United States Patent Application Publication US 2026/0191920 A1 - sequence listing, part 5

SEQ ID NO: 15617 - protein, 209 aa, unidentified
  source 1..209: note = Sunxiuqinia dokdonensis
  REGION 1..209: note = tr|A0A0L8V3H5|A0A0L8V3H5_9BACT GTP cyclohydrolase 1; OS = Sunxiuqinia dokdonensis OX=1409788 GN=folE PE=3 SV=1
MDMEDSFNGKKSGYRRIEKFDRLHTEKISEHYREIIDLLGEDVTREGLQKTPLRVAKAMQFLLQGYEQDPEAMLRSAMFKEDYRQMVIVKDIEIYSMCEHHMLPFIGKAHVGYIPDGYITGLSKIARVVDAFSRRLQVQERLTLQIKECIQNTLNPLGVAVVIEAQHLCMQMRGIQKQHSITTTSDFTGAFQRVATREEFIKLISSKLS

SEQ ID NO: 15618 - protein, 198 aa, unidentified
  source 1..198: note = Sunxiuqinia dokdonensis
  REGION 1..198: note = tr|A0A0L8VDE2|A0A0L8VDE2_9BACT GTP cyclohydrolase 1; OS = Sunxiuqinia dokdonensis OX=1409788 GN=folE PE=3 SV=1
MREDAFVRSDEEKMEIIQAKFREIMETLGLDLRDDSLNGTPRRVAKMFVQEIFSGLNPKNRPQISVFENKFQYGEMLVEKNINLNSTCEHHFLPIVGKAHVAYVSSGEVIGLSKINRIVDYFSRRPQVQERLTVQIASELKRILKTEDVAIVIDAKHMCVSSRGIEDESSSTITAEYGGIFKQQARKEEFLKYIALGK

SEQ ID NO: 15619 - protein, 244 aa, Sunxiuqinia elliptica
  REGION 1..244: note = tr|A0A1I2KRQ9|A0A1I2KRQ9_9BACT GTP cyclohydrolase 1; OS = Sunxiuqinia elliptica OX=655355 GN=folE PE=3 SV=1
MKVNGFVKTNRPTTAKNSRVNGHLVQNRVDNDLIGDNHIATSIDTPMRSDAFKLTDNEKMEIIEDKFREIMDTLGLDLNDDSLSGTPHRVAKMFVQEIFNGLNPANKPKISVFENKFKYGEMLVEKNINLNSTCEHHFLPIVGKAHVAYVSSGQVIGLSKINRIVDYYARRPQVQERLTVQVANELKKILKTEDVAVVIDAKHMCVSSRGIEDESSSTVTAEYGGIFKDKERKEEFLKYVTLGS

SEQ ID NO: 15620 - protein, 207 aa, Sunxiuqinia elliptica
  REGION 1..207: note = tr|A0A4R6GPS3|A0A4R6GPS3_9BACT GTP cyclohydrolase 1; OS = Sunxiuqinia elliptica OX=655355 GN=folE PE=3 SV=1
MEESLNGELGGYQRIEKFDRENTERISDYYRKIIDLLGEDVNREGLEKTPLRVAKAMQFLLQGYEQNPEEMLRSAMFKEDYRQMVIVKDIEIYSMCEHHMLPFIGKAHIGYIPDGYITGLSKIARVVDAFSRRLQVQERLTLQIKECIQNTLNPLGVAVVIEAQHLCMQMRGVQKQHSITTTSDFTGAFERVATREEFIKLISSKLS

SEQ ID NO: 15621 - protein, 222 aa, unidentified
  source 1..222: note = Superficieibacter electus
  REGION 1..222: note = tr|A0A2P5GWA4|A0A2P5GWA4_9ENTR GTP cyclohydrolase 1; OS = Superficieibacter electus OX=2022662 GN=folE PE=3 SV=1
MSLLSKEAALVHEALVARGLETPLRPPVRDMDNETRKRLISGHMTEIMQLLNLDLSDDSLMETPHRIAKMYVDEIFSGLDYANFPKITVIENKMKVDEMVTVRDITLTSTCEHHFVTIDGQATVAYIPKESVIGLSKINRIVQFFAQRPQVQERLTQQILTALQTLLGTNNVAVSIDAVHYCVKARGIRDATSATTTTSLGGLFKSSQNTRQEFLRAVRHRS

SEQ ID NO: 15622 - protein, 262 aa, unidentified
  source 1..262: note = Sutterella megalosphaeroides
  REGION 1..262: note = tr|A0A2Z6I7D0|A0A2Z6I7D0_9BURK GTP cyclohydrolase FolE2 OS=Sutterella megalosphaeroides OX=2494234 GN=folE2; PE = 3 SV=1
MDAKTNLPDVQSAHDGRNIAIDRVGVRGVTLPIVIEGRDGPQHTVASIAMTVSLPADQKGTHMSRFIALMSECTEPLNVNVIRRLMGQMLENLHAVDGTIEIRFPFFVKKTAPVSKLESIMNYEGAWIADSDEGAITVRQETLTPVTSLCPCSKEISKYGAHNQRSHLTSSLILKSDMTLEEQVAISESVASCQLWARLKRADEKYVTEYAYEHPKFVEDLVRDMAKALNDDDRVAAYRIEAENFESIHNHSAYATITHDKR

SEQ ID NO: 15623 - protein, 265 aa, Sutterella parvirubra
  REGION 1..265: note = tr|H3KE55|H3KE55_9BURK GTP cyclohydrolase FolE2; OS = Sutterella parvirubra YIT 11816 OX=762967 GN=folE2 PE=3; SV = 1
MDNEMKTMLPDVQSSHDGRNIPINRVGVRGVKTPLVVAGRDGEQHTVAELAMTVALPADQKGTHMSRFIAMLEEHGEPFSAETMRHLMLDMLDRLNAVDGTIEVRFPYFIRKTAPVSKLQSTMNYEAAWIADATNGVVTVRQIMVTPVTSLCPCSKEISRYGAHNQRSHVTTSLLLGAPMTLEEQAAIAEEAGSCQLWARLKRADEKYVTEYAYDHPKFVEDLVRDMAKALDDDERVQAYRVEAENFESIHNHSAYAWIEHDKRG

SEQ ID NO: 15624 - protein, 265 aa, Sutterella sp.
  REGION 1..265: note = tr|A0A5B7ZJ99|A0A5B7ZJ99_9BURK GTP cyclohydrolase FolE2 OS=Sutterella sp. KGMB03119 OX=2584944 GN=folE2 PE=3; SV = 1
MEAENKTTLPDVQSSEDERNIAINRVGVRGIRLPVIVAGREAPQHTVADITMTVSLPADKKGTHMSRFIALMEELSEPLDADLMRRLFAEMLERLHAEDGTIEIRFPFFVRKIAPVSKLESIMNYQCALIASSVKGEVTVRQEALAPVTSLCPCSKEISRYGAHNQRSHLTSSLILSAPMSFEEQVAIAENSASCQLWSRLKRSDEKYVTEYAYDHPKFVEDLVRDMAKALNADDRVVAYRVEAENFESIHNHSAYAWIERDKRL

SEQ ID NO: 15625 - protein, 265 aa, Sutterella sp.
  REGION 1..265: note = tr|A0A415CIR9|A0A415CIR9_9BURK GTP cyclohydrolase FolE2 OS=Sutterella sp. AM11-39 OX=2292075 GN=folE2 PE=3; SV = 1
MDKTSNVLPDVQNLMDGRNIPIDRVGIRGLTVPLQVQSIKGAQPTVAKVCMCVGLPADKRGTHMSRFVSLIADNHEPLSSDMMRETLEKMLTLLEAEEGYIEISCPFFVTKTSPMSKLKSLMNYDVRFLAERVGGKTRVIQEVTVPVTSLCPCSREISDYGAHNQRSHIVVALELSEPISLEEQIRFAETSASCELWSRLKRNDEKFVTEFAYDHPKFVEDIIRDVCKQLNADDRVLWYRAEAENFESIHNHSAYATISRDKRLA

SEQ ID NO: 15626 - protein, 264 aa, Sutterella wadsworthensis
  REGION 1..264: note = tr|K1JJP4|K1JJP4_9BURK GTP cyclohydrolase FolE2; OS = Sutterella wadsworthensis 2_1_59BFAA OX=742823 GN=folE2; PE = 3 SV=1
MDADNKNTLPDVQSARDGRNIAIDRVGVRGITVPITVETKEDTLATVATVEMTVSLPADKKGTHMSRFVALMEEHSEPLNVDVVRSLMADMLKRLDAVDGTIELRFPFFIRKCAPVSKLTSLMNYEAAWIADSRGGVITVRQETATPVTSLCPCSKEISRYGAHNQRSRLTASVELSAPMSLEEQIAYSEEAASCQLWARLKRSDEKYVTEYAYDHPKFVEDIVRDMAAALNKEERVVAYRVEAENFESIHNHSAYAYITHDKR

SEQ ID NO: 15627 - protein, 268 aa, Sutterella wadsworthensis
  REGION 1..268: note = tr|R5PT41|R5PT41_9BURK GTP cyclohydrolase FolE2; OS = Sutterella wadsworthensis CAG:135 OX=1263111 GN=folE2; PE = 3 SV=1
MEAPQTNSLPDIQSSGDPRNIRINRVGVRGVELPVTVADEADVQHTVARLTMSVALPPDHRGTHMSRFIGILEAQTEPYTIEVVQSTIRAMLAELQAQEGTFEIRFPFFLRKAAPISRLESVMNYECAWTATISPAAFELRQETITPVTSLCPCSKEISRYGAHNQRSRLTSSIVLASPMSLREQIALSEAAGSAPLWARLKRADEKFVTEYAYDNPKFVEDIVRDMAESLNKDSRVTAYRVESENFESIHNHSAYAWIEHDKRTKTN

SEQ ID NO: 15628 - protein, 268 aa, unidentified; identical to SEQ ID NO: 12376
  source 1..268: note = Sutterellaceae bacterium
  REGION 1..268: note = tr|A0A3D3SH53|A0A3D3SH53_9BURK GTP cyclohydrolase FolE2 OS=Sutterellaceae bacterium OX=2026794 GN=folE2 PE=3; SV = 1

SEQ ID NO: 15629 - protein, 268 aa, unidentified
  source 1..268: note = Sutterellaceae bacterium
  REGION 1..268: note = tr|A0A350CYK5|A0A350CYK5_9BURK GTP cyclohydrolase FolE2 OS=Sutterellaceae bacterium OX=2026794 GN=folE2 PE=3; SV = 1
MTDNKLMVLPDVQSSADRRNIPIRRVGVKGIRTPILVKSQSGAQHTVADVEMYVSLPADKKGTHMSRFWTLLGGINKPFAPQMMVEVMQEMLASLKSDGGYIRLAFPFFMEKSAPVSHLQSTMDYDVVLTAECVNGKITVTQEVTAPVTSLCPCSKEISKYGAHNQRSHVSIIAEVETNFPIEKQIEMIESCASCQVWGLLKRSDEKYVTEHAYENPKFVEDLVRDVAIRCQDEPAILAFTVEAENFESIHNHSAFASLHFDKRQTAE

SEQ ID NO: 15630 - protein, 263 aa, Suttonella indologenes
  REGION 1..263: note = tr|A0A380MV87|A0A380MV87_9GAMM GTP cyclohydrolase FolE2 OS=Suttonella indologenes OX=13276 GN=folE2 PE=3 SV=1
MTEMIPDVQGSADRRQLPITRVGIRDIRMPIIFSNAESKQQHSVATAEMTVLLPHDKKGTHMSRFIQILNETSQYSVADFLQLHGQMLQRLMADEGTFALTFPYFVEKSAPVSGSKSMMDYEVSLLADGNVGNSELYVEVTVPVTSLCPCSKEISDYGAHNQRSHIIITALYDPERPFSIEELIGMGEKGGSCPIWATLKRPDEKWVTEHAYENPKFVEDIVRDVALMLNEDDRIQSYSVSSENFESIHNHSAYAIIEHDKRL

SEQ ID NO: 15631 - protein, 265 aa, Suttonella ornithocola
  REGION 1..265: note = tr|A0A380MS64|A0A380MS64_9GAMM GTP cyclohydrolase FolE2 OS=Suttonella ornithocola OX=279832 GN=folE2 PE=3; SV = 1
MVDINSIPDIQGTPDKRELSINRVGIRDIRIPFAIKNHEGNITHTVAEVEMTVSLPHDKKGTHMSRFIHLLNETACYQLSALDDLHAEMLKRLNALEGTIILDFPYFVEKLAPISKTQSLMEYQVSLTIDGSMQEKDIVVEVTVPVTSLCPCSKEISQYGAHNQRSHIIITALYDADNPFFIEELIYMGEKGGSCPIWATLKRPDEKYVTEHAYENPKFVEDIVRDVAIMLNEDDRILAYTVSSENFESIHNHSAYAIIKHDKRL

SEQ ID NO: 15632 - protein, 218 aa, Swaminathania salitolerans
  REGION 1..218: note = tr|A0A511BQC1|A0A511BQC1_9PROT GTP cyclohydrolase 1; OS = Swaminathania salitolerans OX=182838 GN=folE PE=3 SV=1
MTKPAADLVALDAARHKGQGGERPIAPIALPEDAQVRIAAAMREILLALGEDPDREGLFETPDRVARMYLDVLGGLHEDPRVHLHKQFLADQHEGAVIVRDIGFHSMCEHHLLPFFGKAHVAYLPEAGRLTGLSKIARVVNVLARRPQLQERLTDQIAASIIEVLEPKAVMVLVEAEHMCMAMRGIRNVGSRTVTTVVRGVWQRDTAARAEIMALLKG

SEQ ID NO: 15633 - protein, 212 aa, unidentified
  source 1..212: note = Swingsia samuiensis
  REGION 1..212: note = tr|A0A4Y6UJJ1|A0A4Y6UJJ1_9PROT GTP cyclohydrolase 1; OS = Swingsia samuiensis OX=1293412 GN=folE PE=3 SV=1
MTDKKAQNGPSHQEGLRPLEAISKPQDAQGRIASAVREILEAVGEDPDREGLKDTPTRVAKMYLEIFEGLYEDPREHLKKQFSADQHNGAVIVKDIHFYSMCEHHLLPVHGKAHVAYLPGGGRLTGLSKLARLVEGFARRPQLQERMTDQIAQGMMDILSPEAVLVVVEAEHMCMSMRGVRSPGSTTVTSVARGLWQDDYAARMEIMSLLRA

SEQ ID NO: 15634 - protein, 205 aa, unidentified
  source 1..205: note = Swingsia sp.
  REGION 1..205: note = tr|A0A4Y6U8S5|A0A4Y6U8S5_9PROT GTP cyclohydrolase 1; OS = Swingsia sp. F3b2 OX=2558361 GN=folE PE=3 SV=1
MTIANANTGKEGFLNLPDNAEERIAGHVRGILEALGEDPGREGLLETPQRAARMFLDVFSGLYEDPARHLEKQFSSDGHSGLVIVRDIPFRSTCEHHLLPVVGKADVAYLPDGGRLTGLSKLARVVEGYARRPQLQERLTDQVAEAIWRVLHPKAVLVVMRAEHMCMTVRGVKAPGAETVTSRAMGQWADDAAARAEVMALMRAG

SEQ ID NO: 15635 - protein, 176 aa, Symbiobacterium thermophilum
  REGION 1..176: note = tr|A0A1Y2T3U6|A0A1Y2T3U6_SYMTR GTP cyclohydrolase 1; OS = Symbiobacterium thermophilum OX=2734 GN=folE PE=3 SV=1
MILEAVGEDPDREGLLETPRRVADFYEEVFAGLHRDPAERLTAIFNEDHEELVIVRDISFESMCEHHLLPFFGKAHVAYIPRSGRVVGLSKLARVVEDFSRRPQLQERLTAQIADLLMEKLNPLGVLVVVEAEHMCMTMRGVRKPGSSTITSAVRGVFQTSEATRAEAMALIRGVR

SEQ ID NO: 15636 - protein, 187 aa, Symbiobacterium thermophilum
  REGION 1..187: note = tr|Q67QR8|Q67QR8_SYMTH GTP cyclohydrolase 1; OS = Symbiobacterium thermophilum (strain T / IAM 14863); OX = 292459 GN=folE PE=3 SV=1
MDKAKIEQAVRMILEAVGEDPDREGLLETPRRVADFYEEVFAGLHRDPAERLTAIFNEDHEELVIVRDISFESMCEHHLLPFFGKAHVAYIPRSGRVVGLSKLARVVEDFSRRPQLQERLTAQIADLLMEKLNPLGVLVVVEAEHMCMTMRGVRKPGSSTITSAVRGVFQTSEATRAEAMALIRGVR

SEQ ID NO: 15637 - protein, 213 aa, Synechococcus elongatus
  REGION 1..213: note = sp|Q54769|GCH1_SYNE7 GTP cyclohydrolase 1; OS = Synechococcus elongatus (strain PCC 7942) OX=1140; GN = folE PE=3 SV=2
MTSPSLNGSNSLVDAIRPETEAVSQAEMEAAVRTLLLGVGEDPEREGLLKTPKRVAEAYRFLTSGYSQSLDDLVNGAIFDEGHNEMVLVRDITAFSLCEHHMLPFMGKVHVAYIPNQKVVGLSKLARIVEMYSRRLQVQERLTRQIAESVQEILDPQGVAVVMEATHMCMVMRGVQKPGSWTVTSAMVGVFQEDQRTREEFLSLIRHQPAAFA

SEQ ID NO: 15638 - protein, 213 aa, Synechococcus elongatus
  REGION 1..213: note = tr|A0A3G6X0S2|A0A3G6X0S2_SYNEL GTP cyclohydrolase 1; OS = Synechococcus elongatus PCC 11801 OX=2219813 GN=folE; PE = 3 SV=1
MTSPSLNGSNSLIDAVRPDENGTSQAEMEAAVRTLLLGVGEDPEREGLLKTPKRVAEAYRFLTSGYSQSLDDLVNGAIFDEGHNEMVLVRDITAFSLCEHHMLPFMGKVHVAYIPNQKVVGLSKLARIVEMYSRRLQVQERLTRQIAESVQEILDPQGVAVVMEATHMCMVMRGVQKPGSWTVTSAMVGVFQEDQRTREEFLSLIRHQPAAFA

SEQ ID NO: 15639 - protein, 234 aa, Synechococcus lividus
  REGION 1..234: note = tr|A0A2D2PYT8|A0A2D2PYT8_SYNLI GTP cyclohydrolase 1; OS = Synechococcus lividus PCC 6715 OX=1917166 GN=folE PE=3; SV = 1
MTSSSSNRLTMSESIANGKVTTPTVLPDRNTHQGKEAILHPPHAEAAKEEMMAAVRSILLNVGEDPEREGLLKTPKRVAEAMQFLTSGYSQSLDTLVNGAIFDEGHDEMVLVRDINFFSLCEHHMLPFIGKAHVAYIPNQRVIGLSKLARIVEMYARRLQVQERLTRQVAEAIETVLDPKGVAVVMEASHMCMVMRGVQKPGSWTVTSSMLGVFRDDQKTREEFLNLIRHQPNF

SEQ ID NO: 15640 - protein, 229 aa, Synechococcus sp.
  REGION 1..229: note = sp|Q2JR69|GCH1_SYNJA GTP cyclohydrolase 1; OS = Synechococcus sp. (strain JA-3-3Ab) OX=321327 GN=folE; PE = 3 SV=1
MTLAKPGSGAEFRLNNKANLKSRLVRDLSHAAGQEPEGSESLDPAMVAAVETLLRGIGEDPQREGLKKTPERVVAALKFLTSGYRQSLEDLINGAIFDEGHDEMVLLRDITLFSLCEHHLLPFIGKAHVAYIPRQKVVGLSKIARIVEMYSRRLQVQERLTRQIAEALMTMLDPYGVGVVIEATHMCMVMRGVQKPGSWTVTSSMVGVFQEDPRTREEFLSLIRHPSNL

SEQ ID NO: 15641 - protein, 247 aa, Synechococcus sp.
  REGION 1..247: note = tr|G4FIH4|G4FIH4_9SYNE GTP cyclohydrolase I; OS = Synechococcus sp. WH 8016 OX=166318; GN = Syn8016DRAFT_1226 PE=4 SV=1
MTSTIPAISNGTLTSLNAEVQPVSQRIRQRLIDQGVSFLANDNVAAFIQTGELDELEIEVADRVRELLRSLVIDIENDHNTAETAERVARMYLREVFKGRYHHQPKVASFPNVKQLDEIYTVGPITVRSACSHHLVPIMGNCWIGIKPGDRVIGLSKFTRVADWVFSRPHIQEEAVMILADEIERLCAPQGLGIIIKAQHYCMKWRGVREPQTSMVNSVVRGDFRHDPSLKQEFFELVRQQEAMLST

SEQ ID NO: 15642 - protein, 234 aa, Synechocystis sp.
  REGION 1..234: note = sp|Q55759|GCH1_SYNY3 GTP cyclohydrolase 1; OS = Synechocystis sp. (strain PCC 6803 / Kazusa) OX=1111708; GN = folE PE=3 SV=1
MTIASSHSINNGMNTGKLVNQLSSLPDRNTHNGQEVKYHPENVELNKEKMMDAVRVMLESVGEDPEREGLLKTPKRVAEAMQFLTQGYDQSLEKLVNGAIFDEGHNEMVLVRDIDFFSLCEHHMLPFMGKAHLAYIPNQKVVGLSKLARIVEMFSRRLQVQERLTRQIAEAVQEILDPQGVAVVMEATHMCMVMRGVQKPGSWTVTSAMIGSFQNEQKTREEFLNLIRHQPNFY

SEQ ID NO: 15643 - protein, 234 aa, Synechocystis sp.; identical to SEQ ID NO: 15642
  REGION 1..234: note = tr|A0A068MVU6|A0A068MVU6_SYNY4 GTP cyclohydrolase 1; OS = Synechocystis sp. (strain PCC 6714) OX=1147 GN=folE; PE = 3 SV=1

SEQ ID NO: 15644 - protein, 268 aa, unidentified
  source 1..268: note = Synergistaceae bacterium
  REGION 1..268: note = tr|A0A3C0SKA2|A0A3C0SKA2_9BACT GTP cyclohydrolase FolE2 OS=Synergistaceae bacterium OX=2053624 GN=folE2 PE=3; SV = 1
MRDVQSERDIRNIPIDSVGVTGLAYPIEVRDRNDKTQHTVATVEMSVSLPRDYRGTHMSRFIEILNSCNGHVTLPNLEHIVAALRDHLDAEQSEIRFSFPYFAVRKAPVSGAPSLTRYDVVFWASSGKDFDFTLTVIVPVNTLCPCSREISEKGAHNQRAEVTITVRMDRLVWIEELAEVAEESASSPVFTLLKREDEKFVTEKAYDTPRFVEDVVREVAVRLDDDPRVRWYSVRVVSHESIHAHEAFASLSRDKGLWIDKQGGDRHR

SEQ ID NO: 15645 - protein, 268 aa, unidentified
  source 1..268: note = Synergistaceae bacterium
  REGION 1..268: note = tr|A0A353N0T7|A0A353N0T7_9BACT GTP cyclohydrolase FolE2 OS=Synergistaceae bacterium OX=2053624 GN=folE2 PE=3; SV = 1
MRDVQSERDIRNIPIDSVGVTGLAYPIEVRDRNDKTQHTVATVEMSVSLPRDYRGTHMSRFIEILNSCNGHVTLPNLEHIVAALRDHLDAEQSEIRFSFPYFAVRKAPVSGAPSLTRYDVVFWASSGKDFDFTLTVIVPVNTLCPCSREISEKGAHNQRAEVTITVRMDRLVWIEELAEVAEESASSPVFTLLKREDEKFVTEKAYDTPRFVEDVVREVAVRLDDDPRIRWYSVRVVSHESIHAHEAFASLSRDKGLWIDQQGGDRHR

SEQ ID NO: 15646 - protein, 268 aa, unidentified; identical to SEQ ID NO: 15645
  source 1..268: note = Synergistales bacterium
  REGION 1..268: note = tr|A0A101I3U4|A0A101I3U4_9BACT GTP cyclohydrolase FolE2 OS=Synergistales bacterium 58_81 OX=1635274 GN=folE2; PE = 3 SV=1

SEQ ID NO: 15647 - protein, 268 aa, unidentified; identical to SEQ ID NO: 15645
  source 1..268: note = Synergistales bacterium
  REGION 1..268: note = tr|A0A101GQP5|A0A101GQP5_9BACT GTP cyclohydrolase FolE2 OS=Synergistales bacterium 57_84 OX=1641384 GN=folE2; PE = 3 SV=1

SEQ ID NO: 15648 - protein, 259 aa, Synergistes jonesii
  REGION 1..259: note = tr|A0A073ISC5|A0A073ISC5_9BACT GTP cyclohydrolase FolE2 OS=Synergistes jonesii OX=2754 GN=folE2 PE=3 SV=1
MRDVQNETDDRNLEIDRVGVRDISWPIAVPDRDSGTQETIANVSLSVSLPRDYRGTHMSRFVEVLSSQEKRVTFHNMEGLLETLRARLAARDAHALFDFPYFITKSAPVSGAKGRVRCDVRFDASLVDDEFDLVTTVTAPIQTLCPCSKEISDFGAHNQRAHAVMEVRLSGFVWLEEFVKMADDCASAPIYSLLKREDEKFVTERAYMHPKFVEDAVRDLALAMRAEPRVLWYRVSVASHESIHNHDAFAVIVGDKRNG

SEQ ID NO: 15649 - protein, 258 aa, Synergistes sp.
  REGION 1..258: note = tr|G9PZK0|G9PZK0_9BACT GTP cyclohydrolase FolE2; OS = Synergistes sp. 3_1_syn1 OX=457415 GN=folE2 PE=3 SV=1
MRDVQNESDNRNMAIDRVGIRDLSWPISVPDRMNGTQETVAQVSLSVSLPRDYRGTHMSRFIEVLGAQEKSVTFHNMEGLLMTLKERLQARDAHAVFEFPYFIMKEAPVSGAKGRLRCDVRFEAALCGDDFDLVTTVTSPVQTLCPCSKEISEFGAHNQRAHAVMEVRLSGFVWLEEFVRMADDCASAPIYSLLKREDEKYVTERAYSNPRFVEDSVRELALAMQADERVLWYRVSVTSHESIHNHDAFAVIERDKRI

SEQ ID NO: 15650 - protein, 332 aa, unidentified
  source 1..332: note = Synergistetes bacterium
  REGION 1..332: note = tr|A0A1V5JW72|A0A1V5JW72_9BACT GTP cyclohydrolase FolE2 OS=Synergistetes bacterium ADurb.Bin520 OX=1852915; GN = folE2 PE=3 SV=1
MGRSGIRPAPRALPFALEGDVQQGHPEVPLGLSRVGISNLRRIVRLGTEDRVALFYATMDLFAHLRGDRAGVHMSRFSEILEEMGEEISLPPTPDLESLAERIALQIARRQEAASSEVHIRAQFLVRQETPLSSRRSDELYTFLGYAASDGVTVRRAAGVEVDGLTACPCAQDMVRGAALARLREAGYAPEEAERIVSLVPLATHNQRGRGTLILGCDPKIPAEHLVAVVEAAMSSETYELLKRPDEFFVVEKAHRRPRFVEDVVREMLRHVVEAFPDLPDDTFVLARQENLESIHQHNAFAEASALLGSLRRELAGGPPASGPSLEGWLRG

SEQ ID NO: 15651 - protein, 257 aa, unidentified
  source 1..257: note = Synergistetes bacterium
  REGION 1..257: note = tr|A0A2N1QTL2|A0A2N1QTL2_9BACT GTP cyclohydrolase FolE2 OS=Synergistetes bacterium HGW-Synergistetes-1; OX = 2013842 GN=folE2 PE=3 SV=1
MRDVQSEHDKRNIAIDKVGIRGLSWPIQVLDRSNGIQDTVANVSLSVFLPRDYRGTHMSRFIEVLGEQENQVTFHNMENLLKMLQKRLDADEAHADFEFPYFITKKAPVSGAPGRMRYDVRFFAELKGSKFDLITELTAPIQTLCPCSKEISDRGAHNQRAHAKISVRMKTFVWIEELAEAADLCASAPVYSILKREDEKAVTEKAYANPRFVEDSVRELSIAMEKDHRITWYSVSVTSHESIHNHDAFASVERSKN

SEQ ID NO: 15652 - protein, 255 aa, unidentified
  source 1..255: note = Syntrophaceae bacterium
  REGION 1..255: note = tr|A0A1J5IBR2|A0A1J5IBR2_9DELT GTP cyclohydrolase FolE2 OS=Syntrophaceae bacterium CG2_30_58_14 OX=1805378; GN = folE2 PE=3 SV=1
MIDIQNLKDERNIDIKKVGVKGLKYPIVVLDRAHETQQVNATINMYVSLLHHFKGTHMSRFVEVLNEIREQVNIRTFHSILEKIRTRLRAESAHIEIEFPYFIEKTAPRSKAKSLMEYRCQFMGTCNDGGMDFMVGMVVPVTTVCPCSKEISRSGAHNQRSIVTVRVRFRKFFWIEDVIKLIEKSASGEVYSLLKRIDEKFVTEKGYENPMFVEDVVRNVAVRLSQDPNFTWYSVEAENFESIHNHSAYACVEKE

SEQ ID NO: 15653 - protein, 257 aa, unidentified
  source 1..257: note = Syntrophaceae bacterium
  REGION 1..257: note = tr|A0A1V4X8J4|A0A1V4X8J4_9DELT GTP cyclohydrolase FolE2 OS=Syntrophaceae bacterium PtaB.Bin038 OX=1811716; GN = folE2 PE=3 SV=1
MIDVQSRRDRRKIDIQKVGVKGIQYPVIVLDRANGIQHVNATVDMFVDLPHQFKGTHMSRFIEILNEVRGQINLRSFEKILLQMREKLNAKSAHMEIEFPYFIEKRAPVSGAKSLMGYRCRFTGEHDGEKTDFLVGVSVPVTTVCPCSKEMSSLGAHNQRSIVTVRVRFRKFFWIEDVISLVEGSASGEVYSLLKRVDEKHVTEAAHANPMFVEDVVRSVAVKLNRDPNFTWYRVEAENIESIHNHSAYACVEKEPS

SEQ ID NO: 15654 - protein, 185 aa, Syntrophaceticus schinkii
  REGION 1..185: note = tr|A0A0B7MP98|A0A0B7MP98_9FIRM GTP cyclohydrolase 1; OS = Syntrophaceticus schinkii OX=499207 GN=folEA PE=3 SV=1
MDREKILQGVRLLIEGIGEDPEREGLQGTPDRVARMCEEIFCGLHSDPKEELNVCFTENHSEMILVKDIPIYSVCEHHLLPFYGKAHVAYIPRQGKLTGLSKLARVVETLSKRPQLQERLTSQVADTIMDALNPLGVIVVIEAEHMCMTMRGIKKAGAKTMTSAVRGVFKTSEATRAEAFALIKE

SEQ ID NO: 15655 - protein, 257 aa, Syntrophobacter fumaroxidans
  REGION 1..257: note = sp|A0LQR3|GCH4_SYNFM GTP cyclohydrolase FolE2; OS = Syntrophobacter fumaroxidans (strain DSM 10017 / MPOB); OX = 335543 GN=folE2 PE=3 SV=1
MIDVQSRFDSRNIRVDKVGVKDIRYPITVMDKTNGIQHTVASVNMYVNLPREFKGTHMSRFIEILNEFHGNLDIREFPSILQSVQEHLSAESAHLELSFSYFIKKLSPVTGCAGLMEYGCRVAGSLDSNRGHDLVLEVNVPISTVCPCSKEISSYGAHNQRGMVRLAVRFKKFVWIEDLVRLVECAASSEVYSVLKRPDEKFVTESAFDNPKFVEDVVRDIAKELKADQNISWFLVDVENFESIHNHSAYACIERSK

SEQ ID NO: 15656 - protein, 257 aa, Syntrophobacter sp.
  REGION 1..257: note = tr|A0A2P9GUX9|A0A2P9GUX9_9DELT GTP cyclohydrolase FolE2 OS=Syntrophobacter sp. SbD2 OX=2043168 GN=folE PE=3; SV = 1
MIDVQNQADHRNISIDKVGVKDIRYPVTVMDRNNGVQHTVASINMYVNVPREFKGTHMSRFIEILNEFHGHLDIREFSSVLEALQEHLQSESAHMEINFPYFIRKLSPVTESAGLMEYRCRIAGTLDREKGYDLVVEVNVPITTVCPCSKEISDHGAHNQRGTVRIAVRFQRFIWIEDLIDLVERAASCDVYSVLKRPDEKYVTEYAFENPKFVEDVVRDIACELEHDPNVCWFLVDVENFESIHNHSAYAFIERQK

SEQ ID NO: 15657 - protein, 271 aa, Syntrophobacter sp.
  REGION 1..271: note = tr|A0A2U3LI71|A0A2U3LI71_9DELT Putative GTP cyclohydrolase 1 type 2 OS=Syntrophobacter sp. SbD1; OX = 2043167 GN=SBDP1_950010 PE=4 SV=1
MVRIKDILQWIDSWAPFRYAELWDNCGLQVGNPQSAVTRALVALDPASCVIEEAEQCGCQCVVTHHPLLLSPIKFVRTDSWPGSIIGRALLSGISIIAAHTNLDAARLGTNAQLKELLGLSVTGPLDASALFCGQEQYMGMGLVGLLPRETGIESLAATLSGALGGTAVRVTGDLRKKISRVAVCTGSGASLMEKALAAGAEVFITGDFKYHDARFAEENGLGVIDIGHFASEKLVLEPFADFLRSKAKSEAAELEVFVSKSQADPFKLVV

SEQ ID NO: 15658 - protein, 259 aa, unidentified
  source 1..259: note = Syntrophobacteraceae bacterium
  REGION 1..259: note = tr|A0A2M6YL84|A0A2M6YL84_9DELT GTP cyclohydrolase FolE2 OS=Syntrophobacteraceae bacterium CG07_land_8_20_14_0_80_61_8 OX=1974095 GN=folE2 PE=3 SV=1
MIDVQSQLDDRNVNIDKVGVKNVRYPITVMDRENQLQHTVASINMYVNLPRQFKGTHMSRFIEILNEFHGHLDIREFSRVVEAMKERLQAQSAHLEIEFPYFIKKQSPVTRTAGLMEYHCRVMGSLDQAGKHDLVVEVNVPITTVCPCSREISRHGAHNQRGLAHLAVRFKRFIWIEDLVRMVERAASCEVYSLLKRPDEKFVTEKGYDNPKFVEDVVRDIAVQLKTDPNVLWFRADVENYESIHNHSAYAYIERRKAV

SEQ ID NO: 15659 - protein, 259 aa, unidentified
  source 1..259: note = Syntrophobacteraceae bacterium
  REGION 1..259: note = tr|A0A1J5IQI1|A0A1J5IQI1_9DELT GTP cyclohydrolase FolE2 OS=Syntrophobacteraceae bacterium CG2_30_61_12; OX = 1805379 GN=folE2 PE=3 SV=1
MIDVQSQLDDRNVNIDKVGVKNVRYPITVMDRENQLQHTVASINMYVNLPRQFKGTHMSRFIEILNEFHGHLDIREFSRVVEAMKERLHAQSAHLEIEFPYFIKKQSPVTRTAGLMEYHCRVMGSLDQAGKHDLVVEVNVPITTVCPCSREISRHGAHNQRGLAHLAVRFKRFIWIEDLVRMVERAASCEVYSLLKRPDEKFVTEKGYDNPKFVEDVVRDIAVQLKTDPNVLWFRADVENYESIHNHSAYAYIERRKAV

SEQ ID NO: 15660 - protein, 255 aa, unidentified; identical to SEQ ID NO: 15652
  source 1..255: note = Syntrophobacterales bacterium
  REGION 1..255: note = tr|A0A2M7BDS4|A0A2M7BDS4_9DELT GTP cyclohydrolase FolE2 OS=Syntrophobacterales bacterium CG03_land_8_20_14_0_80_58_14 OX=1974100 GN=folE2 PE=3 SV=1

SEQ ID NO: 15661 - protein, 251 aa, unidentified
  source 1..251: note = Syntrophobacterales bacterium
  REGION 1..251: note = tr|A0A1G3UQ04|A0A1G3UQ04_9DELT GTP cyclohydrolase I (Fragment) OS=Syntrophobacterales bacterium GWC2_56_13; OX = 1802287 GN=A2X96_00835 PE=3 SV=1
MIDIQNLKDERNINIKKVGVKGLKYPIVVLDRAHGTQPVNATINMYVSLLHNFKGTHMSRFVEVLNDIREQVNIRTFHSILEKIRTKLHAESAHIEIEFPYFIEKTAPRSGAKSLMEYRCRFLGTNDGGRMDFVVGMAVPVTTVCPCSREISRVGAHNQRSIVTVKVRFRKFFWIEDVIRLIEDSASGEVYSLLKRIDEKYVTEKGYKNPMFVEDVVRNVAERISRDANFTWYRVEAENFESIHNHSAYAC

SEQ ID NO: 15662 - protein, 188 aa, Syntrophobotulus glycolicus
  REGION 1..188: note = tr|F0T214|F0T214_SYNGF GTP cyclohydrolase 1; OS = Syntrophobotulus glycolicus (strain DSM 8271 / FlGlyR); OX = 645991 GN=folE PE=3 SV=1
MEINTQKLEQAVSMLLEAIGEDPEREGLIDTPKRVAKFYAEAFAGLHDDPSKHLQVIFDENHEEMVIVKDIPMYSMCEHHLLPFFGKAHVAYIPRNGKVTGLSKLARVIDGYARRPQLQERLTTQIADTIKNSLEARGVLVVIEAEHMCMTLRGIKKPGSKTVTSAVRGIFQTSSATRAEAFSLIMGK

SEQ ID NO: 15663 - protein, 191 aa, Syntrophomonas sp.
  REGION 1..191: note = tr|A0A3B8HY24|A0A3B8HY24_9FIRM GTP cyclohydrolase 1; OS = Syntrophomonas sp. OX=2053627 GN=folE PE=3 SV=1
MTNREINKPQIVQAVRMILEAIGENPEREGLLNTPQRVAKMYEEIFSGMGTEPKEFLEVCFSEYHDELVLVKDIPIYSMCEHHLLPFYGKAHVAYIPKGGKVVGISKLVRVAEAYAHRPQLQERLTSQIADCIYDALSPYAVGVVIEAEHMCMTMRGVRKPGSITVTSAVRGLFETRSEVRAELFALINSK

SEQ ID NO: 15664 - protein, 190 aa, Syntrophomonas sp.
  REGION 1..190: note = tr|A0A356Z9Y4|A0A356Z9Y4_9FIRM GTP cyclohydrolase 1; OS = Syntrophomonas sp. OX=2053627 GN=folE PE=3 SV=1
MPGQNIDTDKIKQAVTMMLEAIGENPEREGLVDTPARVARMYQEIFEGLRETPQDFLKVSFTEYHDELVLVKDIPLYSMCEHHLLPFYGKAHVAYIPRGGKVVGISKLARVTESFAHRPQLQERLTSQIADCINETLHPYGVAVVIQAEHMCMTMRGVRKPGALTVTSAVRGIFETSQASRAEVFSLING

SEQ ID NO: 15665 - protein, 192 aa, Syntrophomonas wolfei
  REGION 1..192: note = tr|Q0AX39|Q0AX39_SYNWW GTP cyclohydrolase 1; OS = Syntrophomonas wolfei subsp. wolfei (strain DSM 2245B / Goettingen) OX=335541 GN=folE PE=3 SV=1
MQKKVIDEAKIEEAVHMILEAIGEDPEREGLQNTPKRVARMYREIFAGMNSNPREFLQVSFTEFHDELVLVKDIPLYSMCEHHLLPFYGKAHVAYIPRGGKVVGISKLTRVAEAYAMRPQLQERLTSQIADCINDSLKPFGVAVVIEAEHMCMTMRGVRKPGALTVTSAVRGIFETRPETRAEVFSLINQKI

SEQ ID NO: 15666 - protein, 88 aa, Syntrophomonas wolfei
  REGION 1..88: note = tr|A0A354YWG1|A0A354YWG1_9FIRM GTP cyclohydrolase 1 (Fragment) OS=Syntrophomonas wolfei OX=863 GN=DDZ44_01430; PE = 3 SV=1
MDEAKIEEAVHMILEAIGEDPEREGLQNTPKRVARMYSEIFAGMNSNPREFLKVSFTEFHDELVLVKDIPLYSMCEHHLLPFYGKAHV

SEQ ID NO: 15667 - protein, 190 aa, Syntrophomonas zehnderi
  REGION 1..190: note = tr|A0A0E3W3M8|A0A0E3W3M8_9FIRM GTP cyclohydrolase 1; OS = Syntrophomonas zehnderi OL-4 OX=690567 GN=folE PE=3 SV=1
MDKQDNNRLKIEAAFKQILEAIGEDPQREGVVNTPARVARMYDELFWGMKVDPRKYLDVSFTEYHDELVLVKDIPIYSMCEHHFLPFYGVAHIAYIPKGGKVVGISKLARVAEAYARRPQLQERLTSQIADCIYETLEPMGVGVVIQAEHMCMTMRGIKKPGSLTVTSAVRGIFETRPQTRAELLTLILK

SEQ ID NO: 15668 - protein, 263 aa, unidentified
  source 1..263: note = Syntrophorhabdaceae bacterium
  REGION 1..263: note = tr|A0A1V5C2C5|A0A1V5C2C5_9DELT GTP cyclohydrolase FolE2 OS=Syntrophorhabdaceae bacterium PtaU1.Bin034; OX = 1811715 GN=folE2 PE=3 SV=1
MKDVQNMYDPRNIDIDKVGVKNVKYPIIVLDKANGTQHTIADISMYVSLPRDYKGTHMSRFVEILHQHKNMINMKDFPIILSEMKERLNAESAHMEVRFPYFIRKDAPVSGTQGYLEYNCALIGHMDNSNSMKEFTVSVSVPITTLCPCSKEISDWGAHNQRGIVTVGVRFKRFFWIEDLIATIEDCSSCDIYSVLKRQDEKFVTEKAFQNPKFVEDVVRDVAEKLGNEPNITYFVIEAENFESIHNHSAYAFLERKNEGGNA

SEQ ID NO: 15669 - protein, 269 aa, Syntrophorhabdus sp.
  REGION 1..269: note = tr|A0A1V4WQB5|A0A1V4WQB5_9DELT GTP cyclohydrolase FolE2 OS=Syntrophorhabdus sp. PtaB.Bin047 OX=1811700; GN = folE2 PE=3 SV=1
MNDRQKMADVQNMHDSREIEIDKVGVKNVKYPIIVLDRANGHQNTIATIDMYVNLPHHYKGTHMSRFVEILHEYKNMINMKNFPDILKEMKARLDAEAAHMSVSFPYFIKKEAPVSKTPSYMEYQCGFKGSMGADNTMTEFIVSVSVPINTLCPCSKEISEQGAHNQRGITKVDVHTKRFFWIEDLIDIVEKSASSDIYSILKREDEKFITEHAFDNPKFVEDVVRDISERLSRDTNIRWFAIEAENFESIHNHSAYAYLERDNEGGKI

SEQ ID NO: 15670 - protein, 272 aa, Syntrophorhabdus sp.
  REGION 1..272: note = tr|A0A1V5DA00|A0A1V5DA00_9DELT GTP cyclohydrolase FolE2 OS=Syntrophorhabdus sp. PtaU1.Bin153 OX=1811705; GN = folE2 PE=3 SV=1
MLDVQSFDDDRMIEIDKVGVKNIKYPIVVLDKTEGLQHTIATIDMYVNLPHNYKGTHMSRFVEILHSNKSMINMKNFPNILREMKDRLNAESAHLSVKFPYFIKKEAPISRTEGFLEYCCGFSGSMDGSNRMREFVVSVSVPINTLCPCSKEISEHGAHNQRGITTVSVRFKKFFWIEDLIGLVEQCASSDIYSVLKREDEKFVTERAFENPKFVEDVVRDIAETLSKDTNMTWFMIEAENFESIHNHSAYAYLERNNESGTAIKSGVDKVS

SEQ ID NO: 15671 - protein, 188 aa, Syntrophothermus lipocalidus
  REGION 1..188: note = tr|D7CMP9|D7CMP9_SYNLT GTP cyclohydrolase 1; OS = Syntrophothermus lipocalidus (strain DSM 12680 / TGB-C1) OX=643648 GN=folE PE=3 SV=1
MDIEKIEKAVRMIIEAIGEDKDREGLRDTPRRVARMYAELFSGIEEDPSKHLQVLFTEHHDELVLIKDIPLYSMCEHHLLPFYGKAHVAYIPRKGRITGLSKLVRVVEGFAKRPQLQERLTSQIADSIMERLQPWGVAVVIEAEHMCMTMRGVNKPGSMTVTSAVRGIFETNPASRAEAFALIKGPIR

SEQ ID NO: 15672 - protein, 255 aa, Syntrophus aciditrophicus
  REGION 1..255: note = sp|Q2LUP0|GCH4_SYNAS GTP cyclohydrolase FolE2; OS = Syntrophus aciditrophicus (strain SB) OX=56780 GN=folE2; PE = 3 SV=1
MIDIQNLEDHRKINIQKVGVKGINYPIVVLDKAKGTQHVNASINMYVDLPHHFKGTHMSRFIEVLNEFRGEINIRTFHTILEKVRDKLKAESAHMEITFPYFIEKTAPVSGAKSLMDYICAFSGMNAENKKDFLVGVVVPVTTVCPCSKEISCMGAHNQRSHVTVKVRFKKFFWLEDIIRLVETSASGEVYSLLKRVDEKYVTEQGYANPMFVEDVVRNVAERLNENSNLTWYSVEAENFESIHNHNAYAYVEKE

SEQ ID NO: 15673 - protein, 255 aa, Syntrophus gentianae
  REGION 1..255: note = tr|A0A1H7WPQ5|A0A1H7WPQ5_9DELT GTP cyclohydrolase FolE2 OS=Syntrophus gentianae OX=43775 GN=folE2 PE=3 SV=1
MIDIQSQKDHRKINIQKVGVKGIKYPIIVLDKTAGTQPVNASINMYVNLPHSFKGTHMSRFIEVLNEFRGEINLRTFHTILEKVREKLHAESAHMEIEFPYFIEKTAPVSGAKSLMEYRCLFSGCNAEHQKDFLVGIVVPVTTVCPCSKEISSMGAHNQRSFVTVKVRFRKFFWLEDLIRLVETSASGEVYSLLKRVDEKYVTEQGYSNPMFVEDVVRNIAEQLNSNSNLTWYSVEAENFESIHNHNAYAYVEKE

SEQ ID NO: 15674 - protein, 255 aa, Syntrophus sp.
  REGION 1..255: note = tr|A0A1V5DMD8|A0A1V5DMD8_9DELT GTP cyclohydrolase FolE2 OS=Syntrophus sp. PtaU1.Bin208 OX=1811713 GN=folE2; PE = 3 SV=1
MIDIQSQKDHRKINIQKVGVKGIKYPIIVLDKIAGTQPVNASINMYVNLPHSFKGTHMSRFIEVLNEFRGEINLRTFHTILEKVREKLHAESAHMEIEFPYFIEKTAPVSGAKSLMEYRCLFSGCNAEHQKDFLVGIVVPVTTVCPCSKEISSMGAHNQRSFVTVKVRFRKFFWLEDLIRLVETSASGEVYSLLKRVDEKHVTEQGYSNPMFVEDVVRNVAEQLNSNSNLTWYSVEAENLESIHNHNAYAYVEKE

SEQ ID NO: 15675 - protein, 257 aa, Syntrophus sp.
  REGION 1..257: note = tr|A0A1V4XW87|A0A1V4XW87_9DELT GTP cyclohydrolase FolE2 OS=Syntrophus sp. PtaB.Bin138 OX=1811711 GN=folE2_2; PE = 4 SV=1
MKDEKRFMQDVGMTDLPFPMKVLSRDHKEGQFTIAKISIATRIMHEFEARWIDKFIHIIHQHREQIGTESLKTNILDYMKELNATKVKVDFNYPFFIEKVTPVSKEKCLVRYNCTYSASVAKSDLKPKVSLKISAPCITTYPASSPEKTGGLFGQMSKVELEVQSQKDIFPEDLIEIVDNHALVPIYSFLTEEDQEFVIKKIHSEQKTSVVMVDEIKEELANIRDIEGYSVNCSNFGMLHSYSTFIGTAKSMWIPLS

SEQ ID NO: 15676 - protein, 363 aa, unidentified
  source 1..363: note = Tabrizicola sp.
  REGION 1..363: note = tr|A0A2N4YEL5|A0A2N4YEL5_9RHOB GTP cyclohydrolase FolE2 OS=Tabrizicola sp. TH137 OX=2067452 GN=folE2 PE=3; SV = 1
MNIHTPELDRQPSREEAEAALAVLRRWAGKASDAEIATLDSSVAYLIPGEGYPALSRAYPSDFVVDSVYKDSLPDLQNGPASLIRGEKALIQHVGISNFRLPIRYRTRDNGEIMLETSVTGTVSLEAEKKGINMSRIMRSFYAHAERDFSFAVIEHALEDYKRDLESFDARIQMRFSFPVKVGSLRSGLSGWQYYDIALELVDVAGVRKKIMHLDFVYSSTCPCSLELSEHARRTRGQLATPHSQRSVARISVEVKPGKRLWFEDLIDLAREAVPTETQVMVKREDEQAFAELNAANPIFVEDAARSFCQALKGDGRIGDFRIVASHQESLHSHDAVSVLTEGPTFAAESLDPRLFQTLYHVG

SEQ ID NO: 15677 - protein, 322 aa, unidentified
  source 1..322: note = Tahibacter aquaticus
  REGION 1..322: note = tr|A0A4R6YRT0|A0A4R6YRT0_9GAMM GTP cyclohydrolase FolE2 OS=Tahibacter aquaticus OX=520092 GN=folE2 PE=3 SV=1
MRPTENAVRSLPDVAKEMQPHVAGTLDWVGMGEIEVPVSINNPDGRTVQSGARVTAYVNLTDPDARGIHMSRLYLHVDKSLSNEPLTPCSLRRLLKDFLDSHTGLSDRALVRIRFDHLLRRPALVSDNSGWKSYPIVLTALMDRGQFSLEIGYEVVYSSTCPCSAALARQLIQERFGQDFARGRPLDYDQIVAWLGSEQGICATPHSQRSSAEVRVKLLQGFELPLIELIDCVEQALKTPVQTAVKRVDEQAFARLNGENLMFCEDAARRVQQALDADERIVDFWVRASHFESLHPHNAVAVATKGVAGGYAGGMDAFAALR

SEQ ID NO: 15678 - protein, 200 aa, unidentified
  source 1..200: note = Tahibacter aquaticus
  REGION 1..200: note = tr|A0A4R6Z6H0|A0A4R6Z6H0_9GAMM GTP cyclohydrolase 1; OS = Tahibacter aquaticus OX=520092 GN=folE PE=3 SV=1
MSSEPSNNGVDRAEAEAAIRTLLRWAGEDPGREGLLDTPRRVVDAYRDWFSGYAEDPAEYLRRTFEEVAGYDELIVLRDIEFESHCEHHMAPIIGRAHVGYLPTDKVVGISKLARVVEGFARRFQVQEKLTAQIAHCIEDVLKPRGVGVVIEAAHQCMTTRGVHKTGVSMTTSQMLGAFREDARTRSEFLQFIAMPGPRR

SEQ ID NO: 15679 - protein, 198 aa, unidentified
  source 1..198: note = Taibaiella chishuiensis
  REGION 1..198: note = tr|A0A2P8D4P1|A0A2P8D4P1_9BACT GTP cyclohydrolase 1; OS = Taibaiella chishuiensis OX=1434707 GN=folE PE=3 SV=1
MAYKKEDHYDEHITNPLTTHYKSVIELLGEDADREGLQKTPERVAKAMQYLTQGYQMNAADILNSAKFKEPYSEMVIVKDIELYSLCEHHMLPFIGKAHIAYIPNGYITGLSKIARVVDCFARRLQVQERLTHQILDAIQEALAPLGVAVVIEAKHMCMMMRGVQKQNSVTTTSAFSGQFEHNETRSEFLRLIAADLV

SEQ ID NO: 15680 - protein, 198 aa, unidentified
  source 1..198: note = Taibaiella soli
  REGION 1..198: note = tr|A0A2W2BWN0|A0A2W2BWN0_9BACT GTP cyclohydrolase 1; OS = Taibaiella soli OX=1649169 GN=folE PE=3 SV=1
MAYKKIEQYDEDITNKLMENYRSSIELLGEDANREGLLKTPERVAKAMQYITAGYNMDAREVLNSAKFHESYSEMVIVKDIELYSLCEHHMLPFFGKAHIAYIPNGWITGLSKIARVVDCFARRLQVQERMTHQILDAIQETLNPQGVAVVIEAKHLCMMMRGVQKQNSVTTTSAFSGQFEKNETRSEFLKLITADLY

SEQ ID NO: 15681 - protein, 198 aa, unidentified
  source 1..198: note = Taibaiella sp.
  REGION 1..198: note = tr|A0A3N6ZMJ8|A0A3N6ZMJ8_9BACT GTP cyclohydrolase 1; OS = Taibaiella sp. KBW10 OX=2153357 GN=folE PE=3 SV=1
MAYKKIESYDEQTTQELSGLYKSVISVLGEDAEREGLQKTPERMAKAMQYLTQGYQLDAHEILNSAKFKEDYNEMVIVKDIELYSMCEHHLLPFIGKAHIAYIPNGYITGLSKLARVVDVFARRLQVQERLTDQILAAIQETLQPQGVAVVIEAKHMCMMMRGVQKQNSSTTTSAFSGQFLQNETRSEFLRLISTELS

SEQ ID NO: 15682 - protein, 220 aa, unidentified
  source 1..220: note = Tamaricihabitans halophyticus
  REGION 1..220: note = tr|A0A4R2R1Z9|A0A4R2R1Z9_9PSEU GTP cyclohydrolase 1; OS = Tamaricihabitans halophyticus OX=1262583 GN=folE PE=3; SV = 1
MTRSENVGGNGVPDGRAGIEVVPEESESGRREFDQERVERAIRELLIGVGEDPDRAGLRETPARVARAYRETFGGLHVDPDEVLDRTFAEGHEELVLVTDIPLYSTCEHHLVPFHGVAHVGYIPNAQGRVTGLSKLARLVDLYAKRPQVQERMTSQIADALMRKLRPRGVIVVVEAEHLCMSMRGIRKPGTRTTTSAVRGLLQTSSASRAEALELIRGRG

SEQ ID NO: 15683 - protein, 189 aa, unidentified
  source 1..189: note = Tamilnaduibacter salinus
  REGION 1..189: note = tr|A0A2U1CYN4|A0A2U1CYN4_9ALTE GTP cyclohydrolase 1; OS = Tamilnaduibacter salinus OX=1484056 GN=folE PE=3 SV=1
MKDSTDEIASHYDSIITQLGEDTDREGLRETPRRAARAMQFLTQGYHQSLEELVNGAVFQSDMDEMVLVQDIELYSLCEHHMLPFIGKCHIAYIPDGNVLGLSKFARIVDMYARRLQIQESLTRNIAEAVQQVTGAKGVGVVVEAQHMCMMMRGVEKQNSHMTSSVMLGQFRKSQATRTEFLQLISGRK

SEQ ID NO: 15684 - protein, 189 aa, unidentified
  source 1..189: note = Tamilnaduibacter salinus
  REGION 1..189: note = tr|A0A2A2I7G0|A0A2A2I7G0_9ALTE GTP cyclohydrolase 1; OS = Tamilnaduibacter salinus OX=1484056 GN=folE PE=3 SV=1
MKDSTDEIASHYDSIITQLGEDTDREGLRETPRRAARAMQFLTQGYHQSLEELVNGAVFQSDMDEMVLVQDIELYSLCEHHMLPFIGKCHIAYIPDGNVLGLSKFARIVDMYARRLQIQESLTRNIAEAVQQVTGARGVGVVVEAQHMCMMMRGVEKQNSHMTSSVMLGQFRKSQATRTEFLQLISGRK

SEQ ID NO: 15685 - protein, 195 aa, unidentified
  source 1..195: note = Tamlana nanhaiensis
  REGION 1..195: note = tr|A0A0D7W1K8|A0A0D7W1K8_9FLAO GTP cyclohydrolase 1; OS = Tamlana nanhaiensis OX=1382798 GN=folE PE=3 SV=1
MPYNKFEEYNMQVTDDVKERYKNIIDDLGEDTKREGLLKTPERAAKAMQFLTQGYNQDPVEILKGAMFKESYNEMVIVKDIELYSLCEHHILPFFGKAHIAYIPNGQIVGLSKLPRIVDVFARRLQVQERLTEQILDCINDTLKPQGVAVVIEAAHMCMMMRGVQKQNSTTTTSGFRGQFEKIETRNEFLKLIGK

SEQ ID NO: 15686 - protein, 225 aa, unidentified
  source 1..225: note = Tamlana nanhaiensis
  REGION 1..225: note = tr|A0A0D7VX12|A0A0D7VX12_9FLAO GTP cyclohydrolase 1; OS = Tamlana nanhaiensis OX=1382798 GN=folE PE=3 SV=1
MKIDNNIDEHDALGEDHIGTSSNTPLRLDAFKLSNEEKIEIIKDDVRHIMETLGLDLTDDSLSGTPNRVAKMFVKEIFGGLDPKKKPSASTFDNKYKYGEMLVEKNITLYSTCEHHLLPIVGRAHIAYISNGNVVGLSKMNRIVDYFAKRPQVQERLTIQIVKELQEVLNTQDVACVIDAKHLCVNSRGIRDIESSTVTSEFGGKFKDKTVRREFLDYIQLDTKF

SEQ ID NO: 15687 - protein, 221 aa, unidentified
  source 1..221: note = Tamlana sedimentorum
  REGION 1..221: note = tr|A0A0D7WB71|A0A0D7WB71_9FLAO GTP cyclohydrolase 1; OS = Tamlana sedimentorum OX=1435349 GN=folE PE=3 SV=1
MMNKDLIENIGDNHISTNIETPLLPNAFDKSDDEKIENIKHHFAKIMEELGLDLTDDSLSGTPYRFAKMYVKELFYGLNPKNKPKLSVFENKYKYKKMLVEQNITIDSSCEHHFLPITGHAHIAYIPKDKVIGLSKINRLVDYYAHRPQVQERLSLQILKDLQAVLNTKDVIVMISAKHLCVSSRGIKDKDSFTTTIEYDGAFNNELQRNEFFGIVNNSST

SEQ ID NO: 15688 - protein, 195 aa, unidentified
  source 1..195: note = Tamlana sedimentorum
  REGION 1..195: note = tr|A0A0D7WAM4|A0A0D7WAM4_9FLAO GTP cyclohydrolase 1; OS = Tamlana sedimentorum OX=1435349 GN=folE PE=3 SV=1
MPYNKFEEYNMKVTDDVKARYKHIIDDLGEDTKREGLLKTPERAAKAMQFLTQGYEQDPVEILKGAMFKESYNEMVIVKDIELYSLCEHHILPFFGKAHIAYIPNGHIVGLSKLPRIVDVFARRLQVQERLTEQILDCINDTLQPQGVAVVIEAAHMCMMMRGVQKQNSTTTTSGFRGQFEKIETRNEFLKLIGK

SEQ ID NO: 15689 - protein, 225 aa, Tamlana sp.
  REGION 1..225: note = tr|A0A2I7SE97|A0A2I7SE97_9FLAO GTP cyclohydrolase 1; OS = Tamlana sp. UJ94 OX=2069432 GN=folE PE=3 SV=1
MKFDSNLDDFDALGEEHIGTSEDTPMRNDAFKLSNEEKIDIIKDDVRHIMETLGLDLTDDSLKGTPNRVAKMFVKEIFGGLDPSKKPSASTFDNKYKYGEMLVEKNITVYSTCEHHLLPIVGRAHIAYISNGTVVGLSKMNRVVDYFAKRPQVQERLTIQIVRELQRVLGTKDVACVIDAKHLCVNSRGIRDIESSTVTSEFGGKFKDMGTRREFLDYIKLDTTF

SEQ ID NO: 15690 - protein, 225 aa, Tamlana sp.
  REGION 1..225: note = tr|A0A5C4SNC3|A0A5C4SNC3_9FLAO GTP cyclohydrolase 1; OS = Tamlana sp. CW2-9 OX=2583814 GN=folE PE=3 SV=1
MKFDNNLEDFDALGNEHIGTSENTPLRQDAFKLSNEEKIDIIKDDVRHIMETLGLDLSDDSLKGTPNRVAKMFVKEIFGGLDPDKKPSASTFDNKYKYGEMLVEKNITVYSTCEHHLLPIVGRAHIAYISNGTVVGLSKMNRVVDYFAKRPQVQERLTIQIVRELQNVLGTKDVACVIDAKHLCVNSRGIRDIESSTVTSEFGGKFKDMATRREFLDYIKLDTTF

SEQ ID NO: 15691 - protein, 242 aa, unidentified
  source 1..242: note = Tangfeifania diversioriginum
  REGION 1..242: note = tr|A0A1M6C0N0|A0A1M6C0N0_9BACT GTP cyclohydrolase 1; OS = Tangfeifania diversioriginum OX=1168035 GN=folE PE=3; SV = 1
MKNEMILQGVNGNGKAKLNGNGHSKGKLNGYEILGENHVGTSAETPLRPDAFEKSDVEKMTVIEDKFRDIMATMGLDLTDDSLQGTPHRVAKMFVQEIFYGLNPDNKPAISVFDNKFKYNEMLVEKDINLNSFCEHHFLPIVGKAHVGYISSGQVIGLSKINRIVDYFARRPQVQERLTVQIANELKKVLKTEDVAVVIDAKHMCVSCRGIQDESSTTVTAEYGGRFKEKSVREEFLRYSGL

SEQ ID NO: 15692 - protein, 207 aa, unidentified
  source 1..207: note = Tangfeifania diversioriginum
  REGION 1..207: note = tr|A0A1M6PF20|A0A1M6PF20_9BACT GTP cyclohydrolase 1; OS = Tangfeifania diversioriginum OX=1168035 GN=folE PE=3; SV = 1
MSEPKIVDSNGYERIDVFDEAVIDELASNYKNILQIIGEDVNREGLDKTPERVAKSMQFLLQGYKTDPVEILRSAMFKEDYRQMVIVKDIEIYSMCEHHLLPFFGKAHVAYIPNGTITGLSKIARVVDVFSRRLQVQERLTTQIKECIQDTLKPLGVAVVIEAQHLCMQMRGIQKQHSITTTSDFTGAFQKNATRDEFIKLISTKFS

SEQ ID NO: 15693 - protein, 193 aa, Tannerella forsythia
  REGION 1..193: note = tr|G8ULQ7|G8ULQ7_TANFA GTP cyclohydrolase 1; OS = Tannerella forsythia (strain ATCC 43037 / JCM 10827 / FDC 338) OX=203275 GN=folE PE=3 SV=1
MKETEALLEVRRQVSEHYRQIIELLGEDTDREGLKKTPMRVAKAMQFLLKGYDEDPEAVLASAMFKEEDYKQMVIVKDIDFFSLCEHHMLPFFGKVHVAYIPNHYITGLSKIPRIVDIFAHRLQIQERMTLQIKECLQKTLNPLGVMVVIEAQHMCMQMRGVEKQNSLTTTSDFTGSFQQARTREEFMNLIKK

SEQ ID NO: 15694 - protein, 193 aa, Tannerella forsythia; identical to SEQ ID NO: 15693
  REGION 1..193: note = tr|A0A1D3UTT4|A0A1D3UTT4_TANFO GTP cyclohydrolase 1; OS = Tannerella forsythia OX=28112 GN=folE PE=3 SV=1

SEQ ID NO: 15695 - protein, 199 aa, Tannerella sp.
  REGION 1..199: note = tr|R7DGS4|R7DGS4_9BACT GTP cyclohydrolase 1; OS = Tannerella sp. CAG:51 OX=1262979 GN=folE PE=3 SV=1
MQKVQDRLSDQEKEDLIAGHYKSILELLGEDVNREGLEKTPIRVARAMKFLTSGYSQSPEEILRSAIFHENYGDSQRIVLVKDIEFYSLCEHHLLPFFGKVHIGYMPGDKIVGLSKPARLVDAFARRFQVQERMTREILDCFDSVIEPYGTIVMVEARHLCMQMRGVEKQNASTTTCLYSGNFKDRELREEFFSMLRNR

SEQ ID NO: 15696 - protein, 199 aa, Tannerella sp.; identical to SEQ ID NO: 15695
  REGION 1..199: note = tr|A0A396MW45|A0A396MW45_9BACT GTP cyclohydrolase 1; OS = Tannerella sp. AF04-6 OX=2293248 GN=folE PE=3 SV=1

SEQ ID NO: 15697 - protein, 202 aa, Tanticharoenia sakaeratensis
  REGION 1..202: note = tr|A0A0D6MJ87|A0A0D6MJ87_9PROT GTP cyclohydrolase 1; OS = Tanticharoenia sakaeratensis NBRC 103193 OX=1231623; GN = folE PE=3 SV=1
MKTEGLRPLGPIDRPADADVRIARAVRDLLEALGEDVSREGLHDTPQRVARMYLEALGGLHADPREPLRTRFVADHHEGPVIVRDIGFHAMCEHHLLPFFGRAHVAYLPDAGVLTGLSKIARTVEVLARRPQLQERLTDQIAQALVETLAPRAVLVVVEAEHLCMAMRGVRAHGARTITMKARGIWADDLAARAEIMALLKA

SEQ ID NO: 15698 - protein, 240 aa, unidentified
  source 1..240: note = Tardiphaga robiniae
  REGION 1..240: note = tr|A0A163ZQG8|A0A163ZQG8_9BRAD GTP cyclohydrolase 1; OS = Tardiphaga robiniae OX=943830 GN=folE PE=3 SV=1
MDAVIKPLRGKSPDGKSSEIRSADNKVQEFRPAELDPAEFLAAAVNPDQLRPSRAEAEQAVQTLLAYIGENPQREGLMDTPRRVVEAYDELFQGYHQCPAEVLNRTFGETAGYDDFVLIRDMAFVSHCEHHMMPFYGKAHIAYTPVERVVGLSKLARLVDIFGHRLQTQEHLTAQLAAAVDEVLKPRGVAVMVEAEHTCMSARGIRKEGSRTFTTRFTGNFRDNPAEQARFMSMIQSMSR

SEQ ID NO: 15699 - protein, 240 aa, unidentified
  source 1..240: note = Tardiphaga sp.
  REGION 1..240: note = tr|A0A2U0TDL5|A0A2U0TDL5_9BRAD GTP cyclohydrolase 1; OS = Tardiphaga sp. OV697 OX=2135487 GN=folE PE=3 SV=1
MDAVIKPLRGKSPDGKSSEIRSADTKVQEFRPAELDPAEFLAAAVNPDQLRPSRAEAEQAVQTLLAYIGENPQREGLMDTPRRVVEAYDELFQGYHQCPAEVLNRTFGETAGYDDFVLIRDMAFVSHCEHHMMPFYGKAHIAYTPVERVVGLSKLARLVDIFGHRLQTQEHLTAQLAAAVDEVLKPRGVAVMVEAEHTCMSARGIRKEGSRTFTTRFTGNFRDNPAEQARFMSMIQSMSR

SEQ ID NO: 15700 - protein, 235 aa, unidentified
  source 1..235: note = Tardiphaga sp.
  REGION 1..235: note = tr|A0A5A7WGY8|A0A5A7WGY8_9BRAD GTP cyclohydrolase 1; OS = Tardiphaga sp. P9-11 OX=2024614 GN=folE PE=3 SV=1
MDAVIKPLRGKSPDGKPTESKAQEFRPAQLDPAEFLAAAVNPDQPRPSRAEAEHAVQTLLAYIGENPQREGLMDTPRRVVEAYDELFQGYHQCPAEVLNRTFGETAGYDDFVLIRDMAFVSHCEHHMMPFYGKAHIAYTPVERVVGLSKLARLVDIFGHRLQTQEHLTAQLAAAVDEVLKPRGVAVMVEAEHTCMSARGIRKEGSRTFTTRFTGNFRDNPAEQARFMSMIQSMSR

SEQ ID NO: 15701 - protein, 367 aa, Tateyamaria omphalii
  REGION 1..367: note = tr|A0A1P8MST3|A0A1P8MST3_9RHOB GTP cyclohydrolase FolE2 OS=Tateyamaria omphalii OX=299262 GN=folE2 PE=3 SV=1
MNIHTPDITAIPERDEAEAALETLRRWAKSATTTDIIELDPSVARLVPGSDGVDYPAFSRDYPEGFAVDAGYKDTLPDLQNGPSSLIRGAKTRIQHVGISNFRLPLRIETRDGAPLTLETSVTGTVSLEADKKGINMSRIMRSFYKHAEETFSFGVIEAALDDYMSDLESFDARIQMRFSMPVRVDSLRSGLSGYQYYDIALELVEQAGVRKRIVHLDYVYSSTCPCSLELSEHARATRGQLATPHSQRSVARISVALEDDADTLWFEDLIDACRRAVSTETQVMVKREDEQAFAELNAANPIFVEDAARLFSEQLLADVRVGDFRVVASHQESLHSHDAVSVLTEGDTFASDSIDPRMFQTLFHTG

SEQ ID NO: 15702 - protein, 367 aa, Tateyamaria sp.
  REGION 1..367: note = tr|A0A0B4CAV6|A0A0B4CAV6_9RHOB GTP cyclohydrolase FolE2 OS=Tateyamaria sp. ANG-S1 OX=1577905 GN=folE2 PE=3; SV = 1
MNIHTPDITAIPERDEAEAALELLRRWAQNATTTDIIELDPSVARLVPGGDGVDYPSFARDYPDEFRVDADYKDTLPDLQNGPSSLIRGAKTRIQHVGISNFRLPLRIESCDGAPLTLETSVTGTVSLEADKKGINMSRIMRSFYKHAEETFSFGVIEAALDDYKADLDSFDARIQMRFSMPVQVDSLRSGLSGYQYYDIALELVEQTGVRKRIVHLDYVYSSTCPCSLELSEHARAVRGQLATPHSQRSVARISVALEDDAETLWFEDLVDACRRAVPTETQVMVKREDEQAFAELNAANPIFVEDAARLFSEQLLADVRIGDFRVVASHQESLHSHDAVSVLTEGDTFAADSIDPRMFQTLFHTG

SEQ ID NO: 15703 - protein, 181 aa, Tatlockia micdadei
  REGION 1..181: note = tr|A0A098GAU9|A0A098GAU9_TATMI GTP cyclohydrolase 1; OS = Tatlockia micdadei OX=451 GN=folE PE=3 SV=1
MQELYKQILEAIGEDVEREGLRGTPDRAANAFRYLTKGYHENLDEIINDALFDSDMSEMVIVKEIEMYSMCEHHLLPFLGKCHVGYMPNGKVLGLSKVARIVDYFARRLQIQERLTIEIADCISSITNARGVAVVIEAKHLCMMMRGIEKQNSVMTTSVMLGEMRDNSASRSEFLRLISKS

SEQ ID NO: 15704 - protein, 308 aa, Tatumella citrea
  REGION 1..308: note = tr|A0A1Y0LBM7|A0A1Y0LBM7_TATCI GTP cyclohydrolase FolE2 OS=Tatumella citrea OX=53336 GN=folE2 PE=3 SV=1
MTIKTKLSPTDLPDVQSEKGEATESLSRVGMEQIDLPVEISGRPVSAKVNAGINLLSSPDAEKGIHMSRLYLLLDELTQHEITPKLLERVLNKFLKSHHGQSDEANIDVYGDILLSRKSLTSNLYGWKAYPIHLSAELNKGLATTLKVGIPYSSTCPASAALSRQVAASQFRDDFANRTDDVPVDEVVEWLTERGMPATPHSQRSWAWITIVLSPAADSYPIEEVIDYTETALGTAVQTVVKRSDEQAFAVANGKNLMFCEDAVRRLSKAFQTAPFCEDFEIYVEHQESLHPHNAVARIYRKGNKNVT

SEQ ID NO: 15705 - protein, 221 aa, Tatumella citrea
  REGION 1..221: note = tr|A0A1Y0LAD9|A0A1Y0LAD9_TATCI GTP cyclohydrolase 1; OS = Tatumella citrea OX=53336 GN=folE PE=3 SV=1
MSLFSQEAALVHEALVARGLETPLRKPARELDDQARKTLIAGHMTEIMQLLNLDLQDDSLTETPHRIAKMYVDEIFSGLDYANFPKITVIENKMNVDEMVTVRDISLTSTCEHHFVTIDGKATVAYIPKDKVIGLSKINRIVQFFARRPQVQERLTQQVLVALQTLLGTNNVAVCIDAVHYCVKARGVQDATSATTTTSLGGLFKSSQNTRQEFLRSVRHN

SEQ ID NO: 15706 - protein, 221 aa, Tatumella morbirosei
  REGION 1..221: note = tr|A0A095T6R3|A0A095T6R3_9GAMM GTP cyclohydrolase 1; OS = Tatumella morbirosei OX=642227 GN=folE PE=3 SV=1
MSLFSQEAVLVHEALVARGLETPLRKPARELDDQARKTLIAGHMTEIMQLLNLDLQDDSLTETPHRIAKMYVDEIFSGLDYANFPKITVIENKMKVDEMVTVRDISLTSTCEHHFVTIDGKATVAYIPKDKVIGLSKINRIVQFFARRPQVQERLTQQVLVALQTLLGTNNVAVCIDAVHYCVKARGVQDATSATTTTSLGGLFKSSQNTRQEFLRSVRHN

SEQ ID NO: 15707 - protein, 311 aa, Tatumella morbirosei
  REGION 1..311: note = tr|A0A095UCJ1|A0A095UCJ1_9GAMM GTP cyclohydrolase FolE2 OS=Tatumella morbirosei OX=642227 GN=folE2 PE=3 SV=1
MSSAAKQTLCPGMLPDIQASKADGAGESLSWVGMEQIDLPVEIAGRPVSAKVNAGINLLSSPEAEKGIHMSRLYLLLDELTQGEITPGLLHHVLKAFLASHQGRSDEASIEISGELLLSRKSLNSNHLGWKAYPVTLSAELGQSFTATLKVGVPYSSTCPASAALSRQVAGLQFRKDFADRIDRLPAAEIVDWLVGKGMPATPHSQRSWAWLSIRLHPGAQSIPVIDLIDGAEIALGTAVQTVVKRSDEQAFAVANGQNLMFCEDAVRRLDHMLQTAPFCEAYDIRVEHQESLHPHNAVARINWKGIKNVT

SEQ ID NO: 15708 - protein, 221 aa, Tatumella ptyseos
  REGION 1..221: note = tr|A0A085JH92|A0A085JH92_9GAMM GTP cyclohydrolase 1; OS = Tatumella ptyseos ATCC 33301 OX=1005995 GN=folE PE=3; SV = 1
MSLLSQEAALVHEALVARGLETPLRKPARELDNTTRKALIAGHMTEIMQLLNLDLDDDSLTETPHRIAKMYVDEIFSGLDYANFPKITVIENKMKVDEMVTVRDISLTSTCEHHFVTIDGKATVAYIPKDKVIGLSKINRIVQFFAQRPQVQERLTQQVLVALQTLLGTNNVAVCIDAVHYCVKARGVQDATSATTTTSLGGLFKSSQNTRQEFLRAVRHN

SEQ ID NO: 15709 - protein, 116 aa, Tatumella ptyseos
  REGION 1..116: note = tr|A0A2X5NPR0|A0A2X5NPR0_9GAMM GTP cyclohydrolase 1; OS = Tatumella ptyseos OX=82987 GN=folE_2 PE=3 SV=1
MARGLETPLRKPARELDNTTRKALIAGHMTEIMQLLNLDLDDDSLTETPHRIAKMYVDEIFSGLDYANFPKITVIENKMKVDEMVTVRDISLTSTCEHHFVTIDGKATVAYIRKIK

SEQ ID NO: 15710 - protein, 221 aa, Tatumella sp.; identical to SEQ ID NO: 5172
  REGION 1..221: note = tr|A0A2G8BYW1|A0A2G8BYW1_9GAMM GTP cyclohydrolase 1; OS = Tatumella sp. OPLPL6 OX=1928657 GN=folE PE=3 SV=1

SEQ ID NO: 15711 - protein, 226 aa, Taylorella asinigenitalis
  REGION 1..226: note = tr|G4QB93|G4QB93_TAYAM GTP cyclohydrolase I type 1; OS = Taylorella asinigenitalis (strain MCE3) OX=1008459; GN = TASI_0953 PE=4 SV=1
MSQNTKYISDVIRERIQTAGKRFHANDNISEFINEDEIAQLQDEVESKFKAVLESLVIDTESDHNTNETAKRVAKMYVREIFAGRYEPMPAVTEFPNIESVNELIVVGPITIRSACSHHFCPIMGQCWIGVMPHKDSNLIGLSKYARIAHWVMHRPQIQEEAIMQLAAILEQKLNPKGIAVIMKADHYCMKWRGVKDSDSKMTNSVMRGCFLTNSDLRKEFLSLIA

SEQ ID NO: 15712 - protein, 269 aa, Taylorella asinigenitalis
  REGION 1..269: note = tr|I7IKD4|I7IKD4_9BURK GTP cyclohydrolase FolE2; OS = Taylorella asinigenitalis 14/45 OX=1091495 GN=folE2; PE = 3 SV=1
MIVDEQNAIPDVQNWDDERNLVIQKVGIRRIKYPFKLLSQEGSISTIGEWSLAVTLPENKKGTHMSRFVNLLQTHKDHTFTLSEFKTLCSEMTDLLEADRGFIETQFTFFVQKEAPISKVVSLMEYAVKWGVSYEKSKNSYGLSVEILIPVMSLCPCSKEISDYGAHNQRSHITVTLCGDLCEKWESVIAIVEGQSSSPLWGLLKRSDEKFVTEHSYDNPKFVEDLIRDVARALKSMQGNGRFDIQVENFESIHNHSAFAQMSINAGDL

SEQ ID NO: 15713 - protein, 267 aa, Taylorella equigenitalis
  REGION 1..267: note = tr|I7JIW5|I7JIW5_9BURK GTP cyclohydrolase FolE2; OS = Taylorella equigenitalis 14/56 OX=1091497 GN=folE2 PE=3; SV = 1
MLKINNYDIPDVQNRNDLRELVIQKVGIKRIKYPLKVTSNSGDFSTVGEWSLAVELPANKKGTHMSRFVNLLQNHKNYSFTISSFKTLCKQMVGQLEANKGFIETSFIFFVEKEAPVSKVLSLLEYSVTWIVSYQESTDSFSTSVKVLVPVMSLCPCSKEISDYGAHNQRSHITFTIHGEFCEKWESVIDIVEAESSSPLWGLLKRSDEKFVTEHSYDNPKFVEDLIRDVAKALSNLDGIGHFELEVENFESIHNHSAFAYLSSKTT

SEQ ID NO: 15714 - protein, 219 aa, Telmatospirillum siberiense
  REGION 1..219: note = tr|A0A2N3Q0E7|A0A2N3Q0E7_9PROT GTP cyclohydrolase 1; OS = Telmatospirillum siberiense OX=382514 GN=folE PE=3 SV=1
MKDPVVTEQKPVTYEEVASRRQPGKPSRAEAEEAVRTLIRWTGDDPTREGLIDTPSRVVRSYEEFYEGYDIDPEEVLRRTFEETDGYDEMVVLRDIRLESHCEHHMVPIIGKAHVAYLPGNRVVGISKLARVVEIYSRRLQIQEKLTAQIANAIQEVLHPRGVAVVIEAAHQCMTTRGVRKPGVTMVTSRMLGAFRDNPATRREFMALISSPASGLSNV

SEQ ID NO: 15715 - protein, 230 aa, unidentified
  source 1..230: note = Tenacibaculum caenipelagi
  REGION 1..230: note = tr|A0A4R6TES8|A0A4R6TES8_9FLAO GTP cyclohydrolase 1; OS = Tenacibaculum caenipelagi OX=1325435 GN=folE PE=3 SV=1
MFEVNSKKMNNDSQDEIGENHIGTSAKTPLRADAFDISDKEKIEKIQENVKEILETLGMDLNDDSLSGTPKRVAKAFVSELFMGLNPKNKPEPSTFDNTYKYGEMLVEKNIIVYSTCEHHLLPIIGRAHVAYISNGKVIGLSKMNRIVEYYAKRPQVQERLTMQVVQAMQEALGTQDVACVIDAKHLCVNSRGIKDIESSTVTAEFGGAFKNKETKREFLDYIKLNTDFH

SEQ ID NO: 15716 - protein, 230 aa, Tenacibaculum dicentrarchi
  REGION 1..230: note = tr|A0A0U3JZF5|A0A0U3JZF5_9FLAO GTP cyclohydrolase 1; OS = Tenacibaculum dicentrarchi OX=669041 GN=folE PE=3 SV=1
MFEVNSNKMNEDRIDDIGDNHVGTSAKNPLRADAFDLSDQEKIAKIQESVKDILETLGMDLTDDSMQGTPKRVAKSFVNEIFMGLNPANMPKASTFENNYNYGEMLVEKNIVVYSTCEHHLLPIIGRAHVAYISGGRVIGLSKMNRLVEYFSKRPQVQERLTMQIVQAMQEALGTQDVACVIDAKHLCVNSRGIKDIESSTVTAEFGGKFKNKETKREFLDYLKMNTDFN

SEQ ID NO: 15717 - protein, 230 aa, Tenacibaculum dicentrarchi
  REGION 1..230: note = tr|A0A2H1XTV8|A0A2H1XTV8_9FLAO GTP cyclohydrolase 1; OS = Tenacibaculum dicentrarchi OX=669041 GN=folE PE=3 SV=1
MFEVNSNEMNEDRIDDIGDNHVGTSAKNPLRDDAFDLSDQEKIAKIQESVKDILETLGMDLTDDSMQGTPKRVAKSFVNEIFMGLNPANMPKASTFENNYNYGEMLVEKNIVVYSTCEHHLLPIIGRAHVAYISGGRVIGLSKMNRLVEYFSKRPQVQERLTMQIVQAMQEALGTQDVACVIDAKHLCVNSRGIKDIESSTVTAEFGGKFKNKETKREFLDYLKMNTDFN

SEQ ID NO: 15718 - protein, 230 aa, Tenacibaculum discolor
  REGION 1..230: note = tr|A0A497ZDI3|A0A497ZDI3_9FLAO GTP cyclohydrolase 1; OS = Tenacibaculum discolor OX=361581 GN=folE PE=3 SV=1
MFEVNNNKMNDDSIDEIGENHIGTSAKTPLRADAFDISDKEKIEKIQENVKEILETLGMDLTDDSMQGTPKRVAKAFVNELFMGLNPQNKPEASTFDNTYKYGEMLVEKNIIVYSTCEHHLLPIIGRAHVAYISNGKVIGLSKMNRIVEYYAKRPQVQERLTMQVVQAMQEALGTQDVACVIDAKHLCVNSRGIKDIESSTVTAEFGGAFKNKETKREFLDYIKLNTDFQ

SEQ ID NO: 15719 - protein, 230 aa, unidentified
  source 1..230: note = Tenacibaculum finnmarkense
  REGION 1..230: note = tr|A0A2I2LDE7|A0A2I2LDE7_9FLAO GTP cyclohydrolase 1; OS = Tenacibaculum finnmarkense OX=1680763 GN=folE PE=3 SV=1
MFEVNSNKMNEDRIDDIGDNHVGTSAKNPLRADAFDLSDQEKIAKIQESVKDILETLGMDLTDDSMQGTPKRVAKSFVNEIFMGLNPANMPKASTFENNYNYGEMLVEKNIVVYSTCEHHLLPIIGRAHVAYISGGRVIGLSKMNRLVEYFSKRPQVQERLTMQIVQAMQEALGTQDVACVIDAKHLCVNSRGIKDIESSTVTAEFGGKFKNKETKREFLNYLKMNTDFN

SEQ ID NO: 15720 - protein, 230 aa, unidentified; identical to SEQ ID NO: 15716
  source 1..230: note = Tenacibaculum finnmarkense
  REGION 1..230: note = tr|A0A2H1Y789|A0A2H1Y789_9FLAO GTP cyclohydrolase 1; OS = Tenacibaculum finnmarkense OX=1680763 GN=folE PE=3 SV=1

SEQ ID NO: 15721 - protein, 230 aa, Tenacibaculum gallaicum
  REGION 1..230: note = tr|A0A3E0HDR5|A0A3E0HDR5_9FLAO GTP cyclohydrolase 1; OS = Tenacibaculum gallaicum OX=561505 GN=folE PE=3 SV=1
MFEVKNNKMNDDSIDEIGENHIGTSAKTPLRPDAFDISDKEKIDKIQESVKEILETLGMDLTDDSMQGTPKRVAKAFVNELFMGLNPENKPEASTFDNTYKYGEMLVEKNIIVYSTCEHHLLPIIGRAHVAYISNGKVIGLSKMNRIVEYYAKRPQVQERLTMQVVQAMQEALGTQDVACVIDAKHLCVNSRGIKDIESSTVTAEFGGAFKNKETKREFLDYIKLNTDFH

SEQ ID NO: 15722 - protein, 217 aa, unidentified
  source 1..217: note = Tenacibaculum holothuriorum
  REGION 1..217: note = tr|A0A1Y2PHT1|A0A1Y2PHT1_9FLAO GTP cyclohydrolase 1; OS = Tenacibaculum holothuriorum OX=1635173 GN=folE PE=3 SV=1
MNKEHIETIGNNHISSNIETPLRTDAFDKTDDEKVKNIQHHFGKIMEELGLDLTDDSLSGTPYRFAKMYVKELFYGLNPKNKPKLSTFDNKYGYKKMLVEQNITIDSACEHHFLPITGHAHIAYIPKDKVVGLSKINRLVDYYSHRPQVQERLSLQILKDLQEALQTEDVIVMISAKHLCVSSRGIKDKNSYTTTIEYGGCFKDDAKRDEFMKIINN

SEQ ID NO: 15723 - protein, 230 aa, unidentified
  source 1..230: note = Tenacibaculum holothuriorum
  REGION 1..230: note = tr|A0A1Y2PB11|A0A1Y2PB11_9FLAO GTP cyclohydrolase 1; OS = Tenacibaculum holothuriorum OX=1635173 GN=folE PE=3 SV=1
MFEVNNNKMNDERIDEIGENHIATSAKTPLRADAFDISDKEKIERIQESVKEILETLGMDLTDDSMQGTPKRVAKAFVNELFMGLNPKNKPEASTFDNTYKYGEMLVEKNIIVYSTCEHHLLPIIGRAHVAYISKGKVIGLSKMNRIVEYYAKRPQVQERLTMQVVQAMQEALGTEDVACVIDAKHLCVNSRGIKDIESSTVTAEFGGAFKNKETKREFLDYIKLNTDFH

SEQ ID NO: 15724 - protein, 219 aa, Tenacibaculum jejuense
  REGION 1..219: note = tr|A0A238UHG8|A0A238UHG8_9FLAO GTP cyclohydrolase 1; OS = Tenacibaculum jejuense OX=584609 GN=folE2 PE=3 SV=1
MEKHDHIGDNHILTNIKTPMVPNAFDKSDDEKIANIQVHFKKIMEELGLDLTDDSLSGTPYRFAKMYVKELFYGLNPANKPKISTFENKYGYQKMLVEQNITIDSSCEHHFLPITGYAHVGYIPKDKVVGLSKINRLVDYYSHRPQVQERLCIQILKDLQETLGTEDVIVVVNAKHLCVSSRGIKDKESFTTTVEYGGRYNEASIRNEFFKICDFKNVE

SEQ ID NO: 15725 - protein, 229 aa, Tenacibaculum jejuense
  REGION 1..229: note = tr|A0A238UCW0|A0A238UCW0_9FLAO GTP cyclohydrolase 1; OS = Tenacibaculum jejuense OX=584609 GN=folE1 PE=3 SV=1
MFEIHNNMTDERIDEIGENHIGTSAKTPLRADAFDISDEEKIEKIQESVKDILITLGMDLTDDSLSGTPKRVAKAFVNELFMGLNPKNRPKASTFDNNYNYGEMLVEKNIIVYSTCEHHLLPIVGRAHVAYISDGKVIGLSKMNRIVDYFAKRPQVQERLTMQVVQAMQEALGTEDVACVIDAKHLCVNSRGIKDIESSTVTAEFGGKFKNKDTKREFLDYIKMDTPFD

SEQ ID NO: 15726 - protein, 230 aa, Tenacibaculum litoreum
  REGION 1..230: note = tr|A0A3R9D5Y5|A0A3R9D5Y5_9FLAO GTP cyclohydrolase 1; OS = Tenacibaculum litoreum OX=321269 GN=folE PE=3 SV=1
MFEVNNNKMNDDSIDEIGENHIGTSAKTPLRADAFDISDKEKIEKIQESVREILETLGMDLTDDSMQGTPKRVAKAFVNELFMGLNPQNKPEASTFDNTYKYGEMLVEKNIIVYSTCEHHLLPIIGRAHVAYISNGKVIGLSKMNRIVEYYAKRPQVQERLTMQVVQAMQEALGTQDVACVIDAKHLCVNSRGIKDIESSTVTAEFGGAFKNKETKREFLDYIKLNTDFQ

SEQ ID NO: 15727 - protein, 230 aa, Tenacibaculum lutimaris
  REGION 1..230: note = tr|A0A420DYY5|A0A420DYY5_9FLAO GTP cyclohydrolase 1; OS = Tenacibaculum lutimaris OX=285258 GN=folE PE=3 SV=1
MFEVNSNKMNDDRIDEIGENHIGTSAKTPLRADAFDISDKEKIEKIQESVREILETLGMDLTDDSMKGTPKRVAKAFVNELFMGLNPENKPEASTFDNTYKYGEMLVEKNIIVYSTCEHHLLPIIGRAHVAYISNGKVIGLSKMNRIVEYYAKRPQVQERLTMQVVQAMQEALGTQDVACVIDAKHLCVNSRGIKDIESSTVTAEFGGAFKNKETKREFLDYIKLNTDFQ

SEQ ID NO: 15728 - protein, 230 aa, Tenacibaculum maritimum
  REGION 1..230: note = tr|A0A2H1EB40|A0A2H1EB40_9FLAO GTP cyclohydrolase 1; OS = Tenacibaculum maritimum NCIMB 2154 OX=1349785 GN=folE; PE = 3 SV=1
MFEVNNNKMNDERIDEIGENHVSTSAKTPLRPDAFDISDSEKIEKIQESVKDILETLGMDLTDDSMKGTPRRVAKAFVNEIFMGLNPENKPKASTFDNNYNYGEMLVEKNIVVYSTCEHHLLPIVGRAHVAYISNGKVIGLSKMNRIVEYFSKRPQVQERLTMQVVQAMQEALGTEDVACVIDAKHLCVNSRGIKDIESSTVTAEFGGKFKDKETKREFLDYLKMNTEFN

SEQ ID NO: 15729 - protein, 219 aa, Tenacibaculum mesophilum
  REGION 1..219: note = tr|A0A1M5DLX9|A0A1M5DLX9_9FLAO GTP cyclohydrolase 1; OS = Tenacibaculum mesophilum OX=104268 GN=folE PE=3 SV=1
MNKHDYIGDNHILTNIKTPLTPNAFDKSDEEKIVNIQGHFAKIMEELGLDLTDDSLSGTPYRFAKMYVKELFYGLNPANKPKVSTFDNKYGYSKMLVEQNITIDSSCEHHFLPISGYAHIGYIPKNRVIELSKINRLVDYYSHRPQVQERLCLQILTDLQETLETEDVIVLVNAKHLCVSSRGIKDKNSYTTTIEYGGSFNDLAVRNEFFKICEFENRE

SEQ ID NO: 15730 - protein, 230 aa, Tenacibaculum mesophilum
  REGION 1..230: note = tr|A0A1M5HNP3|A0A1M5HNP3_9FLAO GTP cyclohydrolase 1; OS = Tenacibaculum mesophilum OX=104268 GN=folE PE=3 SV=1
MFEVNNNKMNDDSIDEIGENHIGTSAKTPLRADAFDISDKEKIEKIQESVREILETLGMDLTDDSMQGTPKRVAKAFVNELFMGLNPENKPEPSTFDNTYKYGEMLVEKNIIVYSTCEHHLLPIIGRAHVAYISNGKVIGLSKMNRIVEYYAKRPQVQERLTMQVVQAMQEALGTQDVACVIDAKHLCVNSRGIKDIESSTVTAEFGGAFKNKETKREFLDYIKLNTDFQ

SEQ ID NO: 15731 - protein, 229 aa, Tenacibaculum skagerrakense
  REGION 1..229: note = tr|A0A4R2NZA4|A0A4R2NZA4_9FLAO GTP cyclohydrolase 1; OS = Tenacibaculum skagerrakense OX=186571 GN=folE PE=3 SV=1
MFEIHNNMIDDRIDEIGENHVGTSAKTPLRADAFDISDEEKIAKIQDSVKDILETLGMDLTDDSLKGTPKRVAKAFVNEMFMGLNPKNKPSASTFDNNYKYGEMLVEKNIIVYSTCEHHLLPIVGRAHVAYISNGKVIGLSKMNRIVEYFSKRPQVQERLTMQVVQAMQEALGTDDVACVIDAKHLCVNSRGIKDIESSTVTAEFGGKFKNKETKREFLDYIKLNTTFD

SEQ ID NO: 15732 - protein, 221 aa, Tenacibaculum soleae
  REGION 1..221: note = tr|A0A1B9XYL1|A0A1B9XYL1_9FLAO GTP cyclohydrolase 1; OS = Tenacibaculum soleae OX=447689 GN=folE PE=3 SV=1
MMNKKQIELVGDNHMYSSIQTPLSTNAFKKTDDEKIENIAYHFKMIMEEIGLDLTDDSLSGTPYRVAKMYIKELFYGLNPANKPKLSTFENKYGYKKMLVEQNITIDSACEHHFLPIIGHAHVAYVAKDKVIGLSKINRLVDYYARRPQVQERLVLQILNDLQTVLDTKDVIIMVTAKHLCVSSRGIKDQSSFTTTLEYGGCFNNTEKRNEFLKIISNQKI

SEQ ID NO: 15733 - protein, 230 aa, Tenacibaculum soleae
  REGION 1..230: note = tr|A0A1B9Y3F3|A0A1B9Y3F3_9FLAO GTP cyclohydrolase 1; OS = Tenacibaculum soleae OX=447689 GN=folE PE=3 SV=1
MFEVNNNKMNDERIDEIGENHIATSAESPIRKDAFDISDEEKIARIEESVKDILITLGMDLTDDSMQGTPKRVAKAYVNELFMGLNPKNMPKASTFDNNYNYGEMLVEKNIVVYSTCEHHLLPIIGRAHVAYISNGKVIGLSKMNRIVEYFSKRPQVQERLTMQIVQAMQEALGTEDVACIVDAKHLCVNSRGIKDIESSTVTAEFGGAFKNKDTKREFLDYVKMDTKFD

SEQ ID NO: 15734 - protein, 230 aa, Tenacibaculum sp.
  REGION 1..230: note = tr|A0A2H1YF51|A0A2H1YF51_9FLAO GTP cyclohydrolase 1; OS = Tenacibaculum sp. TNO020 OX=1458515 GN=folE PE=3 SV=1
MFEVNNNKMNDERIDDIGDNHVATSAKNPLRDDAFDLSDQEKIAKIQESVKDILETLGMDLTDDSMQGTPKRVAKSFVNEIFMGLNPANMPKASTFENNYNYGEMLVEKNIVVYSTCEHHLLPIIGRAHVAYISGGRVIGLSKMNRLVEYFSKRPQVQERLTMQIVQAMQEALGTQDVACVIDAKHLCVNSRGIKDIESSTVTAEFGGKFKEKNTKREFLDYLKMNTDFN

SEQ ID NO: 15735 - protein, 232 aa, Tenacibaculum sp.
  REGION 1..232: note = tr|A0A1H5J9B8|A0A1H5J9B8_9FLAO GTP cyclohydrolase 1; OS = Tenacibaculum sp. MAR_2010_89 OX=1250198 GN=folE PE=3; SV = 1
MKHQETLLNTLINKNSLNDFSIEDIGDDHLYTGIDTPLKNDAFSLSDNEKKEKIASLFSQIMDVMGLDLTDDSLNGTPKRVAKMYIDEIFSGLNPKNKPKIALFENKYRYNQMLIEKDIQFYSNCEHHFVPIIGKAHVAYVSSGKVIGLSKLNRIVQYYAKRPQVQERLTNQIATDLQAILNTKNVAVIIDAKHLCVSSRGVKDDSSSTITCFYGGVFNTKEKIVELQNYIK

SEQ ID NO: 15736 - protein, 230 aa, unidentified
  source 1..230: note = Tenacibaculum todarodis
  REGION 1..230: note = tr|A0A1L3JGR2|A0A1L3JGR2_9FLAO GTP cyclohydrolase 1; OS = Tenacibaculum todarodis OX=1850252 GN=folE PE=3 SV=1
MFEVNNNKMNDERSKEIGENHVGTSATTPLRADAFDISDEEKIERIQKSVKDILTTLGMDLTDDSLQGTPKRVAKSFVNEIFMGLDPKNMPKASTFDNNYNYGEMLVEKNIVVYSTCEHHLLPIIGRAHVAYISDGKVIGLSKMNRIVEYFSKRPQVQERLTMQVVQAMQEALGVEDVACVIDAKHLCVNSRGIKDIESSTVTAEFGGKFKERETKREFLDYLKMNTDFD

SEQ ID NO: 15737 - protein, 257 aa, unidentified
  source 1..257: note = Tenericutes bacterium
  REGION 1..257: note = tr|A0A1V6F972|A0A1V6F972_9BACT Putative GTP cyclohydrolase 1 type 2 OS=Tenericutes bacterium ADurb.Bin087 OX=1852918 GN=BWX74_00729 PE=4 SV=1
MKTRTLLTKLGRLYPKRIAQKYNDYVGYMAGQKVPEIKRIVLLLDLDEIVLEEALSHKPDLILTHHPFIRGTRAKVFARDEKKKAFALWLDTLPVMVYSMHTNFDEAPNGMNDALAEKLALTDIKPLASEPMARGGYLPHPMNVEEAAKYVVEKLETKYGLLVAGDKEREIKRVAITGGSGSRDWLSAMAEGYDLYISGDAPHHVRRDVMNAGYNYLDVPHEVENAFLCKMKEVLLAIDPTFDVIKIKHEKPPIVIK

SEQ ID NO: 15738 - protein, 263 aa, unidentified
  source 1..263: note = Tenericutes bacterium
  REGION 1..263: note = tr|A0A1V5HLD0|A0A1V5HLD0_9BACT Putative GTP cyclohydrolase 1 type 2 OS=Tenericutes bacterium ADurb.BinA124 OX=1852921 GN=BWY97_01509 PE=4 SV=1
MLIKEIVQYLEQLYPPQLAIESDFNRIGFIIGDLNFEVSNVLMALDLTLEVAQEAVLKNANLIITHHPFFFQPLDKIMFSSEKGQILNLLFTHRLSLFVMHTNLDVGNNGVNDTLARLIGLIDFKVINNEVGKGNFLRYGEIRPLTLASLALKLKNDLDLTGVRVVGDPQKIIKRVGIVGGSGAHDEDIAAALAMDLDCYITGEVKLPAAQKAYFHNLSLIEINHGVEKMVFYPLAQKMAGELGLKNRIFVSEINTDPLVVWK

SEQ ID NO: 15739 - protein, 205 aa, unidentified
  source 1..205: note = Tengunoibacter tsumagoiensis
  REGION 1..205: note = tr|A0A402AAJ8|A0A402AAJ8_9CHLR GTP cyclohydrolase 1; OS = Tengunoibacter tsumagoiensis OX=2014871 GN=folE1 PE=3; SV = 1
MVMHMDQERARNNGHDAHDEQPQARHVDYARLLELGRELLIAVGENPDREGLLDTPRRWADWWREFIEYDPGKTETIFNTASTDQMVCVSGMRVFSLCEHHLLPMWCDVSIGYIPDGKVLGLSKFARIAHQFAHQLQIQERLGQEIADEISRITGTSHVAVVLKGEHLCMTGRGIRTPGVMTSSVMRGVFREHYETRMEFLRLIE

SEQ ID NO: 15740 - protein, 195 aa, Tenuibacillus multivorans
  REGION 1..195: note = tr|A0A1H0E374|A0A1H0E374_9BACI GTP cyclohydrolase 1; OS = Tenuibacillus multivorans OX=237069 GN=folE PE=3 SV=1
MEVSLKNNIQEEKKIIQEKISYHIYEILKLIGEDPEREGLLDTPNRVAKMYLDIFSGINLDPKLELNTLFEEKSNDWIIINDITFYSTCEHHLVTFYGKCHIGYIPNEKIAGLSKFARLVDVLSKKPQVQERLTNEIADCIDEVLKPKGIIVKVEAEHLCMCARGVKKPGSNTITQTKKGDLNQREIYNFLQLIN

SEQ ID NO: 15741 - protein, 306 aa, Tenuibacillus multivorans
  REGION 1..306: note = tr|A0A1H0CIZ8|A0A1H0CIZ8_9BACI GTP cyclohydrolase FolE2 OS=Tenuibacillus multivorans OX=237069 GN=folE2 PE=3; SV = 1
MNETNSKKQLPPKEERHKLFGSVEPGPRTKPQDKDKMADLQNTKKDFLFELDAVGVSNVKHPIVVPSHVEPKEQTTIGTFYFASTISQGSKGTNMSRFTEQLQAYYNKGFRVDIETMKKFTKDLQERLKQKDAELTVEFPWFYQRKAPYTGNIGMNHADAWLKVKYHHENGYDIKVGLKAKITTLCPCSKEISEYSAHNQRGNVVIEITLDPEFDEDKQDWKELLLEAAESNASARIHPVLKRPDEKMVTEQAYENPRFVEDMVRLIASDLYELDMVKQFHVKCINEESIHLHDAIASITFDKREE

SEQ ID NO: 15742 - protein, 219 aa, Tepidamorphus gemmatus
  REGION 1..219: note = tr|A0A4R3MJN3|A0A4R3MJN3_9RHIZ GTP cyclohydrolase 1; OS = Tepidamorphus gemmatus OX=747076 GN=folE PE=3 SV=1
MADGSKRDAMDAMIRNYRGTAHDVNDRDPRGRPSREQVEAAVRTLIAWTGDDPKREGLIDTPRRVAKAFEELYGGYFECPIEALSRTFEEVGGYDDIVLLRDVPFFSHCEHHMLPFVGKANIAYYPAGRVVGLSKLARVVETYARRLQTQENLTAQIATTIDEVLQPHGVAVMLEAEHMCMSLRGVHKHGVSTVTTQFTGRFRDNVGEQDRFLRLVRDR

SEQ ID NO: 15743 - protein, 286 aa, unidentified
  source 1..286: note = Tepidanaerobacter acetatoxydans
  REGION 1..286: note = tr|U4QJM1|U4QJM1_TEPAE GTP cyclohydrolase FolE2; OS = Tepidanaerobacter acetatoxydans (strain DSM 21804 / JCM 16047 / Re1) OX=1209989 GN=folE PE=3 SV=1
MNYLGKTADFMKSRFGKQKIVASCTGVNDLLKDIQSQIDTRGISLNRVGIKNIDWPLKVYDQTNGFQNTVANISLSVALNHDIKGTHMSRFVEVLNNIDILNPQIILSILSSIQTKLDAESSFFECKFPYFIWKESPVSKNISPLKIEAMILGEKNRDETEIIIGVVVPVQTLCPCSKAISSVGAHNQRANVKILVKTKKKIWFEHLAAIAEMSASSPVYSLLKREDEKYVTEAAYNTPKFVEDVARDAALLLEKEDGLKCYRVEVESHESIHNHEAFAWVEKALS

SEQ ID NO: 15744 - protein, 276 aa, Tepidanaerobacter syntrophicus
  REGION 1..276: note = tr|A0A0U9HIA9|A0A0U9HIA9_9THEO GTP cyclohydrolase FolE2 OS=Tepidanaerobacter syntrophicus OX=224999 GN=folE2; PE = 3 SV=1
MKSRFGKLKIVESHTGVNDLLKDIQSQVDTRGISLNRVGIKNIDWPLKVYDQTNGFQNTVANISLSVALKHDIKGTHMSRFVEVLNNIDILNPQVILSILSRIQTKLDAESSFFECKFPYFIWKESPVSKNISPLKIEATISGEKNRDKTEIIIGVVVPVQTLCPCSKAISSVGAHNQRANVKILVKTKKKIWFEHLAAIAEMSASSPVYSLLKREDEKYVTEAAYNTPKFVEDVARDAALLLEKEEGLKCYRVEVESHESIHNHEAFAWVEKALS

SEQ ID NO: 15745 - protein, 187 aa, unidentified
  source 1..187: note = Tepidibacillus decaturensis
  REGION 1..187: note = tr|A0A135L401|A0A135L401_9BACI GTP cyclohydrolase 1; OS = Tepidibacillus decaturensis OX=1413211 GN=folE PE=3 SV=1
MGVNHKQIEEAVKVILKSIGEDPEREGLLETPARVARMYEEIFVGLEQDPKDYFDVIFSEKHEEVVLVKDIPFYSTCEHHLVPFFGIAHVAYIPRDGRVTGLSKLARAVEAVAKRPQLQERMTDTIADAIMEKLEPFGVLVMIEAEHMCMTMRGVKKPGSKTVTITARGIYKEDPQLRNEILQLIRS

SEQ ID NO: 15746 - protein, 187 aa, unidentified
  source 1..187: note = Tepidibacillus fermentans
  REGION 1..187: note = tr|A0A4R3KK95|A0A4R3KK95_9BACI GTP cyclohydrolase 1; OS = Tepidibacillus fermentans OX=1281767 GN=folE PE=3 SV=1
MSVNHEQIKEAVKLILTSIGENPEREGLIDTPARVARMYEEVFSGIEQDPKEYFDVVFSEEHEEVVLVKDIPFYSMCEHHLVPFFGVAHVAYIPRNGRVTGLSKLARAVEAVARRPQLQERITDTVADAIMEKLEPYGVFVMIEAEHMCMTMRGVKKPGSKTVTTAARGIYREDALLRNEILQLIRG

SEQ ID NO: 15747 - protein, 187 aa, Tepidibacter formicigenes
  REGION 1..187: note = tr|A0A1M6PH59|A0A1M6PH59_9FIRM GTP cyclohydrolase 1; OS = Tepidibacter formicigenes DSM 15518 OX=1123349 GN=folE; PE = 3 SV=1
MDKVKIRRAVRDILEAIGEDPDREGLRDTPDRIARMYEEIYSGLNEDPKKHLEIFFQDEKHEELVLVKDIPFYSTCEHHLVPFFGKAHVAYIPKGGKLTGLSKLARVVETAAKRPQLQERITKTVAEALVDVLNPYGVIVVVEAEHMCMTMRGVKKPGSKTITSAVRGIFEKDVAARAEVMSLINNK

SEQ ID NO: 15748 - protein, 195 aa, Tepidibacter formicigenes
  REGION 1..195: note = tr|A0A1M6NVI9|A0A1M6NVI9_9FIRM GTP cyclohydrolase 1; OS = Tepidibacter formicigenes DSM 15518 OX=1123349 GN=folE; PE = 3 SV=1
MAINKKEIEKHIRGILIALGEDPDREGLKDTPKRVANMYEEVFMGTNYTNDEIAEIFGKTFEEDLDVKGSNKDIVFMKDIEIFSHCEHHLALMYNMKVSVAYIPNKKVIGLSKIARIADMVGRRLQLQERIGMDIAYIIQRVTDSEDVAVIIEGEHACMTARGIKKNNTKTITTTLKGRFETDPILNNKLMMLYK

SEQ ID NO: 15749 - protein, 187 aa, Tepidibacter thalassicus
  REGION 1..187: note = tr|A0A1M5P4D7|A0A1M5P4D7_9FIRM GTP cyclohydrolase 1; OS = Tepidibacter thalassicus DSM 15285 OX=1123350 GN=folE; PE = 3 SV=1
MDKEKIKKAVRDILEAIGEDPDREGLIDTPDRIARMYEEIYGGINEDPKKHLEIFFQDEKHEELVLVKDIPFYSICEHHLVPFFGKAHVAYIPKGGKLTGLSKLARVVETVARRPQLQERITKIVADALVDVLNPYGVIVVVEAEHMCMTMRGVKKPGSKTITSAVRGIFEKDVAARAEVMSLINCK

SEQ ID NO: 15750 - protein, 194 aa, Tepidibacter thalassicus
  REGION 1..194: note = tr|A0A1M5QMF1|A0A1M5QMF1_9FIRM GTP cyclohydrolase 1; OS = Tepidibacter thalassicus DSM 15285 OX=1123350 GN=folE; PE = 3 SV=1
MAINKKEIEKHVRGILIALGENPDREGLRDTPKRVANMYEEVFMGINYTNDEIADMFGKTFEEDLDVEGNKDMVFMKDIEIFSHCEHHLALMYNMKVAVAYIPNKKVIGLSKIARIADMVGKRLQLQERIGTDIAYIIQKVTGSEDVAVIIEGEHACMSARGIKKDNAKTVTVTVKGRFATDPILNNKLMMLYK

SEQ ID NO: 15751 - protein, 209 aa, unidentified
  source 1..209: note = Tepidicaulis marinus
  REGION 1..209: note = tr|A0A081BDA9|A0A081BDA9_9RHIZ GTP cyclohydrolase 1; OS = Tepidicaulis marinus OX=1333998 GN=folE PE=3 SV=1
MDMNAVVDSLSSTKTDSARPSREEAEAAVRTLIAWAGDNPDREGLIETPNRVVRAYEEFFAGYEEDPDEVLGKTFEEVEGYDDMVMLRDITLESHCEHHMVAILGKAHIAYVPTNRVVGISKLARVIEIYAKRLQTQETMTAQIVDSINRVLKPKGVAVLIEAKHQCMTTRGIRKPDVATITTQFTGVFRDDLRMEQRFLQMIRGYQER

SEQ ID NO: 15752 - protein, 245 aa, unidentified
  source 1..245: note = Tepidimonas alkaliphilus
  REGION 1..245: note = tr|A0A554W621|A0A554W621_9BURK GTP cyclohydrolase 1; OS = Tepidimonas alkaliphilus OX=2588942 GN=folE PE=4 SV=1
MLMPHPDAMTARANSEEEGVPVSVRIRERLRAARKRFHANDNIADFIQPGELEELLDEVTEKMQAVLDSLVIDTRSDHNTEDTARRVAKMYIKEVFAGRYVKAPAITEFPNAEHLNELMIVGPITVRSACSHHFCPVIGRLWIGVMPNEHTNVIGLSKYARLAEWIMSRPQIQEEAVVQLADLIQEKTQPDGLAIVMEATHYCMAWRGVKDMDSRMINSVMRGVFLKDANLRREFLSLLPRQASA

SEQ ID NO: 15753 - protein, 244 aa, Tepidimonas aquatica
  REGION 1..244: note = tr|A0A554WEV7|A0A554WEV7_9BURK GTP cyclohydrolase 1; OS = Tepidimonas aquatica OX=247482 GN=folE PE=4 SV=1
MLMPNPDAMTDTQPHDDGVPVSVRIRERLRAARKRFHANDNIADFIQPGELEQLLDEVTDKMQTVLDSLVIDTTNDHNTEDTARRVAKMYLKEVFAGRYTKAPTITEFPNAEHLNELMIVGPITVRSACSHHFCPVIGKLWIGVMPNEHTNVIGLSKYARLAEWIMGRPQIQEEAVVQLADLIQEKTQPDGLAIVMEATHYCMAWRGVKDLDSRMINSVMRGVFLKDANLRREFLSLLPRQVQQ

SEQ ID NO: 15754 - protein, 241 aa, unidentified
  source 1..241: note = Tepidimonas fonticaldi
  REGION 1..241: note = tr|A0A1A6DUL1|A0A1A6DUL1_9BURK GTP cyclohydrolase; OS = Tepidimonas fonticaldi OX=1101373 GN=folE PE=4 SV=1
MLMKAPETMTDDTRPDEGVPVSVRIRERIRAARKRFHSNDNIAEFIRPGELEQLLDEVSEKMQAVLDAMVIDTANDHNTEDTARRVAKMYLKEVFAGRYVPAPSITEFPNAEHLNELMIVGPITVRSACSHHFCPVIGKVWIGVMPNEHTNVIGLSKYARLAEWVMGRPQIQEEAVVQLADLIQEKTQPDGLAIVMEATHYCMAWRGVKDMDSRMINSVMRGVFLKDPNLRREFLSLIPRS

SEQ ID NO: 15755 - protein, 246 aa, unidentified
  source 1..246: note = Tepidimonas sediminis
  REGION 1..246: note = tr|A0A554WRZ5|A0A554WRZ5_9BURK GTP cyclohydrolase 1; OS = Tepidimonas sediminis OX=2588941 GN=folE PE=4 SV=1
MLMPNPDAMTAAPAADDDGVPVSVRIRERIRAARKRFHANDNIAEFIRPGELEQLLDEVTEKMQAVLDSLVIDTTSDHNTEDTARRVAKMYLKEVFAGRYVKAPAITEFPNAEHLNELMIVGPITVRSACSHHFCPVIGKLWIGVMPNEHTNVIGLSKYARLAEWIMGRPQIQEEAVVQLADLIQEKTQPDGLAIVMEATHYCMAWRGVKDMDSRMINSVMRGVFLKDANLRREFLSLIPRHVAPQ

SEQ ID NO: 15756 - protein, 245 aa, Tepidimonas sp.
  REGION 1..245: note = tr|A0A554XK47|A0A554XK47_9BURK GTP cyclohydrolase 1; OS = Tepidimonas sp. SPSP-6 OX=2267262 GN=folE PE=4 SV=1
MLMPTHDVSAMAADSVPDEGVPVSVRIRERIKAARKRFHANDNIAEFIRPGELEQLLDEVTEKMQAVLDAMVIDTANDHNTEDTARRVAKMYLKEVFAGRYVPAPTITEFPNAEHLNELMIVGPITVRSACSHHLCPVIGKVWIGVMPNEHTNVIGLSKYARLAEWVMGRPQIQEEAVVQLADLIQERTQPDGLAIVMEATHYCMAWRGVKDMDSRMINSVMRGVFLKDANLRREFLSLIPRQGQ

SEQ ID NO: 15757 - protein, 243 aa, Tepidimonas taiwanensis
  REGION 1..243: note = tr|A0A554XC32|A0A554XC32_9BURK GTP cyclohydrolase 1; OS = Tepidimonas taiwanensis OX=307486 GN=folE PE=4 SV=1
MLMKAPETMTDDTRPDEEGVPVSVRIRERIRAARKRFHANDNIAEFIRPGELEQLLDEVTEKMQAVLDAMVIDTANDHNTEDTARRVAKMYLKEVFAGRYVPAPTITEFPNAEHLNELMIVGPITVRSACSHHFCPVIGKVWIGVMPNEHTNVIGLSKYARLAEWVMGRPQIQEEAVVQLADLIQEKTQPDGLAIVMEATHYCMAWRGVKDMNSRMINSVMRGVFLKDANLRREFLSLIPREG

SEQ ID NO: 15758 - protein, 241 aa, Tepidimonas thermarum
  REGION 1..241: note = tr|A0A554X4U9|A0A554X4U9_9BURK GTP cyclohydrolase 1; OS = Tepidimonas thermarum OX=335431 GN=folE PE=4 SV=1
MLMKAPETMTDDTRPDEGVPVSVRIRERIQAARKRFHANDNIADFIQPGELEQLLDEVTEKMQAVLDAMVIDTRNDHNTEDTARRVAKMYLKEVFAGRYVQAPTITEFPNAEHLNELMIVGPITVRSACSHHFCPVIGKVWIGIMPNEHTNVIGLSKYARLAEWVMGRPQIQEEAVVQLADLIQEKTQPDGLAIVMEATHYCMAWRGVKDMDSRMINSVMRGVFLKDANLRREFLSLIPRG

SEQ ID NO: 15759 - protein, 268 aa, unidentified
  source 1..268: note = Tepidiphilus thermophilus
  REGION 1..268: note = tr|A0A0K6IVR0|A0A0K6IVR0_9PROT GTP cyclohydrolase FolE2 OS=Tepidiphilus thermophilus OX=876478 GN=folE2 PE=3; SV = 1
MDQAIQPIPDVQSFADHRHMAIDKVGIKSIRHPIRVSDRSGGVQHTVATFNMYVGLPHNFKGTHMSRFVEILNAHEREISVENFEPMLRQMVERLEAETGHIEMSFPYFIEKRAPVTGVASLMDYDVTFIGEILAGGEYRFTMKVVVPVTSLCPCSKKISAYGAHNQRSHVTITARTIDHVWIEELVQLAEKEASSELYGLLKRPDEKYVTEHAYDNPKFVEDMVRDVAARLDADPRIVHYVAESENFESIHNHSAYALIERDKTKPR

SEQ ID NO: 15760 - protein, 184 aa, unidentified
  source 1..184: note = Terasakiispira papahanaumokuakeensis
  REGION 1..184: note = tr|A0A1E2VEX6|A0A1E2VEX6_9GAMM GTP cyclohydrolase 1; OS = Terasakiispira papahanaumokuakeensis OX=197479 GN=folE; PE = 3 SV=1
MTESMIPLYRQILEAVGEDPEREGLLDTPKRAAKAMTFLTQGYRQDLSEIVNGAVFSSDCDEMVIVRDIELYSMCEHHMLPFIGRCHIGYIPNGQVLGLSKFARIVDMFARRLQIQEQLTRQIANAVQEVTQARGVGVIIEAQHMCMMMRGVEKQNSSMRSSVMLGQFRESQNTRQEFLKLAGL

SEQ ID NO: 15761 - protein, 185 aa, Teredinibacter sp.
  REGION 1..185: note = tr|A0A509DY93|A0A509DY93_9GAMM GTP cyclohydrolase 1; OS = Teredinibacter sp. ISS155 OX=2584524 GN=folE PE=3 SV=1
MTDHNTKDHFAKIIESCGEDLNRPGLLDTPKRAAKAFEFLTSGYHETVEKVVNGALFPSDANDMVIVKDIELYSLCEHHMLPFIGKAHVGYIPTGKVLGLSKVARIVDMYSRRLQIQEQLSSQIAHTIAEITGASGVGVVIDAKHLCMMMRGVEKQNSSMRTSAMLGTFRDNPTTRSEFLSLIYS

SEQ ID NO: 15762 - protein, 184 aa, Teredinibacter turnerae
  REGION 1..184: note = sp|C5BL73|GCH1_TERTT GTP cyclohydrolase 1; OS = Teredinibacter turnerae (strain ATCC 39867 / T7901); OX = 377629 GN=folE PE=3 SV=1
MKPTPAELYANLISSTGEDLQRPGLQGTPARAATAFEYLTSGYKQSVQEVVNDALFPSDSNDMVVVRDIELFSLCEHHMLPFIGKAHVGYIPTGKVLGLSKVARIIDMYARRLQIQEQLTHQVASTIAEVTGAAGVGVIIEAKHLCMMMRGVEKQNSVMKTSAMLGSFRANLSTRSEFLALLNN

SEQ ID NO: 15763 - protein, 190 aa, Terrabacter aerolatus
  REGION 1..190: note = tr|A0A512D523|A0A512D523_9MICO GTP cyclohydrolase 1; OS = Terrabacter aerolatus OX=422442 GN=folE PE=3 SV=1
MAIDQPRAEAAVRELLLAIGEDPDREGLLDTPGRVARSFAEIYAGLDMTAADVLGTTFEIDHQELVIVRDIELYSTCEHHLVPFHGVAHVGYIPSKDGRVTGLSKLARLVEVFARRPQVQERLTTQIADALVEHLDVQGVIVVVQAEHLCMSMRGIRKPGASTITSAVRGQLRDPATRAEAMALMLEGNK

SEQ ID NO: 15764 - protein, 190 aa, Terrabacter lapilli
  REGION 1..190: note = tr|A0A543N061|A0A543N061_9MICO GTP cyclohydrolase 1; OS = Terrabacter lapilli OX=436231 GN=folE PE=3 SV=1
MAIDTARAQAAVRELLLAIGEDPEREGLLDTPARVARSFSEIYAGLDMEPADVLGTTFEIDHQELVIVRDIELYSTCEHHLVPFHGVAHVGYIPSKDGRVTGLSKLARLVEVFARRPQVQERLTSQIADALVEHLDVQGVIVVVQAEHLCMSMRGIRKPGASTITSAVRGQLRDAATRAEAMALMLEGNK

SEQ ID NO: 15765 - protein, 214 aa, Terrabacter lapilli
  REGION 1..214: note = tr|A0A543MM86|A0A543MM86_9MICO GTP cyclohydrolase 1; OS = Terrabacter lapilli OX=436231 GN=folE PE=3 SV=1
MNRYTSQTDAPSPAHRPHPRLPWAGTGAVIDPDLDRAAAGARVLLEALGVDLDNESLARTPERMASSLAELMSPRPFQMTTFPNDGGYDELILARSIPLRSLCEHHMLPFVGVAHIGYLPGERILGLSKLARVLEHFACRPQVQERLTGQVADWLRAQLSPAGVGVVIEAEHLCMTLRGVQAPGSTTITSSLLGTLRDDPRSRAEFLALTRATG

SEQ ID NO: 15766 - protein, 213 aa, Terrabacter sp.
  REGION 1..213: note = tr|A0A543KXN0|A0A543KXN0_9MICO GTP cyclohydrolase 1; OS = Terrabacter sp. 3211 OX=2587050 GN=folE PE=3 SV=1
MNPSLSQPDPSSRTQHRARTSWSGTGAVAEPDLERAAAGARILLEALGVDLDDESLARTPERMAGSLAELMSPRPFHLTTFPNDGGYDEMVVARSIPLRSLCEHHMLPFVGTAHIGYLPGGRILGLSKLARVLEHFASRPQVQERLTVQVADWLAAQLSPVGVGVVIEAEHLCMTLRGVQAPGTTTITSSLRGVLREDSRSRAEFLALTRSPG

SEQ ID NO: 15767 - protein, 181 aa, Terrabacter sp.
  REGION 1..181: note = tr|A0A0Q8XTH5|A0A0Q8XTH5_9MICO GTP cyclohydrolase 1; OS = Terrabacter sp. Root85 OX=1736603 GN=folE PE=3 SV=1
MARAASGARIMLEALGIDLDNESLARTPERMAASLAELMSPRPFQMTTFPNDGDYDELIVARGIPVRSLCEHHMLPFVGTAHIGYLPGGRILGLSKLARVLEHFSSRPQVQERLTVQVADWLCAQLSPVGVGVVVEAEHLCMTLRGVQAPGTTTITSSLLGALRDDSRSRAEFLALTQASR

SEQ ID NO: 15768 - protein, 137 aa, unidentified
  source 1..137: note = Terrabacteria group
  REGION 1..137: note = tr|A0A537J1T3|A0A537J1T3_9BACT GTP cyclohydrolase 1 (Fragment) OS=Terrabacteria group bacterium ANGP1; OX = 2569760 GN=folE PE=3 SV=1
LLAVGFEEKHKEMVIVKDISLQSLCEHHLLPFHGVAHVAYIPNGRIVGISKIARLVEMLAHRPQVQERLTSQIADLLMEGLRARGAAVVIDATHLCMTMRGVKKPGSRVVTSANRGIFRENPSTRAEFLTLLKPQAG

SEQ ID NO: 15769 - protein, 189 aa, unidentified
  source 1..189: note = Terrabacteria group
  REGION 1..189: note = tr|A0A537LKE0|A0A537LKE0_9BACT GTP cyclohydrolase 1; OS = Terrabacteria group bacterium ANGP1 OX=2569760 GN=folE; PE = 3 SV=1
MDKAVIERAVQQIIEAIGEDPKREGLIGTPRRIADMYEEIFAGLKEDPRELLEVGFDDEDHHELVIVKDIPFYSMCEHHFLPFHGVAHVGYIPQGRILGVSKVARLVEMLARRPQVQERLTSQVADFLCQGGLGAAGSAVVIEAEHLCTTMRGVKKPGSKVVTSATRGIFREDARTRAEFFSIIEGKRS

SEQ ID NO: 15770 - protein, 190 aa, Terracoccus luteus
  REGION 1..190: note = tr|A0A495Y3T4|A0A495Y3T4_9MICO GTP cyclohydrolase 1; OS = Terracoccus luteus OX=53356 GN=folE PE=3 SV=1
MPVDHERAEAAVRELLLAIGEDPSREGLVDTPGRVARAYAEIFAGLDMSPADVLGKTFEIDHQELVIVRDIEVYSTCEHHLVPFHGVAHVGYIPSRDGRVTGLSKLARLVEVYARRPQVQERLTAQVADALVEHLDVQGVIVVIQAEHLCMSMRGIRKPGASTITSAVRGQLRDPATRAEAMSLMLEGNR

SEQ ID NO: 15771 - protein, 310 aa, Terribacillus aidingensis
  REGION 1..310: note = tr|A0A285NLG6|A0A285NLG6_9BACI GTP cyclohydrolase FolE2 OS=Terribacillus aidingensis OX=586416 GN=folE2 PE=3; SV = 1
MQHLHTPTKKQLPAKAERHKLFGSVPPGEKTKPENKADMADLQNTKKNFLFHIDAVGIANVKHPIQVISNTSPAMQTTIGTFEFTSSIQQDSKGTNMSRFTEQLDMYHKNGFTVSVQSLQTFVAELAERLKQDDAKVKVTFPWFFERSGPASGMTGLNHADASLEVSYHKETGFRTTAKLSGTVTTLCPCSKEISEYSAHNQRGIVSMEVQLTDAFNEDVQDWKEALLEAAESNASARIHPVLKRPDEKMVTETAYENPRFVEDMVRLVAADLYELDYVEKFTVSCSNQESIHLHDAVATLSYDKRDEME

SEQ ID NO: 15772 - protein, 310 aa, Terribacillus goriensis
  REGION 1..310: note = tr|A0A075LKL4|A0A075LKL4_9BACI GTP cyclohydrolase FolE2 OS=Terribacillus goriensis OX=386490 GN=folE2 PE=3; SV = 1
MQHLHTPTRKELPSKAERHKLFGSVEPGKKTKPENKADMADLQNTKKNFLFHIDAVGIAKVKHPIQVISNTRPAMQTTIGTFEFTSSIQQDSKGTNMSRFTEQLDLYHKNGFTVSVKSLQTFVAELADRLKQEDARVKVTFPWFFERSGPASGMTGLNHADATLEVAYDKHTGFRTTAKLSGTVTTLCPCSKEISEYSAHNQRGIVSMEVQLTDAFDEDVRDWKEDLLEAAESNASARIHPVLKRPDEKMVTETAYENPRFVEDMVRLVAADLYELNYVEKFTVSCNNEESIHLHDAVATLSYDKRDEEE

SEQ ID NO: 15773 - protein, 310 aa, Terribacillus halophilus
  REGION 1..310: note = tr|A0A1G6MU82|A0A1G6MU82_9BACI GTP cyclohydrolase FolE2 OS=Terribacillus halophilus OX=361279 GN=folE2 PE=3; SV = 1
MQHLHTPTRKQLPSKAERHKLFGSVPPGKKTKPENKADMADLQNTKKNFLFHIDAVGIANVKHPIQVISNTSPAMQTTIGTFEFTSSIQQDSKGTNMSRFTEQLDLYHKNGFTVSVKSLQTFVAELANRLKQDDARVKVTFPWFFERSGPASGMTGLNHADATLEVAYDKQTGFRTTAKLSGTVTTLCPCSKEISEYSAHNQRGIVSMEVQLTDAFDEDVRDWKEDLLEAAESNASARIHPVLKRPDEKMVTETAYENPRFVEDMVRLVAADLYELDYVEKFTVSCSNQESIHLHDAVATLSYDKRDEEE

SEQ ID NO: 15774 - protein, 310 aa, Terribacillus saccharophilus
  REGION 1..310: note = tr|A0A268A9P4|A0A268A9P4_9BACI GTP cyclohydrolase FolE2 OS=Terribacillus saccharophilus OX=361277 GN=folE2; PE = 3 SV=1
MQHLHTPTKKQLPSKAERHKLFGSVAPGKKTKPENKADMADLQNTKKNFLFHIDAVGIAKVKHPIQVISTTRPAMQTTIGTFEFTSSIQQDSKGTNMSRFTEQLDLYHKNGFTVSVKSLQTFVAELADRLKQEDARVKVTFPWFFERSGPASGMTGLNHADATLEVAYNKHTGFRTTAKLSGTVTTLCPCSKEISEYSAHNQRGIVSMEVQLTDAFDEDVRDWKEDLLEAAESNASARIHPVLKRPDEKMVTETAYENPRFVEDMVRLVAADLYELDYVEKFTVSCSNEESIHLHDAVATLSYDKRDEEE

SEQ ID NO: 15775 - protein, 310 aa, Terribacillus saccharophilus; identical to SEQ ID NO: 15772
  REGION 1..310: note = tr|A0A1H8AE40|A0A1H8AE40_9BACI GTP cyclohydrolase FolE2 OS=Terribacillus saccharophilus OX=361277 GN=folE2; PE = 3 SV=1

SEQ ID NO: 15776 - protein, 310 aa, Terribacillus sp.
  REGION 1..310: note = tr|A0A268BNN7|A0A268BNN7_9BACI GTP cyclohydrolase FolE2 OS=Terribacillus sp. 7520-G OX=2025389 GN=folE2 PE=3; SV = 1
MQHLHTSTKKQLPSKAERHKLFGSVPPGKKTKPENKADMADLQNTKKNFLFHIDAVGIAKVKHPIQVISNTSPAMQTTIGTFEFTSSIQQDSKGTNMSRFTEQLDLYHKNGFTVSVKSLQTFVAELADRLKQDDARVKVTFPWFFERSGPASGMTGLNHADATLEVAYDKQTGFRTTAKLSGTVTTLCPCSKEISEYSAHNQRGIVSMEVQLTDAFDEDVRDWKEDLLEAAESNASARIHPVLKRPDEKMVTETAYENPRFVEDMVRLVAADLYELDYVEKFTVSCSNQESIHLHDAVATLSYDKRDEEE

SEQ ID NO: 15777 - protein, 196 aa, unidentified
  source 1..196: note = Terriglobus albidus
  REGION 1..196: note = tr|A0A5B9EEY0|A0A5B9EEY0_9BACT GTP cyclohydrolase 1; OS = Terriglobus albidus OX=1592106 GN=folE PE=3 SV=1
MSTLTDRPLSEASTEEIYRELLLRYDEDPTRDGLLKTPERMEKAMAFLTKGYKQDPTEILRGALFDVDYDEMVIVKDIEFYSLCEHHLLPFFGKAHIAYIPDGKVIGLSKMPRLVDVFSRRLQVQERLTRQIADAIVDAIRPQGVAVIMEARHLCMMMRGVEKQNSATVTSAMLGVFKEQQQTRNEFLSLVRSGKL

SEQ ID NO: 15778 - protein, 207 aa, Terriglobus roseus
  REGION 1..207: note = tr|A0A1H4JBW3|A0A1H4JBW3_9BACT GTP cyclohydrolase 1; OS = Terriglobus roseus OX=392734 GN=folE PE=3 SV=1
MKDSRLETNTAIAEPEVTLHDATTAELYRELLQRVGEDPARDGLLKTPERMEKAMTFLTRGYEQNPTDILRGALFDVDYDEMVIVRDIEFYSLCEHHMLPFFGKAHVAYIPKGKVIGLSKVARLVDVFARRLQVQERMTREIADAVVEAIHPMGVAVILEAQHLCMMMRGVEKQGSMTSTSAMLGCFRESAQTRNEFLSLIRRPSGF

SEQ ID NO: 15779 - protein, 207 aa, Terriglobus roseus
  REGION 1..207: note = tr|I3ZI06|I3ZI06_TERRK GTP cyclohydrolase 1; OS = Terriglobus roseus (strain DSM 18391 / NRRL B-41598 / KBS 63) OX=926566 GN=folE PE=3 SV=1
MKDSRLETNTAVAEPQVTLNDATTAELYRELLLRIGENPERDGLLKTPERMEKAMTFLTHGYEQSATDILRGALFDVDYDEMVIVRDIEFYSLCEHHMLPFFGKAHIAYIPKGKVIGLSKVARLVDVFARRLQVQERMTREIADAVVEAIHPMGVAVILEAQHLCMMMRGVEKQGSMTSTSAMLGCFRESAQTRNEFLSLIRRPGGF

SEQ ID NO: 15780 - protein, 193 aa, Terriglobus saanensis
  REGION 1..193: note = tr|E8UX10|E8UX10_TERSS GTP cyclohydrolase 1; OS = Terriglobus saanensis (strain ATCC BAA-1853 / DSM 23119 / SP1PR4) OX=401053 GN=folE PE=3 SV=1
MVKSLEQATTEELYSEVLRRLGEDPERDGLLKTPERVAKSMAFLTQGYAQNPTELLRGALFDVDYDEMVIVRDIEFYSLCEHHMLPFFGKAHVAYIPQGKVIGLSKVARLVDLFARRLQVQERMTRQIADAIVEAIAPQGVGVVVEAQHLCMMMRGVEKQHSMTTTSAMLGAFRNAAQTRNEFLSLIRRPSAL

SEQ ID NO: 15781 - protein, 258 aa, unidentified
  source 1..258: note = Terrimicrobium sacchariphilum
  REGION 1..258: note = tr|A0A146G7D7|A0A146G7D7_TERSA GTP cyclohydrolase FolE2 OS=Terrimicrobium sacchariphilum OX=690879 GN=folE2; PE = 3 SV=1
MTLQDTQNQRDERRLPIDRVGVKDLRYPIQIRDKDHSLQSTIATVQLTVDLPHHFKGTHMSRFVEVLNSHGPILHVDNIRDVLEQLTRKLQSTCAHVDFEFPFFLEKKAPVTGAVGLIDYVARFNATVENGKMDFIVTTVVPVTTLCPCSKAISARGAHNQRGHVTLAVRCSKPMWIEDMIRLVEDSASSELYSLLKRPDEKAVTERAYDNPVFVEDLVRNVASRCEKDANILWYRVEAENFESIHNHNAYALIEKHG

SEQ ID NO: 15782 - protein, 198 aa, Terrimonas sp.
  REGION 1..198: note = tr|A0A2T7Q5C9|A0A2T7Q5C9_9BACT GTP cyclohydrolase 1; OS = Terrimonas sp. NS-102 OX=2171976 GN=folE PE=3 SV=1
MAYKKVEQYDGDTTASLIETYERALGLLGEDPQREGLLKTPERIAKAMQFMTQGYQQSSRDILNSAKFHEPISEMIIVKDIEVYSMCEHHMLPFFGKAHVAYIPNGWITGLSKIARVVDVYARRLQVQERLTTQILDAIKDALQPLGVAVVIEASHLCMMMRGVQKQNSVTTTSAFFGEFEKNETRSEFIRLIGSSLH

SEQ ID NO: 15783 - protein, 193 aa, unidentified
  source 1..193: note = Terrisporobacter glycolicus
  REGION 1..193: note = tr|A0A1I3QP26|A0A1I3QP26_9FIRM GTP cyclohydrolase 1; OS = Terrisporobacter glycolicus OX=36841 GN=folE PE=3 SV=1
MGERRTVDKPAIEKAVREILIAIGEDPDREGLIGTPDRVARMYEEIFSGLHEDPREHLKVLFKNENHEEMVVVKDIPFYSSCEHHLVPFFGKAHVVYIPKDGKLTGLSKLARVIETFARRPQLQERITKETANIIMEELEPYGVMVVVEAEHMCMTMRGVKKPGSKTITSAVRGIFEKDALARSEAMSLIKFD

SEQ ID NO: 15784 - protein, 193 aa, unidentified
  source 1..193: note = Terrisporobacter othiniensis
  REGION 1..193: note = tr|A0A0B3VVZ5|A0A0B3VVZ5_9FIRM GTP cyclohydrolase 1; OS = Terrisporobacter othiniensis OX=1577792 GN=folE PE=3; SV = 1
MGEKRTVDKPAIEKAVRDILIAIGEDPDREGLIGTPDRVARMYEEIFSGLHEDPRQHLKVLFKNENHEEMVVVKDIPFYSSCEHHLVPFFGKAHVVYVPKDGRLTGLSKLARVIETFARRPQLQERITKETANIIMEELEPYGVMVVVEAEHMCMTMRGVKKPGSKTITSAVRGIFETDALARSEAMSLIKFD

SEQ ID NO: 15785 - protein, 204 aa, unidentified
  source 1..204: note = Tersicoccus phoenicis
  REGION 1..204: note = tr|A0A1R1LDB0|A0A1R1LDB0_9MICC GTP cyclohydrolase 1; OS = Tersicoccus phoenicis OX=554083 GN=folE PE=3 SV=1
MDRAERPDDPGMPGATAGVDEPRISAAVREILLAIGEDPDRSGLRDTPDRVARAYAEMFSGLHQDAADVLGTTFDLDHEELVLVKDIPFYSTCEHHLVPFHGTAHVGYIPSHDGRVTGLSKLARLVEVYARRPQVQERLTTQIVEALVTHLAPRGAIVVVECEHLCMSMRGVRKPGTKTVTSAVRGQLHDPATRAEAMSLILGR

SEQ ID NO: 15786 - protein, 204 aa, unidentified
  source 1..204: note = Tersicoccus sp.
  REGION 1..204: note = tr|A0A1R1LY14|A0A1R1LY14_9MICC GTP cyclohydrolase 1; OS = Tersicoccus sp. Bi-70 OX=1897634 GN=folE PE=3 SV=1
MTHAERPDEPGMPGAVAGVDEPRIAAAVREILLAIGEDPERSGLKDTPDRVARAYAEMFSGLHQDAGDVLGTTFDLDHEELVLVKDIPFYSTCEHHLVPFHGTAHVGYIPSHDGKVTGLSKLARLVEIYARRPQVQERLTTQIVEALVAHLAPRGAIVVIECEHLCMSMRGVRKPGTRTVTSAVRGQLHDPATRAEAMGLILGR

SEQ ID NO: 15787 - protein, 188 aa, unidentified
  source 1..188: note = Tessaracoccus aquimaris
  REGION 1..188: note = tr|A0A1Q2CSH6|A0A1Q2CSH6_9ACTN GTP cyclohydrolase 1; OS = Tessaracoccus aquimaris OX=1332264 GN=folE PE=3 SV=1
MAVDERRAAAAVRELLAAIGEDPDREGLQDTPDRVARAWGELAAGYSTDIGDILGTTFDIEHDELVLVKDIELVSMCEHHMLPFTGVAHIGYIPSSNGRVTGLSKLARLVEMYGRRLQVQERLTTQIADALVEHLDARGVIVVVEAEHTCMTMRGVRKPGSRTVTSAVRGQLRNPATRAEAMSLILGR

SEQ ID NO: 15788 - protein, 205 aa, Tessaracoccus bendigoensis
  REGION 1..205: note = tr|A0A1M6H436|A0A1M6H436_9ACTN GTP cyclohydrolase 1; OS = Tessaracoccus bendigoensis DSM 12906 OX=1123357 GN=folE; PE = 3 SV=1
MGPAAAVESAVDAAEPLMAVDLARASAAVRELLAAIGEDPDREGLRDTPSRVAKAWLELGAGYDADVEEILGTTFDIDHEELVLVKDIELVSMCEHHMLPFTGVAHVGYIPSAVGRVTGLSKLARLVEMYGRRLQVQERLTTQIAEAVVGQLQARGVIVVIEAEHTCMTMRGVRKPGSRTVTSAVRGLLRDPATRAEAMSLILGR

SEQ ID NO: 15789 - protein, 199 aa, Tessaracoccus flavescens
  REGION 1..199: note = tr|A0A1Q2CVZ3|A0A1Q2CVZ3_9ACTN GTP cyclohydrolase 1; OS = Tessaracoccus flavescens OX=399497 GN=folE PE=3 SV=1
MGSAEHTSEQLMAVDGPRAAAAIRELLIAIGEDPERDGLRDTPDRVARAWTELAAGYDADVKEILGTTFDIAHEEMVLVKDIELVSMCEHHMLPFTGVAHIGYIPSENGRVTGLSKLARLVDVYARRLQVQERLTTQIAEALVNELDARGAIVVISAEHTCMTMRGVRKPGSQTVTSAVRGQLRNPATRAEAMSLILGR

SEQ ID NO: 15790 - protein, 188 aa, unidentified
  source 1..188: note = Tessaracoccus flavus
  REGION 1..188: note = tr|A0A1Q2CIL9|A0A1Q2CIL9_9ACTN GTP cyclohydrolase 1; OS = Tessaracoccus flavus OX=1610493 GN=folE PE=3 SV=1
MAVDHQRAIAAVRELLAAVGEDPDRDGLLETPDRVARSWAEMLAGHGADPADLLAKTFDIDHDEMVLVKDIRFVSMCEHHLLPFTGVAHIGYIPSPERGVTGLSKLARLVELFARRLQVQERITSQIAEALVEHLDAHGVIVVLEAEHTCMTMRGVKKPGSMTVTSAVRGQLRVPATRAEAMSLILGR

SEQ ID NO: 15791 - protein, 188 aa, unidentified
  source 1..188: note = Tessaracoccus lapidicaptus
  REGION 1..188: note = tr|A0A1C0AR47|A0A1C0AR47_9ACTN GTP cyclohydrolase 1; OS = Tessaracoccus lapidicaptus OX=1427523 GN=folE PE=3 SV=1
MAIDEARAAAAVRELLLAIGEDPERDGLQETPERVARAWGELLAGHGADASGVLGKTFDIAHDEMVLVKDIELVSTCEHHMLPFTGVAHVGYIPSESGRVTGLSKLARLVDIFARRLQVQERLTTQIADALVEHLDARGVIVVVEAEHTCMTMRGVRKPGSRTVTSAVRGILRHPATRAEAMSLIIGR

SEQ ID NO: 15792 - protein, 188 aa, Tessaracoccus oleiagri
  REGION 1..188: note = tr|A0A1G9MYG8|A0A1G9MYG8_9ACTN GTP cyclohydrolase 1; OS = Tessaracoccus oleiagri OX=686624 GN=folE PE=3 SV=1
MAVDQARIAAAVREILLAVGEDPERDGLRDTPARVARSYAELFSGLGKDASDVLGTTFDVAHDELILVKDIEVASSCEHHLLPFYGVAHVGYIPSKDGRVAGLSKLARLVDLYARRPQIQERLVSEIADALVEHLDPGGVIVVIEAEHMCMSLRGVRKPGAKTITSAVRGSLRNAATRAEAMSLILGH

SEQ ID NO: 15793 - protein, 196 aa, unidentified
  source 1..196: note = Tessaracoccus rhinocerotis
  REGION 1..196: note = tr|A0A553JXI0|A0A553JXI0_9ACTN GTP cyclohydrolase 1; OS = Tessaracoccus rhinocerotis OX=1689449 GN=folE PE=3 SV=1
MHNWRPRVVAERPTADLAAATDAAAALLTALGLDLTDEGLVETPGRMAATLLEMTSSPPFELTTFPNDEGYDELVMVRDIPVRSVCEHHVLPFVGVAHVGYLPGERILGLSKFARMVEFHARRPQTQERLTKRIADHLASALHPRGVGVVIHAEHTCMSIRGALAVGARTTTSALFGLLRDDPRTRSEFLALTRGA

SEQ ID NO: 15794 - protein, 189 aa, unidentified
  source 1..189: note = Tessaracoccus rhinocerotis
  REGION 1..189: note = tr|A0A553K1I1|A0A553K1I1_9ACTN GTP cyclohydrolase 1; OS = Tessaracoccus rhinocerotis OX=1689449 GN=folE PE=3 SV=1
MAVDQARIEAAVREILIAVGEDPDREGLQQTPARVARAYEELFAGLSQDPETYLGTTFDIAHDELVLVKDIEVTSTCEHHLLPFVGVAHVGYIPSSDGRVTGLSKLARLVDVYSRRPQVQERLTTQIADALVEHIEARGVIVVIEAEHMCMTMRGARKPGSKTVTSAVRGQLRDPATRAEAMGLITGRR

SEQ ID NO: 15795 - protein, 200 aa, Tessaracoccus sp.
  REGION 1..200: note = tr|A0A3M0GYN4|A0A3M0GYN4_9ACTN GTP cyclohydrolase 1; OS = Tessaracoccus sp. JDX10 OX=2479848 GN=folE PE=3 SV=1
MPGRAAILPEGPERDLGAAAAAGAEFMRALGVDPSDESRPDLALTPHRFATAYAEMLTPRPFDFTTFLNVEGYDEMVVVRDIAVQSLCEHHLLPFVGVAHVAYLPANLIVGLSKLPRIVEHFARRLQTQERLTLQVAEALESHLQPRGVGVVVEATHSCMTLRGVRSEHASTKTSSLRGSLRSDPATRAEFFALVNGAAH

SEQ ID NO: 15796 - protein, 187 aa, Tessaracoccus sp.
  REGION 1..187: note = tr|A0A3M0G809|A0A3M0G809_9ACTN GTP cyclohydrolase 1; OS = Tessaracoccus sp. JDX10 OX=2479848 GN=folE PE=3 SV=1
MVDHARIEAAVREILLAVGEDPDRDGLRDTPGRVARSYEELFSGLGADPAELLATTFDIDHKELVLVRDVELTSCCEHHLLPFVGVAHVGYIPGPDGKVTGLSKLARLVDMYARRPQIQERLTSQVADALVEHLGVSGVIVVIEAEHMCMTMRGVRKRGSRTITSAVRGHLRNPATRAEAMSLILGR

SEQ ID NO: 15797 - protein, 218 aa, unidentified; identical to SEQ ID NO: 12408
  source 1..218: note = Testudinibacter aquarius
  REGION 1..218: note = tr|A0A4R3Y3W6|A0A4R3Y3W6_9PAST GTP cyclohydrolase 1; OS = Testudinibacter aquarius OX=1524974 GN=folE PE=3 SV=1

SEQ ID NO: 15798 - protein, 195 aa, Tetrasphaera australiensis
  REGION 1..195: note = tr|W6K2M8|W6K2M8_9MICO GTP cyclohydrolase 1; OS = Tetrasphaera australiensis Ben110 OX=1193182 GN=folEA; PE = 3 SV=1
MTEPADKVDQPRIEAAVREILAAIGEDPGRDGLLDTPARVARAYAEAFGGLHADPAEVLAKKFEVDHQELVIVRDIAMYSTCEHHLLPFHGVAHIGYLPQGGVVTGLSKLARLVDVFARRPQVQERMTGQIADALVEHLGVMGCIVVIEAEHLCMSMRGVRKPGARTITSAVRGSLARNAKTRAEAMSLLHSGQR

SEQ ID NO: 15799 - protein, 204 aa, Tetrasphaera duodecadis
  REGION 1..204: note = tr|A0A2N3YI15|A0A2N3YI15_9MICO GTP cyclohydrolase 1; OS = Tetrasphaera duodecadis OX=173053 GN=folE PE=3 SV=1
MVVSNPEAAGSFVHPPVDVPRARAAVREFLIAIGEDPDRDGLLETPARVAKAAVELYAGLRQDPAEVLSKTFPIEHEELVIVRDIPMYSTCEHHLLPFHGVAHIGYIPAADGKVTGLSKLGRLVEVFARRPQVQEQITTQVADALVTHLGAQGVIVVVEAEHLCMSMRGVQKPGSRTITSAVRGQLRDPATRAEAMSLLLGGKR

SEQ ID NO: 15800 - protein, 198 aa, Tetrasphaera elongata
  REGION 1..198: note = tr|N0E613|N0E613_9MICO GTP cyclohydrolase 1; OS = Tetrasphaera elongata Lp2 OX=1193181 GN=folEA PE=3 SV=1
MTVPEPVASGVDQARAEAAVRELLRAVGEDPDRDGLLETPARVARAYAELFAGLHQDAAKVLATTFSIDHEEMIIVRDIELFSTCEHHLLPFHGVAHVGYIPNESGVVTGLSKLARLVEVFARRPQVQERITTQIADALVEHLRARGVIVVIEAEHLCMTMRGVRKPGARTITSAVRGQLRDPATRSEAMSLLLGGKH

SEQ ID NO: 15801 - protein, 234 aa, Tetrasphaera japonica
  REGION 1..234: note = tr|A0A077LWS4|A0A077LWS4_9MICO GTP cyclohydrolase 1; OS = Tetrasphaera japonica T1-X7 OX=1194083 GN=folE PE=3 SV=1
MDLTATSAAIVAGDGVATSLPTASGGSIASADGSVVDGSHRETAPRGLDVDAAERACRQLLWALGLDLSSEAVVRTPHRMARAFAELLTAPEVDFTTFPNEEGYDELVLVEDIPFRSLCEHHMLPFAGVAHVGYLPGSRILGLSKLARLVAHAASRPQTQERLTTRVAEELDHRLRPRGVGVVLHAQHACMSLRGARAHGTWTRTSSLSGELTEDPARRAEFLSLTRSRGGATP

SEQ ID NO: 15802 - protein, 202 aa, Tetrasphaera japonica
  REGION 1..202: note = tr|A0A077M5S1|A0A077M5S1_9MICO GTP cyclohydrolase 1; OS = Tetrasphaera japonica T1-X7 OX=1194083 GN=folEA PE=3; SV = 1
MSTPDTADAEPAHRVDLARAEAAVREFLAAIGEDPDREGLRDTPGRVARAARELYAGLGRDPSAILSTMFQIDHDEMIIVRDIEVYSTCEHHLLPFHGVAHVGYIPAIDGRVTGLSKLARLVDLYARRPQVQERITTQVADALVEHLQARGVIVVVEAEHLCMSMRGVHRPGSRTITSAVRGQLRDPATRSEAMSLLLGGKR

SEQ ID NO: 15803 - protein, 195 aa, Tetrasphaera jenkinsii
  REGION 1..195: note = tr|A0A077M9V9|A0A077M9V9_9MICO GTP cyclohydrolase 1; OS = Tetrasphaera jenkinsii Ben 74 OX=1193518 GN=folEA PE=3; SV = 1
MAELSSPMDLPRIEAAVREILIAVGEDPERDGLLDTPGRVARAYVEAFAGLHADPAEVLSKRFAVDHQELVIVRDIAMYSTCEHHLLPFHGKAHIGYLPRNGYVTGLSKLARLVDVFARRPQVQERMTGQIADALVEHLDVLGVIVVIEAEHLCMSMRGVRKPGASTITSAVRGILARNATTRAEAMALLGFGPR

SEQ ID NO: 15804 - protein, 205 aa, Tetrasphaera sp.
  REGION 1..205: note = tr|A0A0Q9M3R1|A0A0Q9M3R1_9MICO GTP cyclohydrolase 1; OS = Tetrasphaera sp. Soil756 OX=1736399 GN=folE PE=3 SV=1
MSNPDPAGPAGSFVHPPVDVPRARAAVREFLIAIGEDPDRDGLLETPARVAKAAVELYAGLRQDPAEVLSKTFAIEHEELVIVRDIPMYSTCEHHLLPFHGVAHIGYIPAADGKVTGLSKLGRLVEVFARRPQVQEQITTQVADALVTHLGAQGVIVVVEAEHLCMSMRGVQKPGSRTITSAVRGQLRDPATRAEAMALLLGGKR

SEQ ID NO: 15805 - protein, 189 aa, unidentified
  source 1..189: note = Tetzosporium hominis
  REGION 1..189: note = tr|A0A264W713|A0A264W713_9BACL GTP cyclohydrolase 1; OS = Tetzosporium hominis OX=2020506 GN=folE PE=3 SV=1
MTTVDLHKIENAVKMILEAVGEDPAREGLIETPKRVAKMYAEMFEGLHQDPKEYFKTIFHEDHEELVLVKDIPFHSMCEHHLVPFYGKAHVAYIPRNGVVTGLSKLARAVETTARRPQLQERITSTIADSIMEMLNPYGAYVVIEAEHMCMTMRGIKKPGAKTITAVARGVYEEDAVKRSEIHSFIQMT

SEQ ID NO: 15806 - protein, 310 aa, Thalassobacillus cyri
  REGION 1..310: note = tr|A0A1H4GWY9|A0A1H4GWY9_9BACI GTP cyclohydrolase FolE2 OS=Thalassobacillus cyri OX=571932 GN=folE2 PE=3 SV=1
MSQINIRNKKLLPSKKERHKLFGSSDPGPRTKPIEKEQMVDLQNSKQDFLFNIDTVGISNVKHPIRIPSQLTPEIQTTIGTFTFGSSITQDSKGTNMSRFTQQLDEYHQEGFAIDLTTLKKFTKELAARLKQKDAEVEVNFPWFFERKGPASDLAGMNHADAFMKVSYHQETGHDIEVGLTATITTLCPCSKEISEYSAHNQRGNVSMSVKLTEDFNDQETDWKAALLEAAESNASARIHPVLKRPDEKMVTEQAYENPRFVEDVVRLVAADLYEYDFVESFKVTCRNEESIHLHDAIASLSYDKNDEGN

SEQ ID NO: 15807 - protein, 365 aa, Thalassobacter sp.
  REGION 1..365: note = tr|A0A099TAP9|A0A099TAP9_9RHOB GTP cyclohydrolase FolE2 OS=Thalassobacter sp. 16PALIMAR09 OX=1225651; GN = folE2 PE=3 SV=1
MNIHAPEIDRQPNDDQAAEALATLQRWAAAASEAEIAALDPKIAQLLPGAEATGRALSRTYPDDFRVDDAYRATLPDLQNGPSSLIRGEKALIQHVGISNFRLPIRYHTREGAELTLETSVTGSVSLEAEKKGINMSRIMRTFYARSEERFSLGVIEAALSDYKTDLESFDARIQMRFSFPMKVDSLRSGLSGYQYYDIAMEVVDTGGVRQKFMHLDYVYSSTCPCSLELSEHARQARGQLATPHSQRSVARVSVEVTGPSRLWFEDLIEMCRAGVPTETQVMVKREDEQAFAELNAANPIFVEDAARSFCAQLKADPRIGDFRVVASHQESLHSHDAISVLTEGDTFAARSLDPRLFQSLFHVG

SEQ ID NO: 15808 - protein, 365 aa, unidentified
  source 1..365: note = Thalassobacter stenotrophicus
  REGION 1..365: note = tr|A0A0P1FGW8|A0A0P1FGW8_9RHOB GTP cyclohydrolase FolE2 OS=Thalassobacter stenotrophicus OX=266809 GN=folE2; PE = 3 SV=1
MNIHAPEIDRQPNDDQAAEALVTLQRWAAAASEAEIAALDPKIAQLLPGAEATGRALSRTYPDDFRVDDAYRATLPDLQNGPSSLIRGEKALIQHVGISNFRLPIRYHTREGAELTLETSVTGSVSLEAEKKGINMSRIMRTFYARSEERFSLGVIEAALSDYKTDLESFDARIQMRFSFPMKVDSLRSGLSGYQYYDIAMEVVDTGGVRQKFMHLDYVYSSTCPCSLELSEHARQARGQLATPHSQRSVARVSVEVTGPSRLWFEDLIEMCRAGVPTETQVMVKREDEQAFAELNAANPIFVEDAARSFCAQLKADPRIGDFRVVASHQESLHSHDAISVLTEGDTFAARSLDPRLFQSLFHVG

SEQ ID NO: 15809 - protein, 210 aa, Thalassobaculum litoreum
  REGION 1..210: note = tr|A0A1G7Q684|A0A1G7Q684_9PROT GTP cyclohydrolase 1; OS = Thalassobaculum litoreum DSM 18839 OX=1123362 GN=folE; PE = 3 SV=1
MTPYDQALADSEAGTVTPAHPRPTREQAERAVRTLIEFVGENPDREGLQDTPKRVVKSYEELFSGYLYDPAEILARTFEEVEEYDEIVLLRDVRFESFCEHHMLPIIGTAHVAYFPNDRVVGISKLARVIDAYARRMQIQERLTAQIAQAIETVLEPRGVAVVIESEHHCMSTRGVHKHGVSMVTTRMLGCFKEDPDRRREFYQLIGKSS

SEQ ID NO: 15810 - protein, 219 aa, Thalassobaculum litoreum
  REGION 1..219: note = tr|A0A1G7PUB9|A0A1G7PUB9_9PROT GTP cyclohydrolase 1; OS = Thalassobaculum litoreum DSM 18839 OX=1123362 GN=folE; PE = 3 SV=1
MTDMPVSIMRSGGLAAHQLSDDGEFVAESGEDRLAAAESGIRALLRGIGEDPGRDGLLETPARVVRAFSEYCSGYAVDAKALLTTTFSEVSGYQNLVILTDIDFVSHCEHHLAPIVGKAHVAYLPASSVVGISKLARVVDAYARRLQIQERMTSQIAQCIEDGLNPQAVGVIVDAEHGCMTLRGVNKRSPRLRTQDFRGLLAEDLTMQQRFLDAIGARP

SEQ ID NO: 15811 - protein, 388 aa, unidentified
  source 1..388: note = Thalassobium sp.
  REGION 1..388: note = tr|C7DC78|C7DC78_9RHOB GTP cyclohydrolase FolE2; OS = Thalassobium sp. R2A62 OX=633131 GN=folE2 PE=3 SV=1
MEIDRDTPHMKLLRPEDGETEMTLEGQEFEREPTQDEAREALALLRQWAVSVTDEEIATLDALVSCLVPGQELMNYPALARAYPEEFEVDELYKASMPDLQNGPSSLIRGAKQQIQHVGISNFRLPIQVRTRGGAPLTLETSVTGTVSLEAEKKGINMSRIMRTFYRRAEETFSFDVIERALEDYKADLESFDARIQMRFSFPMKVDSLRSGLSGYQYYDLALEVIDVGGVRQKIVHLDYVYSSTCPCSLELSEHARQFRGQLATPHSQRSVARLSVQVDETAGILWFEDLIDLCRRAVPTETQVMVKREDEQAFAELNAANPIFVEDAARSFCELLQADPRIGDFRIVASHQESLHSHDAVSILTEGETFSADSIDPKLFSTLFHVG

SEQ ID NO: 15812 - protein, 367 aa, unidentified
  source 1..367: note = Thalassobium sp.
  REGION 1..367: note = tr|A0A2G1ZYK4|A0A2G1ZYK4_9RHOB GTP cyclohydrolase FolE2 OS=Thalassobium sp. OX=2030825 GN=folE2 PE=3 SV=1
MNIHQPDAARAPSRAEAEDALALLRRWAVDATAEEVATLDPLVSRLIPGSELPNYPALARAYPEDFAVDEAYRAMLPDLQNGPASLIRGAKQQIQHVGISNFRLPIRFHTRDGDDLTLETSVTGTVSLEAEKKGINMSRIMRTFYKHAGETFSFDVIERALEAYKADLDSFDARIQMRFSFPMKVQSLRSGLEGFQYYDIALELIEQKGVAKKIVHLDFVYSSTCPCSLELSEHARQYRGQLATPHSQRSVARISVELEQDAPCLWFEDLIDICRAAVPTETQVMVKREDEQAFAELNAANPIFVEDAARSFCEKLQQDQRIRDFRVVASHQESLHSHDAVSVLTEGQTFAADSLDPKLFATLFHIG

SEQ ID NO: 15813 - protein, 366 aa, unidentified
  source 1..366: note = Thalassobius activus
  REGION 1..366: note = tr|A0A0P1ISF5|A0A0P1ISF5_9RHOB GTP cyclohydrolase FolE2 OS=Thalassobius activus OX=1715691 GN=folE2 PE=3 SV=1
MNIQSSKSDRPMTREEAKDALDKLRAWASAANPTEIAELDPAVARLIPGNEVSNYPDLSRDYPEDFTVDPDYKATLPDLQNGPTSLIKGAKKQIQHVGISNFRLPISYRTRDGGDVTLETSVTGTVSLEEDKKGINMSRIMRSFYKHAEKTFSFEVLEHALADYKADLDSFDARIQMRFRYPMKIPSLRSGLEGYQYYDLAMEKVEIGGQPMKIMHLDYVYSSTCPCSLELSEHARQFRGQLATPHSQRSVARISVVTKSIQRLWFEDLIDMARRAVPTETQVMVKREDEQAFAELNAANPIFVEDAARLFCRELQQDERIGDFRVIASHQESLHSHDAVSILTEGDTFVSGSIDPKLFTTLFHVG

SEQ ID NO: 15814 - protein, 363 aa, unidentified
  source 1..363: note = Thalassobius autumnalis
  REGION 1..363: note = tr|A0A0P1FXH7|A0A0P1FXH7_9RHOB GTP cyclohydrolase FolE2 OS=Thalassobius autumnalis OX=2072972 GN=folE2 PE=3; SV = 1
MNVHTSEIDRVMQADEARDALARLRTWAETASDAELKEVDAGLLALLRSGQYPELSREYPEDFTVDAAYKASLPDLQNGPSSLIRGAKRAIQHVGISNFRLPIRFHTRDGADITLETSVTGTVSLEAEKKGINMSRIMRSFYRHAEKTFSFEVVEAALEDYKADLESFDARIQMRFSYPVKVPSLRSGLAGYQYYDIALELIESAGVRKKIMHLDYVYSSTCPCSLELSEHARQTRGQLATPHSQRSVARISVELVGKACLWFEDLIELARQAVPTETQVMVKREDEQAFAELNAANPIFVEDAARLFSQSLEADARVGDFRVVASHQESLHSHDAVSILTEGATFAAESYDPKMFATLHHPG

SEQ ID NO: 15815 - protein, 366 aa, Thalassobius gelatinovorus
  REGION 1..366: note = tr|A0A0P1FC54|A0A0P1FC54_THAGE GTP cyclohydrolase FolE2 OS=Thalassobius gelatinovorus OX=53501 GN=folE2 PE=3; SV = 1
MNVFMPELNKPLSREDAEQALARLRDWAAQATPEEIADLDPAVSRLLPDAALGNYPALRREYPEDFAVDSGYKDSLPDLQNGPASLIRGAKRIIQHVGISNFRLPIRFHTRDDGDLSLETSVTGTVSLEAEKKGINMSRIMRSFYRHAEKTFSFEVIEAALEDYKTDLDSFDARIQMRFSYPVKLSSLRSGLEGFQYYDIALELIETAGTRKKIIHLDYVYSSTCPCSLELSEHARQFRGQLATPHSQRSVARISVVAQDGECLWFEDLIDMVRTAVPTETQVMVKREDEQAFAELNAANPIFVEDAARLFAQHLEDDPRVGDFRIVASHQESLHSHDAVSILTEGETFSSESIDPKLFNTLYHVG

SEQ ID NO: 15816 - protein, 363 aa, Thalassobius mediterraneus
  REGION 1..363: note = tr|A0A0P1GND6|A0A0P1GND6_9RHOB GTP cyclohydrolase FolE2 OS=Thalassobius mediterraneus OX=340021 GN=folE2; PE = 3 SV=1
MNVHASEIDREMQAEEARDALNRLRAWAQTASEADLAAVGADLSGLLAGKAYPEFSRDYPSDFTVDAAYKDTLPDLQNGPSSLIRGAKRAIQHVGISNFRLPIRFHTRDGGDIALETSVTGTVSLEAEKKGINMSRIMRSFYRHAEKTFSFEVVNAALEDYKNDLESFDARIQMRFSYPVKVQSLRSGLWGYQYYDIALELNETNGVRKKIMHLDYVYSSTCPCSLELSEHAREMRGQLATPHSQRSVARISVELVGPNRLWFEDLLELARDAVPTETQVMVKREDEQAFAELNAANPIFVEDAARLFSKALEDDPRVGDFRVVASHQESLHSHDAVSILTEGDTFAAESYDPKMFATLHHAG

SEQ ID NO: 15817 - protein, 223 aa, Thalassobius sp.
  REGION 1..223: note = tr|A0A2E9G533|A0A2E9G533_9RHOB GTP cyclohydrolase 1; OS = Thalassobius sp. OX=1979401 GN=folE PE=3 SV=1
MNDTNKKLTERQHFEFNGDNHLSNSIDTALRKDAFAKSDEEKINNIEVLFKGIMEELGLDLTDNSLKGTPYRVAKMYVSELFHGLNPQNKPSLSVFDNHYQYNKILLEKNITFSSACEHHFLPIVGKAHIAYISSGKVIGLSKLNRLVEYYSRRPQVQERLTLQIFNELKNTLNTEDIIVMIEAEHLCISSRGVNDKSSSTTTLEYGGKFTEVNMRNEFFQLL

SEQ ID NO: 15818 - protein, 243 aa, Thalassobius sp.
  REGION 1..243: note = tr|A0A2E9GC42|A0A2E9GC42_9RHOB GTP cyclohydrolase 1; OS = Thalassobius sp. OX=1979401 GN=folE PE=3 SV=1
MKQNGTSLNTLHLNGKGSNQNVTESDSLSLELIEQIGDEHVGSSYDTPLRKDAFELSDEEKMRKIEHHFKEIMETLGLDLTDDSLKGTPHRVAKMYVKEIFNGLNPANFPAVKLFDNKYKYNEMLVEKDISFHSNCEHHFVPIIGKAHVAYISNGKVIGLSKINRIVQYFAKRPQVQERLTVQIAETLKKVLETEDIAIVMDAKHMCVSMRGVEDHASSTVTSHFSGKFKNEATKSEFLKYIQ

SEQ ID NO: 15819 - protein, 366 aa, Thalassococcus halodurans
  REGION 1..366: note = tr|A0A1H5ZR09|A0A1H5ZR09_9RHOB GTP cyclohydrolase FolE2 OS=Thalassococcus halodurans OX=373675 GN=folE2 PE=3; SV = 1
MNVFTPEIDRKPSREEAEQALAVLRQWAGKAQDEEIVDLDPAVHALVPDGNGVAYPALDRDYDGDFTVDAAYKAGLPDLQNGPSSLIRGAKRAIQHVGISNFRLPIRYHSRDNGDLTLETSVTGSVSLDADKKGINMSRIMRSFYKHSEATFSFEVIEKALEDYKTDLESFDARINMRLSFPVRVDSLRSGLSGFQYYDIALELVEMNGVRRKIMHLDYVYSSTCPCSLELSEHARRTRGQLATPHSQRSVARISVELKGDDCLWFEDLIDMCRAAVPTETQVMVKREDEQAFAELNAANPIFVEDAARLFAEQLLQDDRIGDFRVVASHQESLHSHDAVSVLTEGDLFHSESLDPKLFSTLFHVG

SEQ ID NO: 15820 - protein, 365 aa, unidentified
  source 1..365: note = Thalassococcus profundi
  REGION 1..365: note = tr|A0A369THL3|A0A369THL3_9RHOB GTP cyclohydrolase FolE2 OS=Thalassococcus profundi OX=2282382 GN=folE2 PE=3; SV = 1
MNVHTPEIDRKPSREEAEAALALLRQWANKAPDAEIEALDPAVARLLDDAAFEYPDLSRIFPHKFEVDAAYKSSLPDLQNGPSSLIKGANRSIQHVGISNFRLPLRFHTRDNGDLTLEASVTGTVSLDADKKGINMSRIMRSFYRHAEATFSFGVIEAALDDYKSDLDSFDARINMAFRFPVKVQSLRSGLEGYQYYDISLELVETDGQRRKIMHLDYVYSSTCPCSLELSEHARRTRGQLATPHSQRSVARLSVEVQDGACLWFEDLIDLCRRAVPTETQVMVKREDEQAFAELNAANPIFVEDAARLFAQGLQKDARVGDFRVLASHQESLHSHDAVSVLTEGDLFAAGSLDPKLFSTLFHVG

SEQ ID NO: 15821 - protein, 366 aa, Thalassococcus sp.
  REGION 1..366: note = tr|A0A4P6MIV1|A0A4P6MIV1_9RHOB GTP cyclohydrolase FolE2 OS=Thalassococcus sp. S3 OX=2017482 GN=folE2 PE=3; SV = 1
MNIHAPTIEHTPDRDEAEAALAVLRSWARKASDADIVELDPSVAGLLPGGGSAYPAFSRMYPTDFEVDADYKASLPDLQNGPSSLIRGARQQIQHVGISNFRLPIRFHSRDNGDLTLETSVTGTVSLDAEKKGINMSRIMRSFYKHADRTFSFEVIEAALDDYKSDLDAFDARIQMRFSFPVRVDSLRSGLSGYQYYDIALELVEQGGVRQKIMHLDYVYSSTCPCSLELSEHARATRGQLATPHSQRSVARISVEIDEKADCLWFEDLIDACRRAVPTETQVMVKREDEQAFAELNAANPIFVEDAARLFCEQLQADHRIGDFRVVASHQESLHSHDAVSVLTDGDTFAAKSFDPKLFNTLFHIG

SEQ ID NO: 15822 - protein, 183 aa, Thalassolituus oleivorans
  REGION 1..183: note = tr|A0A1L6KCW7|A0A1L6KCW7_9GAMM GTP cyclohydrolase 1; OS = Thalassolituus oleivorans OX=187493 GN=folE PE=3 SV=1
MSNLETLYQQVLSELGEDTNREGLLDTPKRAAKAMQFLTSGYETNLHEVVNNAVFTSDNDEMVVVQGIEFYSLCEHHMLPFIGRCHIGYLPNGNVLGLSKFARITDMFARRLQIQENMTKQIAEAVEEITGCRGVGVIVEAQHMCMMMRGVQKQNSMMRTSVMKGAFRENQATRDEFMRLVGL

SEQ ID NO: 15823 - protein, 183 aa, Thalassolituus oleivorans; identical to SEQ ID NO: 15822
  REGION 1..183: note = tr|W8G0M4|W8G0M4_9GAMM GTP cyclohydrolase 1; OS = Thalassolituus oleivorans R6-15 OX=1208320 GN=folE PE=3; SV = 1

SEQ ID NO: 15824 - protein, 183 aa, Thalassolituus sp.
  REGION 1..183: note = tr|A0A558NLS4|A0A558NLS4_9GAMM GTP cyclohydrolase 1; OS = Thalassolituus sp. C2-1 OX=2597518 GN=folE PE=3 SV=1
MSNLESLYQQVLAELGENVEREGLLDTPKRAAKAMQFLTSGYTTDLHEVVNKAVFTSDNDEMVVVQGIEFYSLCEHHMLPFIGRCHIGYLPSGKVLGLSKFARIVDMFGRRLQIQENMTKQIAEAVEEVTGCRGVGVIVEAQHMCMMMRGVQKQNSMMRTSVMKGDFRSNAATRDEFMRLIGL

SEQ ID NO: 15825 - protein, 180 aa, Thalassomonas actiniarum
  REGION 1..180: note = tr|A0A0D8D695|A0A0D8D695_9GAMM GTP cyclohydrolase 1; OS = Thalassomonas actiniarum OX=485447 GN=folE PE=3 SV=1
MEQEFKRIITAIGEDPSREGLVDTPSRAAKALKYLTRGYEQDLDTVINGALFSSECDSMVVVDHIELYSLCEHHMLPFTGRCHIGYIPNGKVLGLSKLARIVDMYARRLQIQENLTQEIANAIMEVTGAKGVGVVVEASHLCMRMRGVEKQNSEMKTSCMLGSFMKDKDTRAEFLQLIKA

SEQ ID NO: 15826 - protein, 308 aa, Thalassomonas actiniarum
  REGION 1..308: note = tr|A0A0D8CV39|A0A0D8CV39_9GAMM GTP cyclohydrolase FolE2 OS=Thalassomonas actiniarum OX=485447 GN=folE2 PE=3; SV = 1
MPTSMPDIANHTTAQTEGTLDWVGMGNIEMPVMVASKDEAERMVSAHVDAFVNLKEPKAKGIHMSRLYLLLDELSSNQVLNYQNLVTLLDGFISSHQDLSDNAKVQFRFDYHLRRKSLISGKAGWKAYPVVITGRLNQGVLDIELAIDVRYSSTCPCSAALARQLIQKAFVDKFSDNGEANLADIHEWLGTTEGIVATPHSQRSVAEIKVKLNQKVNDFPITDLVDTIEDALQTPVQAAVKREDEQEFARLNGQNLMFCEDAARRLQHAMNLETVYDDFWLKINHLESLHAHDAVSVVTKGIAGGYQP

SEQ ID NO: 15827 - protein, 230 aa, Thalassomonas sp.
  REGION 1..230: note = tr|A0A553F9C1|A0A553F9C1_9GAMM GTP cyclohydrolase 1; OS = Thalassomonas sp. M1454 OX=2594477 GN=folE PE=3 SV=1
MNTAQAKKLASIANNTATSAEAKLVQQALISAGLETPMHKGSSLSSDEKYQKIKHAFTEISEALGLDLTDDSLQETPHRIAKMYVQEIFSGLDYSNFPKITVIDNKMANDEMIMVKDINLTSTCEHHFVTIDGLAKVAYIPNKTIIGLSKINRLVRFFAQRPQVQERLTKQILIALKALLATEHVAVTINAVHYCVKARGVMDSNSSTTTTALSGCFKTNSASRAEFISN

SEQ ID NO: 15828 - protein, 308 aa, Thalassomonas sp.
  REGION 1..308: note = tr|A0A553FF64|A0A553FF64_9GAMM GTP cyclohydrolase FolE2 OS=Thalassomonas sp. M1454 OX=2594477 GN=folE2 PE=3; SV = 1
MPTSMPDIANHTTAQTEGTLDRVGMGNIEMPIMVSAKDEAEKMVSAHIDAFVNLNDAQAKGIHMSRLYLLLDDLSSGNTLNYQSLIELLNEFISSHHDLSDTAYVKFSFDYPMRRKALVSGKLGWRVYPVTIVGKLEKGVFDIELCVDIAYSSTCPCSAALARQLIQKAFTEKFAEQDSVAKEDIHQWLGTSEGIVATPHSQRSIAEIKVKLNESVSSFPITDVVDTVETALQTPVQAAVKREDEQEFARLNGQNLMFCEDAARRVQHAMNLVQGYDDFWVKINHLESLHAHDAVAVTTKGLANGYKA

SEQ ID NO: 15829 - protein, 308 aa, Thalassomonas viridans
  REGION 1..308: note = tr|A0A0D8DA32|A0A0D8DA32_9GAMM GTP cyclohydrolase FolE2 OS=Thalassomonas viridans OX=137584 GN=folE2 PE=3; SV = 1
MPTSMPDIANHTTAQTEGTLDWVGMSNIEMPLMVTSKDEAERMVSAHVDAFVNLKEPKAKGIHMSRLYLLLDELSNNQVLNYQSLVTLLDGFISSHQDLSDDAKVEFRFDYHLRRKSLISGKQGWKAYPVVLTGRLNQGALNVELAIDVRYSSTCPCSAALARQLIQKAFMEKFSNNEEANLADIHEWLGTTEGIVATPHSQRSVAEVRVKLNQKLNDFPITDLVDTIEDALQTPVQAAVKREDEQEFARLNGQNLMFCEDAARRLQHAMNLETGYDDFWLKINHLESLHAHDAVSVVTKGIAGGYQP

SEQ ID NO: 15830 - protein, 196 aa, unidentified
  source 1..196: note = Thalassospira alkalitolerans
  REGION 1..196: note = tr|A0A1Y2LIR5|A0A1Y2LIR5_9PROT GTP cyclohydrolase 1; OS = Thalassospira alkalitolerans OX=1293890 GN=folE PE=3; SV = 1
MCSQNSTDKRPSREEAEDAVRTLLRWAGDDPDREGLRGTPDRVVRSYGEFFAGYEQDPAEILRRTFEETDGYDEMVVLRDIRVESYCEHHMVPIIGVAHVAYLPRRRVVGISKLARVVEVYAKRLQIQEKMTAQVANTIQEELDPLGVAVVIDANHQCMSTRGIHKTGVSMVTSRMLGAFRDDPITRREFFAMIGR

SEQ ID NO: 15831 - protein, 196 aa, unidentified
  source 1..196: note = Thalassospira lohafexi
  REGION 1..196: note = tr|A0A2N3L706|A0A2N3L706_9PROT GTP cyclohydrolase 1; OS = Thalassospira lohafexi OX=744227 GN=folE PE=3 SV=1
MCSEHSAVKRPTREEAEEAVRTLLRWAGDDPEREGLLGTPDRVARSYGEFFAGYQQDPAEILRRTFEETDGYDEMVVLRDIRVESYCEHHMVPIIGVAHVAYLPRKRVVGISKLARVVEVYSKRLQIQEKMTAQVANTIQEELDPLGVAVVIDANHQCMSTRGVHQTGVSMVTSRMLGAFRDDPITRREFFAMIGR

SEQ ID NO: 15832 - protein, 196 aa, Thalassospira lucentensis; identical to SEQ ID NO: 15831
  REGION 1..196: note = tr|A0A358HU98|A0A358HU98_9PROT GTP cyclohydrolase 1; OS = Thalassospira lucentensis OX=168935 GN=folE PE=3 SV=1

SEQ ID NO: 15833 - protein, 196 aa, Thalassospira lucentensis
  REGION 1..196: note = tr|A0A154L3K9|A0A154L3K9_9PROT GTP cyclohydrolase 1; OS = Thalassospira lucentensis OX=168935 GN=folE PE=3 SV=1
MCSETSVAKRPSREEAEEAVRTLLRWAGDDPDREGLRGTPDRVVRSYGEFFAGYQQDPADILRRTFEETDGYDEMVVLRDIRVESYCEHHMVPIIGVAHVAYLPRRRVVGISKLARVVEVYAKRLQIQEKMTAQVANTIQEELDPLGVAVVIDANHQCMSTRGIHKTGVSMVTSRMLGAFRDDPITRREFFAMIGR

SEQ ID NO: 15834 - protein, 196 aa, unidentified
  source 1..196: note = Thalassospira marina
  REGION 1..196: note = tr|A0A2N3KSE9|A0A2N3KSE9_9PROT GTP cyclohydrolase 1; OS = Thalassospira marina OX=2048283 GN=folE PE=3 SV=1
MCNEETAANRPSREEAEDAVRTLLRWAGDDPDREGLRGTPDRVVRSYGEFFAGYQQDPAEILRRTFEETDGYDEIVLLRDIRVESYCEHHMVPIIGVAHVAYLPRTRVVGISKLARVVEVYAKRLQIQEKMTSQIANTIQEELDPLGVAVVIDANHQCMSTRGVHKTGVSMVTSRMLGAFRDDPVTRREFFSMIGK

SEQ ID NO: 15835 - protein, 196 aa, unidentified
  source 1..196: note = Thalassospira mesophila
  REGION 1..196: note = tr|A0A1Y2KUQ1|A0A1Y2KUQ1_9PROT GTP cyclohydrolase 1; OS = Thalassospira mesophila OX=1293891 GN=folE PE=3 SV=1
MCNDETAVNRPSREQAEEAVRTLLRWAGDDPDREGLRGTPDRVVRSYGEFFAGYEQDPAEILRRTFDETDGYDEIVLLRDIRVESYCEHHMVPIIGVAHVAYLPRKRVVGISKLARVVEVYAKRLQIQEKMTAQIANTIQEELDPLGVAVVIDANHQCMSTRGVHKTGVSMVTSRMLGAFRDDPVTRREFFSMIGK

SEQ ID NO: 15836 - protein, 196 aa, unidentified
  source 1..196: note = Thalassospira permensis
  REGION 1..196: note = tr|A0A074JAN1|A0A074JAN1_9PROT GTP cyclohydrolase 1; OS = Thalassospira permensis NBRC 106175 OX=1353532 GN=folE; PE = 3 SV=1
MCSETSAVKRPSQEEAEEAVRTLLRWAGDDPDREGLRGTPDRVVRSYGEFFAGYQQDPAEILRRTFEETDGYDEMVVLRDIRVESYCEHHMVPIIGVAHVAYLPRRRVVGISKLARVVEVYAKRLQIQEKMTAQVANTIQEELDPLGVAVVIDANHQCMSTRGIHKTGVSMVTSRMLGAFRDDPITRREFFAMIGR

SEQ ID NO: 15837 - protein, 196 aa, unidentified
  source 1..196: note = Thalassospira povalilytica
  REGION 1..196: note = tr|A0A2N3KI96|A0A2N3KI96_9PROT GTP cyclohydrolase 1; OS = Thalassospira povalilytica OX=732237 GN=folE PE=3 SV=1
MCSEHSAVKRPTREEAEDAVRTLLRWAGDDPDREGLRGTPDRVVRSYGEFFAGYQQDPAEILRRTFEETDGYDEMVVLRDIRVESYCEHHMVPIIGVAHVAYLPRKRVVGISKLARVVEVYSKRLQIQEKMTAQVANTIQEELDPLGVAVVIDANHQCMSTRGVHKTGVSMVTSRMLGAFRDDPITRREFFAMIGR

SEQ ID NO: 15838 - protein, 196 aa, Thalassospira profundimaris
  REGION 1..196: note = tr|A0A367WEU6|A0A367WEU6_9PROT GTP cyclohydrolase 1; OS = Thalassospira profundimaris OX=502049 GN=folE PE=3 SV=1
MCSEHSAVKRPTREEAEDAVRTLLRWAGDDPDREGLLGTPDRVVRSYGEFFAGYQQDPAEILRRTFEETDGYDEMVVLRDIRVESYCEHHMVPIIGVAHVAYLPRRRVVGISKLARVVEVYAKRLQIQEKMTAQVANTIQEELDPLGVAVVIDANHQCMSTRGVHKTGVSMVTSRMLGAFRDDPITRREFFAMIGR

SEQ ID NO: 15839 - protein, 196 aa, Thalassospira profundimaris
  REGION 1..196: note = tr|A0A199YNR6|A0A199YNR6_9PROT GTP cyclohydrolase 1; OS = Thalassospira profundimaris OX=502049 GN=folE PE=3 SV=1
MCSEHNPVKRPTREEAEEAVRTLLRWAGDDPDREGLRGTPDRVARSYGEFFAGYQQDPAEILRRTFEETDGYDEMVVLRDIRVESYCEHHMVPIIGVAHVAYLPRRRVVGISKLARVVEVYAKRLQIQEKMTAQVANTIQEELDPLGVAVVIDANHQCMSTRGVHKTGVSMVTSRMLGAFRDDPITRREFFAMIGR

SEQ ID NO: 15840 - protein, 48 aa, Thalassospira sp.
  REGION 1..48: note = tr|A0A3C0FNV0|A0A3C0FNV0_9PROT GTP cyclohydrolase 1 (Fragment) OS=Thalassospira sp. OX=1912094 GN=DCM48_11380; PE = 3 SV=1
GVAHVAYLPRRRVVGISKLARVVEVYAKRLQIQEKMTAQVANTIQEEL

SEQ ID NO: 15841 - protein, 196 aa, Thalassospira sp.; identical to SEQ ID NO: 15839
  REGION 1..196: note = tr|A0A2E3TJA7|A0A2E3TJA7_9PROT GTP cyclohydrolase 1; OS = Thalassospira sp. OX=1912094 GN=folE PE=3 SV=1

SEQ ID NO: 15842 - protein, 196 aa, Thalassospira xiamenensis; identical to SEQ ID NO: 15836
  REGION 1..196: note = tr|A0A367W5F2|A0A367W5F2_9PROT GTP cyclohydrolase 1; OS = Thalassospira xiamenensis OX=220697 GN=folE PE=3 SV=1

SEQ ID NO: 15843 - protein, 196 aa, Thalassospira xiamenensis; identical to SEQ ID NO: 15833
  REGION 1..196: note = tr|A0A154KRZ1|A0A154KRZ1_9PROT GTP cyclohydrolase 1; OS = Thalassospira xiamenensis OX=220697 GN=folE PE=3 SV=1

SEQ ID NO: 15844 - protein, 196 aa, Thalassospira xianhensis; identical to SEQ ID NO: 15833
  REGION 1..196: note = tr|A0A367U9K6|A0A367U9K6_9PROT GTP cyclohydrolase 1; OS = Thalassospira xianhensis MCCC 1A02616 OX=1177929; GN = folE PE=3 SV=1

SEQ ID NO: 15845 - protein, 307 aa, unidentified
  source 1..307: note = Thalassotalea agarivorans
  REGION 1..307: note = tr|A0A1I0AW30|A0A1I0AW30_THASX GTP cyclohydrolase FolE2 OS=Thalassotalea agarivorans OX=349064 GN=folE2 PE=3; SV = 1
MSSSMPDIANHSQALSEGTLDWVGMSNIEMPLQVSSEGQQPQVVTTSIDAFVNLLPPQAKGIHMSRLYLALDEMSGEQILCPAALQHVLNAFISSHSDLSDSAKVAITFDYHLRRKSLISGKEGWKAYPITVVGQIMQGNLSVELAIDVTYSSTCPCSAALARQLIQNAFTEQFSDEQISKDDVLAWLGTTDGINATPHSQRSVAQVKVKLPSDLAHFPIVQLIDLLENTLQTPVQAAVKREDEQEFARLNGQNLMFCEDAARKIQHSLNQQKSVEDFWVRINHYESLHAHDAVSITTKGVADGYTP

SEQ ID NO: 15846 - protein, 308 aa, unidentified
  source 1..308: note = Thalassotalea euphylliae
  REGION 1..308: note = tr|A0A3E0UEQ4|A0A3E0UEQ4_9GAMM GTP cyclohydrolase FolE2 OS=Thalassotalea euphylliae OX=1655234 GN=folE2 PE=3; SV = 1
MPTSMPDIANHTTAQTEGTLDWVGMSNIEMPLMVASKDQPERMVSAHIDAFVNLKEAQAKGIHMSRLYLLLDELSNNNTLNYQSFAALLDGFISSHQELSDQAKVAIHFDYHMRRKSLISGKQGWKAYPVVLTGQLNKGQLSVELAIDVRYSSTCPCSAALARQLIQQAFLNKFDEQDSIDKQTIHEWLGTTEGVVATPHSQRSIAKVKVKLNSSVTEFPISDLVDAIEDTLQTPVQAAVKREDEQEFARLNGQNLMFCEDAARKLQHTMNQATQYDDFWVKVNHLESLHAHNAVSITTKGVEDGYQA

SEQ ID NO: 15847 - protein, 308 aa, unidentified
  source 1..308: note = Thalassotalea euphylliae
  REGION 1..308: note = tr|A0A3E0U2G6|A0A3E0U2G6_9GAMM GTP cyclohydrolase FolE2 OS=Thalassotalea euphylliae OX=1655234 GN=folE2 PE=3; SV = 1
MPTSMPDIANHTTAQTEGTLDWVGMSNIEMPLMVASKDQPERMVSAHIDAFVNLKEAQAKGIHMSRLYLLLDELSNNNTLNYQSFAALLDGFISSHQELSDQAKVAIHFDYHLRRKSLISGKQGWKAYPVVLTGQLNKGQLSVELAIDVRYSSTCPCSAALARQLIQQAFLNKFDEQDNIDKQTIHEWLGTTEGVVATPHSQRSIAKVKVKLNSSVTEFPISDLVDAIEDTLQTPVQAAVKREDEQEFARLNGQNLMFCEDAARKLQHTMNQATHYDDFWVKVNHLESLHAHNAVSITTKGVEGGYQA

SEQ ID NO: 15848 - protein, 309 aa, unidentified
  source 1..309: note = Thalassotalea sp.
  REGION 1..309: note = tr|A0A516HF48|A0A516HF48_9GAMM GTP cyclohydrolase FolE2 OS=Thalassotalea sp. PS06 OX=2594005 GN=folE2 PE=3; SV = 1
MPTSMPDIANHTKAQTEGTLDRVGMGNIEMPIMLAAKDEAERMISAHIDAFVNLKEPKAKGIHMSRLYLLLDELASNNTLNYQSLVTLLDEFISSHHDLSDTALVKFQFDYPMRREALISGKLGWRVYPVTITGKLEQGRFDIELGVDIAYSSTCPCSAALARQLIQKSFTESFADQDQVAAEDVHQWLGTTQGIVATPHSQRSIAEIKVKLNSQVNNFPITDIVDTVENALQTPVQAAVKREDEQEFARLNGQNLMFCEDAARRVQHVMNQVSGYDDYWVKINHLESLHAHDAVAVTTKGIEGGYQPE

SEQ ID NO: 15849 - protein, 212 aa, unidentified
  source 1..212: note = Thalassotalea sp.
  REGION 1..212: note = tr|A0A1Q6CFS2|A0A1Q6CFS2_9GAMM GTP cyclohydrolase 1; OS = Thalassotalea sp. PP2-459 OX=1742724 GN=folE PE=3 SV=1
MISYEAALVRDTLIARGLETPMVVTELTSEEKYTRLKGLFTEVANTIGLDLTDDSLAETPHRIAKMYIHEVFSGLNYENFPAISVIENKMAVDEMVKVTDINLTSTCEHHFVTIDGLAQVAYIPNKKIIGLSKINRIVRFFAQRPQVQERLTQQILVAIQTLTETDNVAVSINATHFCVKSRGIMDVNSKTTTTALGGIFKTNPQTRAEFLS

SEQ ID NO: 15850 - protein, 268 aa, Thauera aminoaromatica
  REGION 1..268: note = tr|A0A5C7S991|A0A5C7S991_9RHOO GTP cyclohydrolase FolE2 OS=Thauera aminoaromatica OX=164330 GN=folE2 PE=3; SV = 1
MNAPEKFFLPDVQSSADHRALAIQQVGVRGLRYPMAVRDLDGGVQHTVARLEMTVGLPAEVKGTHMSRFVELLEAERDALDLDGLRGLFADMLVRLEAESGRIEARFPWFMKKAAPVSGVESLLDIDARVVVEKTAGGEIRSTLEAVVPVTSLCPCSKKISAYGAHNQRSHITLSATLRGDLGLRELVRMAEEEASCEVFGLLKRPDEKWVTERAYDNPKFVEDLVRDIALRLRADARVASWRVQSENFESIHNHSAYALVEGENAPE

SEQ ID NO: 15851 - protein, 269 aa, Thauera aminoaromatica
  REGION 1..269: note = tr|A0A5C7SIV0|A0A5C7SIV0_9RHOO GTP cyclohydrolase FolE2 OS=Thauera aminoaromatica OX=164330 GN=folE2 PE=3; SV = 1
MNTPNAIAIPDVQSSADSRRIAIDKVGIKSIRHPIKVADKRGGVQHTVASFNMYVGLPHNFKGTHMSRFIEILNGREREISVENFEPMLRTMVERLEAETGHVEMSFPYFINKTAPVSGVQSLMDYEVCFIGSIGEGGAYEFTMKVVVPVTSLCPCSKKISAYGAHNQRSHVTVTAVLNDHLWIEEMVQMVEAQASCEVFGLLKRPDEKWVTERAYDNPKFVEDMVRDVAGQLNREPRIDAYVVESENFESIHNHSAYALIERDKRGGA

SEQ ID NO: 15852 - protein, 210 aa, Thauera aromatica
  REGION 1..210: note = tr|A0A2R4BM28|A0A2R4BM28_THAAR GTP cyclohydrolase 1; OS = Thauera aromatica K172 OX=44139 GN=folE PE=3 SV=1
MSTHEHPPPPRPRAIGIARSGEFDPAAFEQAVVDLLRACGVAADTSHTGRTAQRVRELWQHRLLGGYDLDPAEVLGDGFEDPRRDMVVVRGIAVHGVCPHHLVPFRGVAHVAYLPGGRLHGFGRIARLVDAIGHRFTYQEWMTRDIAEALMTHGKAAGAACVIEAEQLCLLLGEDRRGDERVITQAFCGEFERSPQSRAEFLRAIEHRRS

SEQ ID NO: 15853 - protein, 280 aa, Thauera aromatica
  REGION 1..280: note = tr|A0A2R4BMU7|A0A2R4BMU7_THAAR GTP cyclohydrolase FolE2 OS=Thauera aromatica K172 OX=44139 GN=folE2 PE=3 SV=1
MHDAPNPQRTDMNAPTDHAIPDVQNSADSRRIAINKVGIKSIRHPVKVADKCGGVQHTVASFNMYVGLPHNFKGTHMSRFVDILNGNEREISVESFEPMLRAMVERLEAEAGHVEMSFPYFINKTAPVSGVQSLMDYEVCFIGSIRDDGHYEFTIKVVVPVTSLCPCSKKISAYGAHNQRSHVTVTAVLNDHLWIEDLVQLVENQASCELFGLLKRPDEKWVTERAYDNPKFVEDMVRDLAASLDQETRIDAYVVESENFESIHNHSAYALIERDKRSAA

SEQ ID NO: 15854 - protein, 210 aa, Thauera chlorobenzoica
  REGION 1..210: note = tr|A0A1H5S1X6|A0A1H5S1X6_9RHOO GTP cyclohydrolase 1; OS = Thauera chlorobenzoica OX=96773 GN=folE PE=3 SV=1
MDTHEPPATPRPRTIGIARSGDFDPAAFEQAVLDLLRACGVAPDTSHTGRTAQRVRELWQHRLLGGYDLDPAEVLGDGFEDPRRDMVVVRGIAVHGVCPHHLVPFRGLAHVAYLPGGRLHGFGRIARLVDAIGHRFTYQEWMTRDIAEALMTHGKAAGAACVIEAEQLCLLLGEDRRGDERVITQAFCGEFERSPQSRAEFLRAIEHRRS

SEQ ID NO: 15855 - protein, 269 aa, Thauera chlorobenzoica
  REGION 1..269: note = tr|A0A1H5XPJ1|A0A1H5XPJ1_9RHOO GTP cyclohydrolase FolE2 OS=Thauera chlorobenzoica OX=96773 GN=folE2 PE=3 SV=1
MNAPTDHAIPDVQNSADSRRIAINKVGIKSIRHPVKVADKCGGVQHTVASFNMYVGLPHNFKGTHMSRFVDILNGNEREISVESFEPMLRAMVERLEAEAGHVEMSFPYFINKTAPVSGVQSLMDYEVCFIGSIDDDGHYEFTIKVVVPVTSLCPCSKKISAYGAHNQRSHVTVTAVLNDHLWIEDLVQLVENQASCELFGLLKRPDEKWVTERAYDNPKFVEDMVRDLAASLDQEARIDAYVVESENFESIHNHSAYALIERDKRSAA

SEQ ID NO: 15856 - protein, 212 aa, unidentified
  source 1..212: note = Thauera humireducens
  REGION 1..212: note = tr|A0A127K4B1|A0A127K4B1_9RHOO GTP cyclohydrolase 1; OS = Thauera humireducens OX=1134435 GN=folE PE=3 SV=1
MSRHDHDEHDHPAPPRPRSVGIARTGDFDAPAFERAIGDLLRACGIDAATSHTSRTAQRVRELWQKRLLGGYDLDPAEVLGDGFEDERRDMVVVRGIAVHGVCPHHLVPFRGVAHVAYLPGGRLHGFGRIARLVDAIGHRFTYQEWMTRDIADALMQHGKAAGAACVIEAEQLCLLLGEDRRGDERVVTQAFSGEFERSAQARNEFLRAISG

SEQ ID NO: 15857 - protein, 268 aa, unidentified
  source 1..268: note = Thauera humireducens
  REGION 1..268: note = tr|A0A140IDP6|A0A140IDP6_9RHOO GTP cyclohydrolase FolE2 OS=Thauera humireducens OX=1134435 GN=folE2 PE=3 SV=1
MNTPTDAPMPDVQSSADTRQIAINKVGIKSIRHPVKVSDKTGGVQHTVASFNMYVGLPHNFKGTHMSRFVEILNSNERDISVESFEPMLRAMVERLEAETGHVEMSFPYFINKAAPVSGVNSLLDYDVTFIGEIREGDRYEFTMKIVVPVTSLCPCSKKISDYGAHNQRSHITVTAVLNDHLWIEDMVQLVESQASCEVFGLLKRPDEKWVTERAYDNPKFVEDLVRDVAGLLNAEPRIDAYVVESENFESIHNHSAYALIECDKRRP

SEQ ID NO: 15858 - protein, 268 aa, Thauera linaloolentis
  REGION 1..268: note = tr|N6YEZ4|N6YEZ4_9RHOO GTP cyclohydrolase FolE2; OS = Thauera linaloolentis 47Lol = DSM 12138 OX=1123367; GN = folE2 PE=3 SV=1
MNTPIDAFMPDVQSSADTRQIAINKVGIKSIRHPVKVSDKAGGIQHTVASFNMYVGLPHNFKGTHMSRFIEILNSNERDISVESFEPMLRMMVERLEAETGHVEMSFPYFINKAAPVSCVNSLLDYEVSFVGEIREGGRYEFTMKIVVPVTSLCPCSKKISDYGAHNQRSHITVTAVLNDHLWIEDMVQLVESQASCEIFGLLKRPDEKWVTERAYDNPKFVEDLVRDVASLLNAEARVDAYVVESENFESIHNHSAYALIECDKRSG

SEQ ID NO: 15859 - protein, 210 aa, Thauera linaloolentis
  REGION 1..210: note = tr|N6YG90|N6YG90_9RHOO GTP cyclohydrolase 1; OS = Thauera linaloolentis 47Lol = DSM 12138 OX=1123367; GN = folE PE=3 SV=1
MPRHDHDTHPAQPQPSTIGIARTGSFDAPAFERAIGDLLRASGIDADSSHTGRTAQRVRELWQKRLLGGYDLDPAEVLGDGFADERRDMVVVRGIAVHGVCPHHLVPFRGVAHVAYIPGGRLHGFGRIARLVDAIGHRFTYQEWMTRDIADALMQHGKAAGAACVIEAEQLCLLLGEDRRGDERVVTQAFSGEFERSAQARNEFMRAISG

SEQ ID NO: 15860 - protein, 268 aa, Thauera phenylacetica
  REGION 1..268: note = tr|N6YM79|N6YM79_9RHOO GTP cyclohydrolase FolE2; OS = Thauera phenylacetica B4P OX=1234382 GN=folE2 PE=3 SV=1
MNAPEKFFLPDVQSSADHRALAIQHVGVRGLRYPMAVRDLDGGVQHTVATLEMTVGLPADVKGTHMSRFVELLEAERDALDLDGLRGLFADMLLRLEASSGRIEARFPWFMKKAAPVSGVESLLDIDARVVVEKAERGEIRSTLEAVVPVTSLCPCSKKISAYGAHNQRSHITLSATLRGDLGLRELVRMAEEEASCEVFGLLKRPDEKWVTERAYDNPKFVEDLVRDIALRLRADGRVASWRVQSENFESIHNHSAYALIEGENAPE

SEQ ID NO: 15861 - protein, 231 aa, Thauera phenylacetica
  REGION 1..231: note = tr|N6YXR5|N6YXR5_9RHOO GTP cyclohydrolase 1; OS = Thauera phenylacetica B4P OX=1234382 GN=folE PE=3 SV=1
MPVRVPQGTAPDDAMSPPAHDPCGHDHPHAPRPGAVGIPRSGAFDASAFEKAVGDLLRACGIAPDNAHTGRTAQRVRELWQRRLLGGYELDPAEVLGDGFEDARRDMVVIRGIAVHGVCPHHLVPFRGVAHVAYLPGGRLHGFGRIARLVDAIGHRFTYQEWMTRDIADALMRHGHAAGAACVIEAEQLCLLLGEDRRGDERVITQAFAGEFERSEQARNEFLRAIEERRR

SEQ ID NO: 15862 - protein, 209 aa, unidentified
  source 1..209: note = Thauera propionica
  REGION 1..209: note = tr|A0A235F017|A0A235F017_9RHOO GTP cyclohydrolase 1; OS = Thauera propionica OX=2019431 GN=folE PE=3 SV=1
MSRHDHDHSALPHPRSVGIARTGSFDAPAFERAIGDLLRACGVDADTSHTGRTAQRVRELWQKRLLGGYDLDPAEVLGDGFEDERRDMVVVRGIAVHGVCPHHLVPFRGVAHVAYLPGGRLHGFGRIARLVDAIGHRFTYQEWMTRDIADALMQHGKAAGAACIIEAEQLCLLLGEDRRGDERVVTQAFSGEFERSAQARNEFLRAISG

SEQ ID NO: 15863 - protein, 268 aa, unidentified
  source 1..268: note = Thauera propionica
  REGION 1..268: note = tr|A0A235EVW4|A0A235EVW4_9RHOO GTP cyclohydrolase FolE2 OS=Thauera propionica OX=2019431 GN=folE2 PE=3 SV=1
MNSPTDAPMPDVQSSADTRQIAINKVGIKSIRHPVKVSDKTGGVQHTVASFNMYVGLPHNFKGTHMSRFVEILNANERDISVESFEPMLRAMVERLEAETGHVEMSFPYFINKAAPVSGVNSLLDYDVTFIGEIRDGGRYEFTMRIVVPVTSLCPCSKKISDYGAHNQRSHITVTATLNDHLWIEDMVQLVESQASCEVFGLLKRPDEKWVTERAYDNPKFVEDLVRDVAGLLNAEPRIDAYIVESENFESIHNHSAYALIKCDKRRH

SEQ ID NO: 15864 - protein, 269 aa, Thauera sp.
  REGION 1..269: note = tr|A0A290ZMS9|A0A290ZMS9_9RHOO GTP cyclohydrolase FolE2 OS=Thauera sp. K11 OX=2005884 GN=folE2 PE=3 SV=1
MNAPLANAMPDVQNSADSRQIAINKVGIKSIRHPVKVVDKSGGVQHTVASFNMYVGLPHNFKGTHMSRFIEILNGNEREISVESFEPMLREMVERLEAETGHIEMTFPYFIGKAAPVSGVKSLMDYEVTFTGEIRAGGGYEFTMKVVVPVTSLCPCSKKISDYGAHNQRSHVTVTAVLNDHLWIEEAVQLVESQASCEVYGLLKRPDEKYVTERAYDNPKFVEDMVRDVAGLLNKEDRIDAYVVESENFESIHNHSAYALITRDKRIEA

SEQ ID NO: 15865 - protein, 212 aa, Thauera sp.
  REGION 1..212: note = tr|A0A290ZM02|A0A290ZM02_9RHOO GTP cyclohydrolase 1; OS = Thauera sp. K11 OX=2005884 GN=folE PE=3 SV=1
MKEGQTDDAGDADLRGGVSREAAEDAVRTLIRWAGDEPGREGLVDTPSRVVRAYEEFFAGYSQDPAEILARTFSEVEGYDEMIVMNDIRFESHCEHHMAPIIGKAHIGYLPNHRVVGISKLARLVEIYAKRLQIQEKMTVQIADTLHSVLQPKGVAVVIEASHQCMTTRGVHKPGAGLVTSRMVGAFREDASTRREFLAMIGMGGPRGLPNT

SEQ ID NO: 15866 - protein, 238 aa, Thauera terpenica
  REGION 1..238: note = tr|S9ZTW8|S9ZTW8_9RHOO GTP cyclohydrolase 1; OS = Thauera terpenica 58Eu OX=1348657 GN=folE PE=3 SV=1
MKANAGMAADDRPNEKSVRHSASPPVSNSDHDSEHDHPVQARPRTVGIARSAQFDAPAFERAITDLLGACGIKTDSAHTGRTAQRVRELWQKRLLGGYDLDPAEVLGEGFADERRDMVVVRGIAVHGVCPHHLVPFRGVAHVAYIPGGRLHGFGRIARLVDAIGHRFTYQEWMTRDIADALMAHGKAAGAACVVEAEQLCLLLGEDRRGDERVVTQAFSGEFERSAQARNEFLHAISG

SEQ ID NO: 15867 - protein, 268 aa, Thauera terpenica
  REGION 1..268: note = tr|S9ZDD9|S9ZDD9_9RHOO GTP cyclohydrolase FolE2; OS = Thauera terpenica 58Eu OX=1348657 GN=folE2 PE=3 SV=1
MNAPDKFFLPDVQASADHRALPIQRVGVRGLRYPLAIAAAGGTVQHTVATIEMTVGLAADQKGTHMSRFVELLEAQHEALDLAGVRGLFADMLQRLEASSGRIEARFPWFVRKQAPVSGVASLLDMDATVIVEQTEGGSVHTRLQVVVPVTSLCPCSKKISAYGAHNQRSHITLDVRLRADMELDELLRIAEEEASCEVFGLLKRADEKWVTERAYDNPKFVEDLVRDIALRLGAEPRVAAWSVASENFESIHNHSAYAFIEGENLAQ

SEQ ID NO: 15868 - protein, 187 aa, Thermacetogenium phaeum
  REGION 1..187: note = tr|A0A101FHT5|A0A101FHT5_9THEO GTP cyclohydrolase 1; OS = Thermacetogenium phaeum OX=85874 GN=folE PE=3 SV=1
MDREKILQGVRLILEGIGEDPEREGLRGTPDRVARMYEEIFCGLHHDPKKELNVIFSENHNEMVLVKDIPMYSTCEHHFMPFYGKAHVAYIPRQGRITGLSKLARVVECLSKRPQLQERLTSQIADTIMEALNPLGVIVVIEAEHMCMTMRGVKKAGSKTLTSAVRGIFQTNEATRAEAFALIRGGN

SEQ ID NO: 15869 - protein, 187 aa, Thermacetogenium phaeum; identical to SEQ ID NO: 15868
  REGION 1..187: note = tr|K4LF94|K4LF94_THEPS GTP cyclohydrolase 1; OS = Thermacetogenium phaeum (strain ATCC BAA-254 / DSM 12270 / PB) OX=1089553 GN=folE PE=3 SV=1

SEQ ID NO: 15870 - protein, 196 aa, Thermaerobacter marianensis
  REGION 1..196: note = tr|E6SML5|E6SML5_THEM7 GTP cyclohydrolase 1; OS = Thermaerobacter marianensis (strain ATCC 700841 / DSM 12885 / JCM 10246 / 7p75a) OX=644966 GN=folE PE=3 SV=1
MPRRAEEFDLERIQRAVLDILEAVGEDPTREGLVDTPRRVAEAYQELFSGLGRDPADELSVFFSTDHDEVVLVKDIPFYSICEHHLLPFHGRAHVAYLPRNGRITGLSKLARAVEVASRRPQLQERLTVQIADAIEQRLNPRGVVVVIEAEHLCMTMRGIQKPGSYAVTSAVRGLFRENVASRHEVFALIRSDLRP

SEQ ID NO: 15871 - protein, 196 aa, Thermaerobacter sp.
  REGION 1..196: note = tr|A0A4P7GV26|A0A4P7GV26_9FIRM GTP cyclohydrolase 1; OS = Thermaerobacter sp. FW80 OX=2546351 GN=folE PE=3 SV=1
MPRRAEEFDLQRIQRAVLEILEAVGEDPTREGLVDTPRRVAEAYQELFSGLGRDPADELTVFFETDHDEVVLVKDIPFYSMCEHHLLPFHGRAHVAYLPRNGRITGLSKLARAVEVASRRPQLQERLTCQIADAIEARLNPRGVVVVIEAEHLCMTMRGIQKPGSYAVTSAVRGLFRENVASRHEVFALIRSDLRP

SEQ ID NO: 15872 - protein, 196 aa, Thermaerobacter sp.
  REGION 1..196: note = tr|A0A371Z8N1|A0A371Z8N1_9FIRM GTP cyclohydrolase 1; OS = Thermaerobacter sp. PB12/4term OX=2293838 GN=folE PE=3; SV = 1
MPRRAEEFDLERIQRAVLEILEAVGEDPRREGLVDTPRRVAEAYQELFSGLGRDPADELSVFFETDHDEVVLVKDIPFYSMCEHHLLPFHGRAHVAYLPRNGRITGLSKLARAVEVASRRPQLQERLTVQIADAIEERLNPRGVVVVIEAEHLCMTMRGIQKPGSYAVTSAVRGLFRENVASRHEVFALIRSDLRP

SEQ ID NO: 15873 - protein, 196 aa, Thermaerobacter subterraneus
  REGION 1..196: note = tr|K6PRZ0|K6PRZ0_9FIRM GTP cyclohydrolase 1; OS = Thermaerobacter subterraneus DSM 13965 OX=867903; GN = folE PE=3 SV=1
MPRRAEEFDLDRIKRAVLDILEAVGEDPRREGLVDTPRRVAEAYQELFSGLGRDPADELSVFFETDHDEVVLVKDIPFYSMCEHHLLPFHGRAHVAYLPRNGRITGLSKLARAVEVASRRPQLQERLTVQIADAIEERLNPRGVVVVIEAEHLCMTMRGIQKPGSYAVTSAVRGLFRENVASRQEVFALIRSDLRP

SEQ ID NO: 15874 - protein, 192 aa, Thermanaeromonas toyohensis
  REGION 1..192: note = tr|A0A1W1W0U5|A0A1W1W0U5_9THEO GTP cyclohydrolase 1; OS = Thermanaeromonas toyohensis ToBE OX=698762 GN=folE PE=3; SV = 1
MMFEVDKIERAVRMILEAIGENPDREGLRDTPRRVAKMYQEIFAGLLQDPAAVFTVHYTEEHEELVIVKDIPFYSMCEHHLLPFFGKVHLGYIPRKGRVVGLSKLVRGIEVFTKRPQLQERLTKQIADAIMQYVRALGVIVVIEAEHMCMTMRGVKKPGSLTVTSAVRGVLHDDEALRSEALALIKGWRTAV

SEQ ID NO: 15875 - protein, 180 aa, unidentified
  source 1..180: note = Thermanaerothrix daxensis
  REGION 1..180: note = tr|A0A0P6YPF6|A0A0P6YPF6_9CHLR GTP cyclohydrolase 1; OS = Thermanaerothrix daxensis OX=869279 GN=folE PE=3 SV=1
MLIAFGENPERQGLIRTPERVASMYEELLAGYRVDPVELINEAIFDVNYDEMVVVRDIEFYSLCEHHMLPFIGRAHVAYIPRGKVIGLSKIPRVVDMFARRLQVQERMTRQIADFLNEVLHPLGVAVVVEAIHMCAMIRGVKKHNSRMTTSTMLGAFRTSMATRMEFLDNISRSAEPLHI

SEQ ID NO: 15876 - protein, 256 aa, Thermanaerovibrio acidaminovorans
  REGION 1..256: note = tr|D1B659|D1B659_THEAS GTP cyclohydrolase FolE2; OS = Thermanaerovibrio acidaminovorans (strain ATCC 49978 / DSM 6589 / Su883) OX=525903 GN=folE2 PE=3 SV=1
MRDLQSERDLRGIGLNRVGVRGIKRPMEVLSMEGPALHTVGRFCAFTDLPPDVRGSHMSRIAQLVLQWDGRVPCPSSARELLSSLSSSLGASASEAEVRFPFFVPKASPVTRIPCPLEVRCRVLASLRGEDLSFRLAVKVPVKTLCPCSREISSFGAHNQRAHVTIEVGSRRMIWIEELVAVAEENASSPVYPVLKRQDERFVTEGAYMRPRFVEDLARDCAARLLEDPRVESLRVRVVSHESIHDHDAVAEVIRP

SEQ ID NO: 15877 - protein, 259 aa, Thermanaerovibrio velox
  REGION 1..259: note = tr|H0UQ27|H0UQ27_9BACT GTP cyclohydrolase FolE2; OS = Thermanaerovibrio velox DSM 12556 OX=926567 GN=folE2; PE = 3 SV=1
MRDLQSEADPRGVPIERVGIRGLTRPMMVMSKDGSPVPSVGTFSVFTDLPMNLRGTHMSRLAELASSWEGRVPCPRSAEEFLRSLIEALDARRGGMKVKFPYFVPKRSPVTDLPGVLQVQASVKAELDVEDPAGGLRFFLSVTTPVLTLCPCSKEISRFGAHNQRASVRIRVRSMDMIWIEELVEMAERNASSPLYPILKRRDERFVTESSYERPRFVEDLARDCALELKKHPAVRGFSVKVTSFESIHRHDAVAEVIG

SEQ ID NO: 15878 - protein, 228 aa, Thermasporomyces composti
  REGION 1..228: note = tr|A0A3D9V6S6|A0A3D9V6S6_9ACTN GTP cyclohydrolase 1; OS = Thermasporomyces composti OX=696763 GN=folE PE=3 SV=1
MSCDGDTHREGQVSNGSVHVDDVDEALTSGSADLFEATQARPYDSERVERAIRELLYAIGEDPDRPGLKDTPARVARAYAEMFAGLRMSPEAVLSTTFDLGHDEMVLVKDIEVWSVCEHHLVPFTGAAHIGYIPNTEGQITGLSKLARLVDVFAKRPQVQERLTTQIADALVRILKPRGVIVVVECEHLCMTMRGVRKPGAKTVTSAVRGQLRDPATRAEAMSLIIGA

SEQ ID NO: 15879 - protein, 188 aa, Thermincola ferriacetica
  REGION 1..188: note = tr|A0A0L6W565|A0A0L6W565_9FIRM GTP cyclohydrolase 1; OS = Thermincola ferriacetica OX=281456 GN=folE PE=3 SV=1
MFDQQKLEQAVKMILEAIGEDPTREGLVDTPKRVARMYQEIFSGLEEDPKDHLKVLFTEDHEEMVLVKDIPFYSMCEHHLLPFFGRAHVAYIPRRGKITGLSKLARAVETIAKRPQLQERLTCGIAEAIMESLNPLGVLVVVEAEHMCMTMRGVKKPGSMTVTSAVRGLFKTQEATRAEAFALIRSQK

SEQ ID NO: 15880 - protein, 188 aa, unidentified; identical to SEQ ID NO: 15879
  source 1..188: note = Thermincola potens
  REGION 1..188: note = tr|D5X860|D5X860_THEPJ GTP cyclohydrolase 1; OS = Thermincola potens (strain JR) OX=635013 GN=folE PE=3; SV = 1

SEQ ID NO: 15881 - protein, 187 aa, Thermoactinomyces sp.
  REGION 1..187: note = tr|A0A151Z1J6|A0A151Z1J6_9BACL GTP cyclohydrolase 1; OS = Thermoactinomyces sp. AS95 OX=1811386 GN=folE PE=3 SV=1
MVDHRKIEEAVRMILEAVGEDPNREGLLDTPKRVARMYEEIFSGLNKDPKDQFSVVFSEDHEELVLVKDIPFFSTCEHHLVPFFGKAHIGYIPRGGRVTGLSKLARAVETVARRPQLQERITSTVADSIVESLDPYGVIVVIEAEHMCMTMRGVKKPGSKTVTSAVRGVFAEDSAARAEAMSLIGLK

SEQ ID NO: 15882 - protein, 192 aa, Thermoactinomyces sp.
  REGION 1..192: note = tr|A0A1K1TK94|A0A1K1TK94_9BACL GTP cyclohydrolase 1; OS = Thermoactinomyces sp. DSM 45891 OX=1761907 GN=folE PE=3; SV = 1
MKQVDHDKIEQAVRMILEAVGEDPQREGLLDTPARVARMYAEVFQGLDQNPKDHFSVVFGEDHEEVVLVKDIPFFSTCEHHLVPFFGHAHIAYIPRGGRVTGLSKLARAVDSVTKRPQLQERITSTIADSMMETLDPHGVFVVLEAEHMCMTMRGVKKPGSKTVTSVARGIYAEDTGKRDEVFKMIRMGSLT

SEQ ID NO: 15883 - protein, 187 aa, Thermoactinomyces vulgaris; identical to SEQ ID NO: 9562
  REGION 1..187: note = tr|A0A0N1K0N4|A0A0N1K0N4_THEVU GTP cyclohydrolase 1; OS = Thermoactinomyces vulgaris OX=2026 GN=folE PE=3 SV=1

SEQ ID NO: 15884 - protein, 188 aa, Thermoanaerobacter brockii
  REGION 1..188: note = tr|E8UUK8|E8UUK8_THEBF GTP cyclohydrolase 1; OS = Thermoanaerobacter brockii subsp. finnii (strain ATCC 43586 / DSM 3389 / AKO-1) OX=509193 GN=folE PE=3 SV=1
MIDKEKIKKAVRDILEAIGEDPDREGLLETPDRVARMYEEIFAGLHTDVKDVIKIFQEDEHQEIILVKDIPLYSMCEHHLLPFIGVAHVAYLPRKGRILGLSKLARIVDILAKRPQLQERLTSEIADTIMEAVNPLGVAVVIEAEHLCMTMRGIKKPGAKTVTSALRGIFRTDEKSRAEVMSLINSKK

SEQ ID NO: 15885 - protein, 188 aa, Thermoanaerobacter ethanolicus; identical to SEQ ID NO: 15884
  REGION 1..188: note = tr|C7ISL8|C7ISL8_THEET GTP cyclohydrolase 1; OS = Thermoanaerobacter ethanolicus CCSD1 OX=589861 GN=folE; PE = 3 SV=1

SEQ ID NO: 15886 - protein, 188 aa, Thermoanaerobacter italicus
  REGION 1..188: note = tr|D3T4X9|D3T4X9_THEIA GTP cyclohydrolase 1; OS = Thermoanaerobacter italicus (strain DSM 9252 / Ab9); OX = 580331 GN=folE PE=3 SV=1
MIDKEKIKKAVRDILEAIGENPDREGLLETPDRVARMYEEIFAGLHTNVKDVIKIFQEDEHQEIILVKDIPLYSMCEHHLLPFIGVAHVAYLPRKGRILGLSKLARIVDILAKRPQLQERLTSEIADTIMEAVNPLGVAVVIEAEHLCMTMRGVKKPGSKTVTSALRGIFRTDQKSRAEVMSLINSKK

SEQ ID NO: 15887 - protein, 188 aa, Thermoanaerobacter kivui
  REGION 1..188: note = tr|A0A097ATW6|A0A097ATW6_THEKI GTP cyclohydrolase 1; OS = Thermoanaerobacter kivui OX=2325 GN=folE PE=3 SV=1
MIDKEKIKKAVRDILEAIGENPDREGLLETPDRVARMYEEIFAGLHTDVKDVIKFFQEDEHQEIILVKDISLYSMCEHHLLPFIGVAHVAYLPRKGRILGLSKLARIVDILAKRPQLQERLTSEIADTIMEAVNPLGVAVVIEAEHLCMTMRGIKKPGAKTVTSALRGVFRTDQKSRAEVMSLINSKR

SEQ ID NO: 15888 - protein, 188 aa, Thermoanaerobacter mathranii; identical to SEQ ID NO: 15886
  REGION 1..188: note = tr|D7ASB3|D7ASB3_THEM3 GTP cyclohydrolase 1; OS = Thermoanaerobacter mathranii subsp. mathranii (strain DSM 11426 / CIP 108742 / A3) OX=583358 GN=folE PE=3 SV=1

SEQ ID NO: 15889 - protein, 188 aa, Thermoanaerobacter pseudethanolicus; identical to SEQ ID NO: 15884
  REGION 1..188: note = sp|B0KCE5|GCH1_THEP3 GTP cyclohydrolase 1; OS = Thermoanaerobacter pseudethanolicus (strain ATCC 33223 / 39E) OX=340099 GN=folE PE=3 SV=1

SEQ ID NO: 15890 - protein, 188 aa, Thermoanaerobacter siderophilus
  REGION 1..188: note = tr|I9ACT0|I9ACT0_9THEO GTP cyclohydrolase 1; OS = Thermoanaerobacter siderophilus SR4 OX=880478 GN=folE; PE = 3 SV=1
MIDKEKIKKAVRDILEAIGEDPDREGLLETPDRVARMYEEIFAGLHTDVKDVIKIFQEDEHQEIILVKDIPLYSMCEHHLLPFIGAAHVAYLPRKGKILGLSKLARIVDILAKRPQLQERLTSEIADTIMEAVNPLGVAVVIEAEHLCMTMRGIKKPGAKTVTSALRGIFRTDEKSRAEVMSLINSKR

SEQ ID NO: 15891 - protein, 188 aa, Thermoanaerobacter sp.; identical to SEQ ID NO: 15884
  REGION 1..188: note = sp|B0K5C1|GCH1_THEPX GTP cyclohydrolase 1; OS = Thermoanaerobacter sp. (strain X514) OX=399726 GN=folE; PE = 3 SV=1

SEQ ID NO: 15892 - protein, 188 aa, Thermoanaerobacter sp.; identical to SEQ ID NO: 15884
  REGION 1..188: note = tr|A0A358W0I2|A0A358W0I2_THESB GTP cyclohydrolase 1; OS = Thermoanaerobacter sp. OX=1755 GN=folE PE=3 SV=1

SEQ ID NO: 15893 - protein, 188 aa, Thermoanaerobacter thermocopriae; identical to SEQ ID NO: 15884
  REGION 1..188: note = tr|A0A101D6F2|A0A101D6F2_9THEO GTP cyclohydrolase 1; OS = Thermoanaerobacter thermocopriae OX=29350 GN=folE PE=3; SV = 1

SEQ ID NO: 15894 - protein, 188 aa, Thermoanaerobacter thermohydrosulfuricus
  REGION 1..188: note = tr|A0A1I1XRC5|A0A1I1XRC5_THETY GTP cyclohydrolase 1; OS = Thermoanaerobacter thermohydrosulfuricus OX=1516; GN = folE PE=3 SV=1
MIDKEKIKKAVRDILEAIGEDPDREGLLETPDRVARMYEEIFAGLHTDVKDVIKIFQEDEHQEIILVKDIPLYSMCEHHLLPFIGVAHVAYLPRKGKILGLSKLARIVDILAKRPQLQERLTSEIADTIMEAVNPLGVAVVIEAEHLCMTMRGIKKPGAKTVTSALRGIFRTDEKSRAEVMSLINSKK

SEQ ID NO: 15895 - protein, 188 aa, Thermoanaerobacter thermohydrosulfuricus; identical to SEQ ID NO: 15894
  REGION 1..188: note = tr|M8DQY0|M8DQY0_THETY GTP cyclohydrolase 1; OS = Thermoanaerobacter thermohydrosulfuricus WC1 OX=1198630; GN = folE PE=3 SV=1

SEQ ID NO: 15896 - protein, 188 aa, Thermoanaerobacter uzonensis
  REGION 1..188: note = tr|A0A1M4YSM7|A0A1M4YSM7_9THEO GTP cyclohydrolase 1; OS = Thermoanaerobacter uzonensis DSM 18761 OX=1123369; GN = folE PE=3 SV=1
MIDKEKIKKAVRDILEAIGEDPDREGLLETPDRVARMYEEIFAGLHTDVKDVIKIFQEDEHQEIILVKDIPLYSMCEHHLLPFIGVAHVAYLPRKGRILGLSKLARIVDILAKRPQLQERLTSEIADTIMEAVNPLGVAVVIEAEHLCMTMRGIKKPGAKTVTSALRGIFRTDEKSRAEVMSLINSKR

SEQ ID NO: 15897 - protein, 188 aa, Thermoanaerobacter wiegelii
  REGION 1..188: note = tr|G2MX34|G2MX34_9THEO GTP cyclohydrolase 1; OS = Thermoanaerobacter wiegelii Rt8.B1 OX=697303 GN=folE; PE = 3 SV=1
MIDKEKIKKAVRDILEAIGEDPDREGLLETPDRVARMYEEIFAGLHTDVKDVIKIFQEDEHQEIILVKDIPLYSMCEHHLLPFIGVAHVAYLPRKGKILGLSKLARIVDILAKRPQLQERLTSEIADTIMEAVNPLGVAVVIEAEHLCMTMRGIKKPGAKTVTSALRGIFRTDEKSRAEVMSLINSKR

SEQ ID NO: 15898 - protein, 194 aa, unidentified; identical to SEQ ID NO: 12545
  source 1..194: note = Thermoanaerobacterales bacterium
  REGION 1..194: note = tr|A0A117L8L1|A0A117L8L1_9FIRM GTP cyclohydrolase 1; OS = Thermoanaerobacterales bacterium 50_218 OX=1635288; GN = folE PE=3 SV=1

SEQ ID NO: 15899 - protein, 188 aa, Thermoanaerobacterium aotearoense
  REGION 1..188: note = tr|W9E9S8|W9E9S8_9FIRM GTP cyclohydrolase 1; OS = Thermoanaerobacterium aotearoense SCUT27 OX=1421016; GN = folE PE=3 SV=1
MIDKEKIKKAVYDILEAIGEDPKREGLLETPDRVARMYEEIFSGLHENVMDVIKTFKEDEHQEIVIVKDIPMYSMCEHHLLPFMGVAHVAYLPRKGTILGLSKLARIVDILAKKPQLQERLTSEIADTIVKAANPLGVAVVVEAEHLCMTMRGIKKPGAKTVTSALRGLFKTDQRAREEVMLLINGKR

SEQ ID NO: 15900 - protein, 188 aa, Thermoanaerobacterium saccharolyticum; identical to SEQ ID NO: 15899
  REGION 1..188: note = tr|I3VTX8|I3VTX8_THESW GTP cyclohydrolase 1; OS = Thermoanaerobacterium saccharolyticum (strain DSM 8691 / JW/SL-YS485) OX=1094508 GN=folE PE=3 SV=1

SEQ ID NO: 15901 - protein, 188 aa, Thermoanaerobacterium sp.
  REGION 1..188: note = tr|A0A1X2FXY4|A0A1X2FXY4_9FIRM GTP cyclohydrolase 1; OS = Thermoanaerobacterium sp. PSU-2 OX=1930849 GN=folE PE=3; SV = 1
MIDKEKIKKAVYDILEAIGEDPKREGLLETPDRVARMYEEIFSGLHENVMDVIKTFKEDEHQEIVIVKDIPMYSMCEHHLLPFMGVAHVAYLPRKGTILGLSKLARIVDILAKKPQLQERLTSEIADTIVKAANPLGVAVVVEAEHLCMTMRGIKKPGAKTVTSALRGLFKTDQRSREEVMLLINGKR

SEQ ID NO: 15902 - protein, 187 aa, Thermoanaerobacterium sp.
  REGION 1..187: note = tr|A0A285BGH8|A0A285BGH8_9FIRM GTP cyclohydrolase 1; OS = Thermoanaerobacterium sp. RBIITD OX=1550240 GN=folE; PE = 3 SV=1
MIDKEKIKKAVRNIIEAIGEDPDREGLKETPDRVARMYEEIFSGLHTNVMDVIKTFKEDEHQEIVLVKDIPMYSMCEHHLLPFMGVAHVAYLPRKGTILGLSKLARIVDILAKKPQLQERLTSEIADTIMEAVNPLGVVVVVEAEHLCMTMRGIKKPGAKTVTSALRGIFKTDQRSREEVMLLINAK

SEQ ID NO: 15903 - protein, 187 aa, Thermoanaerobacterium thermosaccharolyticum
  REGION 1..187: note = tr|D9TRD0|D9TRD0_THETC GTP cyclohydrolase 1; OS = Thermoanaerobacterium thermosaccharolyticum (strain ATCC 7956 / DSM 571 / NCIB 9385 / NCA 3814) OX=580327; GN = folE PE=3SV=1
MIDKEKIKKAVYDILEAIGEDPNREGLLETPDRVARMYEEIFSGLHTDVMDVIKTFKEDEHQEIVIVKDIPMYSMCEHHLLPFMGVAHVAYLPRKGTILGLSKLARIVDVLAKKPQLQERLTSEIADTIVKAANPLGVAVVVEAEHLCMTMRGIKKPGAKTVTSALRGLFKTDQRSREEVMLLINGK

SEQ ID NO: 15904 - protein, 187 aa, Thermoanaerobacterium thermosaccharolyticum
  REGION 1..187: note = tr|A0A231VJB3|A0A231VJB3_THETR GTP cyclohydrolase 1; OS = Thermoanaerobacterium thermosaccharolyticum OX=1517; GN = folE PE=3 SV=1
MIDKEKIKRAVYDILEAIGEDPNREGLLETPDRVARMYEEIFSGLHTDVMDVIKTFKEDEHQEIVIVKDIPMYSMCEHHLLPFMGVAHVAYLPRKGTILGLSKLARIVDVLAKKPQLQERLTSEIADTIVKAANPLGVAVVVEAEHLCMTMRGIKKPGAKTVTSALRGLFKTDQRSREEVMLLINGK

SEQ ID NO: 15905 - protein, 188 aa, Thermoanaerobacterium xylanolyticum
  REGION 1..188: note = tr|F6BGB7|F6BGB7_THEXL GTP cyclohydrolase 1; OS = Thermoanaerobacterium xylanolyticum (strain ATCC 49914 / DSM 7097 / LX-11) OX=858215 GN=folE PE=3 SV=1
MIDKEKIKKAVYDILEAIGEDPKREGLLETPDRVARMYEEIFSGLHENVMDVIKTFKEDEHQEIVIVKDIPMYSMCEHHLLPFIGVAHVAYLPRKGTILGLSKLARIVDILAKKPQLQERLTSEIADTIVKAANPLGVAVVVEAEHLCMTMRGIKKPGAKTVTSALRGLFKTDQRSREEVMLLINGKR

SEQ ID NO: 15906 - protein, 206 aa, unidentified; identical to SEQ ID NO: 5246
  source 1..206: note = Thermoanaerobaculum aquaticum
  REGION 1..206: note = tr|A0A062XMS5|A0A062XMS5_9BACT GTP cyclohydrolase 1; OS = Thermoanaerobaculum aquaticum OX=1312852 GN=folE PE=3; SV = 1

SEQ ID NO: 15907 - protein, 197 aa, Thermobacillus composti
  REGION 1..197: note = tr|L0EFQ2|L0EFQ2_THECK GTP cyclohydrolase 1; OS = Thermobacillus composti (strain DSM 18247 / JCM 13945 / KWC4) OX=717605 GN=folE PE=3 SV=1
MAGVKDYANRHVAENRAELERLVREMLRMIGEDPDREGLLDTPARVVRMFEEIYAGYSVDPGDVLGVTFDEQHEELVIVKDIVYYSQCEHHLAPFFGKVHIGYLPSGKIVGLSKLARLVEAVTRKLQVQERITSQIADILEERLHPHGVMVVVEGEHLCMCARGVKKPGSKTVTSAIRGEFRESAALRDEFLQLIRM

SEQ ID NO: 15908 - protein, 197 aa, Thermobacillus sp.
  REGION 1..197: note = tr|A0A1Y3Q6S8|A0A1Y3Q6S8_9BACL GTP cyclohydrolase 1; OS = Thermobacillus sp. ZCTH02-B1 OX=1858795 GN=folE PE=3; SV = 1
MAGVKEYANRHVQENRAELERIVREMLRLIGEDPDREGLLETPARVVRMFEEIFAGYSVDPGDVLGVTFDEQHEELVIVKDIVYYSQCEHHLAPFFGKVHIGYLPSGKIVGLSKLARLVDAVTRRLQVQERITSQIADILEERLHPHGVMVVVEGEHLCMCARGVKKPGSKTVTSAIRGEFRESAALRDEFLRLIRM

SEQ ID NO: 15909 - protein, 197 aa, Thermobacillus sp.
  REGION 1..197: note = tr|A0A3E0R115|A0A3E0R115_9BACL GTP cyclohydrolase 1; OS = Thermobacillus sp. OX=2108467 GN=folE PE=3 SV=1
MAGVKDYANRHVAENRAELERLVREMLRMIGEDPDREGLLDTPARVVRMFEEIYAGYSVDPGDVLGVTFDEQHEELVIVKDIVYYSQCEHHLAPFFGKVHIGYLPSGKIVGLSKLARLVEAVTRKLQVQERITSQIADILEERLHPHGVMVVVEGEHLCMCARGVKKPGSKTVTSAIRGEFRENAALRTEFLELLKV

SEQ ID NO: 15910 - protein, 207 aa, Thermobifida cellulosilytica
  REGION 1..207: note = tr|A0A147KI06|A0A147KI06_9ACTN GTP cyclohydrolase 1; OS = Thermobifida cellulosilytica TB100 OX=665004 GN=folE; PE = 3 SV=1
MTEYEYRAGEIDAGLEPAGIDQPRIEKAVREILLAIGEDPDRDGLVDTPARVARAFAEQYAGLHQRPEDVLTTVFEANHEEMVLVKDIELYSTCEHHLVPFYGVAHVGYIPNTDGRITGLSKLARLVDVYARRPQVQERLTSQVADALMEHLEPRGVIVVVEAEHLCMTMRGVRKPGAKTVTSAVRGSFRESDKTRAEAMGLIMGHR

SEQ ID NO: 15911 - protein, 207 aa, Thermobifida fusca
  REGION 1..207: note = sp|Q47KU5|GCH1_THEFY GTP cyclohydrolase 1; OS = Thermobifida fusca (strain YX) OX=269800 GN=folE PE=3; SV = 1
MTEYEYRVGDTDAGLAPAGIDQPRIEKAVREILLAIGEDPDRDGLVETPARVARAFAEQFAGLSQRPEDVLTTVFEANHEEMVLVKDIELYSTCEHHLVPFYGAAHVGYIPNTDGRITGLSKLARLVDIYARRPQVQERLTSQVADALMERLEPRGVIVVVEAEHLCMTMRGVRKPGAKTVTSAVRGAFRESYKTRAEAMDLILGRR

SEQ ID NO: 15912 - protein, 207 aa, Thermobifida halotolerans
  REGION 1..207: note = tr|A0A399G1K5|A0A399G1K5_9ACTN GTP cyclohydrolase 1; OS = Thermobifida halotolerans OX=483545 GN=folE PE=3 SV=1
MTEYEYQAGDIDTGLEPTGIDQPRIEKAVREILSAIGEDPDRDGLVETPARVARAFAEQFAGLHQRPEDVLTTVFEANHEEMVLVKDIELYSTCEHHLVPFYGAAHVGYIPNVNGQITGLSKLARLVDVYARRPQVQERLTSQVADALMEHLDPRGVIVVIEAEHLCMTMRGVRKPGAKTVTSAVRGAFRESDKTRAEAMGLIMGHR

SEQ ID NO: 15913 - protein, 194 aa, Thermobispora bispora
  REGION 1..194: note = tr|D6Y9V4|D6Y9V4_THEBD GTP cyclohydrolase 1; OS = Thermobispora bispora (strain ATCC 19993 / DSM 43833 / CBS 139.67 / JCM 10125 / NBRC 14880 / R51) OX=469371; GN = folE PE =3 SV=1
MTVPPPNFDRARIERAVREILIGIGEDPDREGLRDTPARVARAYAEQFSGLGQRPEDALTTMFDADHDEMVLVKDIEVMSMCEHHLLPFYGVAHIGYTPNEKGKVTGLSKLARLVDVYARRPQLQERMTSQIADGLMQVLEPRGVIVVIEAEHMCMTMRGVRKPGAKTITSAVRGDFRTCEATRAEAMSLILRR

SEQ ID NO: 15914 - protein, 256 aa, Thermobrachium celere
  REGION 1..256: note = tr|R7RT18|R7RT18_9CLOT GTP cyclohydrolase FolE2; OS = Thermobrachium celere DSM 8682 OX=941824 GN=folE2 PE=3; SV = 1
MKDVQSERDYRNIPLKHVGINNLKWPVIVKDKKNGTQNTIATVSLSVDLPHFQRGTHMSRFVEVIKELKSVSPKDIEGMLNDLKEKLDAQVAHCRMEFDYFIYKPSPVTKIESPYDVQCAFEATKNHEFDFILEVKVPVTTLCPCSKEISEFGAHNQRATVDIKIKSDKMIWIEDIVKVAEESASTPVFSLLKRKDEKWVTEMAYLNPRFVEDVAREVAVRLEANKDIKWYSVCVESIESIHNHNAFAYTEKGMME

SEQ ID NO: 15915 - protein, 186 aa, unidentified
  source 1..186: note = Thermoclostridium stercorarium
  REGION 1..186: note = tr|A0A1B1YJ06|A0A1B1YJ06_THEST GTP cyclohydrolase 1; OS = Thermoclostridium stercorarium subsp. leptospartum DSM 9219 OX=1346611 GN=folE PE=3 SV=1
MNTEKIKSLIRELIIEIGDDPDREGLIETPSRVAEMFKEIFSGYQDIPENTVKLFKETKHGDGIIIKDIPFYSMCEHHIMPFFGVIDVAYIPNNESILGLSKFSRIVDYYSKRLQLQECLGEQICDFIMKEVNARGAMVIIKAEHLCMSMRGVKKSGVNTITKTSKGVFNDNSELRMEYLSLLLNM

SEQ ID NO: 15916 - protein, 186 aa, unidentified; identical to SEQ ID NO: 15915
  source 1..186: note = Thermoclostridium stercorarium
  REGION 1..186: note = tr|A0A1B1YBL3|A0A1B1YBL3_THEST GTP cyclohydrolase 1; OS = Thermoclostridium stercorarium subsp. thermolacticum DSM 2910 OX=1121336 GN=folE PE=3 SV=1

SEQ ID NO: 15917 - protein, 185 aa, Thermocrinis albus
  REGION 1..185: note = tr|D3SP30|D3SP30_THEAH GTP cyclohydrolase 1; OS = Thermocrinis albus (strain DSM 14484 / JCM 11386 / HI 11/12) OX=638303 GN=folE PE=3 SV=1
MGIDREKIKQAVRLFLEGIGEDPDREGLKETPDRIARMWEEFERQREFNFKLFEEFGQYNEMVVVKDITIYSFCEHHLLPFFGKAHVAYVPDRVVCGLSKLVRTVKAFALRPQVQERLTAQIADFLMEQLKPKGVAVVLECEHLCMSMRGVMSPGHITTTSALRGIFLSDIRTREEFLKLIGKKL

SEQ ID NO: 15918 - protein, 186 aa, Thermocrinis minervae
  REGION 1..186: note = tr|A0A1M6QAI6|A0A1M6QAI6_9AQUI GTP cyclohydrolase 1; OS = Thermocrinis minervae OX=381751 GN=folE PE=3 SV=1
MAIDKEKIKQAIRLFLEGIGEDPDREGLKETPDRIARMWEEFDRQREFNFKLFEEFGDYNEMVIVKDIRFYSLCEHHLLPFFGKVHIAYIPDKVVCGLSKLVRTVKAFSLRPQVQERLTQQIADFLQEQLNPKGVAVVIEAEHLCMSMRGVMTPGHITVTSALRGIFLKDLRTREEFLKLIGKQGL

SEQ ID NO: 15919 - protein, 186 aa, Thermocrinis ruber
  REGION 1..186: note = tr|W0DD60|W0DD60_9AQUI GTP cyclohydrolase 1; OS = Thermocrinis ruber OX=75906 GN=folE PE=3 SV=1
MAVDKEKLKQAIRLFLEAIGEDPDREGLKETPERVARMWEEFDRQRSFDFKLFEEFGDYNEMVLVKDINIYSLCEHHLLPFFGKAHIAYIPNGIVCGLSKLVRTVRAFALRPQVQERLTNQIADFLMEQLKPKGVAVVLEMEHLCMSMRGVMSPGHITTTSALRGIFLSDLRTREEFLKLIGKSNQ

SEQ ID NO: 15920 - protein, 162 aa, Thermocrispum agreste
  REGION 1..162: note = tr|A0A2W4JJX5|A0A2W4JJX5_9PSEU GTP cyclohydrolase 1 (Fragment) OS=Thermocrispum agreste OX=37925 GN=folE PE=3; SV = 1
MAPREDSDSTFDLARAEKAVRELLIACGEDPDRPGLQETPARVARAFQEMFAGLHTDPDEVLDRTFDESHEELVLVTDIPMFSTCEHHLVPFHGVAHVGYIPDERGRVAGLSKLARLVDLYSKRPQVQERLTSQIADALDRKLNPRGVIVVIEAEHLCMTMR

SEQ ID NO: 15921 - protein, 260 aa, unidentified
  source 1..260: note = Thermodesulfatator autotrophicus
  REGION 1..260: note = tr|A0A177E8X1|A0A177E8X1_9BACT GTP cyclohydrolase FolE2 OS=Thermodesulfatator autotrophicus OX=1795632; GN = folE2 PE=3 SV=1
MSELKDVQSLPDYRQIEIDKVGIKGIRYPVSVLDRHKGIQHTIAEINMYVDLPHHFKGTHMSRFVEILNEFRHEIHIKKILCILQEMRKRLTAKVAHIEMSFPFFMEKEAPVSKAVGLMGYNCRILGSMGENFRDLVLEVEVPIMTVCPCSKEISAKGAHNQRGIVRVKVRFKKFIWIEELIEIVEKCASSPVYPLLKRTDEKFVTEWAYDHPMFVEDVVREVCSRLTENQEITWFSVEAENFESIHAHNAYAFIERNKN

SEQ ID NO: 15922 - protein, 260 aa, Thermodesulfatator indicus
  REGION 1..260: note = tr|F8AC75|F8AC75_THEID GTP cyclohydrolase FolE2; OS = Thermodesulfatator indicus (strain DSM 15286 / JCM 11887 / CIR29812) OX=667014 GN=folE2 PE=3 SV=1
MDKLKDVQSLPDHRQIEIDKVGIKGIRYPISILDRRKGIQHTVAQINMYVDLPHHFKGTHMSRFVEILNEFRHEIHIKKILCILQEMRKRLTAKVAHIEMSFPFFMEKEAPVSKAIGLMEYNCRILGSMGEDFRDLVLEVEVPVMTVCPCSREISERGAHNQRGIVRVKVRFKKFIWIEELIEIVEECASSPVYPLLKRTDEKFITEWAYDHPMFVEDVVREVCRRFTENQKIIWFSVEAENFESIHAHNAYAFIERNKV

SEQ ID NO: 15923 - protein, 281 aa, Thermodesulfatator sp.
  REGION 1..281: note = tr|A0A432UHV1|A0A432UHV1_9BACT GTP cyclohydrolase FolE2 OS=Thermodesulfatator sp. OX=1874629 GN=folE2 PE=3; SV = 1
MKLKDVQSEPATCEIPVDKVGIKGIRYPVSVLDRRRGLQHTVAEINMFVDLPQEFKGTHMSRFIEILNEFREEIHIRNIPFILERMRKKLAAQVAHLEICFPYFLQKEAPVSRAPSLMEYRCLIAGAKDEKRLDLVLGVSVPVMTVCPCSQAISTLGAHNQRGEVNLRVRFKRFVWLEDLIEIVEASASSPVYPLLKRPDEKFVTEEAHRRPRFVEDVVREVAQRLLEHPDITWFAVSAENFESIHAHNAYAYIERFKETSEKALGTSPPHPSFTSKATTF

SEQ ID NO: 15924 - protein, 189 aa, unidentified
  source 1..189: note = Thermodesulfitimonas autotrophica
  REGION 1..189: note = tr|A0A3N5AXE9|A0A3N5AXE9_9THEO GTP cyclohydrolase 1; OS = Thermodesulfitimonas autotrophica OX=1894989 GN=folE; PE = 3 SV=1
MFDREKIERAVRMILEAIGEDPDREGLKETPARVARMYEEIFAGLGENPADHLEKYFNVAHEEMVLVRDIPVYSVCEHHLLPFFGVAHVAYIPRTGSITGLSKLARVVEGFARRPQLQERLTGQVADAIMERLHPRGVLVVIEAEHMCMTMRGVKKPGAKTVTSAVRGIFQQNPATRAEAFALIKGSLK

SEQ ID NO: 15925 - protein, 192 aa, unidentified
  source 1..192: note = Thermodesulfobacteriales bacterium
  REGION 1..192: note = tr|A0A524JUA5|A0A524JUA5_9BACT GTP cyclohydrolase 1; OS = Thermodesulfobacteriales bacterium OX=2528040 GN=folE; PE = 3 SV=1
MRRGITPMSVKKAIKEILLEIGEDPKREGLRDTPDRMEKMFKELTAGYHMDPKEVINEAIFHIKYDEMVVVKDIEFYSLCEHHMLPFFGKCNIAYIPNGKVVGLSKIPRIVEVFSRRLQVQERMTVQIADFLKKELDPLGVAVVVEAYHLCMAMRGIKKSGANMLTSSMRGVFKKDERTRGEFLSFIGRDLK

SEQ ID NO: 15926 - protein, 263 aa, Thermodesulfobacterium commune
  REGION 1..263: note = tr|A0A124FKR4|A0A124FKR4_9BACT GTP cyclohydrolase FolE2 OS=Thermodesulfobacterium commune OX=1741 GN=folE2; PE = 3 SV=1
MKPELIDVQSLPPEEKIDIDKVGIKGFKHPVTVLDREKGLQHTVAELNLYVDLPSKFKGTHMSRFIEVINEFKGEIHVKNVIKLLKKLAQRLSAKSAHLEMFFPYFLQKKAPVTQISSLMEYQGILLASYSEGKKDLVIGAKVPVMTLCPCSKSISQFSAHNQRSLITVKVRFKEFIWLEELIEIAEASASSPVYSLLKRPDEKFVTEFAYENPRFVEDVVRGVAKRLWEHPEVKWFFVEVENFESIHAHNAYACIERTKRGS

SEQ ID NO: 15927 - protein, 263 aa, Thermodesulfobacterium commune; identical to SEQ ID NO: 15926
  REGION 1..263: note = tr|A0A075WUE9|A0A075WUE9_9BACT GTP cyclohydrolase FolE2 OS=Thermodesulfobacterium commune DSM 2178 OX=289377; GN = folE2 PE=3 SV=1

SEQ ID NO: 15928 - protein, 259 aa, unidentified
  source 1..259: note = Thermodesulfobacterium geofontis
  REGION 1..259: note = tr|A0A2N7QFF5|A0A2N7QFF5_9BACT GTP cyclohydrolase FolE2 OS=Thermodesulfobacterium geofontis OX=1295609; GN = folE2 PE=3 SV=1
MELEDIQSLTPEEKIPLDKVGIKGFKYPVTVLDQKKGFQHTVAEINLYVDLPSKFKGTHMSRFIEVLNEFGSEIHIKNVIKLLKRLREKLFSKSAHIEMYFPYFLEKKSPVSGIISVMEYEAFILASYSQRKRDLIVGVGVPVMTLCPCSKSISKYSAHNQRGKVTIKVRFKKFIWLEELIEIAESSASSPVYSLLKRPDEKFVTEKAYENPKFVEDVVRSVAKKLLEHPEITWFSVSAENFESIHAHNVYAFIERTKS

SEQ ID NO: 15929 - protein, 259 aa, unidentified
  source 1..259: note = Thermodesulfobacterium geofontis
  REGION 1..259: note = tr|F8C424|F8C424_THEGP GTP cyclohydrolase FolE2; OS = Thermodesulfobacterium geofontis (strain OPF15); OX = 795359 GN=folE2 PE=3 SV=1
MKLEDIQSLAPENKIPLDKVGIKGFKYPVKVLDREKGIQHTVAEINLYVDLPARFKGTHMSRFIEVLNEFGREIHMKNVIKLLKRLKKKLSSRSAHIEMYFPYFLEKKAPVSGIASLMEYQAFILASYSQKKKDLIVGVEVPVMTLCPCSKSISKYSAHNQRGKVTIKVRFKNFIWLEELIEIAETSASSPVYSLLKRPDEKFVTEHAYENPKFVEDVVREVARKLLEHPEITWFSVEAENFESIHAHNAYAFIERTKS

SEQ ID NO: 15930 - protein, 188 aa, unidentified
  source 1..188: note = Thermodesulfobium acidiphilum
  REGION 1..188: note = tr|A0A2R4W2L8|A0A2R4W2L8_9FIRM GTP cyclohydrolase 1; OS = Thermodesulfobium acidiphilum OX=1794699 GN=folE PE=3; SV = 1
MDQEKIKKAVYDILIAIGEDPNREGLKDTPERIARMYEEIFSGINEDPLSVLNVEYHENTDEMVLIKDIPFYSICEHHLIPFIGRAHVAYLPKDGRVVGLSKIARVVDILSKKPQLQERLTSDIAKTIMKGLNPLGVAVVVEAEHLCMSMRGIKKPGHTTVTSALRGAFKASSSTRSEVLSLIFGRLI

SEQ ID NO: 15931 - protein, 189 aa, Thermodesulfobium narugense
  REGION 1..189: note = tr|A0A2J6XBH3|A0A2J6XBH3_9FIRM GTP cyclohydrolase 1; OS = Thermodesulfobium narugense OX=184064 GN=folE PE=3 SV=1
MLDQEKIKKAVYDILIAIGEDPNREGLKDTPERIARMYEEIFSGINADPLSVLNVEYHENTDEMVLIKDIPFYSICEHHLIPFIGRAHVAYLPKDGRVVGLSKIARVVDILSKKPQLQERLTSDIAKTIMKGLNPLGVAVVVEAEHLCMSMRGIKKPGHTTVTSALRGAFKASSSTRSEVLSLIFGRLI

SEQ ID NO: 15932 - protein, 188 aa, Thermodesulfobium narugense
  REGION 1..188: note = tr|M1E967|M1E967_9FIRM GTP cyclohydrolase 1; OS = Thermodesulfobium narugense DSM 14796 OX=747365 GN=folE; PE = 3 SV=1
MDQEKIKRAIYDILVAIGEDPNREGLKDTPERIARMYEEIFSGINEDPLSVLNVEYHENTDEMVLIKDIPFYSICEHHLIPFIGRAHVAYLPKDGRVVGLSKIARVVDILSKKPQLQERLTSEIARTIMKGLNPLGVAVVVEAEHLCMSMRGIKKPGHTTVTSALRGAFKASSSTRSEVLSLIFGRLI

SEQ ID NO: 15933 - protein, 270 aa, Thermodesulforhabdus norvegica
  REGION 1..270: note = tr|A0A1I4S4L7|A0A1I4S4L7_9DELT GTP cyclohydrolase FolE2 OS=Thermodesulforhabdus norvegica OX=39841 GN=folE2; PE = 3 SV=1
MNSMYYFRPSIVVDVQSRRDHRNIAIDKVGVKNIRYPLTVLDKSRGFQHTVGTINMYVNLPRRFKGTHMSRFIEILNEFYGNFDIRNLPRILETMQKRLDAESAHIEISFPYFIEKLAPVTKSTGIMEYGCRVIGALDCNLGYDLIVEVIVPITTVCPCSKEISNYGAHNQRGIVRLAVRYEKFIWIEDLIELVEDCASCDVYSVLKRPDEKYVTERAYDNAKFVEDVVRDVALRLKADPNITWFAVDVENFESIHNHSAYAFIERWKKA

SEQ ID NO: 15934 - protein, 187 aa, Thermodesulfovibrio aggregans
  REGION 1..187: note = tr|A0A0U9HR24|A0A0U9HR24_9BACT GTP cyclohydrolase 1; OS = Thermodesulfovibrio aggregans OX=86166 GN=folE PE=3 SV=1
MFDREKIKKGVRLIIEGIGENPEREGLVETPDRIARMYEEIFKGLEPPEEELLKCIEGETHDEMVLLRNIPFYSVCEHHFLPFFGNAHIAYIPDGRIVGLSELPRALDYLAKRPQVQERLTKQLADLIVEKIKPKGCMVVIEAEHLCMSMRGIKKPGVKTITSAVRGIFRKSQTTRQEALELINKDK

SEQ ID NO: 15935 - protein, 187 aa, Thermodesulfovibrio aggregans
  REGION 1..187: note = tr|A0A2J6WNX5|A0A2J6WNX5_9BACT GTP cyclohydrolase 1; OS = Thermodesulfovibrio aggregans OX=86166 GN=folE PE=3 SV=1
MVNREKIKKGVRLIIEGIGEDPERDGIKDTPERIARMYEEIFKGLEPPEEELLKCIEGETHDEMVLLKNIPFYSVCEHHFLPFFGYAHIAYIPDGRIVGLSELPRAVDYLAKRPQIQERLTKELANLIMEKLRPKGCMVVIEAEHLCMSMRGIKKPGAKTITSAVRGIFRRSQKTRQEALELINKDK

SEQ ID NO: 15936 - protein, 188 aa, Thermodesulfovibrio sp.
  REGION 1..188: note = tr|A0A1C3FD79|A0A1C3FD79_9BACT GTP cyclohydrolase 1; OS = Thermodesulfovibrio sp. N1 OX=1871110 GN=folE PE=3 SV=1
MFDRKKIEDGVKLILEGIGEQPERPGLKDTPLRIAKMYEEIFRGLLPAEDDLLKCIEGETHDEMVLIKDIPFYSMCEHHLLPFFGYAHIAYIPDGKIVGLSELPKALDYLAKRPQVQERLTSQLANLLMEKLKPKGCMIVIEAEHLCMSMRGVKKPGAKTITSAVRGIFRKSQATRQEALELINRKEK

SEQ ID NO: 15937 - protein, 188 aa, Thermodesulfovibrio yellowstonii
  REGION 1..188: note = sp|B5YJV0|GCH1_THEYD GTP cyclohydrolase 1; OS = Thermodesulfovibrio yellowstonii (strain ATCC 51303 / DSM 11347 / YP87) OX=289376 GN=folE PE=3 SV=1
MFDRKKIEEGVRLILEGIGEDVERPGIKDTPIRIARMFEEIFRGLLPPDEDLLKSIEGETHDEMVLIKDIPFYSVCEHHLLPFFGNAHIAYIPDGRIVGLSELPKALDYLSKRPQVQERLTSQLANLLMEKLKPKGCMVVIEAEHLCMSMRGIKKPDAKTITSAVRGIFRKSQTTRQEALELINRRDK

SEQ ID NO: 15938 - protein, 200 aa, unidentified
  source 1..200: note = Thermoflavifilum aggregans
  REGION 1..200: note = tr|A0A2M9CTI1|A0A2M9CTI1_9BACT GTP cyclohydrolase 1; OS = Thermoflavifilum aggregans OX=454188 GN=folE PE=3 SV=1
MSYKKIEQYEEKITSHLVENYRETLILLGENPDREGLKKTPHRVAKAMQYLTQGYHMDPKAILESAKFQESYSEMVLVKDIELYSLCEHHLLPFFGKAHVAYIPNGYIVGLSKIARVVDCFSRRLQVQERLTHQILDAIQDVLHPLGVAVVIEAQHLCMMMRGVQKQNSVTTTSAFSGQFEDERTRAEFIRLISADLMHR

SEQ ID NO: 15939 - protein, 188 aa, Thermoflavimicrobium dichotomicum
  REGION 1..188: note = tr|A0A1I3SHA9|A0A1I3SHA9_9BACL GTP cyclohydrolase 1; OS = Thermoflavimicrobium dichotomicum OX=46223 GN=folE PE=3; SV = 1
MQVDHQKIEQAVRMILEAIGEDPNREGLIDTPKRVARMYEEIFAGLKQNPEDYFSVIFSEDHEELVLVKDIPFFSTCEHHLVPFFGKAHVGYIPRGGRVVGLSKLARAVEAVARRPQLQERITATVADAIMTKLDPHGVIVVVEAEHMCMTMRGVKKPGSKTITSAVRGVFAEDPASRAEALSLMGLK

SEQ ID NO: 15940 - protein, 188 aa, Thermoflavimicrobium sp.
  REGION 1..188: note = tr|A0A364K2V3|A0A364K2V3_9BACL GTP cyclohydrolase 1; OS = Thermoflavimicrobium sp. FBKL4.011 OX=2137476 GN=folE; PE = 3 SV=1
MQVDHQKIEQAVRMILEAVGEDPNREGLLDTPKRVARMYEEIFVGLKQNPEDYFSVIFSEDHEELVLVKDIPFYSTCEHHLVPFFGKAHVGYIPRGGRVVGLSKLARAVEAVARRPQLQERITANVADSIMNKLDPHGVIVVVEAEHMCMTMRGVKKPGSKTITSAVRGIFAEDQTSRAEVLSLMGLK

SEQ ID NO: 15941 - protein, 246 aa, unidentified
  source 1..246: note = Thermoflexibacter ruber
  REGION 1..246: note = tr|A0A1I2JP36|A0A1I2JP36_9BACT GTP cyclohydrolase 1; OS = Thermoflexibacter ruber OX=1003 GN=folE PE=3 SV=1
MKQNEILLSSPHKGNGHTHNGHKHQESNHLHDDIGDGHILTSLNTPLREDAFQLDDDLKIELIEKHFEQIMHILGLDLTDDSLKGTPHRVAKMYVKEIFSGLNPANKPTAKLFENQYNYNQMLVEKNITFYSTCEHHFVPIFGKAHVAYFSSGKVIGLSKLNRIVQYFAKRPQVQERLTNQIGEELKKALATEDVAVIMDAYHLCVSSRGIQDTNSSTVTAFFSGKFEEESVKAELLKYIEMKTGN

SEQ ID NO: 15942 - protein, 192 aa, unidentified
  source 1..192: note = Thermoflexus hugenholtzii
  REGION 1..192: note = tr|A0A2A9HJQ5|A0A2A9HJQ5_9CHLR GTP cyclohydrolase 1; OS = Thermoflexus hugenholtzii OX=1495650 GN=folE PE=3 SV=1
MTTTAGPDQARIRAAVVELLKAIGDDPTRDGLADTPRRIAEMYAEIFEGLFYDPREHLRVGFEVAHDEMVILRNIPFYSMCEHHFLPFHGEAHVGYIPDGRVVGISKLARVVEGYARRPQIQEQLTSQIAEAIQDVLQPDGVAVVIEAEHLCMTMRGIKKPGSRMVTSAMRGDFKNSHVTRAEFLSLVHGHH

SEQ ID NO: 15943 - protein, 208 aa, unidentified
  source 1..208: note = Thermoflexus hugenholtzii
  REGION 1..208: note = tr|A0A212RTT4|A0A212RTT4_9CHLR GTP cyclohydrolase 1; OS = Thermoflexus hugenholtzii JAD2 OX=877466 GN=folE PE=3; SV = 1
MEPEGWRMWAETRTSAPDPDRLAEAVGALLRALGEDPDREGLRRTPARVAAMLQEVLAGYWMDPAELINGAIFEAEDNDLVLVRDIEFYSMCEHHLLPFYGRVHVAYIPDGRIIGLSKIPRIVELFARRLQVQERMTRQIADFLERVLQPQGVAVIVEAAHLCTMMRGVRKSGARMVTQALTGAFRTDPRLRSELRAHLRHPDRDAAG

SEQ ID NO: 15944 - protein, 222 aa, unidentified
  source 1..222: note = Thermogutta terrifontis
  REGION 1..222: note = tr|A0A286RF81|A0A286RF81_9PLAN GTP cyclohydrolase 1; OS = Thermogutta terrifontis OX=1331910 GN=folE PE=3 SV=1
MNREVDHIEATRSCRDAKQAGQEPRDKLSATQEYQVDLPRIERAVREILLAVGEDPDREGLRETPARVARMYAELFRGLRLDPRRHLKKVFTEKYDEIVVVKDISFESVCEHHLMPFMGKAHIAYLPGGKVVGLSKLARVVEDVSRRPQVQERMTEVIADLLIEELDAKGVAVVVEAIHTCMTVRGIRKPGAICVTSALRGAFRTNPSTRAEVMTLIYNGRQ

SEQ ID NO: 15945 - protein, 188 aa, Thermohalobacter berrensis
  REGION 1..188: note = tr|A0A419T6C6|A0A419T6C6_9CLOT GTP cyclohydrolase 1; OS = Thermohalobacter berrensis OX=99594 GN=folE PE=3 SV=1
MDKKRIENAVREILEAIGEDPNREGLKDTPKRIANMYEEIFSGLKKDPKKHLEIYFEEENHEELVLVKDIPFYSMCEHHLVPFFGKASVGYLPRNGKLTGLSKLARVVETVARRPQLQERFTSTIADSIMEKLNPYGVIVVVEAEHMCMTMRGVKKPGSKTVTSAVRGVFDRDAKSRAEAMALINFGK

SEQ ID NO: 15946 - protein, 187 aa, Thermohydrogenium kirishiense
  REGION 1..187: note = tr|A0A4R4ARU9|A0A4R4ARU9_9FIRM GTP cyclohydrolase 1; OS = Thermohydrogenium kirishiense OX=937254 GN=folE PE=3; SV = 1
MIDKEKIKKAVFDILEAIGEDPKREGLIETPDRVARMYEEIFSGLHTDVMDVIKTFKEDEHQEIVIVKDIPMYSMCEHHLLPFMGVAHVAYLPRKGTILGLSKLARIVDILAKKPQLQERLTSEIADTIVKAANPLGVAVVVEAEHLCMTMRGIKKPGAKTVTSALRGLFKTDQRSREEVMLLINGK

SEQ ID NO: 15947 - protein, 187 aa, unidentified
  source 1..187: note = Thermolongibacillus altinsuensis
  REGION 1..187: note = tr|A0A4R1QQV3|A0A4R1QQV3_9BACI GTP cyclohydrolase 1; OS = Thermolongibacillus altinsuensis OX=575256 GN=folE PE=3; SV = 1
MSINHEQIEQAVRLILEAIGEDPNREGLLDTPKRVAKMYAEVFAGLNEDPKQHLQTVFSEEHEELVLVKDIPFYSMCEHHLVPFFGVAHVAYIPRGGKVTGLSKLARTVEAVARRPQLQERITATVADAIVEALDPHGVMVVVEAEHMCMTMRGVKKPGAKTVTTAVRGVLETDAEARAEILALIKS

SEQ ID NO: 15948 - protein, 225 aa, unidentified
  source 1..225: note = Thermomicrobiales bacterium
  REGION 1..225: note = tr|A0A524J1Q4|A0A524J1Q4_9CHLR GTP cyclohydrolase 1; OS = Thermomicrobiales bacterium OX=2482790 GN=folE PE=3 SV=1
MPSHVQRLVDEIENEIGEESTRPEALIEGNGSNGQGSEGPVEAAVREILTEIGEDPRRQGLLGTPGRVHRMYTELTAGYHVDPDRLINGAIFDVAYSEMVLVKDISFYSLCEHHLLPFFGTAAVAYIPRGRVIGLSKIPRIVEMYSRRLQVQERLTQQIADFLQDRLDPQGVGVVMEATHLCAAMRGVRKPGTIMTTSAVLGLFRTRDRTRAEFFAHLERRSPEA

SEQ ID NO: 15949 - protein, 207 aa, Thermomicrobium roseum
  REGION 1..207: note = tr|B9L0Q6|B9L0Q6_THERP GTP cyclohydrolase 1; OS = Thermomicrobium roseum (strain ATCC 27502 / DSM 5159 / P-2) OX=309801 GN=folE PE=3 SV=1
MHHHEELVHLEDTGLEFTTTCDLERLRSLVAQWLEIIGEDPHREGLVRTPQRVAEAWAFLTRGYRQNLHEIVNGAIFHVEQDTMVVVKGIEFYSMCEHHLLPFFGHVHIGYLPRGRILGLSKFARIVDLYARRLQVQERLTNQIAEAIAELLDPQGVAVVADGIHLCMMMRGVEKQHARTTTSAMLGVFRESAAAREEFYRLLSTSS

SEQ ID NO: 15950 - protein, 307 aa, Thermomonas haemolytica
  REGION 1..307: note = tr|A0A4R3NBC9|A0A4R3NBC9_9GAMM GTP cyclohydrolase FolE2 OS=Thermomonas haemolytica OX=141949 GN=folE2 PE=3; SV = 1
MHKPLTSPILPDVAFDTAAQARALDWVGMEGMALPIRVQGQDGQEMTVPASVDVAVDLRDPATRGIHMSRLYLQLQQGLANETLGAPMLRRLLEACIASQQGLSSRARLRLRYEQLLLRRALRSDNAGWKRYPVEVEAELADGHLRLVLAFALDYSSTCPASAALSRQANAQRFATDFAEAGAVPAEAVCDWLQSPRGLAATPHAQRSRAEVRVELKPAFDCLPLLALVDALEAALGTPVQTAVKREDEQAFAQANAANLMFCEDAARRVAAVLAADARIAAWSARVAHLESLHPHDAVASVSGRNS

SEQ ID NO: 15951 - protein, 202 aa, Thermomonas haemolytica
  REGION 1..202: note = tr|A0A4R3NDN9|A0A4R3NDN9_9GAMM GTP cyclohydrolase 1; OS = Thermomonas haemolytica OX=141949 GN=folE PE=3 SV=1
MSDSRPDDVRHGVARAQAEEAVRTLLKWAGDDPAREGLLDTPKRVAKAYEDWFSGYALDPDDYMARTFEEVDGYDEMIVLRDIEYESHCEHHMAPIIGKVHVGYLPDGKVVGISKLARVVEAYARRFQVQEKMTAQIAHCIQRALQPRGVGVVVVGTHECMTTRGIHKRGVSMVTSKMLGSFRDDARTRAEFLRFIEVGPGR

SEQ ID NO: 15952 - protein, 198 aa, Thermomonas hydrothermalis
  REGION 1..198: note = tr|A0A1M4TY96|A0A1M4TY96_9GAMM GTP cyclohydrolase 1; OS = Thermomonas hydrothermalis OX=213588 GN=folE PE=3 SV=1
MADDIRNQVTRAQAEEAVRTLLRWAGDDPTREGLLDTPQRVVKAYEDWFSGYALDPDEYLARTFEEVGGYDEMIVLRDIEYESHCEHHMAPIIGKVHVGYLPAGKVVGISKLARVVEAYARRFQVQEKMTAQIAGCIQRVLEPRGVGVVVVGTHECMTTRGIHKRGVSMVTSKMLGCFRDDARTRAEFLRFIEVGPGR

SEQ ID NO: 15953 - protein, 308 aa, Thermomonas hydrothermalis
  REGION 1..308: note = tr|A0A1M4UN06|A0A1M4UN06_9GAMM GTP cyclohydrolase FolE2 OS=Thermomonas hydrothermalis OX=213588 GN=folE2; PE = 3 SV=1
MHKPLTSPALPDVAFDRVPQARALDWVGMEGIALPIRLPDGNGATLRVPASVDVAVDLHAAGARGIHMSRLYLQLQQGLADTLLTGPALRRLLDDCIASQQGLATRARLRLRYDQLLLRTALRSGHAGWKRYPVMLEAVLADGHLQLTLELALEYSSTCPASAALSRQANAERFARMFGASSDVAVADVCAWLESEQGLAATPHAQRSRAEFRLELRPSLDELPLVNLIDALEAALGTPVQTAVKREDEQAFAEANAANLMFCEDAARRLAAVLAAEARILAWQVRVAHLESLHAHDAVASVSGRNDR

SEQ ID NO: 15954 - protein, 307 aa, Thermomonas sp.
  REGION 1..307: note = tr|A0A5B7ZMD8|A0A5B7ZMD8_9GAMM GTP cyclohydrolase FolE2 OS=Thermomonas sp. SY21 OX=2202149 GN=folE2 PE=3 SV=1
MHNSPRPTPLPDVAADAVALARPLDWVGMDGMAMPIRLAGEGGPDLHVPASVDVAVDLRDADARGIHMSRLYLQLQQSLANEALSAPSLRRLLETCIASQQGLSTRARLRLRYEHLLLRKALRTDNAGWKRYPVEVEAELRDGHLQLSMGFSVEYSSTCPASAALSRQVNAARFAEDFAGLRPLSNDMVRDWLASDRGLAATPHAQRSRAEVRVELKPAFDELPLHALVDAVETALGTPVQTAVKREDEQAFAEANAANLMFCEDAARRVAAALAGDARVAAWQARVAHYESLHPHDAVASVSGRNA

SEQ ID NO: 15955 - protein, 308 aa, Thermomonas sp.
  REGION 1..308: note = tr|A0A5C7QXR0|A0A5C7QXR0_9GAMM GTP cyclohydrolase FolE2 OS=Thermomonas sp. OX=1971895 GN=folE2 PE=3 SV=1
MHDNTRSAPLPDVAHDLAALARPLDWVGMDAIALPICLHGEGGVSMHVPAMVDIAVDLHDAGARGIHMSRLYLQLQQSLANEGVSAPVLRKLLEACVASQQGLSTRARLRLRYDHLLLRPALASANAGWKNYPVILEAELRDGHLHLSLAFSVEYSSTCPASAALSRQVNARRFAEDFAGIRPLSNDALAEWLASERGLAATPHAQRSRAELLVALKPTFDELPLQSLVEMVEAALGTPVQTAVKREDEQAFAELNAANLMFCEDAARRVAATLAGNARVSAWKVRVAHFESLHPHDAVASVSGRNSP

SEQ ID NO: 15956 - protein, 210 aa, Thermomonospora curvata
  REGION 1..210: note = tr|D1A546|D1A546_THECD GTP cyclohydrolase 1; OS = Thermomonospora curvata (strain ATCC 19995 / DSM 43183 / JCM 3096 / NBRC 15933 / NCIMB 10081 / Henssen B9); OX = 471852 G N=folE PE=3 SV=1
MTLPHDEAPRAGEPAHSGLPAFDHERLERAVREILIAIGEDPDREGLRETPARVARAYAEQFAGLRQRPEDVLNKVFEADHDEMVLVKDIEVYSTCEHHLVPFHGLAHVGYTPNAKGQITGLSKLARLVDVYARRPQVQERLTSQIADALMEILEPRGVIVVIEAEHLCMTMRGVRKPGAKTVTSAVRGDFRDHAETRAEAMALILGRPS

SEQ ID NO: 15957 - protein, 207 aa, unidentified
  source 1..207: note = Thermophagus xiamenensis
  REGION 1..207: note = tr|A0A1I1XZN9|A0A1I1XZN9_9BACT GTP cyclohydrolase 1; OS = Thermophagus xiamenensis OX=385682 GN=folE PE=3 SV=1
MKQTLNGENGYAKIESFDDKITSQLSYHYSEILKLIGEDITREGLEKTPLRVAKALQFLTQGYNMDPEKIIRSAMFKEDYQQMVVVKDIELYSMCEHHMLPFFGKAHVAYIPRHHITGLSKIARVVEAYARRLQVQERLTTQIKECIHKTLNPLGVAVVIEAQHMCMQMRGVQKQHSVTTTSDFTGAFLKNMATREEFFNIIGSSLH

SEQ ID NO: 15958 - protein, 203 aa, Thermopolyspora flexuosa
  REGION 1..203: note = tr|A0A543J3V9|A0A543J3V9_9ACTN GTP cyclohydrolase 1; OS = Thermopolyspora flexuosa OX=103836 GN=folE PE=3 SV=1
MDSELMPERRPEPPPFDAARIEKAVREILIAIGEDPDREGLRDTPARVARAYAEQFAGLRQNPEDVLTTVFDADHDEMVLVRDIEVSSVCEHHLVPFYGVAHVGYIPNDKGQVTGLSKLARLIDVYARRPQLQERMTSQVADALMRVLEPRGVIVVIEAEHLCMTMRGVRKPGAKTITSAVRGNFRSSDRTRAEAMALILGRR

SEQ ID NO: 15959 - protein, 261 aa, Thermosediminibacter oceani
  REGION 1..261: note = tr|D9S1R7|D9S1R7_THEOJ GTP cyclohydrolase FolE2; OS = Thermosediminibacter oceani (strain ATCC BAA-1034 / DSM 16646 / JW/IW-1228P) OX=555079 GN=folE2 PE=3 SV=1
MKDVQSERDERRVPLKKVGVKNIEWPLKVLDKSKGYQHTVARMSLSVDLKHYIRGTHMSRFVEVLNDLEMLSPKALDDILTDIKERLKAENSHLEISFPYFIWKVSPVSGLESPLKIEAMIEAEKRVEPVITMGVRVPVHTLCPCSKEISENGAHNQRAVVEIYVRSREMIWFEDLVEIAEKNASCPIYTLLKRPDEKFVTEMAYKNAKFVEDVTRDVALELERDERIEWYRVQVTSFESIHNHDAFACVEKGWIEDVARD

SEQ ID NO: 15960 - protein, 270 aa, Thermosinus carboxydivorans
  REGION 1..270: note = tr|A1HPY7|A1HPY7_9FIRM GTP cyclohydrolase FolE2; OS = Thermosinus carboxydivorans Nor1 OX=401526 GN=folE2; PE = 3 SV=1
MKDVQNAADMRGIAIQKVGVSDVDLPFLIKTKNGSFQSVLAKIKLTVDLPKEYKGTHMSRFIEVLNEWSQKPVSYREMECILSDIMHRLDAQRADIDINFKYFLEKRAPISGLKSYLDCDCLFSGTLLSGDHLKFVLGLAVPFTSLCPCSKEISRYGAHNQRGLMKVKIKHRPGHFIWIEDLAALMEEQGSCPVYPLLKREDEKYVTERAYENPKFVEDVLRDLVLALRRLKGVEWFEVECENYESIHNHNAYAAHREFVSEITSTERSL

SEQ ID NO: 15961 - protein, 259 aa, Thermosipho africanus
  REGION 1..259: note = sp|B7ICT4|GCH4_THEAB GTP cyclohydrolase FolE2; OS = Thermosipho africanus (strain TCF52B) OX=484019; GN = folE2 PE=3 SV=1
MRDVQSERDERNVPLKHVGIKNLKYPVVVLDKKNKNQHTIAEINMYVDLPKDFRGTHMSRFLEVLNKFHLKIDPKNIKAILDDLKKTLKAQSASIEIMFPYFLQKKAPVTKIESYMEYKCGFKAYDTNEECEFYIVVEVPIQTLCPCSKEISKYNAHNQRALARIEVETSELIWFEDLIELAESSASVPLFTLLKRPDEKYVTEKAYENPKFVEDVARDIALSLKENKKIRWFKVEVESFESIHNHNAYACVNSDTMEV

SEQ ID NO: 15962 - protein, 259 aa, Thermosipho africanus
  REGION 1..259: note = tr|K2PHQ6|K2PHQ6_9BACT GTP cyclohydrolase FolE2; OS = Thermosipho africanus H17ap60334 OX=1161912 GN=folE2; PE = 3 SV=1
MRDVQSERDERNVPLKHVGIKNLKYPVVVLDKKNKNQHTIAEINMYVDLPKDFRGTHMSRFLEVLNKFHLKIDPKNIKAILDDLKKTLKAQSASIEIMFPYFLQKKAPVTKIESYMEYKCGFKAYDTNEECEFYIVVEVPIQTLCPCSKEISKYNAHNQRALARIEVETSELIWFEDLIELAESSASVPLFTLLKRPDEKYVTEKAYENPKFVEDVARDIALSLKENKKIRWFKVEVESFESIHNHNAYACVDSDTMEV

SEQ ID NO: 15963 - protein, 258 aa, Thermosipho atlanticus
  REGION 1..258: note = tr|A0A1M5QNV7|A0A1M5QNV7_9BACT GTP cyclohydrolase FolE2 OS=Thermosipho atlanticus DSM 15807 OX=1123380; GN = folE2 PE=3 SV=1
MLKDVQNEKDLRNIPLKHVGIKNLRYPIIVLDKKNKIQHTVADINMFVDLPKDFRGTHMSRFVEILNNFHFKIEPKTIKEILDDLKKSLNAQSAKIEISFPYFLKKEAPVTKIESFLEYKCGFKAYDNDKKYNFYLVVEVPVQTLCPCSKEISKYNAHNQRAKILIEVETYELIWFEELIAIAEHSASSPLYTLLKRPDEKHVTENAYENPKFVEDVARDVALKLKEDKRIKWFKVEVESYESIHTHNAYACVDSLTL

SEQ ID NO: 15964 - protein, 259 aa, Thermosipho melanesiensis
  REGION 1..259: note = sp|A6LKE7|GCH4_THEM4 GTP cyclohydrolase FolE2; OS = Thermosipho melanesiensis (strain DSM 12029 / CIP 104789 / BI429) OX=391009 GN=folE2 PE=3 SV=1
MKDVQSEKDTREIPLKHVGIKKLKYPVQVLDRENKVQNTVADINMYVDLPKDFRGTHMSRFLEVFNKFHLKIDPKTIKKILDDLKQTLKAQSAKIEIMFPYFLKKKAPVTKIESYMEYLCGFSAYDGPQKCEFYTIVEVSVQTLCPCSKEISKYNAHNQRANVRIEVETSELVWFEELIEIAEDSASVPLFSLLKRPDEKFVTEKAYENPKFVEDVARDIAIRLKDNPKINWFKVEVESYESIHNHNAFACVDSTIMEV

SEQ ID NO: 15965 - protein, 259 aa, Thermosipho sp.
  REGION 1..259: note = tr|A0A1L7BFR1|A0A1L7BFR1_9BACT GTP cyclohydrolase FolE2 OS=Thermosipho sp. 1063 OX=1462747 GN=folE2 PE=3 SV=1
MRDVQSEKDTREIPLKHVGIKDLKYPIQVLDRKNKVQNTIAKINMYVDLPKDFRGTHMSRFLEVFNKFHLKIDPKNIKMILDDLKKTLKAKSAKIEIMFPYFIKKKAPVTKIESYMEYTCGFKAYDGPEKCEFFIVVEVPVQTLCPCSKEISKYNAHNQRAHVRIEVETSDLVWFEELIEIAEKHSSVPLFSLLKRPDEKFLTEKAYENPKFVEDVARDIALELKNNPKLKWFKVEVESYESIHNHNAFACVDSYNMEV

SEQ ID NO: 15966 - protein, 216 aa, Thermosporothrix hazakensis
  REGION 1..216: note = tr|A0A326UDL0|A0A326UDL0_9CHLR GTP cyclohydrolase 1; OS = Thermosporothrix hazakensis OX=644383 GN=folE PE=3 SV=1
MTLNIDLDDLDFQEAIHLKHRHISVEDMQKFEGYIAEIFAAMGMDVNTPSTRETPQRFLKAMFDATEGYDGDPKLIKVFDAEYPDGVDGRRSQVIEGPIPFFSLCEHHAFPFFGHAYVGYIANQHIIGLSKLTRLVRVFAKRFSVQERLTQQIASTLETILQPHGVAVYLEANHLCMAMRGVRETSALTRTTSWRGEYEANPELRSEFFSACQIRS

SEQ ID NO: 15967 - protein, 216 aa, Thermosporothrix sp.; identical to SEQ ID NO: 15966
  REGION 1..216: note = tr|A0A455SXI8|A0A455SXI8_9CHLR GTP cyclohydrolase 1; OS = Thermosporothrix sp. COM3 OX=2490863 GN=folE_2 PE=3 SV=1

SEQ ID NO: 15968 - protein, 203 aa, unidentified
  source 1..203: note = Thermostaphylospora chromogena
  REGION 1..203: note = tr|A0A1H1C638|A0A1H1C638_9ACTN GTP cyclohydrolase 1; OS = Thermostaphylospora chromogena OX=35622 GN=folE PE=3; SV = 1
MQSPETVIPDVTEPLKVDSARIEKAVREILLAIGEDPDRDGLRDTPARVARAYAEQFAGLGQTPEDVLTTVFDADHDEMVLVKDIEVYSTCEHHLVPFYGVAHVGYIPNEKGQITGLSKLARLIDVYARRPQVQERMTSQVADALDRVLEPRGVIVVIEAEHLCMTMRGVRKPGAKTITSAVRGSFRTSEKTRAEAMSLILGQ

SEQ ID NO: 15969 - protein, 258 aa, Thermosulfidibacter takaii
  REGION 1..258: note = tr|A0A0S3QUX0|A0A0S3QUX0_THET7 GTP cyclohydrolase FolE2 OS=Thermosulfidibacter takaii (strain DSM 17441 / JCM 13301 / NBRC 103674 / ABI70S6) OX=1298851 GN=folE2; PE = 3SV=1
MRDLQNERDYRNIPIDRVGIKGLKYPITVLDRHHKEQPTVAEIDIAVGLPKEFRGTHMSRFVEILNNYRWKIHTARVLEILNKVMEKLPSHSAYLRINFPYFLEKQAPVSKEESLMNYNVSMEATLYENGKKEMLLTVEVPVMTLCPCSKEISDKNAHNQRALVKISVKMNKLVWIEELIETAESCASAQLYSLLKREDEKYITEYAYEHPVFVEDLVRDIALKLKKDERISWFRIEAESMESIHNHNAFAVVEAKNR

SEQ ID NO: 15970 - protein, 259 aa, unidentified
  source 1..259: note = Thermosulfurimonas dismutans
  REGION 1..259: note = tr|A0A179D4P3|A0A179D4P3_9BACT GTP cyclohydrolase FolE2 OS=Thermosulfurimonas dismutans OX=999894 GN=folE2; PE = 3 SV=1
MELKDVQSLYDPREISIDKVGIKGIRYPVSVLDKRRGVQHTVAEINMYVDLPREFKGTHMSRFIEILNEFREEIYIKNIPFILDRMREKLSAKVAHLEISFPYFLKKEAPVTQAPSLMEYQCFISGAKSEEELDIVLGVRVPVMTVCPCSQAISEIGAHNQRGEVTLKVRFKRFVWLEELIEIVEASASSPVYPLLKRPDEKYVTEWAHQRPRFVEDVVREVGRRLLDHPDIIWFAVSAENLESIHAHNAYAYLERWKD

SEQ ID NO: 15971 - protein, 229 aa, unidentified
  source 1..229: note = Thermosynechococcus elongatus
  REGION 1..229: note = sp|Q8DJB8|GCH1_THEEB GTP cyclohydrolase 1; OS = Thermosynechococcus elongatus (strain BP-1) OX=197221; GN = folE PE=3 SV=1
MTTFPMPDSIINGKATTPAVLPDRNTHQGKEPIPHPPPPEVAKEEMMAAVRTILLNVGEDPDREGLLKTPKRVAEAMQFLTSGYSQSLETLVNGAIFDEGHDEMVLVRDINFFSLCEHHMLPFIGKAHVAYIPNQRVIGLSKLARVVEMYARRLQVQERLTRQVAEAIETVLDPKGVAVVMEATHMCMVMRGVQKPGSWTVTSSMLGVFREDQKTREEFLNLIRHQPNF

SEQ ID NO: 15972 - protein, 216 aa, unidentified
  source 1..216: note = Thermosynechococcus sp.
  REGION 1..216: note = tr|A0A5C2MAX8|A0A5C2MAX8_9CYAN GTP cyclohydrolase 1; OS = Thermosynechococcus sp. CL-1 OX=2583530 GN=folE PE=3; SV = 1
MSQQSRNQLLTVQSSLESIPTCVSTQVSDAEMEQAVRTLLIGLGENPDREGLRDTPKRVVQALKFLTSGYRQSLDDLLNDAVFYEDTNEMVLVRDIDLFSCCEHHILPIIGRAHVAYIPNGRVIGLSKIARICEMYARRLQVQERLTQQIADALQGLLKPQGVAVVVEATHMCMVMRGVQKPGSWTVTSSMQGVFAEDARTRQEFLDLIRHQPSFR

SEQ ID NO: 15973 - protein, 184 aa, unidentified
  source 1..184: note = Thermosynechococcus sp.
  REGION 1..184: note = tr|V5V3M4|V5V3M4_9CYAN GTP cyclohydrolase 1; OS = Thermosynechococcus sp. NK55a OX=1394889 GN=folE PE=3; SV = 1
MMAAVRTILLNVGEDPDREGLLKTPKRVAEAMQFLTSGYSQSLETLVNGAIFDEGHDEMVLVRDINFFSLCEHHMLPFIGKAHVAYIPNQRVIGLSKLARVVEMYARRLQVQERLTRQVAEAIETVLDPKGVAVVMEATHMCMVMRGVQKPGSWTVTSSMLGVFREDQKTREEFLNLIRHQPNF

SEQ ID NO: 15974 - protein, 192 aa, Thermosyntropha lipolytica
  REGION 1..192: note = tr|A0A1M5Q8Y7|A0A1M5Q8Y7_9FIRM GTP cyclohydrolase 1; OS = Thermosyntropha lipolytica DSM 11003 OX=1123382 GN=folE; PE = 3 SV=1
MACKEIDKPKIEQAFRMILEAIGEDPDREGLRDTPKRVARMYEEIFSGLWCEPREFLQVSFSEFHDELVLVKDIPLYSMCEHHFLPFYGKAHVAYIPRGGKVIGISKLARVAEAYAKRPQLQERLTSQIADCIYETLNPHGVGVVIEAEHMCMTMRGIRKPGSITVTSALRGLFETRHQTREELLSLILNKR

SEQ ID NO: 15975 - protein, 188 aa, Thermotalea metallivorans
  REGION 1..188: note = tr|A0A140L377|A0A140L377_9CLOT GTP cyclohydrolase 1; OS = Thermotalea metallivorans OX=520762 GN=folE PE=3 SV=1
MDKKRIEKAIREILEAIGENPDREGLIDTPKRIANMYEEIFSGLKEDPQEHLEVYFQQEQHEELVLVKDIPFYSMCEHHLVPFFGKCHVGYIPKKGKLTGLSKLARVVETVARRPQLQERLTTMIADAIMEKLSPHGVIVVVEAEHMCMTMRGVKKPGSQTITSAVRGLFNKDAKARAEAMALINLGK

SEQ ID NO: 15976 - protein, 259 aa, Thermotoga maritima
  REGION 1..259: note = sp|Q9WXP6|GCH4_THEMA GTP cyclohydrolase FolE2; OS = Thermotoga maritima (strain ATCC 43589 / MSB8 / DSM 3109 / JCM 10099) OX=243274 GN=folE2 PE=1 SV=1
MKDVQNEKDPRMVPLKKVGIKDLHWPLKVILKEDGYQSTVAQISCSVDLHREKRGIHMSRFIEVLNKLEVITPQIFEEILDDLIEIMEAKRAHLEIHFPYFIWKESPVSRKKSPLKVDCFVEAEKEKNFSFKIGVRTPVHTLCPCSKEISDYGAHNQRAFVEITVKTRKFIWFEDLVEIAEKNASSPLYTLLKRPDEKFVTEKAYENPRFVEDVARDVALELEKDPRITWYRVYVESMESIHNHNAFACVEKGDFVLEG

SEQ ID NO: 15977 - protein, 259 aa, Thermotoga maritima; identical to SEQ ID NO: 15976
  REGION 1..259: note = tr|G4FGV6|G4FGV6_THEMA GTP cyclohydrolase FolE2; OS = Thermotoga maritima (strain ATCC 43589 / MSB8 / DSM 3109 / JCM 10099) OX=243274 GN=folE2 PE=3 SV=1

SEQ ID NO: 15978 - protein, 259 aa, Thermotoga naphthophila; identical to SEQ ID NO: 15976
  REGION 1..259: note = tr|D2C730|D2C730_THENR GTP cyclohydrolase FolE2; OS = Thermotoga naphthophila (strain ATCC BAA-489 / DSM 13996 / JCM 10882 / RKU-10) OX=590168 GN=folE2 PE=3 SV=1

SEQ ID NO: 15979 - protein, 259 aa, Thermotoga naphthophila
  REGION 1..259: note = tr|A0A101EQT0|A0A101EQT0_9THEM GTP cyclohydrolase FolE2 OS=Thermotoga naphthophila OX=93930 GN=folE2 PE=3; SV = 1
MKDVQNEKDPRMVPLKKVGIKDLHWPLKVILKEDGYQSTVAQISCSVDLHREKRGIHMSRFIEVLNKLEVITPQIFEEILDDLIEIMEAKRAHLEIHFPYFIWKESPVSRKKSPLKVDCFVEAEKEKNFSFKIGVRTPVHTLCPCSKEISDYGAHNQRAFVEITVKTRKFIWFEDLVEIAEKNASSPLYTLLKRPDEKFVTEKAYENPRFVEDVARDVALELEKDPRITWYRVYVESMESIHNHNAFACLEKEDFVLEG

SEQ ID NO: 15980 - protein, 259 aa, Thermotoga neapolitana
  REGION 1..259: note = sp|B9K795|GCH4_THENN GTP cyclohydrolase FolE2; OS = Thermotoga neapolitana (strain ATCC 49049 / DSM 4359 / NS-E) OX=309803 GN=folE2 PE=3 SV=1
MKDVQNEKDTRMVPLKKVGIKDLSWPLKILLKGDGYQPTVAQISCSVDLHREKRGIHMSRFIEVLNGLEEITPHIFEKVLDDLIVTMEAKRAHLEIRFPYFVWKESPVTRKVSPLKVDCFVEAEKEKNFSFKIGVRVPVHNLCPCSKEISDYGAHNQRAFVEIHVRTRKFIWFEDLVEIAERNASVPLYTLLKRPDEKFVTERAYENPKFVEDVARDVALDLEKDPRITWYRVYVESMESIHNHNAFACVEKGDFVLEG

SEQ ID NO: 15981 - protein, 259 aa, Thermotoga petrophila
  REGION 1..259: note = sp|A5IL29|GCH4_THEP1 GTP cyclohydrolase FolE2; OS = Thermotoga petrophila (strain RKU-1 / ATCC BAA-488 / DSM 13995) OX=390874 GN=folE2 PE=3 SV=1
MKDVQNEKDPRMVPLKKVGIKDLHWPLKVILKEDGYQSTVAQISCSVDLHREKRGIHMSRFIEVLNKLEVITPQIFEEILDDLIEIMEAKRAHLEIHFPYFTWKESPVSRKKSPLKVDCFVEAEKEKNFSFKIGVRTPVHTLCPCSKEISDYGAHNQRAFVEITVKTRKFIWFEDLVEIAEKNASSPLYTLLKRPDEKFVTEKAYENPRFVEDVARDVALKLEKDPRITWYRVYVESMESIHNHNAFACVEKGDFVLEG

SEQ ID NO: 15982 - protein, 259 aa, Thermotoga sp.; identical to SEQ ID NO: 15976
  REGION 1..259: note = sp|B1LAA9|GCH4_THESQ GTP cyclohydrolase FolE2; OS = Thermotoga sp. (strain RQ2) OX=126740 GN=folE2 PE=3 SV=1

SEQ ID NO: 15983 - protein, 259 aa, Thermotoga sp.
  REGION 1..259: note = tr|A0A0A6N339|A0A0A6N339_9THEM GTP cyclohydrolase FolE2 OS=Thermotoga sp. Mc24 OX=1231241 GN=folE2 PE=3 SV=1
MKDVQNEKDPRMVPLKKVGIKDLHWPLKVILKEDGYQSTVAQISCSVDLHREKRGIHMSRFIEVLNKLEVITPQIFEEILDDLIEIMEAKRAHLEIRFPYFIWKESPVSRKKSPLKVDCFVEAEKEKNFSFKIGVRTPVHTLCPCSKEISDYGAHNQRAFVEITVKTKKFIWFEDLVEIAERNASSPLYTLLKRPDEKFVTEKAYENPRFVEDVARDVALELEKEPRITWYRVYVESMESIHNHNAFACVEKGDFVLEG

SEQ ID NO: 15984 - protein, 263 aa, unidentified
  source 1..263: note = Thermotogae bacterium
  REGION 1..263: note = tr|A0A496QF43|A0A496QF43_9BACT GTP cyclohydrolase FolE2 OS=Thermotogae bacterium OX=2053689 GN=folE2 PE=3; SV = 1
MEKRKAFLRDVQNEKDERNVPIDMVGIRGLKYPIVVLDRAKGRQNTVGTFDLFVDLPRDFRGTHMSRFVEVLDRHNNRITPRNMESILSDMRAFLKADVAHINVFFPYFLRKNAPVSGISSYSSFECGFIARLNSGFDFILEVNVPVMTVCPCSKEISERGAHNQRANAKVRIRMKSLVWIEEIIEVAETSASAPIFSLLKREDEKYITELSYDNPRFVEDLSREIVLHLEKDRRITWYRVEVASQESIHNHEAYACIEKREL

SEQ ID NO: 15985 - protein, 259 aa, unidentified
  source 1..259: note = Thermotogae bacterium
  REGION 1..259: note = tr|A0A1V6GZ71|A0A1V6GZ71_9BACT GTP cyclohydrolase FolE2 OS=Thermotogae bacterium ADurb.Bin062 OX=1852923; GN = folE2 PE=3 SV=1
MLDVQSEQDHRNLPLDRVGIKKMKYPIALRGKEKGTQHTIAEVTMSVDLPLHFRGTHMSRFVEVLHSHAHNMELKNLKTILSDMKQKLSASRAHLDLEFPYTIEKMAPVTGILSYMVIPCQFNATLDETDRFELVYGAKVPIQTVCPCSKAISSRGAHNQRANVTILLISKKIIWIEDIVKIAEQGASSPVFPLLKREDEKFVTENGYDHAKFVEDVARDIGVVLRESESVSWYSVEVSSMESIHDHDAFAYLEGGQRT

SEQ ID NO: 15986 - protein, 256 aa, unidentified
  source 1..256: note = Thermotogales bacterium
  REGION 1..256: note = tr|A0A124G2T2|A0A124G2T2_9BACT GTP cyclohydrolase FolE2 OS=Thermotogales bacterium 46_20 OX=1635293 GN=folE2; PE = 3 SV=1
MRDVQNDRDKRNIPVDMVGVRSVMYPIVVLDKENQNQNTVGSFNICVDLPKDFRGTHMSRFIEVLDSHNKKITPRNMKHILDDILRSLDAAVAHLKVEFPYFIRKQAPVSRVESYSSYKCSFTATKNNHFDFVLGVSVPVMTVCPCSREISDRGAHNQRAETHVQLRMNSLVWIEDVVQIVEDSASSPVFSLLKREDEKFVTENSYDNPRFVEDLSREIVQKLEMDRRISWYKVEVTSMESIHNHEAYACIERKDD

SEQ ID NO: 15987 - protein, 256 aa, Thermovenabulum gondwanense
  REGION 1..256: note = tr|A0A162MKJ8|A0A162MKJ8_9FIRM GTP cyclohydrolase FolE2 OS=Thermovenabulum gondwanense OX=520767 GN=folE2; PE = 3 SV=1
MKDVQSEKDERMVPLKKVGIKGLKWPLKVQDKKRGFQYTVANITISADLHRDLRGTHMSRFVEVLKNFEILSPKGIEDILIEIKEKLGANSAHIELLIPYFIWKESPVTKSESPLEVCAKIYAELSDSYKIYTGVKVPVHTLCPCSKEISQEGAHNQRAEVDILTRSKKMIWFEDLIEIAESSASCPIYTLLKRPDEKYITEKAFENPKFVEDVTRDAALRLEEDERIEWYRVEVTSFESIHNHQAFACVEKGWMN

SEQ ID NO: 15988 - protein, 186 aa, Thermovibrio ammonificans
  REGION 1..186: note = tr|E8T3S0|E8T3S0_THEA1 GTP cyclohydrolase 1; OS = Thermovibrio ammonificans (strain DSM 15698 / JCM 12110 / HB-1) OX=648996 GN=folE PE=3 SV=1
MAFDRERIERAVREILLAIGEDPDREGLRDTPKRVAKMYEEVLSGYGDSPENHMVLFTERYDEMIIVRDIPIYSMCEHHMLPFFGKAHVAYIPGNDKVTGLSKLARIVDVYAKRLQLQERMTQQIADAIMEKLGAKGVMVVVEAQHLCMIMRGVKKPGSFTVTSAVKGVMRHEPTRMEALFLIKGR

SEQ ID NO: 15989 - protein, 187 aa, Thermovibrio guaymasensis
  REGION 1..187: note = tr|A0A420W6I2|A0A420W6I2_9BACT GTP cyclohydrolase 1; OS = Thermovibrio guaymasensis OX=240167 GN=folE PE=3 SV=1
MAFDSERIEKAVREILIAIGEDPDREGLKDTPKRVAKLYEEILSGYNDSPENHLVLFTEKYDEMIIVKDIPFYSMCEHHMLPFFGKAHVAYIPDNSKVTGLSKLARIVDVYAKRFQLQERMTEQIADAVMAKLNAKGVMVVVEAQHLCMIMRGVKKPGSYTVTSAVKGIMREEPTRMEALFLLKGRS

SEQ ID NO: 15990 - protein, 257 aa, Thermovirga lienii
  REGION 1..257: note = tr|G7V650|G7V650_THELD GTP cyclohydrolase FolE2; OS = Thermovirga lienii (strain ATCC BAA-1197 / DSM 17291 / Cas60314) OX=580340 GN=folE2 PE=3 SV=1
MKDVQNEKDTRNIPIDRVGVTSVSYPIVVLDPKENLQHTVANVTMAVSLPRKFRGTHMSRFLEVLNEFKGRVTLESLEQVTVDLKRKLNASGSEVKIEFPYFINRKAPVSGSTSYTRYDVVFWASYDEHFDFTMKVTVPVQTLCPCSKEISEYGAHNQRAKVSIEVRMNKRIWIEELVDVAESCASSPVYTLLKRKDEKFVTEQAYSNPRFVEDVVRDVALKLDQDDRVDWFSVSVVSQESIHNHDAFASLVRDKRS

SEQ ID NO: 15991 - protein, 204 aa, Thermus aquaticus
  REGION 1..204: note = tr|B7A8L3|B7A8L3_THEAQ GTP cyclohydrolase 1; OS = Thermus aquaticus Y51MC23 OX=498848 GN=folE PE=3 SV=1
MERKMVEIEETGLTFETELDLGRLEGLAAEWLQVIGEDPNREGLLKTPERVAKAWAFLTRGYRQSLEEIVNGAVFRAEGSEMVVVKGIEFYSLCEHHMLPFFGQVHIGYIPGEKILGLSKFARIVDLFARRLQVQERLAVQIAEAIQQVLEPRGVGVVVEGVHLCMMMRGVEKQHSRTVTSAMLGVFREDARTREEFLSHLKGA

SEQ ID NO: 15992 - protein, 242 aa, Thermus aquaticus
  REGION 1..242: note = tr|A0A0M9ADQ4|A0A0M9ADQ4_THEAQ Putative GTP cyclohydrolase 1 type 2 OS=Thermus aquaticus OX=271; GN = ybgI PE=4 SV=1
MDRDELVRYLNGYLDLEAFPQDPSLNGLQVEGKPRVTKVGAAVDAGEAIFRKALEEGVDFLLVHHGLFWGRPFPIVGHHKRRLALLFQGGINLYAAHLPLDAHPEVGNNFVLARDLGLLDLTPWDVGVRGRFPLPTPLLQVADRLGQLTGMQPLVHQGGLDQVETVIIVSGSGTGLLPKVDADLFITGEPKHAVFHETFERGLNVIYAGHYDTETFGVKALAQHLYERFGLPWVFLDHPTGL

SEQ ID NO: 15993 - protein, 198 aa, Thermus arciformis
  REGION 1..198: note = tr|A0A1G7DCQ8|A0A1G7DCQ8_9DEIN GTP cyclohydrolase 1; OS = Thermus arciformis OX=482827 GN=folE PE=3 SV=1
MVEIEETGLTFATEVDLDRLQSLAAEWLQAIGEDPNREGLLKTPERVAKAWAFLTRGYRQDLKELVNGAVFQAEGSEMVVVKGIEFYSMCEHHMLPFFGQVHIGYIPDGKILGLSKFARIVDMFARRLQVQERLAVQIAEAIQEVLEPQGVGVVVEGVHLCMMMRGVEKQHSRTVTSAMLGVFRESQKTREEFLSHLK

SEQ ID NO: 15994 - protein, 202 aa, Thermus brockianus
  REGION 1..202: note = tr|A0A1J0LRP1|A0A1J0LRP1_THEBO GTP cyclohydrolase 1; OS = Thermus brockianus OX=56956 GN=folE PE=3 SV=1
MERKMVEIEETGLSFETELDLDRLKALAADWLLAIGEDPNREGLLKTPERVAKAWAFLTRGYRQDLKEIVNGAIFQAEGSEMVVVKGIEFYSLCEHHLLPFFGQVHIGYIPNGKILGLSKFARIVDLFARRLQVQERLAVQIAEAIQEVLEPQGVGVVVEGVHLCMMMRGVEKQHSRTVTSAMLGVFRESQKTREEFLSHLR

SEQ ID NO: 15995 - protein, 202 aa, Thermus filiformis
  REGION 1..202: note = tr|A0A0A2WQB3|A0A0A2WQB3_THEFI GTP cyclohydrolase 1; OS = Thermus filiformis OX=276 GN=folE PE=3 SV=1
MERKMVKLEDTGLTFETEVDLERLKGLALGWLEAIGEDPAREGLRKTPERVAKAWAFLTRGYRQNLKEIVNEAVFQAEGSELVVVKGIEFYSMCEHHLLPFFGQVHIGYIPDGKILGLSKFARIVDMFARRLQVQERLAVQIAEAIQEVLSPRGVGVVIEGVHLCMMMRGVEKQHSRTTTSAMLGVFREDQKTREEFLSLIR

SEQ ID NO: 15996 - protein, 202 aa, Thermus oshimai
  REGION 1..202: note = tr|K7QXP7|K7QXP7_THEOS GTP cyclohydrolase 1; OS = Thermus oshimai JL-2 OX=751945 GN=folE PE=3 SV=1
MERRMVEIEETGLSFVTEVDLERLQALSEEWLRLIGEDPEREGLKKTPERVAKAWAFLTRGYRQSLEEIVNGAIFQAEGSEMVVVKGIEFYSLCEHHMLPFFGQVHIGYIPNQKILGLSKFARIVDMFARRLQVQERLAVQIAEAIQEVLEPQGVGVVVEGVHLCMMMRGVEKQHSRTVTSAMLGVFRESAKTREEFLDHLK

SEQ ID NO: 15997 - protein, 206 aa, unidentified
  source 1..206: note = Thermus parvatiensis
  REGION 1..206: note = tr|H7GIK3|H7GIK3_9DEIN GTP cyclohydrolase 1; OS = Thermus parvatiensis OX=456163 GN=folE PE=3 SV=1
MERKMVELEDTGLTFATEVDLERLQALAAEWLQVIGEDPGREGLLKTPERVAKAWAFLTRGYRQRLEEVVGGAVFPAEGSEMVVVKGVEFYSMCEHHLLPFFGKVHIGYIPDGKILGLSKFARIVDMFARRLQVQERLAVQIAEAIQEVLEPQGVGVVVEGVHLCMMMRGVEKQHSRTVTSAMLGVFRENQKTREEFLSHLRDGTA

SEQ ID NO: 15998 - protein, 202 aa, Thermus scotoductus
  REGION 1..202: note = tr|E8PQG2|E8PQG2_THESS GTP cyclohydrolase 1; OS = Thermus scotoductus (strain ATCC 700910 / SA-01); OX = 743525 GN=folE PE=3 SV=1
MERKMVELEDTGLTFETHVDLGRLKRLAAEWLEVIGEDPSREGLLKTPERVAKAWAFLTRGYRQDLKAIVNGALFPAEGSEMVVVKGIEFYSMCEHHLLPFFGQVHIGYIPGEKILGLSKFARIVDMFARRLQVQERLAVQIAEAIQEILEPQGVGVVVEGVHLCMMMRGVEKQHSRTTTSAMLGVFRESQKTREEFLSHLK

SEQ ID NO: 15999 - protein, 202 aa, Thermus scotoductus
  REGION 1..202: note = tr|A0A430UVN9|A0A430UVN9_THESC GTP cyclohydrolase 1; OS = Thermus scotoductus OX=37636 GN=folE PE=3 SV=1
MERKMVEIEETGLTFETEMDLERLQRLAAEWLQVIGEDPARQGLLKTPERVAKAWAFLTRGYRQDLKAIVNGALFPAEGSEMVVVKGIEFYSMCEHHLLPFFGQVHIGYIPGEKILGLSKFARIVDMFARRLQVQERLAVQIAEAVQEILEPQGVGVVVEGVHLCMMMRGVEKQHSRTTTSAMLGVFRESQKTREEFLSHLK

SEQ ID NO: 16000 - protein, 202 aa, Thermus sp.
  REGION 1..202: note = tr|G8NC50|G8NC50_9DEIN GTP cyclohydrolase 1; OS = Thermus sp. CCB_US3_UF1 OX=1111069 GN=folE PE=3 SV=1
MSRKMVEIEETGLSFATEVDLERLQHLSAEWLAVIGEDPAREGLRKTPERVAKAWAFLTRGYRQDLKEIVNGAVFQAEGSEMVVVKGVEFYSLCEHHLLPFFGQVHIGYIPNGKILGLSKFARIVDMFARRLQVQERLAVQVAEAIQEVLEPQGVGVVVEGVHLCMMMRGVEKQHSRTITSAMLGVFRESQKTREEFLSHLK

SEQ ID NO: 16001 - protein, 204 aa, Thermus sp.
  REGION 1..204: note = tr|A0A4V2IUK6|A0A4V2IUK6_9DEIN GTP cyclohydrolase 1; OS = Thermus sp. CFH 72773T OX=2509362 GN=folE PE=3 SV=1
MDPKMVEVEETGLTFATEMDLERLQRLAAEWLEVIGEDPTREGLVKTPERVAKAWAFLTRGYRQDLQEIVNGAVFQAEGSEMVVVKGIEFYSLCEHHLLPFFGQVHVGYIPDGKILGLSKFARIVDMFARRLQVQERLAVQVAEAIQEILEPQGVGVVVEGVHLCMMMRGVEKQHSRTVTSAMLGVFRESQKTREEFLSHLRAG

SEQ ID NO: 16002 - protein, 202 aa, unidentified
  source 1..202: note = Thermus tengchongensis
  REGION 1..202: note = tr|A0A4Y9EVB0|A0A4Y9EVB0_9DEIN GTP cyclohydrolase 1; OS = Thermus tengchongensis OX=1214928 GN=folE PE=3 SV=1
MEGRMVEIEETGLTFETEVDLDRLQRLAAEWLEVIGEEPSREGLLKTPERVAKAWAFLTRGYRQSLQEIVNGAVFQAEGSEMVVVKGIEFYSMCEHHLLPFFGQVHIGYIPDGKILGLSKFARIVDMFARRLQVQERLAVQIAEAIQEVLQPQGVGVVVEGVHLCMMMRGVEKQHSRTVTSAMLGAFRESQKTREEFLSHLK

SEQ ID NO: 16003 - protein, 202 aa, unidentified
  source 1..202: note = Thermus tengchongensis
  REGION 1..202: note = tr|A0A4Y9FB64|A0A4Y9FB64_9DEIN GTP cyclohydrolase 1; OS = Thermus tengchongensis OX=1214928 GN=folE PE=3 SV=1
MEGRMVEIEETELTFETEVDLDRLQRLAAEWLEVIGEEPSREGLLKTPERVAKAWAFLTRGYRQSLQEIVNGAVFQAEGSEMVVVKGIEFYSMCEHHMLPFFGQVHIGYIPDGKILGLSKFARIVDMFARRLQVQERLAVQIAEAIQEVLQPQGVGVVVEGVHLCMMMRGVEKQHSRTVTSAMLGVFRESQKTREEFLSHLK

SEQ ID NO: 16004 - protein, 220 aa, Thermus thermophilus
  REGION 1..220: note = tr|Q5SH52|Q5SH52_THET8 GTP cyclohydrolase 1; OS = Thermus thermophilus (strain HB8 / ATCC 27634 / DSM 579) OX=300852 GN=folE PE=1 SV=1
MSPGPQSGGQERGSMERKMVELEDTGLTFATEVDLERLQALAAEWLQVIGEDPGREGLLKTPERVAKAWAFLTRGYRQRLEEVVGGAVFPAEGSEMVVVKGVEFYSMCEHHLLPFFGKVHIGYIPDGKILGLSKFARIVDMFARRLQVQERLAVQIAEAIQEVLEPQGVGVVVEGVHLCMMMRGVEKQHSRTVTSAMLGVFRENQKTREEFLSHLRDGTA

SEQ ID NO: 16005 - protein, 207 aa, Thermus thermophilus
  REGION 1..207: note = tr|A0A510I0I3|A0A510I0I3_THETH GTP cyclohydrolase 1; OS = Thermus thermophilus OX=274 GN=folE PE=3 SV=1
MERKMVELEDTGLTFATEVDLERLQALAAEWLQVIGEDPGREGLLKTPERVAKAWAFLTRGYRQRLEEVVGGAVFPAEGSEMVVVKGVEFYSMCEHHLLPFFGKVHIGYIPDGKILGLSKFARIVDMFARRLQVQERLAVQIAEAIQEVLEPQGVGVVVEGVHLCMMMRGVEKQHSRTVTSAMLGVFRENQKTREEFLSHLKDPLGL

SEQ ID NO: 16006 - protein, 269 aa, Thioalbus denitrificans
  REGION 1..269: note = tr|A0A369C3E8|A0A369C3E8_9GAMM GTP cyclohydrolase FolE2 OS=Thioalbus denitrificans OX=547122 GN=folE2 PE=3; SV = 1
MNRPEKSIADVQSSQDTRRIAIDKVGIKDIRHPIRVADRDGGEQHTVAMFNMYVNLPHNFKGTHMSRFVEILNLHEREITVDSFKEMLVEVTQRLEAESGHIEMTFPYFVNKKAPISGVQSLMDYEVSFIGEAHNGEISMDLKVVVPVTSLCPCSKKISDYGAHNQRSHVTVAARTRGFIWIEDIIDLVEQEASCELYGLLKRPDEKHVTERAYDNPKFVEDMVRDVAARLNADERISAYVVESENFESIHNHSAYALISMDKERAAQG

SEQ ID NO: 16007 - protein, 212 aa, Thioalbus denitrificans
  REGION 1..212: note = tr|A0A369CED2|A0A369CED2_9GAMM GTP cyclohydrolase 1; OS = Thioalbus denitrificans OX=547122 GN=folE PE=3 SV=1
MDSNKRLKTDIVKGGHYAANLDAEADETYDEQFESLVHGMLVRLGEDPRREGLTRTPLRVAKAMDFLTSGYGVTAEEVVKGALFEDDCKEMVLVKDIEFYSLCEHHVLPFFGRAHVAYLPNGKIIGLSKIARIVDVFARRLQVQERMTNQIADALMEIMNAHGVAVVTEASHFCMMMRGVQKQNSSTITSAMRGTFERNASTRAEFLDLIRR

SEQ ID NO: 16008 - protein, 270 aa, Thioalkalivibrio denitrificans
  REGION 1..270: note = tr|A0A1V3NDE4|A0A1V3NDE4_9GAMM GTP cyclohydrolase FolE2 OS=Thioalkalivibrio denitrificans OX=108003 GN=folE2; PE = 3 SV=1
MSTVAPKVISSGMPDVQASADTRRIPINKVGIKDIRHPVRVSDRDGGEQHTVARFNMYVNLPHDFKGTHMSRFVEILNNHEREITVQSFKQMLHEMAERLEAGSGHIEMSFPYFVNKRAPVSGVMSLMDYDVTFIGEIHDGAAQMNIKVVVPVTSLCPCSKGISERGAHNQRSHVTVNARVRDFVWIEEIIDLVESEASCELYGLLKRPDEKHVTERAYDNPKFVEDMVRDVAARLNADERITAYSVESENFESIHNHSAYALIEKDKEG

SEQ ID NO: 16009 - protein, 202 aa, Thioalkalivibrio denitrificans
  REGION 1..202: note = tr|A0A1V3NHK9|A0A1V3NHK9_9GAMM GTP cyclohydrolase 1; OS = Thioalkalivibrio denitrificans OX=108003 GN=folE PE=3; SV = 1
MTEHQCHSDDDDFPRAESEQRMAEQFTRIIAGLGEDPERHGLAGTPLRAARAMAYLTRGYEQSLEELVNGALFDTDNDEMVLVRDIEFYSLCEHHLLPFLGKCHVAYLPKGRVVGLSKIARIVDMFSRRLQIQETLTRQIADAIESVTDARGVAVVMEAKHLCMMMRGVEKQNATMTTSMMLGTFREDARTRAEFMGLIRGG

SEQ ID NO: 16010 - protein, 207 aa, Thioalkalivibrio halophilus
  REGION 1..207: note = tr|A0A1V2ZZK4|A0A1V2ZZK4_9GAMM GTP cyclohydrolase 1; OS = Thioalkalivibrio halophilus OX=252474 GN=folE PE=3 SV=1
MDAASHSDSHSDEEPDNRTPASELAGHYREILAGLGEDPEREGLKDTPLRAAKAMQYLTRGYEQDLDTIVNGALFTSDNDEMVLLRDIELYSLCEHHVLPIIGKVHVAYLPDGKVIGLSKIARIVDMFAARLQIQENLTRQIAEALQQVTQAKGVGVVVDARHMCMTMRGVEKQHSSMATSVMLGAFREDSRTRREFLNLIGRGGRD

SEQ ID NO: 16011 - protein, 207 aa, Thioalkalivibrio nitratireducens
  REGION 1..207: note = tr|L0DYC4|L0DYC4_THIND GTP cyclohydrolase 1; OS = Thioalkalivibrio nitratireducens (strain DSM 14787 / UNIQEM 213 / ALEN2) OX=1255043 GN=folE1 [H] PE=3 SV=1
MTAVTRPIKIEQNETEPMTVPLASVETLSEHYRQLLRGLGEDVEREGLLDTPARAVKAMKYLTRGYHQNLDEIVNNALFTSENDEMVLLKDIELYSLCEHHVLPIIGKAHVAYLPNGRVIGLSKIARIVDMFAARLQIQENLTRQVAEALMKVTNARGVGVVIDAKHMCMTMRGVEKQNSSMATSVMLGAFREDQRTREEFLDLIRR

SEQ ID NO: 16012 - protein, 207 aa, Thioalkalivibrio paradoxus
  REGION 1..207: note = tr|W0DL08|W0DL08_9GAMM GTP cyclohydrolase 1; OS = Thioalkalivibrio paradoxus ARh 1 OX=713585 GN=folE PE=3; SV = 1
MTAVSRPIKIEQNETEPMTVPLASVETLSEHYRQLLRGLGEDVEREGLLDTPARAVKAMKYLTRGYHQNLDEIVNNALFTSENDEMVLLKDIELYSLCEHHVLPIIGKAHVAYLPNGRVIGLSKIARIVDMFAARLQIQENLTRQIAEALMQVTDARGVGVVIDAKHMCMTMRGVEKQNSSMATSVMLGAFRDDQRTREEFLDLIRR

SEQ ID NO: 16013 - protein, 198 aa, Thioalkalivibrio sp.
  REGION 1..198: note = tr|D3SB85|D3SB85_THISK GTP cyclohydrolase 1; OS = Thioalkalivibrio sp. (strain K90mix) OX=396595 GN=folE; PE = 3 SV=1
MTSAADGRPLPAPEALARHYREILAGLNEDPNREGLLDTPMRAAKAMQYLTRGYHQDLDTIVNGALFSSDNDEMVLLRDIELYSLCEHHLLPIIGKVHVAYLPNGKVIGLSKIARIVDMFAARLQIQENMTRQIAEALMQVTDAKGVGVVVDAKHMCMTMRGVEKQHSSMATSVMLGAFRKDARTRREFLNLIHGSRD

SEQ ID NO: 16014 - protein, 304 aa, Thioalkalivibrio sp.
  REGION 1..304: note = tr|A0A318VUM8|A0A318VUM8_9GAMM GTP cyclohydrolase FolE2 OS=Thioalkalivibrio sp. ALE21 OX=1158175 GN=folE2; PE = 3 SV=1
MDSASDHRSTDLPDVATGTSRRASTLDWVGMERIALPLQVAGQPVAAHADAGVSLDDPEARGIHMSRLYLALRMLIHRELDCARLGHVLDAFLESHEGLSGRAALSLEGEALLERPAMVSPLAGWKAYPFRVDTEKDDRGTQIRLGIEIGYSSTCPCSAALARQAIQERYDQDFGTAPPDPDRLREWLGSEAGIMATPHSQRSRAWVEVGVRPDAETFPFRFLVDRVEQALGTALQTAVKRADEQAFAVANGGNPMFCEDAARRLDEALEAPFGARGYRIHVRHEESLHAHDAVARVERPPRGA

SEQ ID NO: 16015 - protein, 200 aa, unidentified
  source 1..200: note = Thioalkalivibrio sulfidiphilus
  REGION 1..200: note = tr|B8GR58|B8GR58_THISH GTP cyclohydrolase 1; OS = Thioalkalivibrio sulfidiphilus (strain HL-EbGR7); OX = 396588 GN=folE PE=3 SV=1
MSHHDCCEQEDDFPGADAEQRMAEDYTRIIRGLGEDPDRNGLIGTPLRAARAMSYLTRGYHQSLDELVNGALFETDNDEMVLVRDIEFYSLCEHHLLPFLGRCHVAYLPKGRVIGLSKIARIVDMFARRLQIQETLTRQIAEAIESVTDARGVAVVMEAKHMCMMMRGVEKQNSTMTTSMMTGTFRNDARTRAEFMGLIR

SEQ ID NO: 16016 - protein, 270 aa, unidentified
  source 1..270: note = Thioalkalivibrio sulfidiphilus
  REGION 1..270: note = tr|B8GN60|B8GN60_THISH GTP cyclohydrolase FolE2; OS = Thioalkalivibrio sulfidiphilus (strain HL-EbGR7); OX = 396588 GN=folE2 PE=3 SV=1
MSNIAPKAISGGMPDVQASADTRQIPINKVGIKDIRHPVRVSDRTGSEQHTVARFNMYVNLPHNFKGTHMSRFVEILNNHEYEITVQSFKQMLHEMAERLEAGSGHIEMSFPFFVNKRAPVSGVMSLMDYDVSFIGEIHDGVAQMNIKVVVPVTSLCPCSKKISDYGAHNQRSHVTINARVGEFVWIEELIDLVESEASCELYGLLKRPDEKHVTERAYDNPKFVEDMVRDVAARLNADERIRAYAVESENFESIHNHSAYALIEKDKDA

SEQ ID NO: 16017 - protein, 217 aa, Thioalkalivibrio versutus
  REGION 1..217: note = tr|A0A1V3BT54|A0A1V3BT54_9GAMM GTP cyclohydrolase 1; OS = Thioalkalivibrio versutus OX=106634 GN=folE PE=3 SV=1
MNENKEPSMNADARMADEPTATPASGQPLAAPEQLAEHYREILAGLGENPQREGLRDTPMRAAKAMQYLTRGYQQDLDTIVNDALFSSDNDEMVLLRDIELYSLCEHHLLPIIGKVHVAYLPDGKVIGLSKIARIVDMFAARLQIQESLTREIAEALMQVTGAKGVGVVVDAKHMCMTMRGVEKQHSSMATSVMLGAFREDGRTRREFLNLIGRTGN

SEQ ID NO: 16018 - protein, 217 aa, Thioalkalivibrio versutus
  REGION 1..217: note = tr|A0A0G3G849|A0A0G3G849_9GAMM GTP cyclohydrolase 1; OS = Thioalkalivibrio versutus OX=106634 GN=folE PE=3 SV=1
MNENKEPSMNADARMADEPTATPASGQPLAAPEQLAEHYREILAGLGENPQREGLRDTPMRAAKAMQYLTRGYQQDLDTIVNDALFSSDNDEMVLLRDIELYSLCEHHLLPIIGKVHVAYLPDGKVIGLSKIARIVDMFAARLQIQESLTREIAEALMQVTGAKGVGVVVDAKHMCMTMRGVEKQHSSMATSVMLGAFREDGRTRREFLNLIRGSRD

SEQ ID NO: 16019 - protein, 283 aa, Thiobaca trueperi
  REGION 1..283: note = tr|A0A4V2V126|A0A4V2V126_9GAMM GTP cyclohydrolase FolE2 OS=Thiobaca trueperi OX=127458 GN=folE2 PE=3 SV=1
MEQSLEPTCRVTAANAIADVQGSADTRRIAIDRVGIKDIRHPVRIRDRSGLEQHTVATFNMSVYLPHDFKGTHMSRFVQILNSHEREISVSSFQDMLAEMSRRLESEAGHIEMRFPFFVNKKAPVSGVSSLLDYEVTFIGEIRDGQPNLEVKVVIPVTSLCPCSKEISAYGAHNQRSHVTVRVQTDGFIWLEELIELVEREASSELFGLLKRPDEKFVTERAYNNPKFVEDMVRDVASRLNEDRRILAYVVEAENFESIHNHSAYAMIERDKAREAQIAEATL

SEQ ID NO: 16020 - protein, 212 aa, Thiobaca trueperi
  REGION 1..212: note = tr|A0A4V2V1W8|A0A4V2V1W8_9GAMM GTP cyclohydrolase 1; OS = Thiobaca trueperi OX=127458 GN=folE PE=3 SV=1
MSEKPKLSQVLTHGRYATSFDAESAEEVYDPRKESLVRSMLTEIGEDPEREGLRRTPLRVAKAMDFLTSGYSLSAEEILKGAIFKEDVKEMVVVRDIEFYSMCEHHMLPFFGHAHVGYLPNGQVVGLSKVARVVDVFARRLQVQERLTNQVADALMEHLSAHGVAVVMEASHTCMMMRGVQKQRSTTVSSAMRGAFDANPSTRAEFMSFIRN

SEQ ID NO: 16021 - protein, 260 aa, unidentified
  source 1..260: note = Thiobacillaceae bacterium
  REGION 1..260: note = tr|A0A4V2NVZ5|A0A4V2NVZ5_9PROT GTP cyclohydrolase FolE2 OS=Thiobacillaceae bacterium LSR1 OX=2528202; GN = folE2 PE=3 SV=1
MPDVQNYHDARRIAIDKVGIKAIRHPIRVADQNGGVQHTIATFNMYVYLPHHFKGTHMSRFVEILNSYEREFSVESFEAMMRQMVERLEAESGHVEMNFPYFISKKAPVSGVESMIDYDITFIGEIRNGEYIQTIRAVVPVTSLCPCSKKISDYGAHNQRSHVTLTVRTNSFVWIEDLVRFAEDNASCELYGLLKRPDEKFVTERAYDNPKFVEDLVRDVAAALNSDERIDAYVVEAENFESIHNHSAYALIERDKQAKA

SEQ ID NO: 16022 - protein, 213 aa, unidentified
  source 1..213: note = Thiobacillaceae bacterium
  REGION 1..213: note = tr|A0A4R1BC84|A0A4R1BC84_9PROT GTP cyclohydrolase 1; OS = Thiobacillaceae bacterium LSR1 OX=2528202 GN=folE PE=3; SV = 1
MSDSCDHDCQPPYRPGHLGIPQVRRFDGEAFERAVTDLLLACGIEPDSNHTGRTARRVRELWERRLLGGYDMDPGEALGDGFEDCRDDMVVVRGIAIHGVCPHHLVPFRGVAHVAYIPGGRLHGFGRIARMVDAIGHRFTYQEWMTRDIAEALISHGRARGAACVIEAEQLCLLLGEDRRGDERVVTQAFSGCFRDDAQARSEFLRAINGQMP

SEQ ID NO: 16023 - protein, 269 aa, Thiobacillus denitrificans
  REGION 1..269: note = sp|Q3SKF2|GCH4_THIDA GTP cyclohydrolase FolE2; OS = Thiobacillus denitrificans (strain ATCC 25259); OX = 292415 GN=folE2 PE=3 SV=1
MNEICDTAVCMPDVQSSADTRQIAIDKVGIKSIRHPVRVADKADGVQHTIANFNMYVFLPHNFKGTHMSRFIEILNTREREISVENFEGMLRQMVERLEAESGYIEMTFPYFINKSAPVSGVQSMLDYEVTFVGAIENGQYTHTTKVVVPVTSLCPCSKKISEYGAHNQRSHVTVTAKTRGFLWIEDLVRKVEDQASCELFGLLKRPDEKYVTERAYDNPKFVEDIVRDVAAAMNAEPLIDAYVVEAENFESIHNHSAYALIEHDKRKK

SEQ ID NO: 16024 - protein, 214 aa, Thiobacillus denitrificans
  REGION 1..214: note = tr|A0A106BVX5|A0A106BVX5_THIDE GTP cyclohydrolase 1; OS = Thiobacillus denitrificans OX=36861 GN=ABW22_00175 PE=3; SV = 1
MIDACDHDCHTPHVSGSFGIPQVGAFDPAAFEQAVNAMLAACGVAPDSVHTGRTAQRVRELWQRRLLGGYAIEPAEALGEGFADARDDMVVVRGIAVHGVCPHHLVPFRGVAHVAYIPGGRLHGFGRIARMVDAIGHRFTYQEWMTRDIAEALVTHGLAQGAACIIEAEQLCLLLGEDRRGDERVVTQAFTGCFKTSDQMRNEFLRAVTHSDLK

SEQ ID NO: 16025 - protein, 273 aa, Thiobacillus sp.
  REGION 1..273: note = tr|A0A1Q4EI66|A0A1Q4EI66_9PROT GTP cyclohydrolase FolE2 OS=Thiobacillus sp. 0-1251 OX=1895858 GN=folE2 PE=3; SV = 1
MPDRKSARSVDTAIPDVQNTPDVRRIAIDKVGIKAIRHPVKVRDKSSGTQHTIATFGMYVHLPHHFKGTHMSRFIEILNSQEREITVESFESMLRQMVERLEARSGYIEMSFPYFINKQAPVSGVKSLLDYEVTFIGEIRDGAYHQTVRILVPCTSLCPCSKGISKYGAHNQRSHITITVKTNDFIWIEDLIHIAEVNASSQLYGLLKRPDEKYVTEKAYENPKFVEDLVRDVAAALNEDARIESYVVESENFESIHNHSAYALIERTAPLSA

SEQ ID NO: 16026 - protein, 195 aa, Thiobacillus sp.
  REGION 1..195: note = tr|A0A358C4V3|A0A358C4V3_9PROT GTP cyclohydrolase 1; OS = Thiobacillus sp. OX=924 GN=DEB56_04460 PE=3 SV=1
MPQVGAFDPAAFEQAVNAMLAACGVAPDSVHTGRTAERVRELWQKRLLGGYAIEPAAALGEGFTDDRDDMVVVRGIAVHGVCPHHLVPFRGVAHVAYIPGGRLHGFGRIARMVDAIGHRFTYQEWMTRDIAEALVTHGRAQGAACIIEAEQLCLLLGEDRRGDERVVTQAFTGCFRTSDQQRNEFLRAVAQSDLR

SEQ ID NO: 16027 - protein, 212 aa, Thiocapsa marina
  REGION 1..212: note = tr|F9UEU5|F9UEU5_9GAMM GTP cyclohydrolase 1; OS = Thiocapsa marina 5811 OX=768671 GN=folE PE=3 SV=1
MAEKPKLTQVFTHSHYATSFEAESDEEVYDARKEALVKSMLGEIGEDPNREGLRRTPLRVAKAMDFLTSGYSMSAEEIIKKALFEEDVREMVVVRDIEFYSMCEHHMLPFFGHAHVGYLPNGKVVGLSKIARVVDVFARRLQVQERLTSQVADALMEHLGAHGVAVVMEASHTCMMMRGVQKQRSSTVSSAMRGTFETDPRTRSEFMSFIKG

SEQ ID NO: 16028 - protein, 284 aa, Thiocapsa marina
  REGION 1..284: note = tr|F9U519|F9U519_9GAMM GTP cyclohydrolase FolE2; OS = Thiocapsa marina 5811 OX=768671 GN=folE2 PE=3 SV=1
MEQVLEPNCCAAPDNAEIADVQASADSRRIAIDKVGIKDIRHPVRVSDRNGTEQHTVANFNMYVYLPHDFKGTHMSRFVQILNNHEREIGVASFKEMLAEMSQLLESEAGHIEMRFPFFVNKKAPVTGVESLLDYEVTFIGEIRRGVPTLEIKVVVPVTSLCPCSKKISAYGAHNQRSHVTVQVRSHGHIWIEELIEMVEAEASSELFGLLKRPDEKYVTEHAYDNPKFVEDLVRDVATRLNEDDRVAAYVVEAENFESIHNHSAYALIERDKDREARIAEATL

SEQ ID NO: 16029 - protein, 284 aa, Thiocapsa rosea
  REGION 1..284: note = tr|A0A495VEM8|A0A495VEM8_9GAMM GTP cyclohydrolase FolE2 OS=Thiocapsa rosea OX=69360 GN=folE2 PE=3 SV=1
MEHALEPNCCAAPDSIDIADVQGSADSRRIAIDKVGIKDIRHPVRVSDRSGTEQHTVANFNMYVYLPHDFKGTHMSRFVQILNNHEREIGVSSFKEMLTEMSQRLESEAGHIEMRFPFFVNKKAPVTGVESLLDYEVTFIGEIQQGLPSLEIKVVVPVTSLCPCSKKISAYGAHNQRSHVTVQVRSQGHIWIEELIEMVEAEASSELFGLLKRPDEKYVTEHAYDNPKFVEDLVRDVATRLNEDDRVTAYVVEAENFESIHNHSAYALIERDKDREARIVEATL

SEQ ID NO: 16030 - protein, 212 aa, Thiocapsa rosea
  REGION 1..212: note = tr|A0A495V962|A0A495V962_9GAMM GTP cyclohydrolase 1; OS = Thiocapsa rosea OX=69360 GN=folE PE=3 SV=1
MAKKPNLTQVFTHSHYASSFEAESDDEVYDERKEALVKSMLGEIGEDPDREGLRRTPLRVAKAMDFLTSGYSMSAEEIIKKALFAEDVKEMVVVRDIEFYSMCEHHMLPFFGHAHVGYLPNGKVVGLSKIARVVDVFARRLQVQERLTSQVADSLMEHLGAHGVAVVMEASHTCMMMRGVQKQRSSTVSSAMRGTFETDPRTRSEFMSFIKG

SEQ ID NO: 16031 - protein, 212 aa, Thiocapsa roseopersicina
  REGION 1..212: note = tr|A0A1H2SWF9|A0A1H2SWF9_THIRO GTP cyclohydrolase 1; OS = Thiocapsa roseopersicina OX=1058 GN=folE PE=3 SV=1
MAEKPKLTQVFTNSHYATSFEAESDDEVYDARKEALVKSMLGEIGEDPDREGLRRTPLRVAKAMDFLTSGYSMSAEEIIKKALFAEDVKEMVVVRDIEFYSMCEHHMLPFFGHAHVGYLPDGKVVGLSKIARVVDVFARRLQVQERLTSQVADALMEHLGAHGVAVVMEASHTCMMMRGVQKQRSSTVSSAMRGTFETDPRTRSEFMSFIKG

SEQ ID NO: 16032 - protein, 284 aa, Thiocapsa roseopersicina
  REGION 1..284: note = tr|A0A1H2SS23|A0A1H2SS23_THIRO GTP cyclohydrolase FolE2 OS=Thiocapsa roseopersicina OX=1058 GN=folE2 PE=3; SV = 1
MEQVLEPNCCAAPDSAEIADVQGSADSRRIAIDKVGIKDIRHPVRVSDRSGAEQHTVANFNMYVYLPHDFKGTHMSRFVQILNNHEREIGVASFKEMLTEMSQRLESEAGHIEMRFPFFVNKKAPVTGVESLLDYEVTFIGEIQQGLPSLEIKVVVPVTSLCPCSKKISAYGAHNQRSHVTVQVRSLGHIWIEELIEMVEAEASSELFGLLKRPDEKYVTEHAYDNPKFVEDLVRDVATRLNEDDRVTAYVVEAENFESIHNHSAYALIERDKDHEARIAEATL

SEQ ID NO: 16033 - protein, 273 aa, Thiocapsa sp.
  REGION 1..273: note = tr|A0A0U5IL78|A0A0U5IL78_9GAMM GTP cyclohydrolase 1; OS = Thiocapsa sp. KS1 OX=610332 GN=folE PE=3 SV=1
MPRRVIACAPLTTRPTRYRRNVSEAPGSICPRRPHSGVQELFTSKADTLPVHFVEDPLGNTMAEKPKLTQVFANSHYAASFEAESEDEVYDARKEALVKSMLGEIGEDPNREGLRRTPLRVAKAMDFLTSGYSMSAEEIIKKALFEEDVREMVVVRDIEFYSMCEHHMLPFFGHAHVGYLPNGKVVGLSKIARVVDVFARRLQVQERLTSQVADALMEHLGAHGVAVVMEASHTCMMMRGVQKQRSSTVSSAMRGTFETDPRTRSEFMSFIKG

SEQ ID NO: 16034 - protein, 281 aa, Thiocapsa sp.
  REGION 1..281: note = tr|A0A0U5I8I4|A0A0U5I8I4_9GAMM GTP cyclohydrolase FolE2 OS=Thiocapsa sp. KS1 OX=610332 GN=folE2 PE=3 SV=1
MEQVLEPNCCATPEIADVQGSADSRRIAIDKVGIKDIRHPVRVSDRSGIDQHTVANFNMYVYLPHDFKGTHMSRFVQILNNHEREIGVASFKEMLVEMSHRLESEAGHIEMRFPFFVSKKAPVTGVESLLDYEVTFIGEIRHGEPTLEIKVVVPVTSLCPCSKQISAYGAHNQRSHVTVQVRTQGYIWIEELIEMVEKEASSELFGLLKRPDEKYVTERAYDNPKFVEDLVRDVATRLNEDDRIGAYVVEAENFESIHNHSAYALIERDKDREARIAEATL

SEQ ID NO: 16035 - protein, 364 aa, unidentified
  source 1..364: note = Thioclava arenosa
  REGION 1..364: note = tr|A0A2A4CTP6|A0A2A4CTP6_9RHOB GTP cyclohydrolase FolE2 OS=Thioclava arenosa OX=1795308 GN=folE2 PE=3 SV=1
MNHLDKISPPDMAQAKSALDVLRDWAASASPEEVAALDPAIARLLPGTPLSNYPDLKRDYDADFTVDAAYKASLPDLQNGPASLIVGAKTRIEHVGISNFRLPIRYRLKDGGEVTLETSVTGTVSLEAEKKGINMSRIMRSFYAHAERDFSAEVMAHAVDDYKDHLESFDARLQMRFSFPVKIESLRSGLAGWQYYDIALEQLDQAGTRRQIIHLDYVYSSTCPCSLELSEHARRARGQLATPHSQRSVARISVVAEEGDCLWFEDLIAIARAAVPTETQVMVKREDEQAFAELNAANPIFVEDAVRAFAAGLLADPRVGDFRVVASHQESLHSHDAVALLTEGPTFAAESLDPRLFASLVHPG

SEQ ID NO: 16036 - protein, 364 aa, unidentified
  source 1..364: note = Thioclava atlantica
  REGION 1..364: note = tr|A0A085TSS9|A0A085TSS9_9RHOB GTP cyclohydrolase FolE2 OS=Thioclava atlantica OX=1317124 GN=folE2 PE=3 SV=1
MNVQGRIETPDSDEAKEALETLRAWAAKADPVEVARLDPAIARLLPDHALSNYPDLSRDYDAAFTVDETYKASMPDLQNGPASLIVGARTRIEHVGISNFRLPVRFRTRDNGDLTLEASITGTVSLEADKKGINMSRVMRSFYTHAEKSFSFEVMEAALDDYKDDLESFDARLMMRFSFPVKRQSLRSGLEGWQYYDIALELADVAGERTKVIHLDYVYSSTCPCSLELSEHARSARGRLATPHSQRSVARISTVVEPGECLWFEDLIDLARLAVPTETQVMVKREDEQAFAELNASNPIFVEDAVRAFAERLLAEPRVGDFRIVASHQESLHSHDAVAVLTEGPTFTAASLDPKLFGTLIHQG

SEQ ID NO: 16037 - protein, 364 aa, unidentified
  source 1..364: note = Thioclava dalianensis
  REGION 1..364: note = tr|A0A074TGG1|A0A074TGG1_9RHOB GTP cyclohydrolase FolE2 OS=Thioclava dalianensis OX=1185766 GN=folE2 PE=3; SV = 1
MNVHGQIDTPDEQDARAALDTLRAWAAQADPVEVARLDPAIARLLPGHEVANYPDLSRSFDPDFKVDAAYKASLPDLQNGPSSLIVGAKTRIEHVGISNFRLPIRLRTRDGGDLTLEASVTGTVSLEAEKKGINMSRVMRSFYSHAEERFSFEVMEAALDDYKDDLDSFDARLMMRFSFPVKRPSLRSGLSGWQYYDIALELSEVAGQRCKIVHLDYVYSSTCPCSLELSEHARATRGQLATPHSQRSVARISTVIEPGEVLWFEDLIDLARAAVPTETQVMVKREDEQAFAELNAANPIFVEDAVRVFAQGLLAEARVGDFRIVASHQESLHSHDAVAVLTEGDTFAQASLDPKLFSTLIHQG

SEQ ID NO: 16038 - protein, 364 aa, unidentified
  source 1..364: note = Thioclava electrotropha
  REGION 1..364: note = tr|A0A1W9XU73|A0A1W9XU73_9RHOB GTP cyclohydrolase FolE2 OS=Thioclava electrotropha OX=1549850 GN=folE2 PE=3; SV = 1
MNVQGRIETPDNDDARAALDVLRAWAAKADPVEVAQLDPAIARLLPGHEVSNYPDLSRDYDADFEADETYKATMPDLQNGPSSLIVGAHTRIEHVGISNFRLPVRFHTRDNGDLTLEASVTGTVSLEAEKKGINMSRVMRSFYVHAEKTFSFEVMEAALDDYMDDLESFDARLMMRVSFPVKRPSLRSGLEGWQYYDIALELIETAGVRTKVIHLDYVYSSTCPCSLELSEHARASRGQLATPHSQRSVARISAVVEPGEVLWFEDMIDLARAAVPTETQVMVKREDEQAFAELNAANPIFVEDAVRAFAERLLADARIGDFRIVASHQESLHSHDAVAMLTEGETFASASVDPKLFATLIHQG

SEQ ID NO: 16039 - protein, 364 aa, unidentified
  source 1..364: note = Thioclava indica
  REGION 1..364: note = tr|A0A074KFZ6|A0A074KFZ6_9RHOB GTP cyclohydrolase FolE2 OS=Thioclava indica OX=1353528 GN=folE2 PE=3 SV=1
MNVHGKIDTPDANEAKTALETLRAWAALADPVEVARLDPAIARLLPGHAVANYPDLSRQFDPDFKVDEAYKASLPDLQNGPASLIVGAKTRIEHVGISNFRLPVRFRTRDNGDLTLEASITGTVSLEAEKKGINMSRVMRSFYSHAEESFSFEVMEAALDDYLDDLESFDARLMMRFSFPVKRPSLRSGLEGWQYYDIALELIDMGGARTKVIHLDYVYSSTCPCSLELSEHARATRGQLATPHSQRSVARISAVVEPGECLWFEDLIELARAAVPTETQVMVKREDEQAFAELNAANPIFVEDAVRVFAQRLLAEPRIGDFRVLASHQESLHSHDAVAVLTEGQTFGSASLDPQLFASLVHRG

SEQ ID NO: 16040 - protein, 364 aa, Thioclava pacifica
  REGION 1..364: note = tr|A0A074JAX3|A0A074JAX3_9RHOB GTP cyclohydrolase FolE2 OS=Thioclava pacifica DSM 10166 OX=1353537 GN=folE2; PE = 3 SV=1
MNVQGRIETPDNDEAREALETLRAWAAQADPVEVAQLDPAIARLLPGHAVSNYPDLSREYDESFTVDPAYKASLPDLQNGPSSLIVGAHTRIEHVGISNFRLPVRFKTRDNGDLTLETSVTGTVSLEADKKGINMSRVMRSFYAHAEKSFSFEVMEAALDDYKDDLESFDARLMMRVSFPVKRPSLRSGLEGWQYYDLALEVIDVAGVRTKVLHLDYVYSSTCPCSLELSEHARATRGQLATPHSQRSVARISAVVEPGNILWFEDLIDLARAAVPTETQVMVKREDEQAFAELNAANPIFVEDAVRAFAERLLAEPRVGDFRVVASHQESLHSHDAVAVLTEGPTFASASLDPKLFGTLIHQG

SEQ ID NO: 16041 - protein, 364 aa, Thioclava sp.
  REGION 1..364: note = tr|A0A4R7KI10|A0A4R7KI10_9RHOB GTP cyclohydrolase FolE2 OS=Thioclava sp. ES.032 OX=1798206 GN=folE2 PE=3 SV=1
MNVQGRIDTPDDNDARAALDVLRAWAAKADPVEVAQLDPAIARLLPGHEVSNYPDLSRDYDADFEADETYKATMPDLQNGPSSLIVGAHTRIEHVGISNFRLPVRFHTRDNGDLTLEASVTGTVSLEAEKKGINMSRVMRSFYVHAEKTFSFEVMEAALDDYMDDLESFDARLMMRVSFPVKRPSLRSGLEGWQYYDIALELIETGGVRTKVIHLDYVYSSTCPCSLELSEHARASRGQLATPHSQRSVARISAVVEPGEVLWFEDMIDLARAAVPTETQVMVKREDEQAFAELNAANPIFVEDAVRAFAERLLADARIGDFRIVASHQESLHSHDAVAMLTEGETFASASVDPKLFATLIHQG

SEQ ID NO: 16042 - protein, 364 aa, Thioclava sp.
  REGION 1..364: note = tr|A0A1T2B566|A0A1T2B566_9RHOB GTP cyclohydrolase FolE2 OS=Thioclava sp. DLFJ4-1 OX=1915313 GN=folE2 PE=3; SV = 1
MNVQGRIETPDNDDARAALDVLRAWASKADPVEVAQLDPAIARLLPGHEVSNYPDLSRDYDADFEADETYKATMPDLQNGPSSLIVGAHTRIEHVGISNFRLPVRFHTRDNGDLTLEASVTGTVSLEAEKKGINMSRVMRSFYVHAEKTFSFEVMEAALDDYMDDLESFDARLMMRVSFPVKRPSLRSGLEGWQYYDIALELIETAGVRTKVIHLDYVYSSTCPCSLELSEHARASRGQLATPHSQRSVARISAVVEPGEVLWFEDMIDLARAAVPTETQVMVKREDEQAFAELNAANPIFVEDAVRAFAERLLADARIGDFRIVASHQESLHSHDAVAMLTEGETFASASVDPKLFATLIHQG

SEQ ID NO: 16043 - protein, 284 aa, Thiocystis violascens
  REGION 1..284: note = tr|I3YFS9|I3YFS9_THIV6 GTP cyclohydrolase FolE2; OS = Thiocystis violascens (strain ATCC 17096 / DSM 198 / 6111) OX=765911 GN=folE2 PE=3 SV=1
MEQLLEPNCRATPTGLDIADVQGSADTRRIAIDKVGIKDIRHPVRVRERGGAEQHTVATFNMYVYLPHDFKGTHMSRFVQILNNHEREISVDSFKEMLTEMSQLLESEAGHIEMRFPYFVNKKAPVSGVASLLDYDVTFIGEIRHGRPTLEIKVLVPVTSLCPCSKKISAYGAHNQRSHVTVQVRTQGFIWLEEIIEMIEREASSELFGLLKRPDEKFVTERAYNNPKFVEDMVRDVAKCLNADARIAAYVVEAENFESIHNHSAYALIERDKTREAKIAEASL

SEQ ID NO: 16044 - protein, 211 aa, Thiocystis violascens
  REGION 1..211: note = tr|I3Y7Q9|I3Y7Q9_THIV6 GTP cyclohydrolase 1; OS = Thiocystis violascens (strain ATCC 17096 / DSM 198 / 6111) OX=765911 GN=folE PE=3 SV=1
MEKPKLSRVLAHSHYAASFEAESEEEIYDAPKEALVRSMLTEIGEDPEREGLRRTPLRVAKAMDFLTSGYGLSAEEIIKGAVFEENVKEMVVVRDIEFYSLCEHHLLPFFGHAHVGYLPNGKVVGLSKIARVVDVFARRLQVQERLANQVADALMEHLGAHGVAVVMEASHTCMMMRGVQKQRSSTVTSAMRGTFEEDPRTRAEFMSFIRG

SEQ ID NO: 16045 - protein, 278 aa, Thioflavicoccus mobilis
  REGION 1..278: note = tr|L0GUY1|L0GUY1_9GAMM GTP cyclohydrolase FolE2; OS = Thioflavicoccus mobilis 8321 OX=765912 GN=folE2 PE=3; SV = 1
MEAVRKSTPVTAPIADVQSSQDSRRIAIDKVGIKDIRHPVRVRDRTNGEQHTIATFNMYVYLPHNFKGTHMSRFVQILNGHEEEISVASFKEILEEMAQRLESEAGHIEMRFPYFVAKRAPITGVRSLLDYDVTFIGEIRDGEPEMHIKVVVPVTSLCPCSKEISAYGAHNQRSHVTVQVRNRGFIWVEEIIELIEQEASCEIFGLLKRPDEKYVTERAYDNPKFVEDLVRDVAARLNADERVGGYVVEAENFESIHNHSAYALVERDKEAERAGTQG

SEQ ID NO: 16046 - protein, 212 aa, Thioflavicoccus mobilis
  REGION 1..212: note = tr|L0GYW5|L0GYW5_9GAMM GTP cyclohydrolase 1; OS = Thioflavicoccus mobilis 8321 OX=765912 GN=folE PE=3 SV=1
MYDSSKAPRVSANGHYAESLDADSEDEVYDSHKESLVEALLCALGEDPGRDGLKRTPLRVAKAMDFLTSGYQMSAEDVIKQALFEEDCTEMVVVRDIEFYSLCEHHMLPFFGHAHVGYLPNGKVVGLSKIARVVDVFARRLQVQERLTNQVADALMTHLGAHGVAVVMEASHTCMMMRGVQKQRSMTISSAMRGSFHEDPRTRAEFMSFIRS

SEQ ID NO: 16047 - protein, 273 aa, unidentified
  source 1..273: note = Thioflexothrix psekupsii
  REGION 1..273: note = tr|A0A251XBJ5|A0A251XBJ5_9GAMM GTP cyclohydrolase FolE2 OS=Thioflexothrix psekupsii OX=1570016 GN=folE2 PE=3; SV = 1
MNKPLSLIPDVQSSIDTRRLTINKVGIKALKHPLQVLNREGKAQSTVAICNMSVELAHHQKGTHMSRFIELLNADEQMLSMEAFKQLLSAMVQRLEAQRGYIEFTFPYFIRKQAPVSGVASYLDYEITLLGEINEGIPAVVLKTVIPVTSLCPCSKKISAYGAHNQRSHVTVSVRPSGPIWIEDLIELVEQQASSELFGLLKRSDEKLVTERAYENPKFVEDMVRDVAAQLNHHPHIAAYCVEAENFESIHNHSAYAIIEKDKLSPCGSVISS

SEQ ID NO: 16048 - protein, 222 aa, unidentified
  source 1..222: note = Thioflexothrix psekupsii
  REGION 1..222: note = tr|A0A251X452|A0A251X452_9GAMM GTP cyclohydrolase 1; OS = Thioflexothrix psekupsii OX=1570016 GN=folE PE=3 SV=1
MAKVDIELGKQVHEYLVSKGVETPVIEEKLRVSDEVKIAAIKTHITAIMETLGMDLADDSLIETPTRIAKMYVNEIFRGLDYSFFPKCTTVENKMHYDEMVLEKDIAAISSCEHHFVTIDQRVSIGYIPKKRVLGLSKLNRIAKFFAQRPQIQERYAEQLFYALECILQTSDIAIFVRGKHYCVAQRGVEDTSSYTITSKLGGTFKTNAALRNEFMNLINSH

SEQ ID NO: 16049 - protein, 276 aa, unidentified
  source 1..276: note = Thiogranum longum
  REGION 1..276: note = tr|A0A4R1HAB3|A0A4R1HAB3_9GAMM GTP cyclohydrolase FolE2 OS=Thiogranum longum OX=1537524 GN=folE2 PE=3 SV=1
MSKSTAATVNNPIADVQNSADTRHIAIDKVGIKDIRHPVRVKDRSEGEQHTIANFNMYVNLPHNFKGTHMSRFVEILNLHEREIGVESFKEMLGEMAERLEAEAGHIEMSFPYFINKTAPISGVQSLLDYEVSFIGEISDGKPKMKIKVIVPVTSLCPCSKKISERGAHNQRSHVTVTATTRDFVWIEELIDMVEGQASCELYGLLKRPDEKYVTEKAYDNPKFVEDMVRDIAAALNTDDRISAYIVESENFESIHNHSAYALIERDKEKDQLVDS

SEQ ID NO: 16050 - protein, 272 aa, Thiohalobacter thiocyanaticus
  REGION 1..272: note = tr|A0A426QHA1|A0A426QHA1_9GAMM GTP cyclohydrolase FolE2 OS=Thiohalobacter thiocyanaticus OX=585455 GN=folE2; PE = 3 SV=1
MKPASAKVSKEIEDVQSSPDTRHIAIDKVGIKDIRHPVRVRDRSDGEQHTIANFNMYVSLPHNFKGTHMSRFVDILNRHEKEITVKSFKDMLGEMTELLDAESGHIEMNFPYFVMKAAPVSGVQSLMDYDVSFIGEIHEGHPQMNIKVVIPVTSLCPCSKKISDYGAHNQRSHVTVSVRTKGFIWIEELIELVEKEASCELYGLLKRPDEKHVTERAYDNPKFVEDMVRDVAARLNADERVSSYVVESENFESIHNHSAYAMIIKDEEAEKA

SEQ ID NO: 16051 - protein, 275 aa, Thiohalobacter thiocyanaticus
  REGION 1..275: note = tr|A0A1Z4VPP0|A0A1Z4VPP0_9GAMM GTP cyclohydrolase FolE2 OS=Thiohalobacter thiocyanaticus OX=585455 GN=folE2; PE = 3 SV=1
MSQMKPASAKVSKEIEDVQSSPDTRHIAIDKVGIKDIRHPVRVRDRSDGEQHTIANFNMYVSLPHNFKGTHMSRFVDILNRHEKEITVKSFKDMLGEMTELLDAESGHIEMNFPYFVMKAAPVSGVQSLMDYDVSFIGEIHDGQPQMNIKVVVPVTSLCPCSKKISDYGAHNQRSHVTVSVRTTGFIWIEELIELVEQEASCELYGLLKRPDEKAVTERAYDNPKFVEDMVRDVAARLNADERVSSYVVESENFESIHNHSAYAMIIKDEESEQA

SEQ ID NO: 16052 - protein, 265 aa, Thiohalomonas denitrificans
  REGION 1..265: note = tr|A0A1G5PZP6|A0A1G5PZP6_9GAMM GTP cyclohydrolase FolE2 OS=Thiohalomonas denitrificans OX=415747 GN=folE2; PE = 3 SV=1
MNKPCQPIADVQSSEDTRRIPINKVGIKDIRHPVRIRDRSGGEQHTIANFNMYVNLPHNFKGTHMSRFVEIINRHERELSVESFKDMLSEMTELLEAEAGHIEMVFPYFVNKKAPISGVESLMDYDVTFIGEVANGEPKLKVKVIVPVTSLCPCSKKISERGAHNQRSHVTVAVETRGFVWIEDIIDLVESEASCELYGLLKRPDEKMVTERAYDNPKFVEDIVRDIAVRLNADDRIAQYVVESENFESIHNHSAYALIEKDKRL

SEQ ID NO: 16053 - protein, 265 aa, Thiohalophilus thiocyanatoxydans
  REGION 1..265: note = tr|A0A4R8IQZ8|A0A4R8IQZ8_9GAMM GTP cyclohydrolase FolE2 OS=Thiohalophilus thiocyanatoxydans OX=381308; GN = folE2 PE=3 SV=1
MNAVTDPIEDVQSSADTRRIPINKVGIKDIRHPVRIRDRNEGEQHTVASFNMYVNLPHNFKGTHMSRFVDILNNHEREISVQSFKEMLAEMAEKLEADSGHIEMAFPYFINKKAPISGVESLMDYDVSFIGEVHDGKVQMTLKVIVPVTSLCPCSKNISDYGAHNQRSHVTVAARIEEFVWVEELIELVESEASCELYGLLKRPDEKNVTERAYDNPKFVEDMVRDVAARLNADKRVSYYVVESENFESIHNHSAYALIEKDKKA

SEQ ID NO: 16054 - protein, 283 aa, Thiohalorhabdus denitrificans
  REGION 1..283: note = tr|A0A0P9C5I4|A0A0P9C5I4_9GAMM GTP cyclohydrolase FolE2 OS=Thiohalorhabdus denitrificans OX=381306 GN=folE2; PE = 3 SV=1
MAVHDRTVSEQELPDCASEIQDTQGLPDQRRIPINKVGIKDIRHPVRVKDRTQGEQHTLAHFNAYVDLPQHFKGTHMSRFVEILNDHEREISVESFRSILEEMRARLEAEQAHLEMAFPYFIMKQAPVSGVESQMDYEVTLRGHLTPEDYQITIQVQVPVTSLCPCSKSISEYGAHNQRSHVDLQVRARDFVWIEDLVELAEAEASCDLYGVLKRPDEKYVTEHAYENPKFVEDLVRDIARRLEDDERIVWYTVGAENFESIHNHSAYAWIERDKRTPLPDGA

SEQ ID NO: 16055 - protein, 269 aa, Thiohalospira halophila
  REGION 1..269: note = tr|A0A1I1U366|A0A1I1U366_9GAMM GTP cyclohydrolase FolE2 OS=Thiohalospira halophila DSM 15071 OX=1123397; GN = folE2 PE=3 SV=1
MNDTTKPTIADVQASADTRNIPINKVGVKDVRHPVRVRDRSGGEQHTVANFNMYVNLPHNFKGTHMSRFVAILNNHDYEITTHSFKEMLREMTHTLEAEAGHIEMSFPYFVNKAAPVSGVQSLMDYAVTFQGDFRAGEPELTIKVQVPVTSLCPCSKEISDYGAHNQRSHVTVAARTRDFVWIEELIDLVESEASSELWGLLKRPDEKHVTERAYDNPKFVEDMVRDVAARLNADHRIAGYTVESENFESIHNHSAYARIEIDKEAHGA

SEQ ID NO: 16056 - protein, 229 aa, unidentified
  source 1..229: note = Thiolapillus brandeum
  REGION 1..229: note = tr|W0TL66|W0TL66_9GAMM GTP cyclohydrolase FolE2; OS = Thiolapillus brandeum OX=1076588 GN=folE2 PE=3 SV=1
MRVKDRSEGEQHTIANFNMYVFLPHNFKGTHMSRFVGILNNHEREISISSFEDMLLEMVELLESEAGHIEMAFPFFVNKTAPVSGVQSLMDYDVTLIGEVEDGRPSIFTKVVVPVTSLCPCSKSISDRGAHNQRSHVTVTVSTRDFMWIEEIIELVEAEASSELYSLLKRPDEKFITERAYDNPKFVEDVVRDVAGRLNADTRIESYVVEAENFESIHNHSAYARIEKP

SEQ ID NO: 16057 - protein, 180 aa, unidentified
  source 1..180: note = Thiolapillus brandeum
  REGION 1..180: note = tr|W0TPB3|W0TPB3_9GAMM GTP cyclohydrolase 1; OS = Thiolapillus brandeum OX=1076588 GN=folE PE=3 SV=1
MADCYQEIIRGVGEDISREGLLKTPQRAAKAMEFLTQGYEQRLEDIVNDAIFPSDNDEMVIVKDIELYSLCEHHMLPFIGKAHVAYLPKGKVIGLSKIARIVDMYARRLQIQEQLTTQVAYAIQDAIGAAGVAVVIEASHLCMMMRGVQKQNSSTTTSMMLGAFRNNHRTRDEFLTLIKL

SEQ ID NO: 16058 - protein, 316 aa, unidentified
  source 1..316: note = Thiomicrorhabdus sp.
  REGION 1..316: note = tr|A0A4P9K972|A0A4P9K972_9GAMM GTP cyclohydrolase FolE2 OS=Thiomicrorhabdus sp. G1 OX=2580412 GN=folE2 PE=3; SV = 1
MTKHMPDIACQPHHGPQGKLNWVGMSGIELPIQIQQGLSQDNPIQISSKAQAYVNLNDPESKGIHMSRLYLILDQMATQQPLTSSRVKTILEAFIDSHQNLSTQAFVEFKFDYYERRNSLLSQNSGWKHYPATIRGEMRDGEFSCEVSIEVPYSSTCPCSAALSRQLIQEAFEKQFAGQSLDYQQVMDWLGTPEGICATPHSQRSYAQVKVKVNESDLLELSALINDIEAALQTPVQAAVKREDEQEFARLNAANLMFCEDASRRLQQALNSKPNYLDFWVRVNHLESLHPHDAVAIVTKGIANGYIDDPNLMDPM

SEQ ID NO: 16059 - protein, 316 aa, unidentified
  source 1..316: note = Thiomicrospira aerophila
  REGION 1..316: note = tr|W0DV04|W0DV04_9GAMM GTP cyclohydrolase FolE2; OS = Thiomicrospira aerophila AL3 OX=717772 GN=folE2 PE=3; SV = 1
MTKHMPDIACQPHSIPQPKLNWVGMSGIELPILINSAHSPIRLSSTTQAYVNLVDPTSKGIHMSRLYLLLDQMATEQTLTPARVKTILEKFVSSHELLSDQAFVEFRFDYYERRSSLLSSNAGWKHYPATLRGELNQGQFHCEISLEVPYSSTCPCSAALSRQLIQQAFETQFKAQASLDYEQVFNWLGTPEGICATPHSQRSYAQVKLAITDHDDLDFSRWISLIENSLQTPVQAAVKREDEQEFARLNASNLMFCEDAARRLQTTLNAEPHLTDFWVRVNHLESLHPHDAVAIVTKGIDKGYIAEPNLMGLFHR

SEQ ID NO: 16060 - protein, 316 aa, unidentified
  source 1..316: note = Thiomicrospira cyclica
  REGION 1..316: note = tr|F6DAE8|F6DAE8_THICA GTP cyclohydrolase FolE2; OS = Thiomicrospira cyclica (strain DSM 14477 / JCM 11371 / ALM1) OX=717773 GN=folE2 PE=3 SV=1
MTKHMPDIACQPHSIPQPKLNWVGMSGIELPILINSAHSPIRLSSSTQAYVNLVDPTSKGIHMSRLYLLLDQLATEQTLTPARVKTILEKFVSSHETLSDHAFVEFRFDYYERRSSLLSSNAGWKHYPATLRGELNQGQFHCEISLEVPYSSTCPCSAALSRQLIQQAFETQFKSTDALDYADVLEWLGTPEGICATPHSQRSYAQVKLAITDHDDLDFSRWISLIERSLQTPVQAAVKREDEQEFARLNASNLMFCEDAARRLQTTLNAEPHLSDFWVRVNHLESLHPHDAVAIVTKSVDGGYIAEPNLMGLFHR

SEQ ID NO: 16061 - protein, 316 aa, Thiomicrospira sp.
  REGION 1..316: note = tr|A0A0X3T741|A0A0X3T741_9GAMM GTP cyclohydrolase FolE2 OS=Thiomicrospira sp. WB1 OX=1685380 GN=folE2 PE=3; SV = 1
MTKHMPDIACQPHKNPQGKLNWVGMSGIELPIQIRQTQDQTLTVSSQVQAYVSLEDPLSKGIHMSRLYLILDEQGAQEPLSPKRLQHLLERFIESHEGLSRNAFLEFRFDYYERRRSLKSDNAGWKHYPCTLRGEMRQGQFECEVSLTVPYSSTCPCSAALSRQLIQEAFEKQFQAGELDFDSVYNWLGTPEGINATPHSQRSYAQVKLKVSAEHTLSLSEVINQIEDSLKTPVQSTVKRADEQEFARLNASNLMFCEDAARRLQKTLDSQSEYEDFWVRVNHLESLHPHDAVAIVTKGIENGYSDEPNFMDRFEY

SEQ ID NO: 16062 - protein, 316 aa, Thiomicrospira sp.
  REGION 1..316: note = tr|A0A3S9TLC5|A0A3S9TLC5_9GAMM GTP cyclohydrolase FolE2 OS=Thiomicrospira sp. S5 OX=1803865 GN=folE2 PE=3; SV = 1
MTKHMPDIACQPHQDPQGKLNWVGMSGIELPIQLQQDSQNTLTLSSQVQAYVSLDDPLSKGIHMSRLYLILDETGSKAPLTPASIQSMLQAFIESHQGLSQNAFVEFRFDYYERRRSLKSDNSGWKHYPCTMRGEMRDGQYECEVSISVPYSSTCPCSAALSRQLIQEAFEQQFNGQALDYNQVLEWLGTPEGICATPHSQRSYAQIKLKVDASHDLNLSTVINQIEDAVKTPVQSTVKREDEQEFARLNATNLMFCEDAARRMQAKLESCTEYQDYWVRVNHLESLHPHDAVAIVTKNVPGGYTDEPNFMDRFEH

SEQ ID NO: 16063 - protein, 271 aa, Thiomonas arsenitoxydans
  REGION 1..271: note = tr|D6CLT1|D6CLT1_THIA3 GTP cyclohydrolase FolE2; OS = Thiomonas arsenitoxydans (strain DSM 22701 / CIP 110005 / 3As) OX=426114 GN=folE2 PE=3 SV=1
MNAPEKLFAQAAAATLPDVQATPDRRNIAIQQVGVRSVRYPVQIRSAQGVQPSVGTFEMTVALPPEVKGTHMSRFIEMLEAHREPLDAQQLGVLLQHMLTRLQASEGAITAQFTYFARKTAPVSGVESLMDYEVTLHAAQKAGALTLTQKVQVPVTSLCPCSKEISNYGAHNQRSHVTIGATLRGEMGLDEQIRIAETAASCELWGLLKRPDEKYVTERAYDHPKFVEDLVRDVAVALERDERVAAYTVESENFESIHNHSAYALVEGRKT

SEQ ID NO: 16064 - protein, 280 aa, Thiomonas arsenitoxydans
  REGION 1..280: note = tr|D6CT47|D6CT47_THIA3 GTP cyclohydrolase FolE2; OS = Thiomonas arsenitoxydans (strain DSM 22701 / CIP 110005 / 3As) OX=426114 GN=folE2 PE=3 SV=1
MPRAGDTEPHRRSPTRHSMNKPFEAIPDIQSTVDERHIAIQRVGVKGLRYPLNVRLRDGSIHPSIAQVTADVALPAEKKGTHMSRFVELLEAMPEAMDAQAFAALTRQMLPKLNATAGRLEFAFTLFLRKTAPVSGVQSLLDYEAGWIAEARGDQLKLTAKVMVPVKSLCPCSKEISDYGAHNQRSHITITAELLQPVALEELIRIAEEEASCEIWGLLKRPDEKYVTEHAYENPKFVEDLVRDVAARLNADPRIGHYVAEAENFESIHNHSAYALIERV

SEQ ID NO: 16065 - protein, 262 aa, Thiomonas bhubaneswarensis
  REGION 1..262: note = tr|A0A0K6I6W7|A0A0K6I6W7_9BURK GTP cyclohydrolase FolE2 OS=Thiomonas bhubaneswarensis OX=339866 GN=folE2; PE = 3 SV=1
MNKPFDAIPDIQSTVDERHIAIQRVGVKGLRYPVNVCLRDGSVHPSIAQVTADVALPAEKKGTHMSRFVELLEAMPEAMDAQAFAALTRQMLPKLNATAGRLEFAFTLFLRKTAPVSGVQSLLDYEAGWIAEARGDQVKLTARVMVPVKSLCPCSKEISDYGAHNQRSNITITAELLQPVALEELIRIAEEEASCEIWGLLKRPDEKYVTEHAYENPKFVEDLVRDVAARLNADARIGHYVAEAENFESIHNHSAYALIERA

SEQ ID NO: 16066 - protein, 272 aa, Thiomonas bhubaneswarensis
  REGION 1..272: note = tr|A0A0K6HQ05|A0A0K6HQ05_9BURK GTP cyclohydrolase FolE2 OS=Thiomonas bhubaneswarensis OX=339866 GN=folE2; PE = 3 SV=1
MNAPEKLFTQAAAAAILPDVQATPDLRHIAIQQVGVRDVRYPVQIRSAQGAQPSVGTFEMTVALPPEVKGTHMSRFIEMLEAHPEPLDARQLGVLLQHMLVRLQATEGAITARFTYFARKAAPVSGVESLMDYEVTLRAEQKAGATTLVQKVQVPVTSLCPCSKEISNYGAHNQRSHVTIGATLRGDLGLDEQIRIAETAASCELWGLLKRPDEKYVTERAYDHPKFVEDLVRDVAVALERDDRVAAYTVESENFESIHNHSAYALVEGRKL

SEQ ID NO: 16067 - protein, 288 aa, Thiomonas delicata
  REGION 1..288: note = tr|A0A238D1S3|A0A238D1S3_THIDL GTP cyclohydrolase FolE2 OS=Thiomonas delicata OX=364030 GN=folE PE=3 SV=1
MELPARCRFLKGQQMNAPEHFFASEPRALPDIQSAGDRRNLPIQRVGVKGVRHPVLIRTVDGGTQPSVATFDMFVALPSDVKGTHMSRFVEILEAHAGVPLDPATLRGMFDRMLERLGAQRGEIALTFTYFMRKTAPVSGVSSLMDYEASFHVTGRVGAPAQVHMALQVPVTSLCPCSREISNYGAHNQRSHLTLKIETKAPMHLDDIVRVAESSASCELWGLLKRPDEKYVTERAYDNPKFVEDLVRDVALALRSDARVDAFTVESENFESIHNHSAYARIDFVRGA

SEQ ID NO: 16068 - protein, 275 aa, Thiomonas delicata
  REGION 1..275: note = tr|A0A238DA05|A0A238DA05_THIDL GTP cyclohydrolase FolE2 OS=Thiomonas delicata OX=364030 GN=folE PE=3 SV=1
MSLSSMIRQGSTMNKPFEAIPDIQSATDHRHMAIQRVGVKSLRYPLSVRTADGGSQPTVAVIDADVALAAEKKGTHMSRFVEILEGVDAPLDHGGLVALAQVMLRRLQADAGRIEFRFPLFVRKSAPVSGVPSLMDYEAGWIAQAQGGGVQVTARVQVPVKALCPCSKEISDYGAHNQRSHITITAQLKEPVPFEQLIRMAEEEASCELWGLLKRPDEKYVTEHAYENPKFVEDLVRDVAARVQRDARIGSYVVEAENFESIHNHSAYARIEGAG

SEQ ID NO: 16069 - protein, 271 aa, Thiomonas intermedia
  REGION 1..271: note = tr|D5X5F0|D5X5F0_THIK1 GTP cyclohydrolase FolE2; OS = Thiomonas intermedia (strain K12) OX=75379 GN=folE2; PE = 3 SV=1
MNAPEKLFAQAAAATLPDVQATPDRRNIAIQQVGVRGVRYPVQIRSAQGVQPSVGTFEMTVALPPEVKGTHMSRFIEMLEAHREPLDAQQLGVLLQHMLTRLQASEGAITAQFTYFARKTAPVSGVESLMDYEVTLHAAQKAGALTLTQKVQVPVTSLCPCSKEISNYGAHNQRSHVTIGATLRGEMGLDEQIRIAETAASCELWGLLKRPDEKYVTERAYDHPKFVEDLVRDVAVALERDERVAAYTVESENFESIHNHSAYALVEGRKT

SEQ ID NO: 16070 - protein, 262 aa, Thiomonas intermedia
  REGION 1..262: note = tr|D5X1I7|D5X1I7_THIK1 GTP cyclohydrolase FolE2; OS = Thiomonas intermedia (strain K12) OX=75379 GN=folE2; PE = 3 SV=1
MNKPFEAIPDIQSTVDERHIAIQRVGVKGLRYPLNVRLRDGSIHPSIAQVTADVALPAEKKGTHMSRFVELLEAMPEAMDAQAFAALTRQMLPKLNATAGRLEFAFTLFLRKTAPVSGVQSLLDYEAGWIAEARGDQLKLTAKVMVPVKSLCPCSKEISDYGAHNQRSHITITAELLQPVALEELIRIAEEEASCEIWGLLKRPDEKYVTEHAYENPKFVEDLVRDVAARLNADPRIGHYVAEAENFESIHNHSAYALIERV

SEQ ID NO: 16071 - protein, 92 aa, Thiomonas sp.
  REGION 1..92: note = tr|A0A259PJ86|A0A259PJ86_9BURK GTP cyclohydrolase 1 (Fragment) OS=Thiomonas sp. 14-66-4 OX=1970450; GN = B7X42_05660 PE=3 SV=1
MKTMTEPIPVTREQAEDAIRTLLRWAGDDPAREGLRDTPRRVAKAYKEWFAGYAQDPTAYLARTFEEVAGYDEIIVLRNIEFESHCEHHMAP

SEQ ID NO: 16072 - protein, 263 aa, Thiomonas sp.
  REGION 1..263: note = tr|A0A259QU30|A0A259QU30_9BURK GTP cyclohydrolase FolE2 OS=Thiomonas sp. 13-66-29 OX=1970448 GN=folE2 PE=3; SV = 1
MNKPFEAIPDIQSATDHRHMAIQRVGVKSLRYPLSVRTADGGSQPTVAVIDADVALAAEKKGTHMSRFVEILEGVDAPLDHGGLVALAQVMLRRLQADVGRIEFRFPLFVRKSAPVSGVPSLMDYEAGWIAQAQGGGVQVTARVQVPVKALCPCSKEISDYGAHNQRSHITITAQLKEPVPFEQLIRMAEEEASCELWGLLKRPDEKYVTEHAYENPKFVEDLVRDVAARVQRDARIGSYVVEAENFESIHNHSAYARIEGAG

SEQ ID NO: 16073 - protein, 262 aa, Thioploca ingrica
  REGION 1..262: note = tr|A0A090AD64|A0A090AD64_9GAMM GTP cyclohydrolase FolE2 OS=Thioploca ingrica OX=40754 GN=folE2 PE=3 SV=1
MNKAVTVMPDVQGSADTRHIAIDKVGIKDIKHPIRVKDRSGREQHTIANFNMYVSLPHNFKGTHMSRFVEILNEHEYEITVDSFKDMLVEMTKRLEARAGHIEMAFTYFVIKLAPVSSVRSLLDYEVTFIGEITDDKPVITVKVIVPVTSLCPCSKEISQYGAHNQRSHVTVTAKTNGFLWIEDLIDLVEKEASCQLYGLLKRPDEKYVTEYAYEHPKFVEDMVRDIATKLNKDPRVTAYVVESENFESIHNHSAYAMIHKA

SEQ ID NO: 16074 - protein, 185 aa, unidentified
  source 1..185: note = Thiopseudomonas denitrificans
  REGION 1..185: note = tr|A0A4R6U0X3|A0A4R6U0X3_9GAMM GTP cyclohydrolase 1; OS = Thiopseudomonas denitrificans OX=1501432 GN=folE PE=3; SV = 1
MCEELAKHYHAILEGLGEDPQREGLLDTPMRAAKAMQYLCNGYEKNLDEVVNNALFESSSEEMVIVRDIELYSLCEHHLLPFIGKAHVAYIPTGKVIGLSKVARIVDMYARRLQIQENLTRQIADAVMSVTQASGVGVVIEAKHMCMMMRGVEKQNSVMTSSAMLGSFRSSVNTRQEFLQLIRGH

SEQ ID NO: 16075 - protein, 212 aa, unidentified
  source 1..212: note = Thiorhodococcus drewsii
  REGION 1..212: note = tr|G2E4W0|G2E4W0_9GAMM GTP cyclohydrolase 1; OS = Thiorhodococcus drewsii AZ1 OX=765913 GN=folE PE=3 SV=1
MSEKSKLSQVLAHSHYATSFEPESNEEVYDPLKEDLVRRMLVEIGEDADREGLKRTPLRVAKAMDFLTSGYGLSAEDIIKGAVFAEDVKQMVVVRDIEFYSMCEHHMLPFFGHAHVGYLPNGKVVGLSKIARVVDVFARRLQVQERLTNQVADALMEHLGAHGVAVVLEASHTCMMMRGVQKQRSTTVSSAMRGAFDEDPRTRAEFMSFIKA

SEQ ID NO: 16076 - protein, 284 aa, unidentified
  source 1..284: note = Thiorhodococcus drewsii
  REGION 1..284: note = tr|G2DZK0|G2DZK0_9GAMM GTP cyclohydrolase FolE2; OS = Thiorhodococcus drewsii AZ1 OX=765913 GN=folE2 PE=3 SV=1
MEQALEPNCCAARAATDIADVQGSADTRRIAIDKVGIKDIRHPVRVRERGGSEQHTVATFNMNVYLPHDFKGTHMSRFVQVLNNHERDISVSSFKEMLTEMSHRLESEAGHIEMRFPFFISKKAPVSGVESLLDYDVTFIGEIRHGEPRLEIKVVVPVTSLCPCSKEISAYGAHNQRSHVTVQVRMQGLMWLEELIELIEHEASSELFGLLKRPDEKYVTEHAYDNPKFVEDLVRDVAKRLNQDDRILSYVVEAENFESIHNHSAYALIERDKQAEARMAEASL

SEQ ID NO: 16077 - protein, 273 aa, Thiorhodospira sibirica
  REGION 1..273: note = tr|G4E4P1|G4E4P1_9GAMM GTP cyclohydrolase FolE2; OS = Thiorhodospira sibirica ATCC 700588 OX=765914 GN=folE2; PE = 3 SV=1
MISTAAPSCERSDAMADVQASLDTRSIPINKVGIKDIRHPVRISDRSGGEQHTVARFNMYVNLPHNFKGTHMSRFVEILNQHERELTVSSFQQMLSEMALRLEAASGHIEMSFPYFVNKRAPVSGVASLLDYDVTFIGEIHDQQIIMNIKVVVPVTSLCPCSKTIAAYGAHNQRSHVTVNARINTFVWIEELIDLVEQEASCELFGLLKRPDEKYVTERAYDNPKFVEDMVRDVAARLNADTRISAYSVESENFESIHNHSAYAMIAFDKSSR

SEQ ID NO: 16078 - protein, 291 aa, Thiorhodovibrio sp.
  REGION 1..291: note = tr|H8Z6L8|H8Z6L8_9GAMM GTP cyclohydrolase FolE2; OS = Thiorhodovibrio sp. 970 OX=631362 GN=folE2 PE=3 SV=1
MESTLRSTAAAAAAPSPQAASQNTPSRQTMADVQASADSRRIAIDRVGIKDIRHPVRIQDRSGLEQHTVATFNMYVHLPHDFKGTHMSRFVAILNNHQPEISVRTFKDMLREMAERLESEAGHIEMRFPFFINKLAPVTGVASLLDYDVTFIGEVKQGQPSLSIRVVVPVTSLCPCSKQISAYGAHNQRSHVTVTVRTRGFLWLEELIDLVESQASCELFGLLKRADEKFVTEHAYDNPKFVEDTVRDIAGLLNQDERIAAYVVESENFESIHNHSAYAMIERDKDAEAAG

SEQ ID NO: 16079 - protein, 329 aa, Thiothrix caldifontis
  REGION 1..329: note = tr|A0A1H4BMR2|A0A1H4BMR2_9GAMM GTP cyclohydrolase FolE2 OS=Thiothrix caldifontis OX=525918 GN=folE2 PE=3 SV=1
MMSTNACQELPCAVAAMPDVAKQPLAGAKGTLNWVGMSQIELPVFLRSAKGDRVQTLARVQAYVNLIDPNSKGIHMSRLYVALDTILGMNDLTPEVLRGTITQFVDTHGGLSDAAYLECRFDYFERRNSLLSDNSGWKNYPVKVAATLRHGQIDTEVSVEVPYSSTCPCSAALARQLIQEGFRETFGDASVVDANTVFDWLGTTNGIRATPHSQRSIAQVRVKLAEKVRTLPITSLIDQVEEALKTPVQATVKREDEQEFARLNAANLMFCEDAARRLKNALNDDISVRDFWLRVNHMESLHAHDAVAVVVKGVEGGYRDDPREYVHPT

SEQ ID NO: 16080 - protein, 183 aa, Thiothrix caldifontis
  REGION 1..183: note = tr|A0A1H3XN15|A0A1H3XN15_9GAMM GTP cyclohydrolase 1; OS = Thiothrix caldifontis OX=525918 GN=folE PE=3 SV=1
MTDTSQLYADLITSIGEDITRDGLLKTPERAAKAFSFLTQGYQQSLEAIVNEAVFDSSNDEMVVVKDIEFYSLCEHHMLPFVGKAHVAYLPKGKVLGLSKIARITDMYARRLQIQENMTKQIADAVQQVTGAAGVGVVLEAQHFCMMMRGVQKQHSSTVTSMMLGEFRDNSRTRQEFLQLIKG

SEQ ID NO: 16081 - protein, 325 aa, Thiothrix eikelboomii
  REGION 1..325: note = tr|A0A1T4VUR3|A0A1T4VUR3_9GAMM GTP cyclohydrolase FolE2 OS=Thiothrix eikelboomii OX=92487 GN=folE2 PE=3 SV=1
MSATNACTDLSCNILPDIASQPHAGPKGTLNWVGMSAIEIPVFVLNATGEKIQTLARVQAYVNLMDPHSKGIHMSRLYLALDNLLSMHELTPELLRKTVTQFVESHGSLSTAAYLECRFNYFEKRSSLVSDNRGWKNYPVRVAATLRGQQFDLEVQVEVPYSSTCPCSAALARQLIQEGFRDQFGEAVVNAQQVYDWLGTTQGISATPHSQRSMAQVKVKLAEKIRNLPLTSLIDRIENALQTPVQAAVKREDEQEFARLNAANLMFCEDAARRLKVAMSEDISVRDFWIRVNHLESLHAHNAVSVAIKGIEGGYQDDPHDYMTC

SEQ ID NO: 16082 - protein, 182 aa, Thiothrix lacustris
  REGION 1..182: note = tr|A0A1Y1QH22|A0A1Y1QH22_9GAMM GTP cyclohydrolase 1; OS = Thiothrix lacustris OX=525917 GN=folE PE=3 SV=1
MTDASQLYAELITSIGEDITRDGLQKTPERAAKAFGFLTQGYQQSLETIVNGAVFASDNDEMVVVKDIEFYSLCEHHLLPFVGRAHIAYLPQGKVLGLSKIARITDMYARRLQIQENMTKQIADAIQSVTGAAGVGVVLEAQHFCMMMRGVQKQHSSTVTSMMLGEFRENSRTRQEFLHLIK

SEQ ID NO: 16083 - protein, 225 aa, Thiothrix lacustris
  REGION 1..225: note = tr|A0A1Y1QEI7|A0A1Y1QEI7_9GAMM GTP cyclohydrolase 1; OS = Thiothrix lacustris OX=525917 GN=folE PE=3 SV=1
MNTKLAYLPERPELSPEAIQVRAALLAAGLETPMQETGLNPQQKYERIKGLMTEVVRTLGLDLHDDSLVETPHRIAKMYVHEIFSGLDYNHFPKLALIDNKMGTDEMVLVRNIGLLSTCEHHFVTIDGKAKVAYIPGDKILGLSKINRVVRFFAQRPQVQERLTRQILVALQTVLETDDVAVSIDAVHYCVKSRGVMDSESETSTLALGGRFRTDAQQRAAFLQG

SEQ ID NO: 16084 - protein, 224 aa, Thiothrix nivea
  REGION 1..224: note = tr|A0A2G6HR81|A0A2G6HR81_9GAMM GTP cyclohydrolase 1; OS = Thiothrix nivea OX=1031 GN=folE PE=3 SV=1
MSTYPPRSAALALSAEAELVRKALIKKGLETPMLDNGLDSQQKYDRIKALMGEVVSTLGLDLKDDSLAETPHRIAKMYVHEIFSGLDYQHFPRLSLIENKMGAREMVKVRNIDLTSTCEHHFVTIDGKAKVAYIPGDKIIGLSKINRIVRFFAQRPQVQERLTRQILVALQTLLSTENVAVSIDAVHYCVKSRGIMDANSQTSTTALGGCFRENIHTRAEFLNP

SEQ ID NO: 16085 - protein, 325 aa, Thiothrix sp.
  REGION 1..325: note = tr|A0A5C7RTS8|A0A5C7RTS8_9GAMM GTP cyclohydrolase FolE2 OS=Thiothrix sp. OX=1032 GN=folE2 PE=3 SV=1
MSATNACTDLSCSVLPDIASQPHAGPKGSLNWVGMSAIEIPVLVLNSTGEKIQTLARVQAYVNLIDPNSKGIHMSRLYLALDNLLSMHELTPELLRKTVAQFVESHGSLSNSAYLECRFNYFEKRSSLVSDNRGWKNYPVRVAATLRGQQFDLEVQVEVPYSSTCPCSAALARQLIQEGFRDQFGEGSVNANTVYEWLGTTQGISATPHSQRSMAQVKVKLAEKIRNLPITSLIDRIENALQTPVQAAVKREDEQEFARLNAANLMFCEDAARRLKLAMSEDISVRDFWIRVNHLESLHAHDAVSVAVKGVDGGYQDDPHDYMSC

SEQ ID NO: 16086 - protein, 263 aa, Thiothrix sp.
  REGION 1..263: note = tr|A0A432UY60|A0A432UY60_9GAMM GTP cyclohydrolase FolE2 OS=Thiothrix sp. OX=1032 GN=folE2 PE=3 SV=1
MSESNIPDVQSSQDTRKIPIDKVGIKAIKHPVRIKERNGGEQHTIAEFNMYVNLPHNFKGTHMSRFVQILNEHEREISVDTFRIMLGEMTERLEAQSGHIEMNFPYFINKTAPVSGVKSLMDYDLTFIGEIHDGQPTTNVKVVVPVASLCPCSKKISDRGAHNQRSHITINARLKKFIWIEELIELVENEASCELYGLLKRPDEKYVTERAYDNPKFVEDTVRDIATRLNAEDRISAYTLECENFESIHNHSAYAYIEKDKLA

SEQ ID NO: 16087 - protein, 264 aa, unidentified
  source 1..264: note = Thiotrichaceae bacterium
  REGION 1..264: note = tr|A0A2A4WDT9|A0A2A4WDT9_9GAMM GTP cyclohydrolase FolE2 OS=Thiotrichaceae bacterium OX=2030882 GN=folE2 PE=3; SV = 1
MNDTDTTQIADVQNSPDNRQIPINKVGIKDIRHPVRVKDRSEGEQHTIATFNMYVDLPHNFKGTHMSRFVKLLNSNEREISVESFDEIMESMITLLDAESGHIEMSFPYFINKEAPVSKVKSLLDYDVTLIGEITGGKTVMTIKVVVPVTSLCPCSKEISDYGAHNQRSHVTVTAKTEGFVWIEDLIDIVEQEASCEIFGLLKRPDEKFVTERAYDNPKFVEDMVRDVAARLNADDRITAYTLESENFESIHNHSAYALIEKVK

SEQ ID NO: 16088 - protein, 271 aa, unidentified
  source 1..271: note = Thiotrichaceae bacterium
  REGION 1..271: note = tr|A0A2A5FYT0|A0A2A5FYT0_9GAMM GTP cyclohydrolase FolE2 OS=Thiotrichaceae bacterium OX=2030882 GN=folE2 PE=3; SV = 1
MTDILDKTNQPGSTLPDVQNSQDTRAIAINKVGIKDIRHPVQVKSRAGHTQHTIANFNMYVDLPHEFKGTHMSRFVEILNNHEWEITVESFKTMLTEMTSRLDAECGHIEMTFHYFINKTAPASGVQSLLDYEVTFIGERVRGKNIINIKVVVPVTSLCPCSKKISDRGAHNQRSHVTVNIETESFIWVEEIIDMVEAQASCELYGLLKRPDEKIVTERAYDNPKFVEDMVRDIAHQLNIDERVLAYTVESENFESIHNHSAYALIEKKRN

SEQ ID NO: 16089 - protein, 315 aa, unidentified
  source 1..315: note = Thiotrichales bacterium
  REGION 1..315: note = tr|A0A259K8Q6|A0A259K8Q6_9GAMM GTP cyclohydrolase FolE2 OS=Thiotrichales bacterium 34-46-19 OX=1970605; GN = folE2 PE=3 SV=1
MTKPFMPDIANMPLSTPMGTLDWVGMSQIEMPIMLAQAGVEPVRSLARVQAYVNLIDPQSKGIHMSRLYLMLDKASTQAVTPASVSAMLSEFVQSHTGLSNAAFVEYKFDYYERRGSLLSGNSGWKNYPCLIRGHLQEGDLRLELQVEVPYSSTCPCSAALARQLIQEQFSSDFTGREQLSQAEVYAWLGTSQGICATPHSQRSFAKVRVTLSNTQMESFEVSQLINRIEDALQTAVQAAVKREDEQEFARLNGANLMFCEDAARRLQAQLDAQSDYSDFWLRVDHLESLHPHDAVSIVSKGVAGGYQPLPSLGG

SEQ ID NO: 16090 - protein, 189 aa, unidentified
  source 1..189: note = Thiotrichales bacterium
  REGION 1..189: note = tr|A0A2D7KME0|A0A2D7KME0_9GAMM GTP cyclohydrolase 1; OS = Thiotrichales bacterium OX=2026796 GN=folE PE=3 SV=1
  VARIANT 153: note = Xaa can be any naturally occurring amino acid
MEPMMRDLFLSLLKSIGEDPERDGLLKTPDRAAKALSFLTKGSKESLEEIVNDALFESDSREMVIVKDIEIYSMCEHHMLPFFGRCHIGYIPDGKVLGLSKLARISDMFSRRLQIQEQLTHEIATAVFETVKPLGVGVVIEARHLCMMMRGVXKQNSSTVSSAMLGTFLTSDRTRSEFLQLIGPRSTSV

SEQ ID NO: 16091 - protein, 263 aa, unidentified
  source 1..263: note = Bathymodiolus puteoserpentis
  REGION 1..263: note = tr|A0A483ANB1|A0A483ANB1_9BACT GTP cyclohydrolase FolE2 OS=thiotrophic endosymbiont of Bathymodiolus puteoserpentis (Logatchev) OX=343240 GN=folE2 PE=3 SV=1
MSAANLPDTQNNADTRQIVIDKVGIKDISHPITFIDRDGNKNPTIGNFTMTVTLPEHVKGTHMSRFIEILNDGPCEFNSGNFDKIIDKVRERLESDTAHITLDFPFFRKKKAPSSGVESLMDYQVTLYGILNQGTSEVMIKVVVPVTSLCPCSKSISKYGAHNQRSHITIKARVVKGKTLHLEDLIELAEQKASCELYAILKRDDEKVVTERAYDNPAFVEDLVRDIAVGLNANDNIDYYRLESENFESIHNHSAYALIENKY

SEQ ID NO: 16092 - protein, 182 aa, Thiovulum sp.
  REGION 1..182: note = tr|J0L8B0|J0L8B0_9HELI GTP cyclohydrolase 1; OS = Thiovulum sp. ES OX=1177931 GN=folE PE=3 SV=1
MESGKIEESVKEILHAIGENPAREGLVKTPHRVAKAFGHILGGYTKDPEKILNSALFETTNDEMVVVKNIEFYSMCEHHMLPIIGTASIGYIPNGKVTGLSKLPRVVDVFARRLQIQENMTEQIANAIQNAISPKGVGVVVTARHMCMEMRGVEKCGSQTTTSSYKGDFKLSEVKREFLSQI

SEQ ID NO: 16093 - protein, 222 aa, Thorsellia anophelis
  REGION 1..222: note = tr|A0A1H9ZT82|A0A1H9ZT82_9GAMM GTP cyclohydrolase 1; OS = Thorsellia anophelis DSM 18579 OX=1123402 GN=folE PE=3; SV = 1
MNTQIKQLSLEAQLVKSALLSEGLETPLIHLEQDKHTRQKMIETHMASIMNLLGLDLTDDSLAETPRRIAKMYVEEIFSGLNYEHFPKITVIENKMRVDEMVTVRDITLTSTCEHHFVTIDGKATVAYLPKDKVIGLSKINRIVQFFSQRPQVQERLTQQILLALQTLLGTKNVAVSIDAVHYCVKARGVRDATSTTTTTALGGIFKSNPTTRHEFLSLLSR

SEQ ID NO: 16094 - protein, 188 aa, Tindallia californiensis
  REGION 1..188: note = tr|A0A1H3QHP0|A0A1H3QHP0_9CLOT GTP cyclohydrolase 1; OS = Tindallia californiensis OX=159292 GN=folE PE=3 SV=1
MDKKRIENAVREILHAIGEDPDREGLLGTPDRIARMYEEIFSGMNEDPQKHLEVFFQEEKHEELVIVKDIAFYSVCEHHLVPFFGVAHVGYIPKNGKLTGLSKLARVVDTIAKRPQLQERLTSTIADTIQEKLEPYGVIVVVEAEHMCMTMRGIKKPGSKTVSSAVRGIFKHDAKSRAEAITLIEFGR

SEQ ID NO: 16095 - protein, 188 aa, Tindallia magadiensis
  REGION 1..188: note = tr|A0A1I3GIW7|A0A1I3GIW7_9CLOT GTP cyclohydrolase 1; OS = Tindallia magadiensis OX=69895 GN=folE PE=3 SV=1
MDKKRIENAVREILHAIGEDPDREGLLGTPDRIARMYEEIFSGMNEDPQKHLEVFFQEEKHEELVIVKDIAFYSVCEHHLVPFFGVAHVGYIPKNGKLTGLSKLARVVDTIAKRPQLQERLTSTIADTIQEKLEPYGVIVVVEAEHMCMTMRGVKKPGSKTVSSAVRGIFKHDAKSRAEAITLIEFGR

SEQ ID NO: 16096 - protein, 186 aa, Tissierella creatinini
  REGION 1..186: note = tr|A0A4T9WHU7|A0A4T9WHU7_9FIRM GTP cyclohydrolase 1; OS = Tissierella creatinini OX=43143 GN=folE PE=3 SV=1
MDKVRIEKAVREILYAIGEDPDREGLLDTPKRMAKMYEEIFAGLQEDPKKHLEVYFQEEKYEELVLIKDIPFYSVCEHHLVPFFGKAHVGYLPRDGRLTGLSKLARVVDTVAKRPQLQERLTSTVADAIVEKLDPYGVIVVVEAEHMCMTMRGVKKPGSKTVTSAVRGSFATDSKSRAEVLSMINK

SEQ ID NO: 16097 - protein, 186 aa, Tissierella creatinophila
  REGION 1..186: note = tr|A0A1U7M3P5|A0A1U7M3P5_TISCR GTP cyclohydrolase 1; OS = Tissierella creatinophila DSM 6911 OX=1123403 GN=folE; PE = 3 SV=1
MDKARIEKAVREILYAIGEDPDREGLLDTPNRVARMYEEIFSGLNEDPKKHLEVYFQEEQYEELVLIKDIPFHSVCEHHLVPFFGKAHIGYLPKEGRLTGLSKLARVVDSVSKKPQLQERLTATIANVITEKLDPYGVIVVIEAEHMCMTMRGVKKPGSKTITSAIRGVFTSDSKSRAEVLSMINK

SEQ ID NO: 16098 - protein, 266 aa, Tissierella creatinophila
  REGION 1..266: note = tr|A0A1U7M819|A0A1U7M819_TISCR Putative GTP cyclohydrolase 1 type 2 OS=Tissierella creatinophila DSM 6911 OX=1123403 GN=TICRE_05890 PE=4 SV=1
MKLKNIIDYIEDWAPKSLIDTWDNTGFQIGSEKKDIKSILIALDLDEDILKKAIEDKFDLIITHHPIIFKPLKNIISTNPKEKLILDIIKNDIAVYNAHSNLDLAIGGVNDELAKLLNIKNTINLKEIFKREINGESISYGYGRIGEISETGLEEFIGVIKSSLNIENLILYGSIHKTIRKVAVCGGSGSDFIENAIEGKADLYITADIKYHEAQDAYERGLTLIDVGHFHSEKIILPVIKRYLEKEFKTLSIEVVMQQSLPKKIY

SEQ ID NO: 16099 - protein, 185 aa, Tissierella praeacuta
  REGION 1..185: note = tr|A0A3F3S4L8|A0A3F3S4L8_9FIRM GTP cyclohydrolase 1; OS = Tissierella praeacuta OX=43131 GN=folE PE=3 SV=1
MVNIEKTESAIRMLLEAIGENPNREGLIDTPKRVAKMYNEIVGGYQEDASVHLSKTFKCEDAELVLEKGIVFHSICEHHLLPFYGKVHIAYIPNEKVVGLSKLCRAVEVYARRLQIQEQLCKQIANAIYESLNAKGVMVIIEAEHTCMTMRGIKKYGSKTVTISTCGILREDILKQKYILEMVRE

SEQ ID NO: 16100 - protein, 185 aa, Tissierella praeacuta; identical to SEQ ID NO: 16099
  REGION 1..185: note = tr|A0A1M4ZV17|A0A1M4ZV17_9FIRM GTP cyclohydrolase 1; OS = Tissierella praeacuta DSM 18095 OX=1123404 GN=folE PE=3; SV = 1

SEQ ID NO: 16101 - protein, 184 aa, unidentified
  source 1..184: note = Tissierellia bacterium
  REGION 1..184: note = tr|A0A133YVJ9|A0A133YVJ9_9FIRM GTP cyclohydrolase 1; OS = Tissierellia bacterium KA00581 OX=1588751 GN=folE PE=3; SV = 1
MDKEKIEKAVSMIIEAIGEDPKREGLLETPKRVCKMYEEIFSGLGKDAKEHLSKTFELVDTSMVVEKDINFFSICEHHFLPFYGKVNIAYIPNGRVVGLSKLARCVEVYSKKPQLQERLTMEIADAIMKFLQAKACLVVISAEHMCMTIRGVKKPKTLTVTSTCKGLFNTDLKLKDEAYRLMGM

SEQ ID NO: 16102 - protein, 196 aa, unidentified
  source 1..196: note = Tissierellia bacterium
  REGION 1..196: note = tr|A0A095ZUQ6|A0A095ZUQ6_9FIRM GTP cyclohydrolase 1; OS = Tissierellia bacterium S5-A11 OX=1230730 GN=folE PE=3; SV = 1
MNEKAARAYRAFLEAYGLDLQALGMEKTPARVAELYEALLAGVGQRTKPIWGEVFESDYHGLLTVTGLHFHSLCEHHMLPFFGTADIIYDPREGMVAGLSKMEKLVQMLSRRPQLQERLTEEIARAVMDDLRARGVFVRVRAAHLCMTMKGDSSPDTKITTVRGLGTLAPGGQNEARVLALLGGTDGGTTDVCTEE

SEQ ID NO: 16103 - protein, 205 aa, Tistlia consotensis
  REGION 1..205: note = tr|A0A1Y6B7Z0|A0A1Y6B7Z0_9PROT GTP cyclohydrolase 1; OS = Tistlia consotensis USBA 355 OX=560819 GN=folE PE=3 SV=1
MDVPHVTSIAQSDSDARPSREEAEAAVRTLLRWAGDDPGREGLRDTPKRVAKAFEEWFGGYGVDPQDYLSRTFEEVDGYDEIVVLRDIDFISHCEHHLAPIIGKAHVAYLPDRRVVGISKLARVVEGYARRLQIQERLTSQIAKAIETTLQPLGVGVVIEATHQCMTTRGVRKSGVSMVTSCVLGSFRSDRRTRQEFLRLIGHGG

SEQ ID NO: 16104 - protein, 208 aa, Tistrella mobilis
  REGION 1..208: note = tr|A0A3B9IQA3|A0A3B9IQA3_9PROT GTP cyclohydrolase 1; OS = Tistrella mobilis OX=171437 GN=folE PE=3 SV=1
MPDAVSAALDARPTVAEAEEAVRTLLRWAGDDPDREGLLGTPGRVVRAYGEFFAGYAMEPQEILARTFEEIDGYDEIVALRDIRFESHCEHHMVPVVGTAHVAYLPRTRVVGISKLARVVEGSAKRFTIQERMTAQIANAITTVLDPRGVAVVVQASHQCMTTRGVHKPGVAMITSRMTGVFREDPGARLELFSLLGMRPGAGPEGAC

SEQ ID NO: 16105 - protein, 211 aa, Tistrella mobilis
  REGION 1..211: note = tr|A0A162KCW5|A0A162KCW5_9PROT GTP cyclohydrolase 1; OS = Tistrella mobilis OX=171437 GN=folE PE=3 SV=1
MGGPAEVGASEAPKAAAPEGRPSRAEAEAAVRTLIRWAGDDPDREGLLSTPDRVVRSYEEFFAGYVQDPVEILQRTFEETDGYDEVVALRGIRIESYCEHHMVPIIGVAHVAYLPRSRVVGISKLARVVEAFSKRLQIQEKLTSQIANAIEEVLQPKGVAVVIEAEHQCMSTRGVHKPGVSMVTSRMLGEFRHNPTLRREFLTLIGNPAGF

SEQ ID NO: 16106 - protein, 208 aa, Tistrella sp.
  REGION 1..208: note = tr|A0A2D8Q823|A0A2D8Q823_9PROT GTP cyclohydrolase 1; OS = Tistrella sp. OX=2024861 GN=folE PE=3 SV=1
MPDAVSAALDARPTVAEAEEAVRTLLRWAGDDPDREGLLGTPNRVVRAYGEFFAGYAMEPQEILARTFEEIDGYDEIVALRDIRFESHCEHHMVPVVGTAHVAYLPRTRVVGISKLARVVEGYAKRFTIQERMTAQIANAISTVLDPRGVAVVVQASHQCMTTRGVHKPGVAMITSRMTGVFRKDPGARLELFSLLGMRPGAGPEGAC

SEQ ID NO: 16107 - protein, 211 aa, Tistrella sp.; identical to SEQ ID NO: 16105
  REGION 1..211: note = tr|A0A2D8Q8R9|A0A2D8Q8R9_9PROT GTP cyclohydrolase 1; OS = Tistrella sp. OX=2024861 GN=folE PE=3 SV=1

SEQ ID NO: 16108 - protein, 183 aa, unidentified
  source 1..183: note = Unknown
  REGION 1..183: note = tr|A0A563CE39|A0A563CE39_9BACT GTP cyclohydrolase 1; OS = TM7 phylum sp. oral taxon 353 OX=713055 GN=folE PE=3; SV = 1
MGNKSIKTKDIESAAKDILIALGEDANREGLLETPHRYAKFFREFFDTEEFRVTTFKNEGSGMIIQTGIPFYSLCEHHMVPFFGEAAIAYIPDEKIVGLSKLARILEHFSRCLQNQERITKQVADFIDENLNPKGVAVSLQARHMCMEMRGVKKLGATTTTNVKGAFLNNAQTRNEFLSFINK

SEQ ID NO: 16109 - protein, 188 aa, unidentified
  source 1..188: note = Unknown
  REGION 1..188: note = tr|A0A563CNF1|A0A563CNF1_9BACT GTP cyclohydrolase 1; OS = TM7 phylum sp. oral taxon 348 OX=671231 GN=folE PE=3; SV = 1
MANNKEIESVIEKLLKELVEDYNRAGLKETPMRVAKSWSRLLEGYERKFEDEAKTFDNTHNYSDIVLSGKINFTSVCEHHLLPFWGEAYIAYIPKDRIIGLSKLARAVDIYSRRLQDQERITQQVAQAINGYLKPRGVAVLLKAQHFCNIARGVEKIQSNMVTSTFSGEFTNDNTRKRFYEMVAFAND

SEQ ID NO: 16110 - protein, 216 aa, Tolumonas auensis
  REGION 1..216: note = sp|C4LDE6|GCH1_TOLAT GTP cyclohydrolase 1; OS = Tolumonas auensis (strain DSM 9187 / TA4) OX=595494; GN = folE PE=3 SV=1
MTHLSKEAVIVRSALEAKGLETPMQHSSLSAQEKKQQIEQHMTSIMTLLGLDLADDSLAETPHRIAKMYVDEIFSGLDYGSFPKITLIENKMGTDEMIKVQDIGLTSTCEHHFVTIDGKATVAYIPKDKIIGLSKINRIVNFFAKRPQVQERLTQQILVALQVLLGTDNVAITVTATHYCVKSRGVMDASSQTTTTALGGVFKSSAATRHEFLSRA

SEQ ID NO: 16111 - protein, 216 aa, Tolumonas sp.
  REGION 1..216: note = tr|A0A5C7QSZ3|A0A5C7QSZ3_9GAMM GTP cyclohydrolase 1; OS = Tolumonas sp. OX=1978237 GN=folE PE=3 SV=1
MTQLSKEAIIVRSALEAKGLETPMQNTVLSSHEKKQQIEQHMTSIMNLLGLDLADDSLAETPHRIAKMYVDELFSGLDYASFPKITLIDNKMGTDEMIKVQDIGVTSTCEHHFVTIDGKATVAYIPKDKIIGLSKINRIVNFFAKRPQVQERLTQQILVALQVLLGTDNVAITMTAVHYCVKSRGVMDASSQTTTTALGGIFKSNAATRHEFLSRA

SEQ ID NO: 16112 - protein, 235 aa, unidentified
  source 1..235: note = Tolypothrix bouteillei
  REGION 1..235: note = tr|A0A0C1N6U2|A0A0C1N6U2_9CYAN GTP cyclohydrolase 1; OS = Tolypothrix bouteillei VB521301 OX=1479485 GN=folE PE=3; SV = 1
MTIASSNGANRSQSPLIPDLTESITPRPDRNTHDGREPILHPQTEEQMEQMMEAVRTLLVGVGEDPEREGLLKTPKRVAEAMRFLTSGYNQSLEDLVNGAIFDEGHNEMVLVRDINLFSLCEHHMLPFMGRAHVAYIPNQKVVGLSKLARIVEMYSRRLQVQERLTRQIAEAVHQILEPQGVAVVIEASHMCMVMRGVQKPGSWTVTSALLGVFQEEQKTREEYFNLIRHQASFF

SEQ ID NO: 16113 - protein, 235 aa, unidentified
  source 1..235: note = Tolypothrix campylonemoides
  REGION 1..235: note = tr|A0A0C2PYR1|A0A0C2PYR1_9CYAN GTP cyclohydrolase 1; OS = Tolypothrix campylonemoides VB511288 OX=1245935 GN=folE; PE = 3 SV=1
MTIARSNGINRSQSPLIPDLTEAITPRPDRNTHDGRQADLHPQTEEQMEQMTDAVRTLLVGVGEDPEREGLLKTPKRVAEAMRFLTSGYNQSLEEIVNGAIFDEGHNEMVLVRDINFFSMCEHHMLPFMGKAHVAYIPNQKVVGLSKLARIVEMYSRRLQVQERLTRQIAEAIQTILEPQGVAVVMEATHMCMVMRGVQKPGSWTVTSAMLGVFQEEQKTREEFFNLIRHQSSFF

SEQ ID NO: 16114 - protein, 235 aa, Tolypothrix sp.; identical to SEQ ID NO: 8366
  REGION 1..235: note = tr|A0A0D6KVL4|A0A0D6KVL4_9CYAN GTP cyclohydrolase 1; OS = Tolypothrix sp. PCC 7601 OX=1188 GN=folE PE=3 SV=1

SEQ ID NO: 16115 - protein, 234 aa, Tolypothrix sp.
  REGION 1..234: note = tr|A0A218QGK9|A0A218QGK9_9CYAN GTP cyclohydrolase 1; OS = Tolypothrix sp. NIES-4075 OX=2005459 GN=folE PE=3 SV=1
MTTARSNGSNVSQSPLIPDLSEAINPRPDRNTRDGREPDLHDPSDEHIKQMKDAVRSILVGVGEDPEREGLLKTPKRVAEAMRFLTSGYNQSLEDLVNDAIFDEGHNEMVLVRDINFFSLCEHHMLPFMGRAHVAYIPNQKVVGLSKLARIVEMYSRRLQVQERLTRQIAEAVQTILEPQGVAVVMEASHMCMVMRGVQKPGSWTVTSAMLGVFQEQKTREEFFSLIHHQAAFF

SEQ ID NO: 16116 - protein, 235 aa, Tolypothrix tenuis; identical to SEQ ID NO: 4873
  REGION 1..235: note = tr|A0A1Z4MSU8|A0A1Z4MSU8_9CYAN GTP cyclohydrolase 1; OS = Tolypothrix tenuis PCC 7101 OX=231146 GN=folE PE=3 SV=1

SEQ ID NO: 16117 - protein, 207 aa, Tomitella sp.
  REGION 1..207: note = tr|A0A516X7I7|A0A516X7I7_9ACTN GTP cyclohydrolase 1; OS = Tomitella sp. HY188 OX=2597660 GN=folE PE=3 SV=1
MAQDSPAQDGAAVKYGAVGPFDAARAEAAVRELLIAVGEDPDREGLRETPARVARAYREVFDGLFSEPDSVLNTVFDEGHQEMILVRDIPVYSTCEHHLVPFHGVAHVGYIPGTSGKVTGLSKLARVVDLYAKRPQVQERLTSDIADALVRKLQPRAAIVVIEAEHLCMSMRGIRKPGATTTTSAVRGLFKTSAVSRGEVLDLILRK

SEQ ID NO: 16118 - protein, 222 aa, Trabulsiella guamensis
  REGION 1..222: note = tr|A0A085AG64|A0A085AG64_9ENTR GTP cyclohydrolase 1; OS = Trabulsiella guamensis ATCC 49490 OX=1005994 GN=folE; PE = 3 SV=1
MSSLSKEAALVHEALVARGLETPLRPPVHDMDNETRKRLIAGHMTEIMELLNLDLSDDSLMETPHRIAKMYVDEIFSGLDYANFPKITVIENKMKVDEMVTVRDITLTSTCEHHFVTIDGKATVAYIPKDTVIGLSKINRIVQFFAQRPQVQERLTQQILTALQTLLGTNNVAVSIDAVHYCVKARGVRDATSATTTTSLGGLFKSSQNTRQEFLRAVRHLS

SEQ ID NO: 16119 - protein, 222 aa, Trabulsiella odontotermitis; identical to SEQ ID NO: 16118
  REGION 1..222: note = tr|A0A0L0GGY0|A0A0L0GGY0_9ENTR GTP cyclohydrolase 1; OS = Trabulsiella odontotermitis OX=379893 GN=folE PE=3 SV=1

SEQ ID NO: 16120 - protein, 367 aa, Tranquillimonas alkanivorans
  REGION 1..367: note = tr|A0A1I5KLH8|A0A1I5KLH8_9RHOB GTP cyclohydrolase FolE2 OS=Tranquillimonas alkanivorans OX=441119 GN=folE2; PE = 3 SV=1
MNVHTPEIERDTDREDAAQALKVLRDWAAKASAEEVAALDPAVARLLPGADAAPYPALSRTYPEGFEADAAYRQTLPDLQNGPQSLIRGAKRQIQHVGISNFRLPIKFHTRDNGDLTLETSVTGTVSLEAEKKGINMSRIMRTFYRHAERTFSFEVIEAALDDYKSDLESFDARIQMRFSFPVKKPSLRSGLEGYQYYDIALELVETAGVRRKVMHLDYVYSSTCPCSLELSEHARMTRGQLATPHSQRSVARVSVELNRNADCMWFEDLVDLCRAAVPTETQVMVKREDEQAFAELNAANPIFVEDAARLFAQALHDEPRIGDFRVVASHQESLHSHDAVSVLTEGETFSQASLDPRLFTTLFHVG

SEQ ID NO: 16121 - protein, 367 aa, Tranquillimonas sp.
  REGION 1..367: note = tr|A0A438AJB7|A0A438AJB7_9RHOB GTP cyclohydrolase FolE2 OS=Tranquillimonas sp. M0103 OX=2486419 GN=folE2; PE = 3 SV=1
MNVYSKDFDETPKREEAEDALRRLRAWAETATPEEVADLDPAISRLLPDRPLPNYPELSRRYPEGFEVDDAYRATLPDLQNGPQSLIRGARRLIQHVGISHFRLPIRFHTRDGDDLTLETSVTGTVSLAAEKKGINMSRIMRSFYRHAERTFSFEVIEAALDDYLSDLGSLDARIQMRFSFPMKRPSLRSGLEGYQYYDIALELVDRGGVRHKITHLDYVYSSTCPCSLELSEHARQYRGQLATPHSQRSVARISVAADTSGETLWFEDIIDHCRAAVPTETQVMVKREDEQAFAELNGANPIFVEDAARLFAQELQGDARIQDYRIIASHQESLHSHDAVSVLTEGATFDQLSFDPQLFSTLHHPG

SEQ ID NO: 16122 - protein, 274 aa, Treponema azotonutricium
  REGION 1..274: note = tr|F5Y8J0|F5Y8J0_TREAZ GTP cyclohydrolase FolE2; OS = Treponema azotonutricium (strain ATCC BAA-888 / DSM 13862 / ZAS-9) OX=545695 GN=folE2 PE=3 SV=1
MKDLKTIPDVQNQADHRDVPLAKVGIKGLEYPITVLDRENKIQHTSAKVDLYADLPRHFKGTHMSRFIEIFHQYREDLSMPRFLDMLNAIRKELEAESAFGSLNFPYFIEKKAPISGLPGIMSYQCRYQGWVNRQDSGNSSRKGKHFTVAVSVPVTTVCPCSKAISDRGAHNQRGIVTVELELGPFFWIEDIIALVEKAASSPVYSLLKREDEKFITEQAYDNPKFVEDLVRDVYIDIKGLNQFPRFSVEAENFESIHNHSAFAYAEFGEHNRE

SEQ ID NO: 16123 - protein, 260 aa, Treponema berlinense
  REGION 1..260: note = tr|A0A1T4PRH9|A0A1T4PRH9_9SPIO GTP cyclohydrolase FolE2 OS=Treponema berlinense OX=225004 GN=folE2 PE=3 SV=1
MIDVQNSPDTREVPLQKVGVKNVKYPVQVLDKNNKVQNTTACVNLFVNLPHDFKGTHMSRFIEVFHKYHSDISMKNFLEMLEEIRAKLDAQRAFGRISFPYFIEKNAPVTGASGFMQYNCTYEGESERLEKGVDSKFFVGIEVPVATLCPCSKAISEFGAHNQRGCVKVKVLYSDFFWIEDIIEMIENCASTPLYSVLKRQDEKFVTEHAYENPRFVEDMVREVYLGLKKMGFAWFKVECTNYESIHFHDAYACAEFGSC

SEQ ID NO: 16124 - protein, 278 aa, Treponema brennaborense
  REGION 1..278: note = tr|F4LPX7|F4LPX7_TREBD GTP cyclohydrolase FolE2; OS = Treponema brennaborense (strain DSM 12168 / CIP 105900 / DD5/3) OX=906968 GN=folE2 PE=3 SV=1
MIDIQNQTDTRDVPLKKVGVRGLKYPVQVLDKRRKTQTTSAVADLFVDLPHHFKGTHMSRFIEIFHAYHTDVSMKRFLAMLNEIRCKLDAECAFGTLTFPFFIEKNAPVSGQPGMMSYECTYEGSVSGTGSSFFVSVAVPVTTVCPCSKAISDRGAHNQRGVVRVKLQSSAFFWIEDVIALVEAAASSGLYSILKRSDEKFVTEAAYDNPRFVEDVVREVYIALRNFRVGDSRDANAPLSETAGRKTGTAAFRWFSVEAENFESIHNHNAYAYTEFDG

SEQ ID NO: 16125 - protein, 256 aa, Treponema bryantii
  REGION 1..256: note = tr|A0A1I3KRY4|A0A1I3KRY4_9SPIO GTP cyclohydrolase FolE2 OS=Treponema bryantii OX=163 GN=folE2 PE=3 SV=1
MIDIQSEEDTRAVPLQKVGVKGVKYPVVVLDKTATKQHTTASVDLFVNLPHNYKGTHMSRFIEVFHKYHSDISMHHFLDMLEEMRTKLSAQKAFGRIEFPYFIEKKAPVTEAAGIMQYKCSYEGEVSEDGTRKFYISIQVPVATLCPCSKAISEYGAHNQRGIVSVRLLYKEFFWIEDVIATIESCASTPLYSLLKRKDEKYVTEHAYENPRFVEDVVREVYLGLKKLGFTQFSVEAENDESIHNHNAYAFAEYSE

SEQ ID NO: 16126 - protein, 256 aa, Treponema bryantii
  REGION 1..256: note = tr|A0A1H9EJ95|A0A1H9EJ95_9SPIO GTP cyclohydrolase FolE2 OS=Treponema bryantii OX=163 GN=folE2 PE=3 SV=1
MRDIQNEEDTRAVPLQKVGVKGVKYPVVVLDKTASKQHTTATVDLYVNLPHNYKGTHMSRFIEVFHKYHTDISMHHFLDMLEEIRVKLDAQKSFGRIEFPYFIEKKAPVTEASGIMQYKCSYEGEVSEDGDRKFYISIQVPVATLCPCSKAISEYGAHNQRGLVSVRLLYKEFFWIEDVITTIENCASTPLYSLLKRKDEKYVTEHAYENPRFVEDVVREVYLGLKKLGFTSFSVEAENDESIHNHNAYAFAEYSI

SEQ ID NO: 16127 - protein, 271 aa, unidentified
  source 1..271: note = Treponema caldarium
  REGION 1..271: note = tr|F8EZ49|F8EZ49_TRECH GTP cyclohydrolase FolE2; OS = Treponema caldarium (strain ATCC 51460 / DSM 7334 / H1); OX = 744872 GN=folE2 PE=3 SV=1
MAETCSCLMEDVQNQRDDRDVPLSKVGIKGVRYPIRVLDKAKSVQHTTATVDLYADLPRHFKGTHMSRFIEVLERHKADLSMPRFLQMLDEIRTDLEAESAFGAIAFPYFIEKAAPVSGLTSSMVYECRYEGSVNSREKHFIVQVSVPVTTVCPCSKAISDRGAHNQRGIVRVEVELGPFFWIEDLIDIVEQSASSPVYTLLKREDEKFITEQAYDNPKFVEDLVRDVYIGIKALNKFPRFSVEAENFESIHNHSAFAYAEYGRQKEQNHE

SEQ ID NO: 16128 - protein, 269 aa, unidentified
  source 1..269: note = Treponema phagedenis
  REGION 1..269: note = tr|A0A0B7GTX7|A0A0B7GTX7_TREPH GTP cyclohydrolase FolE2 OS=Treponema phagedenis OX=162 GN=folE PE=3 SV=1
MLPDIQSGKETRQILLQQVGISDLLYPLRIGLSKETEKILAEIDFSVQVESTQRGTHMSRFIETLNEFTEPLAMENFQKLLESGRNKLHAQAASAKIRFPYIVLKKAPASEKPSYMTYYCVLSGTNYANPEKNTEQITLFVPVQTLCPCSKEISAYGAHNQRSKVEVTLQLGSVFQIEDLITCIEKAASAPLHSLLKREDEKYVTEQAYANPKFAEDLVRDICLSLPALGNFPYARVKTTNYESIHNHNAFAAAHGECKDGQFLQPASI

SEQ ID NO: 16129 - protein, 269 aa, unidentified; identical to SEQ ID NO: 16128
  source 1..269: note = Treponema phagedenis
  REGION 1..269: note = tr|E7NX56|E7NX56_TREPH GTP cyclohydrolase FolE2; OS = Treponema phagedenis F0421 OX=754027 GN=folE2 PE=3 SV=1

SEQ ID NO: 16130 - protein, 263 aa, Treponema porcinum
  REGION 1..263: note = tr|A0A1T4MPH5|A0A1T4MPH5_9SPIO GTP cyclohydrolase FolE2 OS=Treponema porcinum OX=261392 GN=folE2 PE=3 SV=1
MRDIQNETDTRKIPLQKVGVRNVKYPVTVLDKTNKLQLTTATVDLYVNLPHNFKGTHMSRFIEIFHKYHTDISMQHFLEMLEEIRSRLSAQKAYGTIRFPYFIEKSAPVSESKGIMEYTCSYEASAGEDERVFYVNIEVPVATLCPCSKAISDYGAHNQRGIVKVRLLYSDFFWIEDVISVIESCASTQLYSVLKRKDEKFVTEHAYNNPMFVEDVVREVYLGLKQMKFKWFSVEAETEESIHFHNAYAYAEYNENEKKVYSH

SEQ ID NO: 16131 - protein, 262 aa, Treponema saccharophilum
  REGION 1..262: note = tr|H7EIQ9|H7EIQ9_9SPIO GTP cyclohydrolase FolE2; OS = Treponema saccharophilum DSM 2985 OX=907348 GN=folE2; PE = 3 SV=1
MIDIQNTPDTREVPLQKVGIKDLEYPVTVLDKKNGTQSTTAKIDLFVNLPHNYKGTHMSRFIEIFHKHHENLGMSKFLEMLGEIRKTLDAEKSFGTMTFPFFVEKNAPVTGAPGIMRYECKYEGVVSENASDFFVSISIPVTTVCPCSKAISEYGAHNQRGIVNVRLKNSGMFWIEDVIKAVEDSASCGLFSALKRPDEKWVTEHAYDNPRFVEDVVREVYLSLKNFKSGKPFSYFSVECTNFESIHNHNAYAFTEYDGSGV

SEQ ID NO: 16132 - protein, 273 aa, Treponema socranskii
  REGION 1..273: note = tr|U2L6P7|U2L6P7_TRESO GTP cyclohydrolase FolE2; OS = Treponema socranskii subsp. socranskii VPI DR56BR1116 = ATCC 35536 OX=1125725 GN=folE2 PE=3 SV=1
MSADEKTSRAALRDIQSEKDTRGVPLQKVGVKGLHYPVTVRDKINKTQNTTATVDLFVDLPADCKGTHMSRFIEVFHKYRFDISMHRFFDMLDEIRSTLCAARAYGTVSFPFFIEKSAPVTGTKSMMSYMCAYEGSVGKTERDFFISVSVPVATLCPCSKAISDYGAHNQRGTVRVKLLYSDFFWIEDVIAVIENASSGGLYAALKRRDEKWVTEHAYDNPRFAEDIVRETYLALRSFQISKPFAWFSVEAENYESIHNHNAYACAEYGSQTE

SEQ ID NO: 16133 - protein, 273 aa, Treponema socranskii
  REGION 1..273: note = tr|S3JNT6|S3JNT6_TRESO GTP cyclohydrolase FolE2; OS = Treponema socranskii subsp. paredis ATCC 35535; OX = 1125701 GN=folE2 PE=3 SV=1
MSADVKKSCNAMHDMQSEKDTRGVPLQKAGVKGLEYPVTVLDKINKTQNTTATVDLFVDLPAGCKGTHMSRFIEIFHKYRFDISMHRFFDMLDEIRSKLFAARAYGTVSFPFFIEKSAPVTGTKSMMRYTCAYEGSVGKDERNFFVSISVPVATLCPCSKAISDYGAHNQRGTVRVKLLYSDFFWIEDVIAAVENASSGGLYAALKRRDEKWVTEHAYDNPRFAEDVVRETYLALRSFPIAKPFAWFSVEAENYESIHNHNAYAYAEYGAQTE

SEQ ID NO: 16134 - protein, 262 aa, Treponema sp.
  REGION 1..262: note = tr|A0A3D3FI21|A0A3D3FI21_9SPIO GTP cyclohydrolase FolE2 OS=Treponema sp. OX=166 GN=folE2 PE=3 SV=1
MIDVQNFADDRDVPLGKVGVKGVRYPITVLDKARGTQRTVASVDLFANLPHHFKGTHMSRFIEAFQRHRDDLSMPRFLEMLTEIRADLEADSAFALVSFPYFMDKSAPVSGLPSAMVYECRYEGSVSAGGKDFRVSVAVPVQTVCPCSKAISDRGAHNQRGVVRVEVELGPFFWIEDLIAIVENAASSPVFTLLKREDEKYLTERAYDNPKFVEDLVRDVYIGIRSLERFPRFSVEAENFESIHNHSAFAYAEYGPRKGANT

SEQ ID NO: 16135 - protein, 262 aa, Treponema sp.
  REGION 1..262: note = tr|A0A352TAN3|A0A352TAN3_9SPIO GTP cyclohydrolase FolE2 OS=Treponema sp. OX=166 GN=folE2 PE=3 SV=1
MIDVQSSPDTREIPLEKVGVKRLQYPVQVLDKVNGKQSTTATVDLFVNLPHHFKGTHMSRFVEIFHRHSQDLGRRQFLDMLKEIRTSLDAERAFGTMHFLFFMNKKAPVTGENGIMSYECEYEAEVSSDSERFRLKISVPVTTVCPCSKAISQYGAHNQRGVVTVTLENTSLFWMEDVIALIEASASCGLYSVLKRPDEKFVTEHAYENPRFVEDVVREVYLALEHFDGAEKPFSWFSVECENFESIHNHNAYSMTSKITSV

SEQ ID NO: 16136 - protein, 261 aa, Treponema succinifaciens
  REGION 1..261: note = tr|F2NSW9|F2NSW9_TRES6 GTP cyclohydrolase FolE2; OS = Treponema succinifaciens (strain ATCC 33096 / DSM 2489 / 6091) OX=869209 GN=folE2 PE=3 SV=1
MIDIQNSKDTREIPLQKVGVTDLSYPVQVLDKAEGSQKTCAKVNLFVNLPHNYKGTHMSRFIEIFHRHRENLGMKQFLFMLEEIRKSLDAERAFGSMEFPFFMKKQAPVSHAESIMCYECTYEGEVSSASSSFFIKIKIPVTTLCPCSKAISQYGAHNQRGIVTVKLKNSSLFWIEDVIEEVEKSASGGLYSILKRPDEKFVTEHAYENPRFVEDVVREVFIALKNFSKSEKPFSWFSVECKNFESIHNHNAYAYTEFSEA

SEQ ID NO: 16137 - protein, 203 aa, Trichococcus collinsii
  REGION 1..203: note = tr|A0A143YYF2|A0A143YYF2_9LACT GTP cyclohydrolase 1; OS = Trichococcus collinsii OX=157076 GN=folE PE=3 SV=1
MAIDVQAIEEHIKGILIALGDNPEREGLKDTPKRVAKMYEDVYKGMCYTNDEIAEMLNTTFEDDLALGNAENDLVFMKDIEIFSHCEHHLALMYNMKVAVAYVPKQKVIGLSKIARIADMAGRRLQLQERIGSDIAEILENITESEDVAVIIQGEHGCMTTRGIQKPGAKTITTTLRGRFNTDPMLNNKLMMLYTKDSSNQFG

SEQ ID NO: 16138 - protein, 185 aa, Trichococcus collinsii
  REGION 1..185: note = tr|A0A143YDH1|A0A143YDH1_9LACT GTP cyclohydrolase 1; OS = Trichococcus collinsii OX=157076 GN=folE PE=3 SV=1
MDLKKIETAVQMILEAIGEDPNRSGLQDTPKRVARMYAEIFSGVEKDPADHAKVVFHEDTDEIVLVKDIPFYSTCEHHLVPFFGVGHIAYMPKDGQVIGLSKLARILDEVSKKPQIQERITTTVADILMEHLQPQGVMVVLEAEHMCMTMRGVKKPGSKTVTSAVRGAFKQSFKSRSEVLELIKL

SEQ ID NO: 16139 - protein, 185 aa, Trichococcus flocculiformis
  REGION 1..185: note = tr|A0A143YEU0|A0A143YEU0_9LACT GTP cyclohydrolase 1; OS = Trichococcus flocculiformis OX=82803 GN=folE PE=3 SV=1
MDLEKIEVAVQMILEAIGEDPKRSGLQDTPKRVARMYAEIFSGLEKDPADHAKVIFHEDTDEIVLVKDIPFYSTCEHHLVPFFGVGHIAYMPKDGQVIGLSKLARILDEVSKKPQIQERITTTVADILMEHLEPQGVMVILEAEHMCMTMRGVKKPGSKTVTSAVRGGFKQSFKSRSEVLELIKL

SEQ ID NO: 16140 - protein, 185 aa, unidentified
  source 1..185: note = Trichococcus ilyis
  REGION 1..185: note = tr|A0A143YAG4|A0A143YAG4_9LACT GTP cyclohydrolase 1; OS = Trichococcus ilyis OX=640938 GN=folE PE=3 SV=1
MDLEKIESAVQMILEAIGEDPNRSGIKDTPKRVARMYAEIFSGIEKDPTRHAKVVFHEETDEIVLVKDIPFYSTCEHHLVPFFGVGHIAYMPKDGQVIGLSKLARILDDVSKRPQIQERITTTVADILMEFLEPQGVMVVLEAEHMCMTMRGVKKPGSKTVTSAVRGAFENSSKSRSEVLELIKL

SEQ ID NO: 16141 - protein, 203 aa, unidentified
  source 1..203: note = Trichococcus ilyis
  REGION 1..203: note = tr|A0A143YK04|A0A143YK04_9LACT GTP cyclohydrolase 1; OS = Trichococcus ilyis OX=640938 GN=folE PE=3 SV=1
MAIDIAAIEKHIRGILIALGDDPEREGLKDTPKRVARMYEDVYKGMCYTNDEIAEMLNTTFEDDLALGSAGNDLVFMKDIEIFSHCEHHLALMYNMKVAVAYVPKQKVIGLSKIARIADMASRRLQLQERIGTDIAEILQKITDSEDVAVLIQGEHGCMTTRGIQKPGAKTITTTLRGRFNTDPMLNHKLMMLYMKDGSNPLG

SEQ ID NO: 16142 - protein, 203 aa, Trichococcus palustris
  REGION 1..203: note = tr|A0A143YDK2|A0A143YDK2_9LACT GTP cyclohydrolase 1; OS = Trichococcus palustris OX=140314 GN=folE PE=3 SV=1
MAIDVQAIEEHIRGILIALGDDPEREGLKDTPKRVAKMYEEVYMGMCYTNDEISEMLNTTFEDDLALNNNGNDLVFMKDIEIFSHCEHHLALMYNMKVAVAYVPKQKVIGLSKIARIADMVGRRLQLQERIGSDIAEILQKITESEDVAVLIQGEHGCMTTRGIQKPGTKTITTTLRGRFNTDHLLNNKLMMLYTKDSANQRA

SEQ ID NO: 16143 - protein, 185 aa, Trichococcus palustris
  REGION 1..185: note = tr|A0A143YIQ3|A0A143YIQ3_9LACT GTP cyclohydrolase 1; OS = Trichococcus palustris OX=140314 GN=folE PE=3 SV=1
MDLEKIESAVYQILEAIGEDPNRSGLQDTPKRVARMYAEIFSGVEKDPAEHAKVVFHEDTDEIVLVKDIPFYSTCEHHLVPFFGVGHIAYMPKDGQVIGLSKLARILDEVSKKPQIQERITTTVADILMEHLDPQGVMVVLEAEHMCMTMRGVKKPGSKTVTSAVRGAFKQSFKSRSEVLELIKL

SEQ ID NO: 16144 - protein, 185 aa, Trichococcus pasteurii
  REGION 1..185: note = tr|A0A1W1II14|A0A1W1II14_9LACT GTP cyclohydrolase 1; OS = Trichococcus pasteurii OX=43064 GN=folE PE=3 SV=1
MDLEKIETAVQMILEAIGEDPNRSGLQDTPKRVARMYAEIFSGVEKDPADHAKVVFHEDTDEIVLVKDIPFYSTCEHHLVPFFGVGHIAYMPKDGQVIGLSKLARILDEVSKKPQIQERITTTVADILMEHLEPQGVMVVLEAEHMCMTMRGVKKPGSKTVTSAVRGAFKQSFKSRSEVLELIKL

SEQ ID NO: 16145 - protein, 203 aa, Trichococcus pasteurii
  REGION 1..203: note = tr|A0A1W1IFV2|A0A1W1IFV2_9LACT GTP cyclohydrolase 1; OS = Trichococcus pasteurii OX=43064 GN=folE PE=3 SV=1
MAIDVQAIEEHIRGILIALGDDPEREGLKDTPKRVAKMYEDIYKGMCYTNDEIAEMLNTTFEDDLAFGNAENDLVFMKDIEIFSHCEHHLALMYNMKVAVAYIPKQKVIGLSKIARIADMAGRRLQLQERIGSDIAEILEKITESEDVAVIIQGEHGCMTTRGIQKPGAKTITTTLRGRFNTDPMLNNKLMMLYTKDSSNQFG

SEQ ID NO: 16146 - protein, 185 aa, Trichococcus patagoniensis
  REGION 1..185: note = tr|A0A2T5IQW0|A0A2T5IQW0_9LACT GTP cyclohydrolase 1; OS = Trichococcus patagoniensis OX=382641 GN=folE PE=3 SV=1
MDLEKIETAVQMILEAIGEDPNRSGLQDTPKRVARMYAEIFSGVEKDPADHAKVVFHEDTDEIVLVKDIPFYSTCEHHLVPFFGVGHIAYMPKDGQVIGLSKLARILDEVSKKPQIQERITTTVADILMEHLQPQGVMVVLEAEHMCMTMRGVKKPGSKTVTSAVRGAFKQSFKSRSEVLELIKL

SEQ ID NO: 16147 - protein, 185 aa, Trichococcus sp.
  REGION 1..185: note = tr|A0A5C5E891|A0A5C5E891_9LACT GTP cyclohydrolase 1; OS = Trichococcus sp. SKBG OX=2585775 GN=folE PE=3 SV=1
MDLEKIETAVHMILEAIGEDPNRSGLQDTPKRVARMYAEIFSGVEKDPADHAKVVFHEDTDEIVLVKDIPFYSTCEHHLVPFFGVGHIAYMPKDGQVIGLSKLARILDEVSKKPQIQERITTTVADILMEHLQPQGVMVVLEAEHMCMTMRGVKKPGSKTVTSAVRGAFKQSFKSRSEVLELIKL

SEQ ID NO: 16148 - protein, 185 aa, Trichococcus sp.
  REGION 1..185: note = tr|A0A143YI81|A0A143YI81_9LACT GTP cyclohydrolase 1; OS = Trichococcus sp. ES5 OX=872292 GN=folE PE=3 SV=1
MDLEKIEVAVQMILEAIGEDPKRSGLQDTPKRVARMYAEIFSGLEKDPADHAKVIFHEDTDEIVLVKDIPFYSTCEHHLVPFFGVGHIAYMPKDGQVIGLSKLARILDEVSKKPQIQERITTTVADILMEHLEPKGVMVVLEAEHMCMTMRGVKKPGSKTVTSAVRGGFKQSFKSRSEVLELIKL

SEQ ID NO: 16149 - protein, 243 aa, unidentified
  source 1..243: note = Trichodesmium erythraeum
  REGION 1..243: note = tr|Q117H2|Q117H2_TRIEI GTP cyclohydrolase 1; OS = Trichodesmium erythraeum (strain IMS101) OX=203124; GN = folE PE=3 SV=1
MTQSSSNRSNSKNTLNMNGVKTSDANMTSQISYRPERISSSNGQSIKQKLSTEDSNERMKEAVRTILLSVEENPEREGLLNTPKRFAEAMQFLTSGYSQSLEEIVNGAIFDEGHNEMVLVRDINFFSLCEHHMLPFMGKAHIAYIPNQKVVGLSKLARVVDMYSRRLQVQERLNRQIAEAIQTILEPKGVAVVIEATHISMVMRGVQKPGSWTVTSAMVGLFKEDQKTREEYLNLIRHQPTFF

SEQ ID NO: 16150 - protein, 212 aa, unidentified
  source 1..212: note = Trichodesmium erythraeum
  REGION 1..212: note = tr|Q10VY5|Q10VY5_TRIEI GTP cyclohydrolase 1; OS = Trichodesmium erythraeum (strain IMS101) OX=203124; GN = folE PE=3 SV=1
MNLPTVPDFVSPNDLKTKYQTSVTEAEMVQAVRTLLIGLGENPDREGLLDTPKRVVKALKFLTSGYNQSLDELLNGAVFSEDTSEMVLVRDIDLFSSCEHHILPIIGRAHVAYIPNGKVIGLSKIARICEMYARRLQVQERLTAQIADALQGLLRPLGVAVVVEATHMCMVMRGVQKTGSWTTTSAMRGVFADDVKTRQEFMSLIKHSHNFH

SEQ ID NO: 16151 - protein, 235 aa, unidentified
  source 1..235: note = Trichormus variabilis
  REGION 1..235: note = tr|Q3MA34|Q3MA34_TRIV2 GTP cyclohydrolase 1; OS = Trichormus variabilis (strain ATCC 29413 / PCC 7937); OX = 240292 GN=folE PE=3 SV=1
MTIASSNGSNRAQSPLIPDLAEAINTRPDRNTHNGREPELHQPSEQDMDSMMDAVRSILVGVGEDPEREGLLKTPKRVAEAMRFLTSGYNQSLEELLNGAVFDEGHNEMVLVRDINFFSLCEHHMLPFMGRAHVAYIPNQKVVGLSKLARIVEMYSRRLQVQERLTRQIAEAVQTILEPQGVAVVMEASHMCMVMRGVQKPGSWTVTSAMLGVFQEEQKTREEFFNLIRHQPSFF

SEQ ID NO: 16152 - protein, 216 aa, unidentified; identical to SEQ ID NO: 4554
  source 1..216: note = Trichormus variabilis
  REGION 1..216: note = tr|Q3MBR5|Q3MBR5_TRIV2 GTP cyclohydrolase 1; OS = Trichormus variabilis (strain ATCC 29413 / PCC 7937); OX = 240292 GN=folE PE=3 SV=1

SEQ ID NO: 16153 - protein, 269 aa, unidentified
  source 1..269: note = Trinickia caryophylli
  REGION 1..269: note = tr|A0A1X7EGN8|A0A1X7EGN8_TRICW GTP cyclohydrolase FolE2 OS=Trinickia caryophylli OX=28094 GN=folE2 PE=3 SV=1
MNHMNPAFVMPDVQSSVDTRQIAIQRVGVKGVRHPLTVRTLRGDAQPTVGTWNLDVHLPADQKGTHMSRFVALLEDGCAPLDSATMRAMLAAMLEKLEASAGRIEVTFPYFVSKTAPVSGVSSLLDYEVTMTGELRDGALRAFLQVLVPVTSLCPCSKEISQYGAHNQRSHVTIRAELAADMPAEELIRIAEEEASCELWGLLKRPDEKFVTERAYENPKFVEDLVRDVARRLDADERVAAYVLEAENFESIHNHSAYAVIERDKRHPA

SEQ ID NO: 16154 - protein, 233 aa, unidentified
  source 1..233: note = Trinickia caryophylli
  REGION 1..233: note = tr|A0A1X7FMY6|A0A1X7FMY6_TRICW GTP cyclohydrolase 1; OS = Trinickia caryophylli OX=28094 GN=folE PE=3 SV=1
MSSGSRTKDKGEPKAKTKARANRAIDTAGEAAGEAAKRPTREQAEDAVRVLLRWAGDDPEREGLRDTPARVARAYEEFFSGYGLDPREILARTFSEVDGYDEMVVLKDIRFESYCEHHMVPIIGRAHVAYLPKHRVVGISKLARLVDAFAKRLQIQEKMTVQIADTLNEILQPRGVGVILEAAHQCITTRGIHKPGVAMVTSRMLGSFRTDPSTRREFLAIVGNPGSLAVPNS

SEQ ID NO: 16155 - protein, 198 aa, unidentified
  source 1..198: note = Trinickia soli
  REGION 1..198: note = tr|A0A2N7WA65|A0A2N7WA65_9BURK GTP cyclohydrolase 1; OS = Trinickia soli OX=380675 GN=folE PE=3 SV=1
MVRPTRSEAEDAVRVLLRWAGDDPAREGLLDTPARVVRAYEEFFKGYSHDPREILARTFSEVDGYDEMVVLKDIRFESYCEHHMVPIIGRAHVAYLPDHRVVGISKLARLVDAFAKRLQIQEKMTVQIADTLNEILQPKGVGVILEAAHQCISTRGVHKPGVQMVTSRMLGSFRDDPSTRREFLAIVGNLTGTGIPNT

SEQ ID NO: 16156 - protein, 272 aa, unidentified
  source 1..272: note = Trinickia soli
  REGION 1..272: note = tr|A0A2N7VI12|A0A2N7VI12_9BURK GTP cyclohydrolase FolE2 OS=Trinickia soli OX=380675 GN=folE2 PE=3 SV=1
MNQMNPAFVMPDVQSTVDTRQIPIQRVGVKGVRHPLMVRTPSGDAQPTVGTWNLDVHLPAHQKGTHMSRFVALLEGNKAPLEAATFRALLAEMLEKLEATSGRIEVTFPYFVSKTAPVSGVSSLLDYEVTLAGQARDGDVRTFLRVLVPVTSLCPCSKEISQYGAHNQRSHVTIEVELLADLPVEELIRMAEEEASCELWGLLKRPDEKFVTERAYENPKFVEDLVRDVAQRLNRDERIVSYVLEAENFESIHNHSAYAVIEHDKRGAMAAV

SEQ ID NO: 16157 - protein, 212 aa, unidentified
  source 1..212: note = Trinickia sp.
  REGION 1..212: note = tr|A0A4V5PGE4|A0A4V5PGE4_9BURK GTP cyclohydrolase 1; OS = Trinickia sp. 7GSK02 OX=2571161 GN=folE PE=3 SV=1
MTKGSGADQDQSEATSRPTREEAEAAVRVLLRWAGDDPNREGLLETPSRVVRSYEEFFSGYAQDPREILARTFSEVDGYDEMIVLKDIRFESYCEHHMVPIIGRAHVAYLPEHRVVGISKLARLVDAFAKRLQIQEKMTAQIADTLNEILQPKGVGVILEAAHQCMSTRGVHKPGVEMVTSRMLGTFRTDPSTRREFLSIVSNSTAYNVPNT

SEQ ID NO: 16158 - protein, 272 aa, unidentified
  source 1..272: note = Trinickia sp.
  REGION 1..272: note = tr|A0A4U1IER4|A0A4U1IER4_9BURK GTP cyclohydrolase FolE2 OS=Trinickia sp. 7GSK02 OX=2571161 GN=folE2 PE=3 SV=1
MNQMNPAFVMPDVQSTVDTRQIPIQRVGVKAVRHPLTVRTPDGEIQPTVGTWNLDVHLPAEQKGTHMSRFVALLEENKAPLEPAVFRTMLASMLERLEAKAGRIEVTFPYFVSKVAPVSGVKSLLDYEVTLTGDTRNGMTRLFLRVLVPVTSLCPCSKKISQYGAHNQRSHVTINAELSGDLPVEELIRIAEEEASCELWGLLKRPDEKFVTERAYENPKFVEDLVRDVAKRLNDEGRVVAYVLEAENFESIHNHSAYAVIEHDKRDAIDGV

SEQ ID NO: 16159 - protein, 270 aa, unidentified
  source 1..270: note = Trinickia symbiotica
  REGION 1..270: note = tr|A0A2N7X636|A0A2N7X636_9BURK GTP cyclohydrolase FolE2 OS=Trinickia symbiotica OX=863227 GN=folE2 PE=3 SV=1
MNLMNPAFAMPDVQSSPDTRQISIQRVGVKGVRHPLSVRTANGDAQATVGTWNLDVHLPADQKGTHMSRFVALLEESKAPLESATFRAMLAAMLAKLEAPAGRIEVSFPYFVSKTAPVSGVSSLLDYEVTMTGEMRDGALRTFVQVLVPVTSLCPCSKEISEYGAHNQRSHVTIRAELTGDMSAEELIRIAEDEASCELWGLLKRPDEKFVTERAYENPKFVEDLVRDVAQRLNADERIVAYTLEAENFESIHNHSAYAVIEHDKRQPAA

SEQ ID NO: 16160 - protein, 211 aa, unidentified
  source 1..211: note = Trinickia symbiotica
  REGION 1..211: note = tr|A0A2T3XQM5|A0A2T3XQM5_9BURK GTP cyclohydrolase 1; OS = Trinickia symbiotica OX=863227 GN=folE PE=3 SV=1
MNKRDNDLAPEEASARPTRMDAEEAVRTLIRWAGDDPDREGLIQTPARVVRAYREFFSGYQSDPMQILATTFSEVDGYDEMVVLKDIRFESYCEHHMVPIIGRAHVAYLPEHRVVGISKLARLVDVYAKRLQIQEKMTVQIADALNTVLQPKGVAVILEAAHQCMSTRGVHKPGASLVTSRMLGAFRDDPSTRREFLAIVGNGTIMPLPNS

SEQ ID NO: 16161 - protein, 367 aa, unidentified
  source 1..367: note = Tritonibacter horizontis
  REGION 1..367: note = tr|A0A132C183|A0A132C183_9RHOB GTP cyclohydrolase FolE2 OS=Tritonibacter horizontis OX=1768241 GN=folE2 PE=3; SV = 1
MNIHSRDVNGTPDRTEAEEALAVLRHWAAKASETEVAQLDPAIARLLPGRADDAYPDLKRQYPDSFDADDAYRASLPDLQNGPASLIRGAREQIQHVGISNFRLPIRFHTRDNGDLALETSVTGTVSLDAEKKGINMSRIMRSFYRHAEKVFSFRVMEAALEDYLADLDSGDARLQMRFSFPVKVDSLRSGLMGYQYYDVALELVQTGGQRHKIVHLDYVYSSTCPCSLELSEHARQTRGQLATPHSQRSVARISIQLEPDAPCLWFEDLIDHCRRAVPTETQVMVKREDEQAFAELNAANPMFVEDAARLFCEALQSDPRIGDFRVVASHQESLHSHDAVSVLTRGAMFANQSLDPQLFATLIHRG

SEQ ID NO: 16162 - protein, 181 aa, Tropheryma whipplei
  REGION 1..181: note = tr|Q83FV8|Q83FV8_TROWT GTP cyclohydrolase I; OS = Tropheryma whipplei (strain Twist) OX=203267 GN=folE; PE = 4 SV=1
MTKLCRFESGSAQSAVANLLSALGQDVGRLKETPSIASSGLESLISGSETNPADCLVDLIPNTQKGIVILRDIPFRSICEHHLLPFVGTANLLYEPGKFLAGLGNLTSLVRCAARRLSIQERVTDQIADAIYTGLCARRVLVSLAARHTCILDEAGNTEVTTFAHRGIGDADIISFMTIIR

SEQ ID NO: 16163 - protein, 366 aa, Tropicibacter naphthalenivorans
  REGION 1..366: note = tr|A0A0P1G366|A0A0P1G366_9RHOB GTP cyclohydrolase FolE2 OS=Tropicibacter naphthalenivorans OX=441103; GN = folE2 PE=3 SV=1
MNMHTPDIDRKPGRGDAEAALAVLREWAQGAASEEIETLDPALRQFVRDAEPSDYPALRREYPEDFVVEPAYKDSLPDLQNGPASLIKGANRAIQHVGISNFRLPIQYHTRDNGDLTLETSVTGTVSLEADKKGINMSRIMRSFYAHAEKTFSFEVIEAALDDYKTDLESFDARINMRFSFPMKVQSLRSGLSGYQYYDIALELVETAGVRRKIVHLDFVYSSTCPCSLELSEHARRERGQLATPHSQRSVARISVELVGPTCLWFEDLIEMCRAQVPTETQVMVKREDEQAFAELNAANPIFVEDAARLFAEALEDDPRIGDFRVLASHQESLHSHDAVSVLTEGDTFAADSLDPRLFASLFHVG

SEQ ID NO: 16164 - protein, 351 aa, unidentified
  source 1..351: note = Tropicibacter phthalicicus
  REGION 1..351: note = tr|A0A238JB34|A0A238JB34_9RHOB GTP cyclohydrolase FolE2 OS=Tropicibacter phthalicicus OX=1037362 GN=folE2; PE = 3 SV=1
MNIQSDIGEKPSREEAEQALALLRRYAGNPAALAELTGAYPELHNVYPDNFVVDAAYKETLPDLQNGPASLIRGAKRIIQHVGISNFRLPIGYHTRDNGDLTLETSVTGTVSLEADKKGINMSRIMRSFYAHSEKTFSFEVMEAALDDYKSDLESFDARIQMRFSFPMKVDSLRSGLSGFQYYDIALELVEVAGLRRKILHLDYVYSSTCPCSLELSEHARRERGQLATPHSQRSVARISVEVLPGECLWFEDLIDLCRRAVPTETQVMVKREDEQAFAELNAANPIFVEDAARLFAQGLEDDPRIGDFRVVASHQESLHSHDAVSVLTEGELFSNDSLDPKLFSTLFHVG

SEQ ID NO: 16165 - protein, 367 aa, unidentified
  source 1..367: note = Tropicimonas sediminicola
  REGION 1..367: note = tr|A0A239FN56|A0A239FN56_9RHOB GTP cyclohydrolase FolE2 OS=Tropicimonas sediminicola OX=1031541 GN=folE2; PE = 3 SV=1
MNYITADFDRDPTREDARRALEILRQWADAASDVEISDLDPAVVRLKAGGAVDAYPDLSRSYPADFEADAAYKAGMPDLQNGPESLIRGARRQIQHVGISNFRLPIRFHSREGADVALDTSVTGSVSLDADKKGINMSRIMRSFYRSAERTFSFEVIEETLEAYKSDLESFDARIIMRFAFPMKVQSLRSGLEGYQYYDMALEVVDRDGVRTKILHLDYVYSSTCPCSLELSEHARRTRGQLATPHSQRSVARISMVVDPEAGCLWFEDIVEMCRRAVPTETQVMVKREDEQAFAELNAANPIFVEDAARLFAEALQADARIGDFRVVASHQESLHSHDAISVLTEGPTFDGVGLEPHLFTSMIHAR

SEQ ID NO: 16166 - protein, 205 aa, Truepera radiovictrix
  REGION 1..205: note = tr|D7CRJ9|D7CRJ9_TRURR GTP cyclohydrolase 1; OS = Truepera radiovictrix (strain DSM 17093 / CIP 108686 / LMG 22925 / RQ-24) OX=649638 GN=folE PE=3 SV=1
MHQIPPPAPSPLELDDPSPLPEAQALEATVARLIAQLGEDVTREGLQRTPARVARSLRFLTSGYAQDAQSVVRGALFRAEGAELVVVKGLEFYSLCEHHLLPFFGRVHIGYVPGEHILGLSKFARVVDVFARRLQVQERLTVQVADALEGVLRPRGVGVVVEASHLCMMMRGVQQQGSSTRTSVLRGVLGDPGVREEFLRAINTP

SEQ ID NO: 16167 - protein, 197 aa, unidentified
  source 1..197: note = Trueperaceae bacterium
  REGION 1..197: note = tr|A0A2E2ULU2|A0A2E2ULU2_9DEIN GTP cyclohydrolase 1; OS = Trueperaceae bacterium OX=2026798 GN=folE PE=3 SV=1
MNSYLPETDDFDETGECSLGHLVAELIAGLGEDISREGLAKTPQRVERSLRYLTSGYRVKIDDVINGALFAAEGSEMVVVKGIEFYSMCEHHMLPFFGKAHIAYIPNERILGLSKFARVIDLYARRMQVQERLTLQIADILIEVLEPQGLAVVMEASHLCMMMRGVEKQGGTTRTSAMRGVFKNDARTRQEFLEAIS

SEQ ID NO: 16168 - protein, 260 aa, Trueperella bernardiae
  REGION 1..260: note = tr|A0A0W1KLE9|A0A0W1KLE9_9ACTO Putative GTP cyclohydrolase 1 type 2 OS=Trueperella bernardiae OX=59561; GN = AQZ59_00175 PE=4 SV=1
MDIVSVMNEHFPPALAEDWDRVGLVVGDPADEVTKVGFAVDPCGAVVDEAIERGAQMLITHHPLYLRGTSSVATDTAKGAWVHKLIRNGVALFAAHTNADSAANGSAVALAELLGLCDTRPIEPNAEHPELGLGRVGELELTMSVRELALRLQVLLPETPAGITIGGDPERIVKTVAVSPGSGDSFLSAANRAGADVYITADLRHHPATDHLWAGGCALIGATHFASEWPVLPKMRDAVAAAGVDTYISTLITDPWIERL

SEQ ID NO: 16169 - protein, 186 aa, Trueperella bernardiae
  REGION 1..186: note = tr|A0A0W1KJR7|A0A0W1KJR7_9ACTO GTP cyclohydrolase 1; OS = Trueperella bernardiae OX=59561 GN=folE PE=3 SV=1
MSVDVERVQAAVRELLLAIGEDPDRDGLIDTPARVARSYAEIFSGLDEDPGEHLEKVFDVGHQEMVLVRDIPVYSMCEHHLLPFHGVAHVGYIPGADGRVTGLSKLARLVEGYAHRPQVQERLTTQVAEAIYERLGATGVIVVVEAEHLCMSMRGVRKPGSRTVTSAVRGTMHDPATRAEAMSLVR

SEQ ID NO: 16170 - protein, 195 aa, unidentified
  source 1..195: note = Trueperella bialowiezensis
  REGION 1..195: note = tr|A0A448PFH9|A0A448PFH9_9ACTO GTP cyclohydrolase 1; OS = Trueperella bialowiezensis OX=312285 GN=folE PE=3 SV=1
MTSKYDAERVENAVRELLYGIGEDPDRDGLRDTPSRVARSYAEIFGGLHDDPAEHLDKVFDVGHQEMVLVRDIPMYSMCEHHLLPFHGVAHVGYIPAGDGRVTGLSKLARLVEGYARRPQVQERLTSNIADAIDSRLGASGVIVVVEAEHLCMSMRGVRKPGSKTVTSAVRGSMHDPATRSEAMSLIMAGTSHRG

SEQ ID NO: 16171 - protein, 187 aa, Trueperella pyogenes
  REGION 1..187: note = tr|X4RBK7|X4RBK7_9ACTO GTP cyclohydrolase 1; OS = Trueperella pyogenes OX=1661 GN=folE PE=3 SV=1
MIDSARAQAAVRELLLAIGEDPDRDGLKDTPARVARSYAEIFSGLGEDPGSHLEKVFDVGHQELVLVRDIPVYSMCEHHLLPFHGVAHVGYIPGPDGRVTGLSKLARLVEGFAHRPQVQERLTTQVADTLAERIGADGVIVVVEAEHLCMSMRGVRKPGSRTVTSAVRGSLHDPATRAEAMSLIMAG

SEQ ID NO: 16172 - protein, 187 aa, Trueperella pyogenes
  REGION 1..187: note = tr|A0A380MF76|A0A380MF76_9ACTO GTP cyclohydrolase 1; OS = Trueperella pyogenes OX=1661 GN=folE PE=3 SV=1
MIDSTRAQAAVRELLLAIGEDPDRDGLKDTPARVARSYAEIFSGLGEDPGSHLEKVFDVGHQELVLVRDIPVYSMCEHHLLPFHGVAHVGYIPGPDGRVTGLSKLARLVEGFAHRPQVQERLTTQVADTLAERIGADGVIVVVEAEHLCMSMRGVRKPGSRTVTSAVRGSLHDPATRAEAMSLIMAG

SEQ ID NO: 16173 - protein, 198 aa, Tsukamurella paurometabola
  REGION 1..198: note = tr|A0A3P8MCL4|A0A3P8MCL4_TSUPA GTP cyclohydrolase 1; OS = Tsukamurella paurometabola OX=2061 GN=folE PE=3 SV=1
MGKDSGAAVAPFDHARAVAAVRELLIAVGEDPDREGLQKTPERVARAFQEVFAGLHTDPDTVLDTTFGEDHDELVLVKDIPMYSTCEHHLVSFHGVAHVGYLPGESGRVTGLSKLARVVDLYAKRPQVQERLTAQIADALVRKLDPRGVIVVIEAEHLCMAMRGIRKPGASTTTSAVRGAFKDSATSRAEALELILRR

SEQ ID NO: 16174 - protein, 198 aa, Tsukamurella paurometabola
  REGION 1..198: note = tr|D5USD3|D5USD3_TSUPD GTP cyclohydrolase 1; OS = Tsukamurella paurometabola (strain ATCC 8368 / DSM 20162 / JCM 10117 / NBRC 16120 / NCTC 13040) OX=521096; GN = folE PE=3SV=1
MAAGDGAAIAPFDHERAVAAVRELLIAVGEDPEREGLKKTPERVARAFQEVFGGLHTDPDSVLDTTFGEDHDELVLVKDIPMYSTCEHHLVSFHGVAHVGYLPGPSGRVTGLSKLARVVDLYAKRPQVQERLTAQIADAVVRKLDPRGVIVVIEAEHLCMAMRGIRKPGASTTTSAVRGAFKDSATSRAEALELILRR

SEQ ID NO: 16175 - protein, 196 aa, Tsukamurella pseudospumae
  REGION 1..196: note = tr|A0A137ZYV1|A0A137ZYV1_9ACTN GTP cyclohydrolase 1; OS = Tsukamurella pseudospumae OX=239498 GN=folE PE=3 SV=1
MGEGAAIAAFDHERAVAAVRELLIAVGEDPDREGLLKTPERVARAFEEVFGGLHVDPDAVLDTTFGEDHDELVLVKDIPMYSTCEHHLVSFHGVAHVGYLPGESGRVTGLSKLARVVDLYAKRPQVQERLTAQIADALVRKLDPRGVIVVIEAEHLCMAMRGIRKPGASTTTSAVRGAFKDSATSRAEALELILRR

SEQ ID NO: 16176 - protein, 198 aa, Tsukamurella pulmonis
  REGION 1..198: note = tr|A0A1H1HIR8|A0A1H1HIR8_9ACTN GTP cyclohydrolase 1; OS = Tsukamurella pulmonis OX=47312 GN=folE PE=3 SV=1
MGRNSGAAIAPFDHERAVAAVRELLIAVGEDPDREGLQKTPERVARAFREVFGGLHVDPDTVLDTTFGEDHDELVLVKDIPMYSTCEHHLVSFHGVAHVGYLPGESGRVTGLSKLARVVDLYAKRPQVQERLTAQIADALMRKLDPRGVIVVIEAEHLCMAMRGIRKPGASTTTSAVRGAFKDSATSRAEALDLILRR

SEQ ID NO: 16177 - protein, 198 aa, Tsukamurella sp.
  REGION 1..198: note = tr|A0A5C5S553|A0A5C5S553_9ACTN GTP cyclohydrolase 1; OS = Tsukamurella sp. HKU72 OX=2592068 GN=folE PE=3 SV=1
MGDHRGAAVAPFDHERAVAAVRELLIAVGEDPDREGLKKTPERVARAFQEVFGGLHTDPDTVLDTTFGEDHDELVLVKDIPMYSTCEHHLVSFHGVAHVGYLPGESGRVTGLSKLARVVDLYAKRPQVQERLTAQIADALVRKLDPRGVIVVIEAEHLCMAMRGIRKPGASTTTSAVRGAFKDSATSRAEALELILRR

SEQ ID NO: 16178 - protein, 198 aa, Tsukamurella sp.
  REGION 1..198: note = tr|A0A5C5RII3|A0A5C5RII3_9ACTN GTP cyclohydrolase 1; OS = Tsukamurella sp. HKU70 OX=2591848 GN=folE PE=3 SV=1
MAHDNGAAIAPFDHERAVAAVRELLIAVGEDPDREGLQKTPERVAKAFQEVFSGLHTDPDEVLNTTFGEDHDELVLVKDIPMYSTCEHHLVSFHGVAHVGYLPGASGRVTGLSKLARVVDLYAKRPQVQERLTAQIADALVRKLDPRGVIVVIEAEHLCMAMRGIRKPGASTTTSAVRGAFKDSATSRAEALELILRR

SEQ ID NO: 16179 - protein, 198 aa, Tsukamurella tyrosinosolvens
  REGION 1..198: note = tr|A0A1H4M9I2|A0A1H4M9I2_TSUTY GTP cyclohydrolase 1; OS = Tsukamurella tyrosinosolvens OX=57704 GN=folE PE=3 SV=1
MGKDSGAAVAPFDHERAAAAVRELLIAVGEDPDREGLQKTPERVAKAFAEMFGGLHTDPDDVLNTTFGEDHDELVLVKDIPMYSTCEHHLVSFHGVAHVGYLPGTSGRVTGLSKLARVVDLYAKRPQVQERLTAQIADALVRKLDPRGVIVVIEAEHLCMAMRGIRKPGASTTTSAVRGAFKDSATSRAEALELILRR

SEQ ID NO: 16180 - protein, 187 aa, unidentified
  source 1..187: note = Tumebacillus algifaecis
  REGION 1..187: note = tr|A0A223D1B3|A0A223D1B3_9BACL GTP cyclohydrolase 1; OS = Tumebacillus algifaecis OX=1214604 GN=folE PE=3 SV=1
MAFDYDKLQSAVRMLLEAVGENPDREGLLDTPKRVAKMYAEVFEGLGKNPEDELSAIFNEMHEEVVIVKDIPFFSMCEHHLVPFYGKAHVAYIPRNGQVTGLSKLARVVETVARQPQLQERITSTVADTLVNKLNPHGVAVIVEAEHMCMTMRGVKKPGASTITTSVRGIYQESAGARAEVFSLMRG

SEQ ID NO: 16181 - protein, 187 aa, unidentified
  source 1..187: note = Tumebacillus avium
  REGION 1..187: note = tr|A0A1Y0IR55|A0A1Y0IR55_9BACL GTP cyclohydrolase 1; OS = Tumebacillus avium OX=1903704 GN=folE PE=3 SV=1
MAFDFDKAQTAVRMLLEAVGEDPDREGLLDTPKRVAKMYAEVFEGLGKNPEDELSAIFNEMHEEVVIVKDIPFFSMCEHHLVPFYGKAHVAYIPRNGQVTGLSKLARVVETVARQPQLQERITSTVADTLVNKLNPHGVAVIVEAEHMCMTMRGVKKPGASTITTSVRGIYQASSEARAEVFSLMRG

SEQ ID NO: 16182 - protein, 188 aa, unidentified
  source 1..188: note = Tumebacillus flagellatus
  REGION 1..188: note = tr|A0A074MF83|A0A074MF83_9BACL GTP cyclohydrolase 1; OS = Tumebacillus flagellatus OX=1157490 GN=folE PE=3 SV=1
MKEVNLGQIEEAVRMILAAVGEDPNREGLLDTPKRVAKMYAEVFEGLGKNPEDELTALFNEMHEEVVIVKDIPFFSMCEHHLVPFYGKAHVAYIPRGGRVTGLSKLARVVETVARQPQLQERITATIADTLVNKIQPHGVAVIVEAEHMCMTMRGVKKPGASTITTAVRGLYHEDPQARAEVFSLMRG

SEQ ID NO: 16183 - protein, 189 aa, Tumebacillus permanentifrigoris
  REGION 1..189: note = tr|A0A316DBS1|A0A316DBS1_9BACL GTP cyclohydrolase 1; OS = Tumebacillus permanentifrigoris OX=378543 GN=folE PE=3; SV = 1
MMKDVNFNQIEEAVRMILEAVGEDPNREGLLDTPKRVAKMYAEVFSGLGKNPEDELSALFNEMHEEVVIVKDIPFFSMCEHHLVPFYGKAHVAYIPRGGRVTGLSKLARVVETVARQPQLQERITSTIADSLVNKIDPHGVAVIVEAEHMCMTMRGVRKPGASTITTSVRGIYQADPQARAEVFSLMRG

SEQ ID NO: 16184 - protein, 187 aa, Tumebacillus sp.
  REGION 1..187: note = tr|A0A4R2R8F5|A0A4R2R8F5_9BACL GTP cyclohydrolase 1; OS = Tumebacillus sp. BK434 OX=2512169 GN=folE PE=3 SV=1
MAFDFDKAQVAVRMLLEAVGEDPNREGLLDTPKRVAKMYAEVFEGLGKNPEDELSAIFNEMHEEVVIVKDIPFFSMCEHHLVPFYGKAHVAYIPRNGQVTGLSKLARVVETVARQPQLQERITSTVADTLVNKLNPHGVAVIVEAEHMCMTMRGVKKPGASTITTSVRGIYQESSEARAEVFSLMRG

SEQ ID NO: 16185 - protein, 187 aa, Turicibacter sanguinis
  REGION 1..187: note = tr|A0A173T2I4|A0A173T2I4_9FIRM GTP cyclohydrolase 1; OS = Turicibacter sanguinis OX=154288 GN=folE_2 PE=3 SV=1
MSVDKNKIEEAVKMILEAIGENPSREGLIDTPARVARMYEEVFSGLHDDPKKHLQVYFSEEYDQYVLVQDIVFHSMCEHHLLPFFGRVHVAYYPENDAVVGLSKIPRVVDIVSKRPQLQERMGKQIGDAIVETLQSKGVMVVIEAEHMCMVMRGIKKPGAITKTIYSTGVFKEEIALRQEVLNLIKG

SEQ ID NO: 16186 - protein, 187 aa, Turicibacter sanguinis
  REGION 1..187: note = tr|A0A174EFU2|A0A174EFU2_9FIRM GTP cyclohydrolase 1; OS = Turicibacter sanguinis OX=154288 GN=folE_2 PE=3 SV=1
MSVDKNKIETAVRMILEAVGENPDREGIVDTPARVARMYEEVFGGLHEDPSKHLQVYFSEEYDQYVLVQDIVFHSMCEHHLLPFFGKVHVAYYPENNEVVGLSKIARVTDVVSRRPQLQERMGKQIGDTIANAIKSKGVMVVIEAEHMCMVMRGIKKPGAMTKTIYSTGIFKEDLAMRQEVLNLIKG

SEQ ID NO: 16187 - protein, 187 aa, Turicibacter sp.
  REGION 1..187: note = tr|A0A120IDN5|A0A120IDN5_9FIRM GTP cyclohydrolase 1; OS = Turicibacter sp. H121 OX=1712675 GN=folE PE=3 SV=1
MSVDKNKIETAVRMILEAVGENPDREGIVDTPARVARMYEEVFGGLHEDPSKHLQVYFSEEYDQYVLVQDIVFHSMCEHHLLPFFGKVHVAYYPENNEVVGLSKIARVTEVVSRRPQLQERMGKQIGDTIANAIKSKGVMVVIEAEHMCMVMRGIKKPGAMTKTIYSTGIFKEDLAMRQEVLNLIKG

SEQ ID NO: 16188 - protein, 198 aa, Turicibacter sp.
  REGION 1..198: note = tr|A0A109RMM7|A0A109RMM7_9FIRM GTP cyclohydrolase 1; OS = Turicibacter sp. H121 OX=1712675 GN=folE PE=3 SV=1
MKRQIDIEKISSCIREILIALGDDPDREGLRDTPKRVAKMYEEVFAGMTLSNDEIAQLFGTTFDEEDMVEQSSNRCVIVRDIPIFSYCEHHLALMYNMKVSVAYLPKEKMIGLSKIARIADMVGRRLQLQERIGEEIAEIVEKITESDAIIVMIHGEHSCMTSRGIKKPGTLTTTVTYRGERINHDSDLRQELLMLMK

SEQ ID NO: 16189 - protein, 267 aa, unidentified
  source 1..267: note = Turicimonas muris
  REGION 1..267: note = tr|A0A227KP93|A0A227KP93_9BURK GTP cyclohydrolase FolE2 OS=Turicimonas muris OX=1796652 GN=folE2 PE=3 SV=1
MTSNDLMVLPDVQSSLDRRNIPIEKVGVKGIKTPILVKTVLGSQHTVADVEMYVSLPADKKGTHMSRFWTLLESINKPFCPTLLTDVMAQMLSSLKADGGYISLTFPFFMEKAAPVSELHSTMNYQVRLVAEAKNGHIKINQKVEAPVTSLCPCSKEISKYGAHNQRSLVSINAELETNFAIEKQIEMIESSASCPVWGLLKRSDEKYVTEHAYENPKFVEDLVRDVAILCQDEPAILSFTVEAENFESIHNHSAFASITFSKKAEE

SEQ ID NO: 16190 - protein, 275 aa, Turneriella parva
  REGION 1..275: note = tr|I4B1W4|I4B1W4_TURPD GTP cyclohydrolase FolE2; OS = Turneriella parva (strain ATCC BAA-1111 / DSM 21527 / NCTC 11395 / H) OX=869212 GN=folE2 PE=3 SV=1
MSSVQTVATGATAPLVDVQSSADTRRIAIDKVGIKSIRYPIQIRDKTGDTQTTVAELNMYVYLPQHFKGTHMSRFVEILERKKHLDVPAFKALLPEMLERLESRAGQIEMRFTYFVNKTAPVSGVQSLMDYDVTFIGKCEEGITDLQIKVAVPVTSLCPCSKEISQYGAHNQRSHITITARLSEFAEGHNTLWIEDIIRIAEESASCELYGLLKRPDEKYVTEKAYENPKFVEDLVRDVAHRLNLDDRISHYIAEAENFESIHNHSAYALIEKQK

SEQ ID NO: 16191 - protein, 181 aa, Turneriella parva
  REGION 1..181: note = tr|I4B1X1|I4B1X1_TURPD GTP cyclohydrolase I; OS = Turneriella parva (strain ATCC BAA-1111 / DSM 21527 / NCTC 11395 / H) OX=869212 GN=Turpa_0626 PE=4 SV=1
MLIKDWLAANITKDVRALDWFDDAEAEPRIRKAYQELLSGYSIDPSTLLKTTREIGKNEKFTGSVTVRDINYFSICAHHFLPFYGKVDITYEPGEIIIGLGKFPRLVQAYSRRFQIQEDMVKEIAEEIMTSGKARGVYVKSTGRHMCMCSRGPSDHTAETDTEFAMGTLLERYLQPPGRAR

SEQ ID NO: 16192 - protein, 244 aa, unidentified
  source 1..244: note = Tychonema bourrellyi
  REGION 1..244: note = tr|A0A2G4F199|A0A2G4F199_9CYAN GTP cyclohydrolase 1; OS = Tychonema bourrellyi FEM_GT703 OX=2040638 GN=folE PE=3; SV = 1
MTITSNNGSNGSNTLSTDSMKLLETPDKNLPCITTRPDRNSSNGQESSVPIPTEVGQEEMMEAVRTMLLGIGENPEREGLLKTPKRVAEAMRFLTSGYSQSLEELLNGAIFDEGHNEMVLVRDISVFSMCEHHMLPFMGRVHVAYIPNQKVVGLSKLARIVEMYSRRLQVQERLTRQVAEAVQTILEPKGVAVVMEASHMCMTMRGVQKPGSWTVTSAMLGVFQEEQKTREEFLSLIRHQPAFF

SEQ ID NO: 16193 - protein, 187 aa, unidentified
  source 1..187: note = Tyzzerella sp.
  REGION 1..187: note = tr|A0A1Y4UES1|A0A1Y4UES1_9FIRM GTP cyclohydrolase 1; OS = Tyzzerella sp. An114 OX=1965545 GN=folE PE=3 SV=1
MIDEKAIEEHIHGILVALGDNPDREGLIDTPKRVAKMYTEIFAGMQYTNHDIAEMFGKVFDEERVSSNNVVVMKDIDFFSYCEHHLALMYDMKATVAYIPKGKVIGLSKIARICDMVGRRLQLQERIGCDIADIISEITGSEDIAVILEGYHSCVTARGIQKTNTKTVTVERRGKFLEDATLQIYLR

SEQ ID NO: 16194 - protein, 270 aa, Uliginosibacterium sp.
  REGION 1..270: note = tr|A0A2N4XSA0|A0A2N4XSA0_9RHOO GTP cyclohydrolase FolE2 OS=Uliginosibacterium sp. TH139 OX=2067453 GN=folE2; PE = 3 SV=1
MSTQHAPIPDVQGFEDRRQLAINKVGIKSIRHPVRVLDRASSGVQHTIASFNMYVGLPHNFKGTHMSRFVEILNTQEREISVESFEPMLREMVKRLEADTGLIEMRFPYFINKKAPVSGVESLMDYDVCFTGEIDATGNYSLTMQVVVPVTSLCPCSKKISEYGAHNQRSHVTITARTNTPVWIEDLVAIAESEGSCELYGLLKRPDEKFVTERAYDNPKFVEDLVRDVAGRLNADSRVVAYIVESENFESIHNHSAYALIERDKRLQPA

SEQ ID NO: 16195 - protein, 225 aa, Ulvibacter antarcticus
  REGION 1..225: note = tr|A0A3L9YGL2|A0A3L9YGL2_9FLAO GTP cyclohydrolase 1; OS = Ulvibacter antarcticus OX=442714 GN=folE PE=3 SV=1
MDLEKQLKDIEALGNDHVGTATETPLRHDAFELSDIEKISSIKKDVQNIMHTLGLDLTDDSLKGTPSRVAKMFVQEIFSGLHPDRKPKASTFDNKYKYNEMLVEKNITLYSTCEHHLLPIVGRAHIAYISNGTVVGLSKMNRIVDYFAKRPQVQERLTMQIVKELQHVLNTEDVACVIDAKHLCVNSRGIRDIDSSTVTSEFGGKFKNPEVRREFLDYIQLDTEF

SEQ ID NO: 16196 - protein, 199 aa, Ulvibacter antarcticus
  REGION 1..199: note = tr|A0A3L9YVF5|A0A3L9YVF5_9FLAO GTP cyclohydrolase 1; OS = Ulvibacter antarcticus OX=442714 GN=folE PE=3 SV=1
MSSYRFFEEYEHEVTDQLKENYSQILSSIGEDINREGVVKTPERAAKAMQFLTSGNCMDPNEILRSAMFAEGYNDMVIIKDIELYSLCEHHMLPFFGKAHIAYIPNGHIVGLSKIPRVVDVFARRLQVQERLTHDILECINNTLKPLGVAVVIEASHMCMMMRGVQKQNSVTTTSGFRGQFEKIETRNEFLKLISSDLS

SEQ ID NO: 16197 - protein, 225 aa, Ulvibacter litoralis
  REGION 1..225: note = tr|A0A1G7BTB6|A0A1G7BTB6_9FLAO GTP cyclohydrolase 1; OS = Ulvibacter litoralis OX=227084 GN=folE PE=3 SV=1
MDLEKQLKAIEALGDDHVGTASDTPLRSDAFDLSDIEKIALIKKDVHNIMQTLGLDLTDDSLKGTPTRVAKMFVQEIFSGLHPDRKPKASTFDNKYKYNEMLVEKNITLYSTCEHHLLPIVGKAHIAYISNGTVVGLSKMNRIVDYYAKRPQVQERLTIQIVKELQQVLNTEDVACVIDAKHLCVNSRGIRDIDSSTVTSEFGGVFKNPETRSEFLDYIQLTTEF

SEQ ID NO: 16198 - protein, 199 aa, Ulvibacter litoralis
  REGION 1..199: note = tr|A0A1G7FAP9|A0A1G7FAP9_9FLAO GTP cyclohydrolase 1; OS = Ulvibacter litoralis OX=227084 GN=folE PE=3 SV=1
MGSYKFFEEYNHEVTDDLKNNYSDILKGIGEDVTREGIVKTPERAAKAMQFLTSGHCQDPAEILKSAMFAESYNDMVIIKDIELYSLCEHHILPFFGKAHIAYIPNGHIVGLSKIPRVVDVFARRLQVQERLTHDILECINDTLKPKGVAVVIEASHMCMMMRGVQKQNSMTTTSGFRGQFEKIETRNEFLKLISSDLS

SEQ ID NO: 16199 - protein, 225 aa, Ulvibacter sp.
  REGION 1..225: note = tr|A0A2N0ETY4|A0A2N0ETY4_9FLAO GTP cyclohydrolase 1; OS = Ulvibacter sp. MAR_2010_11 OX=1250229 GN=folE PE=3 SV=1
MDLEKQLKAIEAQGDNHIGSSTNTPLRSDAFELSDIEKIALIKKDVQNIMNTLGLDLTDDSLKGTPTRVAKMFVQEIFGGLHPDRKPKASTFENKYKYGEMLVEKNITLYSTCEHHLLPIVGKAHIAYISSGTVVGLSKMNRVVDYFAKRPQVQERLTMQIVEELQRVLGTEDVACVIDAKHLCVNSRGIRDIDSSTVTSEFGGKFKDLQTRREFLDYINLDTEF

SEQ ID NO: 16200 - protein, 199 aa, Ulvibacter sp.
  REGION 1..199: note = tr|A0A167H1Y9|A0A167H1Y9_9FLAO GTP cyclohydrolase 1; OS = Ulvibacter sp. LPB0005 OX=1763537 GN=folE PE=3 SV=1
MGSYNFSEEYDEIVTNKLKDNFTNILTGIGEDIDREGIVKTPERAAKAMQFLTSGHGEDPEAILRGAMFAEDYKDMVVIKDIELYSLCEHHILPFFGKAHIAYIPNGHIVGLSKIPRVVDVFARRLQVQERLTHDILECINNTLKPQGVAVVIEASHMCMMMRGVQKQNSVTTTSGFRGQFEKIETRNEFMKLISSDLS

SEQ ID NO: 16201 - protein, 180 aa, Umboniibacter marinipuniceus
  REGION 1..180: note = tr|A0A3M0A7Z2|A0A3M0A7Z2_9GAMM GTP cyclohydrolase 1; OS = Umboniibacter marinipuniceus OX=569599 GN=folE PE=3 SV=1
MEKAFASIIEAIGEDLNRPGLQDTPKRAAKAFEFLNQGYTQDLETVINGALFPSDSREMVIVKDIELYSLCEHHLLPFIGKAHIAYLPTGKVLGLSKLARIVDMFARRLQIQESLTHQIATTIQEVTGADGVAVVVEAKHMCMMMRGVEKQNSSMKTSAMLGKFKERSETRAEFLSLIAN

SEQ ID NO: 16202 - protein, 214 aa, Umezawaea tangerina
  REGION 1..214: note = tr|A0A2T0TKN9|A0A2T0TKN9_9PSEU GTP cyclohydrolase 1; OS = Umezawaea tangerina OX=84725 GN=folE PE=3 SV=1
MTEIDHHDDAGLPSSNGEAGVARRVFDHARAERAVRELLIACGEDPEREGLRDTPARVARAYRELFAGLYTDPDSVLAKTFDESHEELVLVTDIPMYSFCEHHLLPFHGVAHVGYIPNEQGRVTGLSKLARLVDLYAKRPQVQERLTSQIAEALVRRLEPRGVIVVVEAEHLCMGMRGVRKPGSRTTTSAVRGILRSSASSRSEAINLIRGRLR

SEQ ID NO: 16203 - protein, 215 aa, unidentified
  source 1..215: note = Unknown
  REGION 1..215: note = tr|Q5UF29|Q5UF29_9PROT GTP cyclohydrolase 1; OS = uncultured alpha proteobacterium EBAC2C11 OX=295349; GN = folE PE=3 SV=1
MMTPYDTGDPKEATDAKDAVLNSSTTRTPSRQEAEQAVDVLLRWIGEDPSREGLAGTPSRVVRAWKEFCSGYQENPAQLLERTFEEVEGYDDMVMLRNIRLESHCEHHLVPILGIAHIAYLPNRRVVGISKLARVLDGFSRRLQTQETLTAQVADCIQNVLQPKGVAVLIDAQHQCMTTRGVRKPDVSMITSRFTGIFKADESLSRRFLDQTKIS

SEQ ID NO: 16204 - protein, 214 aa, unidentified
  source 1..214: note = Alphaproteobacteria bacterium
  REGION 1..214: note = tr|A0A212JN23|A0A212JN23_9PROT GTP cyclohydrolase 1; OS = uncultured Alphaproteobacteria bacterium OX=91750; GN = folE PE=3 SV=1
MNTLSKSAKPELAANHAATRPTREEAEEAIRTLLRWAGDDPSREGLIDTPARVARAYEEFFAGYDVDPDEYLRRTFEEVEGYDEMVMLRDIRVESYCEHHMVPIIGRAHVAYMPKKRVVGISKLARVVEAYAKRLQIQEKLTVQIADTINKVLEPSGVAVVIEASHQCMTTRGVHKPGVSMITSHMIGVFRSNSDTRKEFMALLAASGGNPLHP

SEQ ID NO: 16205 - protein, 218 aa, Avibacterium sp.
  REGION 1..218: note = tr|A0A486X9J1|A0A486X9J1_9PAST GTP cyclohydrolase 1; OS = uncultured Avibacterium sp. OX=1936169 GN=folE PE=3 SV=1
MNKISPEAEKVRQALVSKGIETPMVDTQLTKSQRREGIEQHMREVMKLIGLDLRDDSLEETPVRLAKMFVDEIFSGLDYANFPKITNIENQMKVSEMVLVNDVTLTSTCEHHFVTIDGKVSVAYYPKKWVIGLSKINRVVAFFAQRPQVQERLTEQILLAFQTILETEDVAVYVKATHFCVKCRGIKDTNSYTVTSAFGGVFLDDRETRKEFLTLINK

SEQ ID NO: 16206 - protein, 317 aa, unidentified
  source 1..317: note = Unknown
  REGION 1..317: note = tr|B1N6H2|B1N6H2_9BACT GTP cyclohydrolase FolE2; OS = uncultured bacterium CBNPD1 BAC clone 142 OX=417307; GN = folE2 PE=3 SV=1
MQSTDLGEFMPTAMPDVANHSCATTEGVLDWVGMSNIEVPLMLAIAGEAPRQVSAHVEAFVNLKDPKAKGIHMSRLYLLLDDLSRESTLSHASLCDLLDGFITSHEDLSNQAFVKFDFDLHLRRKALITEKQGWKAYPVTVTGQVLDKNLSVELAVKVPYSSTCPCSAALARQLIQEAFVAKFAGQQQISSELVVDWLGTTQGIVATPHSQRSVAEIKVKLHHNVTEFPIVALIDAIEDALKTPVQAAVKRADEQEFARLNGQNLMFCEDAARRLKHALNQLSEFDDFWLRVNHYESLHAHDAVAVTVKGLEGGYRA

SEQ ID NO: 16207 - protein, 189 aa, unidentified
  source 1..189: note = Unknown
  REGION 1..189: note = tr|A0A068LCM8|A0A068LCM8_9BACT GTP cyclohydrolase 1; OS = uncultured bacterium OX=77133 GN=folE PE=3 SV=1
MNQRAKDGIKKFLEALSVDTEAPELEKTPSRVTELYSELFSGVGLDTKSAWGETFSTDYKGLVAVTGIPFYSMCEHHLLPFFGTVDIVYQPKDGCVAGLSKFQDIVNILSRRPQLQERLASELADAIMNDLSAHGVFVRITATQLCMLIKGTMQQDSKVITLESRGVLAETGTLRDEALAMLGGGQANV

SEQ ID NO: 16208 - protein, 195 aa, Bacteroides sp.; identical to SEQ ID NO: 5348
  REGION 1..195: note = tr|A0A1C5L3Y0|A0A1C5L3Y0_9BACE GTP cyclohydrolase 1; OS = uncultured Bacteroides sp. OX=162156 GN=folE PE=3 SV=1

SEQ ID NO: 16209 - protein, 198 aa, Bacteroides sp.
  REGION 1..198: note = tr|A0A1C5UVW3|A0A1C5UVW3_9BACE GTP cyclohydrolase 1; OS = uncultured Bacteroides sp. OX=162156 GN=folE PE=3 SV=1
MMTDTNSINWPQEKVEKLMGHYKEILSLLGEDPEREGLLKTPERVAKAMLTLTRGYEMDPREVLNAAKFKEPYSQMVIVKDIDFFSMCEHHMLPFYGKAHVAYIPNGYITGLSKIARVVDIFSHRLQVQERMTLQIKECIQETLNPLGVMVVVEAKHMCMQMRGVEKQNSVTTTSDFTGAFNQAKTREEFMNLIRAKY

SEQ ID NO: 16210 - protein, 164 aa, unidentified
  source 1..164: note = Bacteroidetes bacterium
  REGION 1..164: note = tr|H5SK67|H5SK67_9BACT GTP cyclohydrolase 1 (Fragment) OS=uncultured Bacteroidetes bacterium OX=152509; GN = HGMM_F40B03C41 PE=3 SV=1
MEKVQLNGNGHDLCFCGEDLPEEQAAPPSQEEREAAIAEHFAAIMKLLGLDLNDPSLAGTPHRVAKMYLRELFTGLDPKNAPVLRTFPNTAGYHQMVVEKEIRVRSVCEHHFVPIIGVAHVAYIPKDTIVGLSKLNRVVDYFARRPQVQERLTRQIADFLRDHL

SEQ ID NO: 16211 - protein, 230 aa, unidentified
  source 1..230: note = Unknown
  REGION 1..230: note = tr|Q2Z094|Q2Z094_9PROT GTP cyclohydrolase 1; OS = uncultured beta proteobacterium OX=86027 GN=folE PE=3; SV = 1
MDADAGVPQVDAEPAAMSGACDHDCHTPHDSGSIGIPQVGSFDPVAFERAINDMLAACGVAPDSVHTGRTAERVRDLWQKRLLGGYAVSPADALGEGFADDGDDMVVVRGIAVHGVCPHHLVPFRGVAHVAYIPGGRLHGFGRVARMVDAIGHRFTYQEWMTRDIAEALVTHGQAKGAACMIEAEQLCLLLGEDRRGDERVVTQAFTGNFKTSDQLRNEFLRATLQRELR

SEQ ID NO: 16212 - protein, 185 aa, Blautia sp.
  REGION 1..185: note = tr|A0A1C6K7U5|A0A1C6K7U5_9FIRM GTP cyclohydrolase 1; OS = uncultured Blautia sp. OX=765821 GN=folE PE=3 SV=1
MVDKQKVEQAIRLLLEGIGEDITREGLIDTPDRIARMCEEIYGGLDQEADHHLLKQFPVENNEIVLEKDITFYSMCEHHLMPFYGKAHLAYIPDGKVTGLSKLARTVEVYARRPQIQERLTVQIADALERALSPKGIMVMLEAEHTCMTMRGVKKPGSKTITTVTRGAFKEDKELQKMFLSMVGK

SEQ ID NO: 16213 - protein, 185 aa, Blautia sp.; identical to SEQ ID NO: 5598
  REGION 1..185: note = tr|A0A1C5WX50|A0A1C5WX50_9FIRM GTP cyclohydrolase 1; OS = uncultured Blautia sp. OX=765821 GN=folE PE=3 SV=1

SEQ ID NO: 16214 - protein, 215 aa, unidentified
  source 1..215: note = Chloroflexi bacterium
  REGION 1..215: note = tr|H5S9B0|H5S9B0_9CHLR GTP cyclohydrolase 1; OS = uncultured Chloroflexi bacterium OX=166587 GN=folE PE=3; SV = 1
MENMNEEIDFDDGLSAEQIAAIRFDYQAIESAVEQILRAVGEDPQREGLRNTPRRVARAYAELLSGYSTDVEAMINGAIFNISYDEVVIVRDIEFHSLCEHHMLPFIGRAHVAYLPRGKVIGLSKIPRIVDMFAHRLQVQERMTRQIADFLQELLQPRGVAVVVEALHLCSMIRGVKKHDARMVTSAMYGAFRTNSATRQEFLDNISRASVPLHI

SEQ ID NO: 16215 - protein, 222 aa, Citrobacter sp.; identical to SEQ ID NO: 6754
  REGION 1..222: note = tr|A0A212IQ43|A0A212IQ43_9ENTR GTP cyclohydrolase 1; OS = uncultured Citrobacter sp. OX=200446 GN=folE PE=3 SV=1

SEQ ID NO: 16216 - protein, 184 aa, Clostridium sp.
  REGION 1..184: note = tr|A0A1C5Z8I7|A0A1C5Z8I7_9CLOT GTP cyclohydrolase 1; OS = uncultured Clostridium sp. OX=59620 GN=folE PE=3 SV=1
MIDKEKVEAAVRLLLEGIGEDIHREGLVETPARIARMYEEIYGGMDEDAAFHLSKTFQVDSHEMVLEKDITFYSTCEHHLMPFYGKAHVAYIPDGRVLGLSKLARTVETFARRLQIQEQLTVQIADALMEHLAPRGVMVMMEAEHMCMTMRGIKKPGSRTVSIATRGVFEGDMQLQNTFFQMIR

SEQ ID NO: 16217 - protein, 192 aa, Clostridium sp.; identical to SEQ ID NO: 8091
  REGION 1..192: note = tr|A0A1C5UB87|A0A1C5UB87_9CLOT GTP cyclohydrolase 1; OS = uncultured Clostridium sp. OX=59620 GN=folE PE=3 SV=1

SEQ ID NO: 16218 - protein, 188 aa, Collinsella sp.
  REGION 1..188: note = tr|A0A1C5LLD4|A0A1C5LLD4_9ACTN GTP cyclohydrolase 1; OS = uncultured Collinsella sp. OX=165190 GN=folE PE=3 SV=1
MAVDKARAEAAIREFLIAVGEDPDRPGLLETPDRVARAAQEVLGGYDEDPSLHLRKQFHENENEEMVIVRDIPFSSLCEHHILPFTGKAHVAYIPHEGRITGLSKIARCVNGYARRLQLQERLTAQIADAMMAELRPRGVLVVLEAEHMCMTMRGVRAAGALTTTSAVRGTFRSDIRTREEALRLLGL

SEQ ID NO: 16219 - protein, 184 aa, Coprococcus sp.
  REGION 1..184: note = tr|A0A1C5SDN4|A0A1C5SDN4_9FIRM GTP cyclohydrolase 1; OS = uncultured Coprococcus sp. OX=458253 GN=folE PE=3 SV=1
MVDHKKVEQAIRLLLEGIGEDPDREGLAETPDRIARMYEEICGGMNEDAEEHLKKTFTAENNEMVVEKDITFYSMCEHHMLPFYGKVHIAYIPDGKVVGLSKLARTVEVFARRLQLQEQMTAQIADALMENLHPKGVMVLAEAEHMCMTMRGIKKPGSKTVSVVTRGAFEENEKLQNMFFRMIG

SEQ ID NO: 16220 - protein, 193 aa, Coprococcus sp.
  REGION 1..193: note = tr|A0A1C5RZ30|A0A1C5RZ30_9FIRM GTP cyclohydrolase 1; OS = uncultured Coprococcus sp. OX=458253 GN=folE PE=3 SV=1
MAIDKEAIKEHIRGILVALGDDPDREGLKETPDRVARMYEEVFEGMNYTNDEIAEMFGKTFKEEDAAHTSDMVFVKDIEVFSYCEHHMALMYDMKVSVAYIPHGRVLGLSKIARIADMVAKRLQLQERIGSDIAYVVGKAAGSPDVAVLIEANHSCMTARGIKKPGTKTYTTTFRGAFENDVNLQNKVLMMNR

SEQ ID NO: 16221 - protein, 267 aa, unidentified
  source 1..267: note = Unknown
  REGION 1..267: note = tr|A0A212IT66|A0A212IT66_9DELT GTP cyclohydrolase FolE2 OS=uncultured delta proteobacterium OX=34034 GN=folE; PE = 3 SV=1
MTVKMNPLQMADVQNGPAGVPLSIDTVGVKGLKLPLVVSDRARGAQHTVALVDLGVDLPGEFKGTHMSRFVEALEGWNEELSFKTMRTLLEDMKTRLMARKAYARFSFPYFIRKAAPVSGVSGLMPYECTLSGELEEGKPEMLLEVTVPVMTVCPCSKAISREGAHSQRTEIRFAVRMNAFCWIEECVDMAEKAGSSPVYPVLKREDEKFVTESAFARPMFVEDVVREVARQLDEHPLITCYAVEVESQESIHGHNAFARMSRDKRA

SEQ ID NO: 16222 - protein, 257 aa, unidentified
  source 1..257: note = Desulfobacteraceae bacterium
  REGION 1..257: note = tr|A0A484HKT5|A0A484HKT5_9DELT GTP cyclohydrolase FolE2 OS=uncultured Desulfobacteraceae bacterium OX=218296; GN = folE PE=3 SV=1
MKDIQNQRDHRNIPIDKVGIKNIRYPIKVLDRKNRVQHTVASVNMYVDLPHKTKGTHMSRFVEILNLIKSEVSLQNISAALDQMKTHLKARSAHIELTFPYFIEKKAPVSGSPGLMDYLCRIEGSSDPDGKLDIISEVRAPISSVCPCSKEISDAGAHNQRGEARLRIRFKKFIWIEDMIELVESSSSCEVFSVLKRVDEKEVTEKGYENPKFVEDIVRDIAEKIKDDENITWFSVSAENFESIHNHSAYAHICGGR

SEQ ID NO: 16223 - protein, 269 aa, Desulfobacterium sp.
  REGION 1..269: note = tr|A0A445MTL7|A0A445MTL7_9DELT Putative GTP cyclohydrolase 1 type 2 OS=uncultured Desulfobacterium sp.; OX = 201089 GN=PITCH_A1530036 PE=4 SV=1
MLPKTSDVLDLIESIAPKRLAETWDNPGIQVGSTDQGIKKILVALDPTVEALSYAINAHADLLFTHHPLIFTPLSQVVADGYPGNVITRAIKNGISIIAAHTNLDIAPEGINKVLSDMISLRQVEVLEENPLMEGSGLGRLGYLPEPVGLQKIVEQIMQTFGCKRPHLVHSNSDVLIHRIAVVGGSGGGLIPLAAKKKADLMITGDIGHHHALTAKTLGIALVDAGHFNLERAAFFGFAKLFGQMAARLKWDIEVTTYPDEENPMILYG

SEQ ID NO: 16224 - protein, 261 aa, Desulfobacterium sp.
  REGION 1..261: note = tr|A0A445N3A0|A0A445N3A0_9DELT GTP cyclohydrolase FolE2 OS=uncultured Desulfobacterium sp. OX=201089 GN=folE; PE = 3 SV=1
MLDIQNKKDFRNIDIDQVGVKGIRYPITVRDKDQGSQQTVAEINMYVNLPRYYKGTHMSRFVEILNEHSRRISLQNFTEILEEMKERLNAESAHMEISFPYFINKAAPVSGSQGLMEYQCAFKGSLNKGSDLVIIIHVPISTLCPCSKEISDFGAHNQRGEVRLQARFKKFVWIEDLIRLVEESASSDVYSVLKREDEKYVTERAYQNPKFVEDIVRDIAVKLNEDPNITWFSVESENFESIHNHNAYAYIEKRKTDKEIA

SEQ ID NO: 16225 - protein, 258 aa, Desulfovibrio sp.
  REGION 1..258: note = tr|A0A212L0K7|A0A212L0K7_9DELT GTP cyclohydrolase FolE2 OS=uncultured Desulfovibrio sp. OX=167968 GN=folE; PE = 3 SV=1
MEDVQSHAPLVALNIDRVGVRELRLPLLVRDRTKGTQQTVASVDLGVDLPSAFKGTHMSRFVETLEEWNAEISYQSVRRLLLDIKQRLEARRAYARFCFPYFIKKCAPASGIPALVSYQCRLTGELDDEGQHFCLEVDVPVMTVCPCSKAISDEGAHSQRAMVRMSLRMKVFSWLEDFIDIAEASGSSAVYTLLKREDEKFVTEHAFAHPTFVEDVVRNVAQRLSEHGQVEWFSVEVESMESIHNHNAFARIERCMSD

SEQ ID NO: 16226 - protein, 263 aa, Desulfovibrio sp.
  REGION 1..263: note = tr|A0A212KXC9|A0A212KXC9_9DELT Putative GTP cyclohydrolase 1 type 2 OS=uncultured Desulfovibrio sp.; OX = 167968 GN=KL86DES1_10075 PE=4 SV=1
MQVAELINTIEEVAPLKAAAPWDISGLQVASLRHEVNSIAVCLDPTPHSVRQCLDLGAQFILSHHPLTLKPSLPAKLDAYHDVLRLLLRADVPLYAAHTSLDVNPRGPAGWLATDLRLDNLTVLEPVAPADADGHMLGYGLAGDLPQPQTVEHIIRALESILDLSTATLSGPPPGKIDRLAYCTGSGSSLLAAAHEAGAQLFITGDVKYHTALDAEIPLLDVGHHSLEEEMMRRMCHVLQQRAHGVAVHFVPSASPFRTVALS

SEQ ID NO: 16227 - protein, 185 aa, Dorea sp.
  REGION 1..185: note = tr|A0A1C5S244|A0A1C5S244_9FIRM GTP cyclohydrolase 1; OS = uncultured Dorea sp. OX=286138 GN=folE PE=3 SV=1
MIDHEKVEQAVRLLLEGIGEDVNREGLIDTPDRIARMYEEIYGGIEEDAATHLSRTFTVDSSEMVVEKDITFYSTCEHHLLPFYGKVHIGYIPDGKVVGLSKLARTVEVFARRLQLQEQLTGQIADALMEHMQAKGAIVMIEAEHMCMTMRGIKKPGSQTVTLARRGVFETDPALEERFFRMLER

SEQ ID NO: 16228 - protein, 187 aa, Dysgonomonas sp.; identical to SEQ ID NO: 7727
  REGION 1..187: note = tr|A0A212K301|A0A212K301_9BACT GTP cyclohydrolase 1; OS = uncultured Dysgonomonas sp. OX=206096 GN=folE PE=3 SV=1

SEQ ID NO: 16229 - protein, 187 aa, Dysgonomonas sp.
  REGION 1..187: note = tr|A0A212JBL3|A0A212JBL3_9BACT GTP cyclohydrolase 1; OS = uncultured Dysgonomonas sp. OX=206096 GN=folE PE=3 SV=1
MQEEQNIELLAKHYKEIINLLGENADREGLLSTPVRVAKAMQFLTKGYHEDPEEILRKAFFKEDYRQMVIVKDIDFYSMCEHHMLPFWGKAHVAYIPNGYITGLSKIARVVDVFARRLQVQERMTLQIKECIQKTLNPLGVMVVIEAQHMCMQMRGVEKQNSTTTTSDFTGVFNQAKTREEFINLIR

SEQ ID NO: 16230 - protein, 192 aa, Eggerthella sp.
  REGION 1..192: note = tr|H6WNT4|H6WNT4_9ACTN GTP cyclohydrolase 1; OS = uncultured Eggerthella sp. SMG5 OX=1131820 GN=folE PE=3; SV = 1
MASNDMDLAKIEQGVRLILEGVGEDPNREGLLETPARVARMYEECFAGLHQDPAVHFETLFDEHHDEMVIVHDIPFFSMCEHHLVPFFGKAHIAYLPSESGKICGISKLARLVEVYARRPQVQERLTSQVADTLVEQLNPRGVAVVMEAEHLCMSMRGVKKPGAKTVTNAMRGIFKEDAATRAEALSLLMGR

SEQ ID NO: 16231 - protein, 192 aa, Eubacterium sp.
  REGION 1..192: note = tr|A0A1C6FLQ6|A0A1C6FLQ6_9FIRM GTP cyclohydrolase 1; OS = uncultured Eubacterium sp. OX=165185 GN=folE_1 PE=3 SV=1
MAIDSEAIKEHIRGILIALGENPDREGLKDTPERVAKMYQEVFEGMNYTNAEIAEMFNKTFEDDLEFESESDDMIVVKDIDIFSYCEHHMALMYDMKVTVAYIPHGKVIGLSKIARIADMVGKRLQLQERIGTDIADIMTIVTGSEDIAILIEGCHSCMSARGIKKTNAKTFSSTLRGKFKENMSLLMRLYS

SEQ ID NO: 16232 - protein, 196 aa, Eubacterium sp.; identical to SEQ ID NO: 4566
  REGION 1..196: note = tr|A0A1C5WPN6|A0A1C5WPN6_9FIRM GTP cyclohydrolase 1; OS = uncultured Eubacterium sp. OX=165185 GN=folE PE=3 SV=1

SEQ ID NO: 16233 - protein, 184 aa, unidentified
  source 1..184: note = Gammaproteobacteria bacterium
  REGION 1..184: note = tr|H5SHR3|H5SHR3_9GAMM GTP cyclohydrolase 1; OS = uncultured Gammaproteobacteria bacterium OX=86473; GN = folE PE=3 SV=1
MKLEEIFAELIQAIGEDLNREGLVDTPKRTAAAFRYLTSGYHQSLESVLNNAIFEADTEDMVIVRDIELYSLCEHHLLPFIGKCHIGYLPAGKVIGLSKTARIVEMYARRLQIQERLTKQIADAIQTAIRPRGVAVVIEAKHLCMMMRGVEKQNSVMTTSAMLGLFRERISTRSEFLNLIGRKI

SEQ ID NO: 16234 - protein, 264 aa, unidentified
  source 1..264: note = Gammaproteobacteria bacterium
  REGION 1..264: note = tr|A0A5E5QBE8|A0A5E5QBE8_9GAMM GTP cyclohydrolase FolE2 OS=uncultured Gammaproteobacteria bacterium OX=86473; GN = folE2 PE=3 SV=1
MSAANLPDTQNNADTRQIVIDKVGIKDISHPITFIDRDGNKNPTIGNFTMTVTLPEHVKGTHMSRFIEILNEGSCEFNSGNFDKIIDKVREKLESDTAHITLEFPFFRKKKAPSSGVESLMDYQVTLYGILNQGASEVMIKVVVPVTSLCPCSKSISKYGAHNQRSHITIKARIAKGKTLHLEDLIELAEQKASCELYAILKRDDEKVVTERAYDNPAFVEDLVRDIAVGLNANDNIDYYRLESENFESIHNHSAYAVIENNKH

SEQ ID NO: 16235 - protein, 183 aa, Lachnospira sp.
  REGION 1..183: note = tr|A0A1C6JSW4|A0A1C6JSW4_9FIRM GTP cyclohydrolase 1; OS = uncultured Lachnospira sp. OX=446043 GN=folE PE=3 SV=1
MDKEKIEQAVRLFLEGIGEDPNREGLLGTPDRVARMCSEIYGGLGQDAGQYLHTTFEAKNNELILEKDIDLYSVCEHHLLPFYGKAHIAYIPDGRVAGLSKLARTIEVFAKRPQIQEQLTAQTADALMEHLKPKGVMVVIEAEHMCMTMRGVRKPGTKTLTYVCRGVFENNDELINRVLMMVR

SEQ ID NO: 16236 - protein, 223 aa, unidentified
  source 1..223: note = Unknown
  REGION 1..223: note = tr|A4GJ71|A4GJ71_9BACT GTP cyclohydrolase 1; OS = uncultured marine bacterium EB0_49D07 OX=415439 GN=folE; PE = 3 SV=1
MSFDKTKTDPVLGQKVHEHLISVGVETPVVDNGLSRKEKIEKIEGHFDQIVSTLGLDLRDDSLTDTPKRVAKMYVNEIFWGLDYDAFPKATVVENKMQYNEMVVEKGVSVQSYCEHHFVNIDGLATVAYVPNKKVLGLSKMNRIVEYFSRRPQIQERLTEQIYHALSFILETENVAVMIDAKHFCVKSRGVEDTQCSTVTSRLGGSFKAHPEVRAEFLALLKM

SEQ ID NO: 16237 - protein, 192 aa, unidentified
  source 1..192: note = Unknown
  REGION 1..192: note = tr|A4GHX1|A4GHX1_9BACT GTP cyclohydrolase 1; OS = uncultured marine bacterium EB0_39H12 OX=415437 GN=folE; PE = 3 SV=1
MNKKPSREEAEEAVRTLISWAGDNPEREGLIETPKRVVKSYEEFYQGYDQNPDEILSKVFEEIEGYDEIVLVKDIPLHSHCEHHMVPIIGKAHVAYLPDQRVVGLSKLARVVDMFGKRLQTQETMTAQIADTINDVLKPRGVAVIIDAEHQCMSSRGVSKHGASTITSRMLGVFRENQKSRMELLNLISGNI

SEQ ID NO: 16238 - protein, 210 aa, Megasphaera sp.
  REGION 1..210: note = tr|A0A1C5R904|A0A1C5R904_9FIRM GTP cyclohydrolase 1; OS = uncultured Megasphaera sp. OX=165188 GN=folE_2 PE=3 SV=1
MTTTTSSYPVNPEAVQAMKRFLEALGLDLTALGMEKTPYRVAEAFGQFFSGLWENPDDEWAAPILSQTNGLVAVRNIRFQSMCEHHLLPFFGTAHIAYYPQDGRIAGFGHFARAVGVLARRPQLQERLTEDLCQSLCRGLQPKGVLVVVKATHLCLTMREGMAADADIVTAATSGCLQAGTKEYDQAWKLLMGDAGAGTILMKEEESWTP

SEQ ID NO: 16239 - protein, 185 aa, Megasphaera sp.
  REGION 1..185: note = tr|A0A1C5MAI7|A0A1C5MAI7_9FIRM GTP cyclohydrolase 1; OS = uncultured Megasphaera sp. OX=165188 GN=folE_1 PE=3 SV=1
MDREKLKQAAALILEAIGQDGRDGTKETPERFAKMMEERLAYAGVSNEEIAKEFDKVFPCDDGNMVVVKDIDVFSFCEHHIALMYDMKIAIGYIPKGCVIGLSKLARIADAVCRRLQLQERIGADIYDVLRRIVKTDDIIVCIQGEHSCMTARGIKKPGSQTRTLYAGGVFDDPLRRNEFFNLIR

SEQ ID NO: 16240 - protein, 196 aa, Microbacterium sp.
  REGION 1..196: note = tr|A0A1Y5P0P3|A0A1Y5P0P3_9MICO GTP cyclohydrolase 1; OS = uncultured Microbacterium sp. OX=191216 GN=folE PE=3; SV = 1
MAVDRDRVAALVRELLEAIGEDPDRPGLKLTPQRVAEAYAEFFAGVGEDAAAPLAHTISVARGPAPDTLPSGAVMLRDVRFRSVCEHHLLPFAGHAHIAYLPGEQVVGLGALPRVVDVLSARPQVQERLGEQIADVIAASLDTRGVLVILDAVHECVTMRGGRQPDASTVTIAARGELAEPAARAEIIALLAGGAA

SEQ ID NO: 16241 - protein, 200 aa, Mycobacterium sp.
  REGION 1..200: note = tr|A0A1Y5PBJ5|A0A1Y5PBJ5_9MYCO GTP cyclohydrolase 1; OS = uncultured Mycobacterium sp. OX=171292 GN=folE PE=3 SV=1
MPQQDSVTLDTPVFDQPRAEAAVRELLLAVGEDPDRQGLVDTPARVARAFQEMFAGLYTNPDAVLETTFDEHHDELVLVKQIPMYSTCEHHLVAFHGMAHVGYIPGEDGRITGLSKLARVVDLYAKRPQVQERLTGQIADAIMRKLNPRGVIVVIEAEHLCMAMRGVRKAGAITTTSAVRGQFKTDNASRSEALDLILRK

SEQ ID NO: 16242 - protein, 150 aa, unidentified
  source 1..150: note = Nitrospirae bacterium
  REGION 1..150: note = tr|D9MP89|D9MP89_9BACT GTP cyclohydrolase 1; OS = uncultured Nitrospirae bacterium MY4-5C OX=798580; GN = LW5_0200 PE=3 SV=1
MYEEILSGHETSIEEILRPIEGESHEEMVILKDISFYSMCEHHLLPFFGAVNIAYVPNAGKIVGIGSLARAVDILARRLQVQERLTTELADLIMAKLRPKGAMVIIDAEHLCMSMRGTKKNGARVVTSAVRGIFRNKQSTREEMLALIKK

SEQ ID NO: 16243 - protein, 214 aa, unidentified
  source 1..214: note = Unknown
  REGION 1..214: note = tr|E7C7M4|E7C7M4_9BACT GTP cyclohydrolase 1; OS = uncultured nuHF1 cluster bacterium HF0770_35I22; OX = 723586 GN=folE PE=3 SV=1
MRTDKSVSSLDNKKASRNRPTRSEAEEAVRVLIRWAGDDPSREGLIETPARVVRSYEEFFSGYSLCPKSFLERTFEETGGYDEIVLLRDIRFESHCEHHMAPIIGRVHVAYLPDKRVVGISKLARLVETYAKRLQIQEKMTADIASTINNVLAPKGVAVVIEGAHQCMTTRGVQKSGVTMVTSQMLGAFRTNSSTRREFLSMISSPATGKSNFE

SEQ ID NO: 16244 - protein, 213 aa, unidentified
  source 1..213: note = Unknown
  REGION 1..213: note = tr|E0XTJ6|E0XTJ6_9BACT GTP cyclohydrolase 1; OS = uncultured nuHF1 cluster bacterium HF0130_31E21; OX = 710728 GN=folE PE=3 SV=1
MSIDKTVTLLENDEMTRKPSREEAEEAVKTLIRWAGDNPTREGLVETPSRVVRAYEEFFTGYSICPKSFLKRTFEETAGYDEIVLLRDIRFESHCEHHMVPIIGKIHIAYLPDQRVVGISKLARLVDVYAKRLQIQEKMTAEIASTINEVLSPKGVAVVIEGVHQCMTTRGVFKPGVSMVTSQMLGAFRTDPSTRREFLSMIGNPASKSATFV

SEQ ID NO: 16245 - protein, 221 aa, unidentified
  source 1..221: note = Unknown
  REGION 1..221: note = tr|A9LH52|A9LH52_9BACT GTP cyclohydrolase 1; OS = uncultured planctomycete 13FN OX=455065 GN=folE PE=3; SV = 1
MSIASPETISDESEVDYQCVNIKTESSTPKRPAALPEVDLDAIGGAVRTIFKAVGEDPDRDGLLETPRRAAKMYAEMFGGLHADSGRHLNVTFEEGYDELVLVRDIEFTSMCEHHLLPFRGVAHVAYIPNGRVTGLSKLARVVEEVSRRPQVQERMTQTIADLIEDRLKSSAVGVIVKAEHSCMSIRGIRKPGSMTVTSSMRGSFRNDPASRAELMSLINQ

SEQ ID NO: 16246 - protein, 204 aa, Pleomorphomonas sp.; identical to SEQ ID NO: 12785
  REGION 1..204: note = tr|A0A212L8G4|A0A212L8G4_9RHIZ GTP cyclohydrolase 1; OS = uncultured Pleomorphomonas sp. OX=442121 GN=folE PE=3; SV = 1

SEQ ID NO: 16247 - protein, 193 aa, Roseburia sp.
  REGION 1..193: note = tr|A0A1C5VYS4|A0A1C5VYS4_9FIRM GTP cyclohydrolase 1; OS = uncultured Roseburia sp. OX=512314 GN=folE PE=3 SV=1
MAIDQKAVEEHIKGLLAALGDNPDREGLKDTPKRVARMYAEVFEGMNYTNHEIAQMFDKTFEEDLTFSRENSDFVIVKDIDIFSYCEHHMALMYDMKVTVAYVPRGKVIGLSKIARIADMVSKRLQLQERIGTDIAEIIQEVTGSEDVAVLIEGCHSCMTARGIKKTDAKTYTSTLRGRFQTDVMLQMRLNVK

SEQ ID NO: 16248 - protein, 184 aa, Roseburia sp.
  REGION 1..184: note = tr|A0A1C5R6C5|A0A1C5R6C5_9FIRM GTP cyclohydrolase 1; OS = uncultured Roseburia sp. OX=512314 GN=folE PE=3 SV=1
MIDKEKVEAGVRLILEGIGEDVNREGLLETPDRIARMYEEIFGGMDMDAAEPLKKRFHASNNEMVVEKDITFYSTCEHHMLPFYGKAHVAYIPNGEVVGISKLARTVEIYARRLQIQEQLTAQVADALMEQLKPKGVMVMMEAEHMCMTMRGIKKPGSRTVTYVTRGIFNEDERLVNKFFQMVR

SEQ ID NO: 16249 - protein, 361 aa, Roseobacter sp.
  REGION 1..361: note = tr|B3VUL4|B3VUL4_9RHOB GTP cyclohydrolase FolE2; OS = uncultured Roseobacter sp. OX=114847 GN=folE2 PE=3 SV=1
MHRKKLKSCPMIPKITGIRPAPLKGEIAVNIHLPSMDDAASNVDCSDETQDLSRDYAQDFVADADYIRTLPDLQNGPTSLIRGAQKFIQHVGISNFRLPIRFHTRDSDPLVLEASVTGSVSLDAEKKGINMSRIMRTFYRQAEETFSFDVMARTLDDYKADLESFDARLQMRLSFPMQVQSLRSGLSGFQYYNIALEVVERAGQRHKIVHLDYVYSSTCPCSLELSEHARRERGQLATPHSQRSVARISVVLAEGQPRLWFEDLVELCRKAVATETQVMVKREDEQAFAELNAANPIFVEDAARLFCEQLQSDPRIGDFRVIASHQESLHSHDAISVLTEGATFAQTSMDPSTFANLFHVG

SEQ ID NO: 16250 - protein, 185 aa, Ruminococcus sp.
  REGION 1..185: note = tr|A0A1C5UHZ3|A0A1C5UHZ3_9FIRM GTP cyclohydrolase 1; OS = uncultured Ruminococcus sp. OX=165186 GN=folE PE=3 SV=1
MVDKQKVEQAIRLLLEGIGEDTEREGLKDTPDRIARMCMEIYGGLDEEADQHLAKQFEVENNEMVLEKDITFYSMCEHHLMPFYGKAHIAYIPNGRVTGLSKLARTVDVYARRPQIQERLTVQIADALERTLNPRGVMVMLEAEHTCMTMRGIKKPGSKTITTVTRGDFKTDRELQKQFLSMVKD

SEQ ID NO: 16251 - protein, 188 aa, Ruminococcus sp.
  REGION 1..188: note = tr|A0A1C6CD19|A0A1C6CD19_9FIRM GTP cyclohydrolase 1; OS = uncultured Ruminococcus sp. OX=165186 GN=folE PE=3 SV=1
MIDKQRVEAAVKELLSAVGEDVDREGLLETPKRVANMYEEIFAGLDDDPKKYLKIFNVPEQEQELVIVRDIPMYSVCEHHLLPFVGVAHIAYIPKNGKIIGLSKFARIVSCFAKKPQVQERLTTEIADFLYDNLEPLGVAVVIEAEHLCMTMRGARAAGAKTMTSALRGAIRTDAKTRAEVMSLLTNK

SEQ ID NO: 16252 - protein, 227 aa, Sphingobacterium sp.
  REGION 1..227: note = tr|E0Y0P7|E0Y0P7_9SPHI GTP cyclohydrolase 1; OS = uncultured Sphingobacterium sp. EB080_L08E11 OX=710992; GN = folE PE=3 SV=1
MSDTINQLLADEIGDAHESFTAVTPLRKDAFDLSNEEKIATIAEHVKGILTTLGMDLEDDSLKGTPMRVAKLYVNEAFGGLDPSRKPGMSTFDNSYRYNEMLVEKNIVVYSTCEHHLLPIVGRAHVAYISKGKVVGLSKMNRIVDYYAKRPQVQERLTRQVVQALQESLGTDDVACVIDAKHLCVNSRGIRDIESSTVTAEFGGVFKDEVKKREFLDYINLSTDFGV

SEQ ID NO: 16253 - protein, 199 aa, Sphingopyxis sp.
  REGION 1..199: note = tr|A0A1Y5PTH7|A0A1Y5PTH7_9SPHN GTP cyclohydrolase 1; OS = uncultured Sphingopyxis sp. OX=310581 GN=folE PE=3 SV=1
MSDKVELGPDGKVVVPDHVAAAVRTLIEWAGDDPAREGLLDTPRRVARAWKEYCQGYGEDPSVHLSRTFEEVGGYDEIVLLRDIPFQSHCEHHMAPIIGKAAIAYLPRDRVVGISKLARVLNGYARRLQVQERLTAEVARCIWDNLHPHGVAVVIDAQHGCMTGRGVRTPGVGMVTSRLLGCFLDDERSRKEVLSLMGY

SEQ ID NO: 16254 - protein, 276 aa, unidentified
  source 1..276: note = Unknown
  REGION 1..276: note = tr|A0A3P3XGY4|A0A3P3XGY4_9SPIR GTP cyclohydrolase FolE2 OS=uncultured spirochete OX=156406 GN=folE PE=3 SV=1
MVDVQSFQDDRHIAIQKVGVKGLRYPITLLDKTEKYQHTTAVVNLYANLPRELKGTHMSRFIEVFDEYRHDLSMPNVIRMLRKIRTELDAQSAYTDIHFPYFINKAAPVSGQTAIMSYDCFYEASCSEKGHRFIAGVIVPVQTVCPCSKAISDGGAHNQRGLVTLQVSLGPFFWFEDLIRIVEESGSSELFTLLKREDEKFITEKAYSQPRFVEDVVREVYLKVDALNRFPWFSVEAENFESIHNHSAYAYVEKSERSKIEPVHEGHGKIDTFMLD

SEQ ID NO: 16255 - protein, 276 aa, unidentified
  source 1..276: note = Unknown
  REGION 1..276: note = tr|A0A3P3XT69|A0A3P3XT69_9SPIR GTP cyclohydrolase FolE2 OS=uncultured spirochete OX=156406 GN=folE PE=3 SV=1
MVDVQSFQDDRHIAIQKVGVKGLRYPITLLDRSEKYQHTTALVNLYADLPHEFKGTHMSRFIEVFEEYRQDLSMPNVLRMLKKIRIELDAQTAYTDIHFPYFIKKAAPVSGQTAIMSYDCFYEASSSEKGHRFIAGVTVPVQTVCPCSKAISDGGAHNQRGVVTLQVSLGPFFWFEDLIRIVEESGSSELFTLLKREDEKFITEKAYGQPRFVEDVVREVYSKVDALHRFPWFSVEAENYESIHNHSAYAYVEKSERSKIEPVNGDYGKFDTLGPM

SEQ ID NO: 16256 - protein, 272 aa, Sporomusa sp.; identical to SEQ ID NO: 15009
  REGION 1..272: note = tr|A0A212LT11|A0A212LT11_9FIRM GTP cyclohydrolase FolE2 OS=uncultured Sporomusa sp. OX=307249 GN=folE PE=3; SV = 1

SEQ ID NO: 16257 - protein, 242 aa, Stenotrophomonas sp.
  REGION 1..242: note = tr|A0A1Y5Q500|A0A1Y5Q500_9GAMM GTP cyclohydrolase I, FolE OS=uncultured Stenotrophomonas sp. OX=165438; GN = STPYR_12233 PE=4 SV=1
MTNTVLAPVVHEGTIAAMKISDRIRLRLEAAGSSHRANDNIADFIEDGELDALRMEVEARMKELLHALVIDTDNDHNTADTARRVARMFIDEAFSGRYRAAPAVTAFPNAARFDELMVVGPMTVRSACSHHLCPIMGRVWIGVLPDASSDVIGLSKYARLCDWIMCRPQIQEEAVVMLADELERRIKPDGLAVVMEASHFCMQWRGIKDERSLMTSSVMRGAFRQDTALRREFLSLIGRGTR

SEQ ID NO: 16258 - protein, 199 aa, Stenotrophomonas sp.
  REGION 1..199: note = tr|A0A1Y5Q8F0|A0A1Y5Q8F0_9GAMM GTP cyclohydrolase 1; OS = uncultured Stenotrophomonas sp. OX=165438 GN=folE PE=3; SV = 1
MADPENPSVTQAQAEEAVRTLLRWAGEDPAREGLLDTPRRVAEAYGDWFKGYHDDPREYLERTFEEVAGYDEMIVLRDIEYESHCEHHMAPIIGRVHVGYVPDGRVVGISKLARVVEAYARRFQVQEKMTAQIADCIQDVLQPLGVGVVVEGAHECMTTRGIHKRGVSMVTSRMRGTFHDDARTRAEFLRFIEVGHARR

SEQ ID NO: 16259 - protein, 263 aa, unidentified
  source 1..263: note = Unknown
  REGION 1..263: note = tr|A0A482ZSU9|A0A482ZSU9_9GAMM GTP cyclohydrolase FolE2 OS=uncultured SUP05 cluster bacterium OX=655186; GN = folE2 PE=3 SV=1
MKSCDLPDTQNNEDLRQIVIDKVGIKDIAHPITYVSRDGGKIATVGNFTMTVELPEHIKGTHMSRFIEILNQGDCEFNSGNFDKIIDKVRQKLESDTAHIIVDFPFFRKKKAPSSGVESLMDYQVTLYGELEKGKSEVMMKVVVPVTSLCPCSKSISKYGAHNQRSHITIKAKPTLGKQLHVEDLIDLAERMASCELYAILKREDEKLVTERAYDNPAFVEDLVRDIAVELNKDDRINYYRLESENFESIHNHSAYAVIEHQK

SEQ ID NO: 16260 - protein, 263 aa, unidentified
  source 1..263: note = Unknown
  REGION 1..263: note = tr|D1KEB3|D1KEB3_9GAMM GTP cyclohydrolase FolE2; OS = uncultured SUP05 cluster bacterium OX=655186 GN=folE2; PE = 3 SV=1
MNAAHLPDTQNSKDTRQIIIDKVGIKDIAHPITYIDRDGNKMPTIGRFTMTVSLPEHVKGTHMSRFIEILNDGPCEFNSSNFDKIINKVCEKLKSDTAHIVLEFPFFRKKKAPSSGVESMMDYQVTLYGSFAKGESEVMMKVVVPVTSLCPCSKSISKYGAHNQRSHITIKAKVSEGHKLDIEDLIDLAERKASCELYAILKRDDEKVVTERAYDNPAFVEDLVRDIALDLNLDERINYYRLESENFESIHNHSAYALIENQK

SEQ ID NO: 16261 - protein, 190 aa, unidentified
  source 1..190: note = Unknown
  REGION 1..190: note = tr|B1GZK8|B1GZK8_UNCTG GTP cyclohydrolase 1; OS = Uncultured termite group 1 bacterium phylotype Rs-D17; OX = 471821 GN=folE PE=3 SV=1
MQIFNFDEKKAQRAVKLLLESFGEDLNREGIKRTPERVAEFYKEVLSGNKIDPLKFIPVHYATEDHEEIVLVKDITFYSLCEHHLLPFFGKMHIAYIPKKDRIIGVSKLIKLVEIFANRLQLQERLTKQLADIVMKFVKPHGVMVVVEAEHLCMTMRGVKKTGSKIITSAMRGIFLKDVRTRSEAMSLLR

SEQ ID NO: 16262 - protein, 305 aa, Thiohalocapsa sp.
  REGION 1..305: note = tr|V4JE38|V4JE38_9GAMM GTP cyclohydrolase FolE2; OS = uncultured Thiohalocapsa sp. PB-PSB1 OX=1385625; GN = folE2 PE=3 SV=1
MPDALTYMDVLQQTLLEDESMDRTVLTATVPATTTIADVQSRADTRRIPIDKVGIKDIRHPVRIKDRGGQEQHTVATFNMYVYLPHHFKGTHMSRFVAILNGHEHEIGVSTFREMLSEMAERLESEAGHIEMRFPFFIDKKAPISGVASLLDYDVTLIGDIHDGKPKMSIKVVVPVTSLCPCSKQISDYGAHNQRSHVTVEARTRGFLWIEELIEMVEAEASCELYGLLKRPDEKYVTERAYDNPKFVEDTVRDVARRLNDDERISAYIVEAENFESIHNHSAYALIECDKEIEARKAGSAPDCD

SEQ ID NO: 16263 - protein, 111 aa, Thiohalocapsa sp.
  REGION 1..111: note = tr|V4LH66|V4LH66_9GAMM GTP cyclohydrolase 1 (Fragment) OS=uncultured Thiohalocapsa sp. PB-PSB1; OX = 1385625 GN=N838_06750 PE=3 SV=1
MTGKIPRISAHTRYEDEDRFEPSDSQDVYDPDKEALIREMLVRLGEDPEREGLKRTPLRVAKAMDFLTQGYHLSAEDIIKKAMFDEDVTEMVVVRDIEFYSLCEHHMLPFF

SEQ ID NO: 16264 - protein, 225 aa, unidentified
  source 1..225: note = Unknown
  REGION 1..225: note = tr|A6EMF5|A6EMF5_9BACT GTP cyclohydrolase 1; OS = unidentified eubacterium SCB49 OX=50743 GN=folE PE=3; SV = 1
MDLEKELENIEAIGDAHVATSGDTPLRSDAFELSDEEKINSIKSDVQNIMQTLGLDLTDDSLKGTPNRVAKMFVKEIFGGLHPDRKPKASTFDNKYKYNEMLVEKNITLYSTCEHHLLPIVGRAHIAYISKGTVVGLSKMNRIVDYYAKRPQVQERLTMQIVKELQEVLGTDDVACVIDAKHLCVNSRGIRDIDSSTVTSEFCGAFKSPDVRREFLEYIKLETTY

SEQ ID NO: 16265 - protein, 199 aa, unidentified
  source 1..199: note = Unknown
  REGION 1..199: note = tr|A6EU75|A6EU75_9BACT GTP cyclohydrolase 1; OS = unidentified eubacterium SCB49 OX=50743 GN=folE PE=3; SV = 1
MSSYKKYETYNDKITDDLKDNFTNILKGIGEDVDREGIVKTPERAAKAMQFLTSGHNQDPAEILKSAMFAEDYNDMVIIKDIELYSLCEHHILPFFGKAHIAYIPNGHIVGLSKIPRVVDIFARRLQVQERLTHDILECINETLKPQGVAVVIEASHMCMMMRGVQKQNSVTTTSGFRGQFEKIETRNEFLKLISSSLS

SEQ ID NO: 16266 - protein, 189 aa, Ureibacillus terrenus
  REGION 1..189: note = tr|A0A540V6L2|A0A540V6L2_9BACL GTP cyclohydrolase 1; OS = Ureibacillus terrenus OX=118246 GN=folE PE=3 SV=1
MSNIDLKKIEEAVKMILEAIGEDVNREGLIDTPKRVSKMYEEMFSGLKEDPRCLFETVFHEEHEELVLVKDIPFYSMCEHHLIPFYGKAHVAYIPQNGRVAGLSKIGRLVESVSHRPQLQERLTTTIADILMEKLEPQGVFVMIEAEHMCMTMRGLKKPGTKTVTSCARGIYEEDDVKRQEVISFIQMS

SEQ ID NO: 16267 - protein, 189 aa, Ureibacillus thermophilus
  REGION 1..189: note = tr|A0A4P6UTI3|A0A4P6UTI3_9BACL GTP cyclohydrolase 1; OS = Ureibacillus thermophilus OX=367743 GN=folE PE=3 SV=1
MSNVDLKKIEEAVKMILEAVGEDVNREGLIDTPKRVSKMYEEMFKGLNEDPRSLFDTVFHENHDELVLVKDIPFYSMCEHHLVPFYGKAHVAYIPQHGRVAGLSKIGRLVESVSHRPQLQERITTTIADILMEKLEPQGVFVMIEAEHMCMTMRGLKKPGTKTVTSCARGIYEVDDVKRQEVISFIQMS

SEQ ID NO: 16268 - protein, 257 aa, Uruburuella suis
  REGION 1..257: note = tr|A0A4R2MQS9|A0A4R2MQS9_9NEIS GTP cyclohydrolase FolE2 OS=Uruburuella suis OX=252130 GN=folE2 PE=3 SV=1
MNAIADVQSSPDLRNMPINQVGIKDLRFPIAITSAEGTQHTVGRLSMTVFLPADQKGTHMSRFVALMERQSEPLSFGRLKTLTEEMVQLLDSHSGKISVSFPFFRQKSAPVSGIKSLLDYDVTLTGEIKEGAYSCTLKVLTPVTSLCPCSKEISQYGAHNQRSHVTVTLTCCDEVGIEEIIDCVEKQASCQLYGLLKRPDEKFVTEQAYENPKFVEDMVRDVAVALRGDARIRAFVVESENFESIHNHSAYAYIAYP

SEQ ID NO: 16269 - protein, 187 aa, Vagococcus acidifermentans
  REGION 1..187: note = tr|A0A430AVI5|A0A430AVI5_9ENTE GTP cyclohydrolase 1; OS = Vagococcus acidifermentans OX=564710 GN=folE PE=3 SV=1
MNSEQKKIIQESVKNILRAIGEDVTREGLIETPERVAKMYEEIFSSVTETDFNNCKVFTSLSDDDIVLVKDIPFYSMCEHHLLPFYGKAHVAYIPSNKQIIGLSKIPRMVDYCAKRPNVQENLTIQIARLLEEKVSPQGIAVAIEAEHMCMSMRGIKKPGSTTKTFHYSGCFKTDRDLKREFLEALT

SEQ ID NO: 16270 - protein, 186 aa, Vagococcus elongatus
  REGION 1..186: note = tr|A0A430AZS7|A0A430AZS7_9ENTE GTP cyclohydrolase 1; OS = Vagococcus elongatus OX=180344 GN=folE PE=3 SV=1
MMDEKKIKTAVKMLLEGMGEDIQRPGLLETPERVAKSYKEIFGGLYEDAAVHLTKTFPVESNEFVLEKDIPFYSTCEHHLIPFFGVAHVAYVPTDKVVGLSKLARTVDIFARRPQIQEQLTNQIADAITEHLEPAGVMVIIEAEHLCMSMRGVKKPGAKTLTMVSRGVLQTDSELKNTILSMVGIK

SEQ ID NO: 16271 - protein, 187 aa, Vagococcus fluvialis
  REGION 1..187: note = tr|A0A1X6WQQ0|A0A1X6WQQ0_9ENTE GTP cyclohydrolase 1; OS = Vagococcus fluvialis bH819 OX=1255619 GN=folE PE=3 SV=1
MDLENKQIIEDAVKQILKAIGENPDREGLKNTPKRVAKMYDEVFGSLTGPEFDDYALFDSRNEDDMVLVKDIQFYSMCEHHLLPFFGKAHVAYIPDGNKVLGLSKLPRLVEYCAKRPSVQEDLTVMIVEQLVKHVPVKGVAVSIEAEHMCMTMRGIKSPHSSTKTFHYTGVFKEDRDVKNDFLRAID

SEQ ID NO: 16272 - protein, 187 aa, unidentified
  source 1..187: note = Vagococcus humatus
  REGION 1..187: note = tr|A0A3S0ADQ5|A0A3S0ADQ5_9ENTE GTP cyclohydrolase 1; OS = Vagococcus humatus OX=1889241 GN=folE PE=3 SV=1
MDLERIEAAVKEILIAVGEDPERTGLQETPKRVARMYQEVFAGLENDPTVHLKVFDEGQDEEMVIVRDIPLHSMCEHHLLPFVGKAHIAYIPRNGKIIGLSKFARIVDHFSKRPQVQERLTSQIADFLDENLDPVGVAVVIEAEHMCMTMRGAKAAGSGTLTSALRGSMRSDAKTRAEVMSLLRGRI

SEQ ID NO: 16273 - protein, 187 aa, unidentified
  source 1..187: note = Vagococcus martis
  REGION 1..187: note = tr|A0A1V4DK19|A0A1V4DK19_9ENTE GTP cyclohydrolase 1; OS = Vagococcus martis OX=1768210 GN=folE PE=3 SV=1
MELEKQMQIEEAVKTILTAIGEDVDRDGLKETPKRVAKMYAEVFSSVQEKEFTNYKVFPSLNEDDMVLVKDIEFYSMCEHHLLPFFGKAHVAYIPSDNKVLGLSKVARMVEFCAKRPNVQEDLTIQIANLINEKVKTKGVAVSIEAEHMCMAMRGVKARGSVTKTFHYQGVFKEDKDVKNDFLRALD

SEQ ID NO: 16274 - protein, 187 aa, Vagococcus penaei
  REGION 1..187: note = tr|A0A1Q2D923|A0A1Q2D923_9ENTE GTP cyclohydrolase 1; OS = Vagococcus penaei OX=633807 GN=folE PE=3 SV=1
MNQENYQAIEEAVKVILEAIGEDVNRDGLKETPKRVAKMYAEVFSSVREKEFTNYKVFPSMNDDDMVLVKDIEFYSMCEHHLLPFYGKAHVAYIPSDNKVLGLSKVARMVDFCAKRPNVQEDLTIQIANLLNEKVNTKGVAVSIEAEHMCMSMRGAKARGSVTKTFHYQGAFKSDRELKNDFLRALD

SEQ ID NO: 16275 - protein, 193 aa, Vagococcus sp.
  REGION 1..193: note = tr|A0A414XCD9|A0A414XCD9_9ENTE GTP cyclohydrolase 1; OS = Vagococcus sp. AM17-17 OX=2292077 GN=folE PE=3 SV=1
MKVGIRMEQEKQLQIEEAVKTILTAIGEDVDRDGLKETPKRVAKMYAEVFSSVQEKEFTNYKVFPSLNEDDIVLVKDIEFYSMCEHHLLPFFGKAHVAYIPSDNKVLGLSKVARMVEFCAKRPNVQEDLTIQIANLINEKVKTKGVAVSIEAEHMCMAMRGVKARGSVTKTFHYQGVFKEDKDVKNDFLRALD

SEQ ID NO: 16276 - protein, 187 aa, Vagococcus sp.
  REGION 1..187: note = tr|A0A429ZF01|A0A429ZF01_9ENTE GTP cyclohydrolase 1; OS = Vagococcus sp. SS1994 OX=1977868 GN=folE PE=3 SV=1
MEQDKQLQIEEAVKTILTAIGEDIDRDGLKETPKRVAKMYAEVFSSVREKEFTNYKVFPSLNEDDMVLVKDIEFYSMCEHHLLPFFGKAHVAYIPSDNKVLGLSKVARMVDFCAKRPNVQEDLTIQIANLINEKVKTKGVAVSIEAEHMCMAMRGVKARGSVTKTFHYQGVFKEDKDVKNDFLRALD

SEQ ID NO: 16277 - protein, 187 aa, unidentified
  source 1..187: note = Vagococcus teuberi
  REGION 1..187: note = tr|A0A1J0A8G4|A0A1J0A8G4_9ENTE GTP cyclohydrolase 1; OS = Vagococcus teuberi OX=519472 GN=folE PE=3 SV=1
MEQEKQLQIEEAVKTILTAIGEDVDRDGLKETPKRVAKMYAEVFSSVQEKEFTNYKVFPSLNEDDMVLVKDIEFYSMCEHHLLPFFGKAHVAYIPSDHKVLGLSKVARMVEFCAKRPNVQEDLTIQIANLINEKVKTKGVAVSIEAEHMCMAMRGVKARGSVTKTFHYQGVFKEDKDVKNDFLRALD

SEQ ID NO: 16278 - protein, 187 aa, unidentified
  source 1..187: note = Vampirococcus sp.
  REGION 1..187: note = tr|A0A410P655|A0A410P655_9BACT GTP cyclohydrolase 1; OS = Vampirococcus sp. LiM OX=1930593 GN=folE PE=3 SV=1
MNKQKLIKAVKMILEAVGEDPKRQDLLETPERVADMYAEILSGLSADPKKELEVVLDQKHEEIVLLKDIPLYSICEHHLLPFIGRAHVAYIPKGGRVTGLSKIARVVEILSRRPQVQERLTTQIATVIMETLKPLGVMVVIEAEHLCMSMRGIKKPGITTVTSAVRGVFKENEKTRSETLALMKGGR

SEQ ID NO: 16279 - protein, 188 aa, Varibaculum cambriense
  REGION 1..188: note = tr|A0A2I1YBY5|A0A2I1YBY5_9ACTO GTP cyclohydrolase 1; OS = Varibaculum cambriense OX=184870 GN=folE PE=3 SV=1
MGYNQAGVEKAIRDLLIAIGEDPDREGLQETPARMGRAWKEVMSGMRSDPAAPLEKQFHVDDEEMVMVRGIPFYSLCEHHLLPFFGVAHVAYIPRDGRITGLSKLARVVEGFSHRLQVQERLTAQVADALMEKLEPQGAAVVIEGEHLCMSMRGIKKPGARTTTSALRGVMRSDPRSRAEVLSLIREN

SEQ ID NO: 16280 - protein, 188 aa, Varibaculum cambriense
  REGION 1..188: note = tr|W1TNB2|W1TNB2_9ACTO GTP cyclohydrolase 1; OS = Varibaculum cambriense DORA_20 OX=1403948 GN=folE PE=3; SV = 1
MGYNQDGVEKAIRDLLIAIGENPDREGLQETPARMGRAWKEVISGMHSDPAAPLEKQFHVDDEEMVMVRGIPFYSLCEHHLLPFFGVAHVAYIPREGRITGLSKLARVVEGFSHRLQVQERLTAQVADALMEKLDPRGAAVVIEGEHLCMSMRGIKKPGARTTTSALRGVMRSDPRSRAEVLSLIRSN

SEQ ID NO: 16281 - protein, 207 aa, unidentified
  source 1..207: note = Variibacter gotjawalensis
  REGION 1..207: note = tr|A0A0S3PW82|A0A0S3PW82_9BRAD GTP cyclohydrolase 1; OS = Variibacter gotjawalensis OX=1333996 GN=folE PE=3 SV=1
MDAIIKPFSRTPSESSRTQRPTRDEAEAAVRTLIAYAGDDPAREGLLDTPKRVVRAYDELFGGYRLDPADVLQRTFSEIDTYDDLVLVRDIPFASHCEHHMIPFTGKAHIAYVPVGEVVGLSKLARLIDIFAKRLQTQEHLTAQIAGAIEEGLKPRGIAVMIEAEHMCMSLRGVQKHGSSTVTTKFTGSFRDDPAEQVRFMTLIRQR

SEQ ID NO: 16282 - protein, 243 aa, Variovorax paradoxus
  REGION 1..243: note = tr|E6UYP5|E6UYP5_VARPE GTP cyclohydrolase I; OS = Variovorax paradoxus (strain EPS) OX=595537; GN = Varpa_4787 PE=4 SV=1
MLRKTDVEPLPDRKDDDEGTPVSVKIRERLNAARKRFNANDNIAEFIQPGELESLLDEVEVKMKAVLESLVIDVENDHNTDNTARRVAKMYLNEVFRGRYVPPPPLTEFPNAEHLNELMIVGPITVRSACSHHFCPIIGKLWIGVMPNEHTNVIGLSKYARLAEWVMGRPQIQEEAIVQLADLIQEKTRPDGLALVMEAEHFCMAWRGVKEMDSKMINSVMRGVFLKDPSLRREFLSLLPRKS

SEQ ID NO: 16283 - protein, 243 aa, Variovorax paradoxus
  REGION 1..243: note = tr|C5CWX5|C5CWX5_VARPS GTP cyclohydrolase I; OS = Variovorax paradoxus (strain S110) OX=543728; GN = Vapar_4119 PE=4 SV=1
MLRKTDVEPRPDGNNDDEGTPVSVKIRERLTAARRRFNANDNIAEFIEPGELESLLDEVEVKMKGVLESLVIDLENDHNTGNTARRVAKMYLNEVFKGRYVAPPSLTEFPNAEHLNELMIVGPITVRSACSHHFCPIIGKLWIGIMPNEHTNVIGLSKYARLAEWVMGRPQIQEEAVVQLADLIQEKTQPDGLALVMEAEHFCMAWRGVKEMDSKMINSVMRGVFLKDPSLRREFLSLLPRRS

SEQ ID NO: 16284 - protein, 243 aa, Variovorax sp.
  REGION 1..243: note = tr|A0A120D5J2|A0A120D5J2_9BURK GTP cyclohydrolase I type 1 OS=Variovorax sp. WDL1 OX=207745 GN=APY03_4360 PE=4; SV = 1
MLRKIDTAERPEPDAGDEGTPVSVKIRERLLAARQRFHANDNIAEFIEPGELESLLDEVEHKMKDVLEALVIDLDNDHNTGNTARRVAKMYLNEVFKGRYVAPPSLTEFPNAEHLNELMIVGPITVRSACSHHFCPIIGKLWIGVMPNEKTNVIGLSKYARLAEWVMSRPQIQEEAVVQLADLIQERTQPDGLALVMEAEHFCMQWRGVKEMDSKMINSVMRGVFLKDSNLRREFLALIPRRS

SEQ ID NO: 16285 - protein, 306 aa, Variovorax sp.
  REGION 1..306: note = tr|A0A1G4ZTJ2|A0A1G4ZTJ2_9BURK GTP cyclohydrolase FolE2 OS=Variovorax sp. EL159 OX=1566270 GN=folE2 PE=3 SV=1
MTARLPDIALTEASPMPLPLDGVGMRGVELPIWPDDPGVRHPVHARADVEVDLPDPQVKGIHMSRLYRLLCDSAESQKLGAASLQKLLRAMVESHADCGSARARLVLSFELLCKRAALVTPGLHGWNAYPVRLEALWRDGSFTLDAQVRVTYASTCPCSAALSRQLIAQAFDARFATHKTMATADALAWLQDNATLATPHSQRSIADIQVRLPHDAPDLGLLRLIDLAEAALGTPAQGAVKRADEQAFARLNGQNLMYVEDAARRLQAALAGSFAVTRIDVRHLESLHPHDAFARVSNASAGEVFA

SEQ ID NO: 16286 - protein, 209 aa, unidentified
  source 1..209: note = Varunaivibrio sulfuroxidans
  REGION 1..209: note = tr|A0A4R3JI83|A0A4R3JI83_9PROT GTP cyclohydrolase 1; OS = Varunaivibrio sulfuroxidans OX=1773489 GN=folE PE=3 SV=1
MSANSPENTDQKPTREEAEEAVRTLLRWAGDDPRREGLLDTPGRVVRAYGEFFRGYDEDPEDILKRTFEEVEGYDELVLLRDIRFESHCEHHLAPIIGKAHVGYLPDRRVVGISKLARVIEAYAKRLQIQEKMTAQIANTIDEVLQPLGVAVVIEAAHQCMTTRGVHKPGVTMVTSRMLGAFRNDPSTRREFLAMVANAPSRTVDGANT

SEQ ID NO: 16287 - protein, 187 aa, Veillonella atypica
  REGION 1..187: note = tr|A0A133S2I1|A0A133S2I1_9FIRM GTP cyclohydrolase 1; OS = Veillonella atypica OX=39777 GN=folE PE=3 SV=1
MNQLAKEGIEQFLRALSVDTKAPELEKTPTRVTELYEELFSGVGKETKELWGELFSTDYNGLVAVTDIPFYSMCEHHLLPFFGTVDVIYQPHSGCVAGLSKFNDVITVLSRKPQLQERLTREIADAIERDLSAEGVFVRLKATQLCMLMKGTLQQGSQVVTIESRGLLREAGSLRDEALAMLGGTNV

SEQ ID NO: 16288 - protein, 187 aa, Veillonella atypica
  REGION 1..187: note = tr|A0A3A6WF36|A0A3A6WF36_9FIRM GTP cyclohydrolase 1; OS = Veillonella atypica OX=39777 GN=folE PE=3 SV=1
MDTKRIESLVYQLLEALGENPDREGLVETPKRVAQMMEEMFEGIQYTNADIADMFGKTFDVDTNQMVIVKDITCFSHCEHHMALMYDMNISIGYIPRGRVIGLSKMPRIAEMCCKRLQLQEKIGEDIAEVISIATGTDDVIVHITSSHSCVSARGVKSANSKTTTLATKGAFQQEDMINRFLTLKNA

SEQ ID NO: 16289 - protein, 193 aa, Veillonella criceti
  REGION 1..193: note = tr|A0A380NJN1|A0A380NJN1_9FIRM GTP cyclohydrolase 1; OS = Veillonella criceti OX=103891 GN=folE PE=3 SV=1
MKEQASEGIAQFLTALGIDLKAAAMEKTPNRVASLYEELFAGMNVQSADIWGEIFPTEYKGLVAVTDIPFYSVCEHHLMPFFGTVDIVYQPKEGRVAGLSKLSDLVNVFARRPQLQERMTRQIATALETDLLAEGVVVRIKATHLCMLIKGELQQGTAVVTMECRGVLSKTGQLREEAMAILGGTTDVQTTQL

SEQ ID NO: 16290 - protein, 189 aa, Veillonella denticariosi
  REGION 1..189: note = tr|A0A2S7Z8H4|A0A2S7Z8H4_9FIRM GTP cyclohydrolase 1; OS = Veillonella denticariosi JCM 15641 OX=1298594 GN=folE; PE = 3 SV=1
MNQRAKDGIKQFLQALSVDTEAPELEKTPSRVTELYGELFSGVGMDTKSAWGDTFTADYKGLVALSGIPFYSMCEHHLLPFFGTVDIVYQPKDGCVAGLSKFQDVVNILSRRPQLQERLTSELADAIMNDLSAHGVFVRITSTQLCMLIKGTMQQDSKVITLESRGVLDETGTLRDEALAMLGGGQADV

SEQ ID NO: 16291 - protein, 187 aa, Veillonella denticariosi
  REGION 1..187: note = tr|A0A2S7Z7U7|A0A2S7Z7U7_9FIRM GTP cyclohydrolase 1; OS = Veillonella denticariosi JCM 15641 OX=1298594 GN=folE; PE = 3 SV=1
MDTEKIESLVYQLLEALGEDPDRAGLVETPKRVAQMMAEVYEGIRYTNAEIAEMYGKTFPVDTDQMVVVKNITCFSHCEHHMALMYDMSISIGYIPKGRVIGLSKVPRIAEMCCKRLQLQEKIGEDIAEVISMATGSEDVIVHITSSHSCMSARGIKSTDSKTTTLATKGVFNEDGMIQRFMLIKES

SEQ ID NO: 16292 - protein, 187 aa, Veillonella dispar
  REGION 1..187: note = tr|C4FPL0|C4FPL0_9FIRM GTP cyclohydrolase 1; OS = Veillonella dispar ATCC 17748 OX=546273 GN=folE PE=3; SV = 1
MDTEKIESLVYQLLEALGEDPNREGLVETPKRVAQMMAEVYEGIQYTNAEIAEMYGKTFEVDTNQMVVVKDITCFSHCEHHMALMYDMSISIGYIPKGRVIGLSKIPRIAEMCCKRLQLQEKIGEDIAEVISLATGSEDVIVHITSSHSCMSARGIKSTDSQTTTLATKGVFNEDNMIHRFMLMKQS

SEQ ID NO: 16293 - protein, 189 aa, Veillonella dispar
  REGION 1..189: note = tr|C4FRH1|C4FRH1_9FIRM GTP cyclohydrolase 1; OS = Veillonella dispar ATCC 17748 OX=546273 GN=folE PE=3; SV = 1
MNQRAKDGIKQFLAALSVDTEAPELEKTPSRVTELYSELFSGVGLDTKSAWGETFSTDYKGLVAVTGIPFYSMCEHHLLPFFGTVDIVYQPKDGCVAGLSKFQDIVNILSRRPQLQERLASELADAIMNDLSAHGVFVRITSTQLCMLIKGTMQQDSKVITLESRGVLAETGTLRDEALAMLGGGQANV

SEQ ID NO: 16294 - protein, 187 aa, Veillonella montpellierensis
  REGION 1..187: note = tr|A0A096ALW7|A0A096ALW7_9FIRM GTP cyclohydrolase 1; OS = Veillonella montpellierensis DNF00314 OX=1401067; GN = folE PE=3 SV=1
MNKDLIEQGIKLLLQGIGENLEREGIIETPKRAAKMYIELLEGMNYTNKEIAEKFGKSFKVDTTQMVIVKDIEAFSMCEHHLALMYDMNIAVGYIPNGKVIGLSKIPRIAEMCCKRLQLQEKIGEDIAEVISIATGSEDVIVHITAKHSCVTARGIKSRNSNTVTITKKGIFKDNYDITREFINNIQ

SEQ ID NO: 16295 - protein, 194 aa, Veillonella montpellierensis
  REGION 1..194: note = tr|A0A096AN32|A0A096AN32_9FIRM GTP cyclohydrolase 1; OS = Veillonella montpellierensis DNF00314 OX=1401067; GN = folE PE=3 SV=1
MKQEINEERVAALIRELLIELGENPNRPGLLETPDRVARMYQEVFEGIRYSNHEIAEKFGKVFEEVKTGSLVTVTHIPIFSYCEHHLALMYNMDVSVGYIPNNKVIGLSKVARIADLVGKRLQLQERIGDDIREILEEVLDTKDIIVVIRGEHACMTSRGIRKPGTITKTASLGGIFETDIPLRQEFYSLLTMG

SEQ ID NO: 16296 - protein, 189 aa, Veillonella parvula
  REGION 1..189: note = tr|A0A413E8L0|A0A413E8L0_9FIRM GTP cyclohydrolase 1; OS = Veillonella parvula OX=29466 GN=folE PE=3 SV=1
MNQRANDGIKQFLEALSVDTEAPELEKTPSRVTELYSELFSGVGVETKSVWGETFSTDYKGLIAVTGIPFYSMCEHHLLPFFGTVDIVYQPKDGCVAGLSKFQDVVNILSRRPQLQERLASELADAIMNDLSAHGVFVRITSTQLCMLIKGTMQQDSKVITLESRGVLAETGTVRDEALAMLGGGQVNV

SEQ ID NO: 16297 - protein, 189 aa, Veillonella parvula
  REGION 1..189: note = tr|D1BLB9|D1BLB9_VEIPT GTP cyclohydrolase 1; OS = Veillonella parvula (strain ATCC 10790 / DSM 2008 / JCM 12972 / Te3) OX=479436 GN=folE PE=3 SV=1
MNQRAKDGIKQFLEALSVDTEAPELEKTPSRVTELYSELFSGVGLDTKAAWGETFSTDYKGLVAVTGIPFYSMCEHHLLPFFGTVDIVYQPKDGCVAGLSKFQDIVNILSRRPQLQERLASELADAIMNDLFAHGVFVRITSTQLCMLIKGTMQQDSKVITLESRGVLAEKGTLRDEALAMLGGGQVNV

SEQ ID NO: 16298 - protein, 187 aa, Veillonella rodentium
  REGION 1..187: note = tr|A0A239ZDX2|A0A239ZDX2_9FIRM GTP cyclohydrolase 1; OS = Veillonella rodentium OX=248315 GN=folE_2 PE=3 SV=1
MDTEKIESLVYQLLEALGEDPDRAGLVETPKRVAQMMAEVYEGIRYTNAEIAEMYGKTFPVDTDQMVVVKNITCFSHCEHHMALMYDMSISIGYIPKGRVIGLSKVPRIAEMCCKRLQLQEKIGEDIAEVISMATGSEDVIVHITSSHSCMSARGIKSTDSKTTTLATKGVFNEDGMIQRFMLMKES

SEQ ID NO: 16299 - protein, 189 aa, Veillonella rodentium; identical to SEQ ID NO: 16290
  REGION 1..189: note = tr|A0A239YM55|A0A239YM55_9FIRM GTP cyclohydrolase 1; OS = Veillonella rodentium OX=248315 GN=folE_1 PE=3 SV=1

SEQ ID NO: 16300 - protein, 189 aa, Veillonella rogosae
  REGION 1..189: note = tr|A0A2S7YZ80|A0A2S7YZ80_9FIRM GTP cyclohydrolase 1; OS = Veillonella rogosae JCM 15642 OX=1298595 GN=folE PE=3; SV = 1
MNQRAKDGIKQFLEALSVDTEAPELEKTPSRVTELYSELFSGVGLDTKSAWGETFSTDYKGLVAVTGIPFYSMCEHHLLPFFGTVDIVYQPKDGCVAGLSKFQDIVNILSRRPQLQERLASELADAIMNDLSAHGVFVRITSTQLCMLIKGTMQQDSKVITLESRGVLAEKGTLRDEALAMLGGGQANV

SEQ ID NO: 16301 - protein, 193 aa, unidentified
  source 1..193: note = Veillonella seminalis
  REGION 1..193: note = tr|K9D067|K9D067_9FIRM GTP cyclohydrolase 1; OS = Veillonella seminalis ACS-216-V-Col6b OX=883156 GN=folE; PE = 3 SV=1
MKEQASEGVAQFLTALGIDLKAADMENTPQRVAGLYEELFAGMNKSSADIWGDIFPTDYKGLVAVTSIPFYSVCEHHLMPFFGTADIVYQPKDGRVAGLSKLSDLVNLFARRPQLQERMTREIATALENDLEAEGVMVRIKATHLCMLIKGELQQGTAVVTMECRGVLSRTGQLREEALTILGGSTDVQTTQL

SEQ ID NO: 16302 - protein, 187 aa, Veillonella sp.
  REGION 1..187: note = tr|A0A2S7Z9G8|A0A2S7Z9G8_9FIRM GTP cyclohydrolase 1; OS = Veillonella sp. T34266-5 OX=2027457 GN=folE PE=3 SV=1
MDTKRIESLVYQLLEALGENPDREGLVETPKRVAQMMEEMFEGIQYTNADIADMFGKTFDVDTNQMVIVKDITCFSHCEHHMALMYDMNISIGYIPRGCVIGLSKMPRIAEMCCKRLQLQEKIGEDIAEVISIATGTDDVIVHITSSHSCVSARGVKSANSKTTTLATKGVFEQDDMINRFLTLKNA

SEQ ID NO: 16303 - protein, 188 aa, Veillonella sp.
  REGION 1..188: note = tr|F9N411|F9N411_9FIRM GTP cyclohydrolase 1; OS = Veillonella sp. oral taxon 780 str. F0422 OX=944564; GN = folE PE=3 SV=1
MKEQAIMGVRQLLEGLDINLETKGMTDTPKRVATLFEGLFSGCHSTGKEALGDVYPTEHTGLVSVNHIPFYSICEHHLMPFYGKVHIVYQPRDGKVFGLGRLKALVDVYAKRPQLQERLTHDIATSLVEDGDVLGAMVMVEATHLCMLMKGEVAQETVAKTILATGILEPMGTLREEALVLLGGNDHV

SEQ ID NO: 16304 - protein, 187 aa, unidentified
  source 1..187: note = Veillonella tobetsuensis
  REGION 1..187: note = tr|A0A480B4W5|A0A480B4W5_9FIRM GTP cyclohydrolase 1; OS = Veillonella tobetsuensis OX=1110546 GN=folE_1 PE=3 SV=1
MDTKRIESLVHQLLEALGENPNREGLVETPKRVAQMMEEMFEGIQYTNADIADMFGKTFEVDTNQMVVVKDITCFSHCEHHMALMYDMNISIGYIPRGRVIGLSKMPRIAEMCCKRLQLQEKIGEDIAEVISIATGTDDVIVHITSSHSCVSARGVKSTNSKTTTLATKGIFEQDDMINRFLTLKNA

SEQ ID NO: 16305 - protein, 187 aa, unidentified
  source 1..187: note = Veillonella tobetsuensis
  REGION 1..187: note = tr|A0A480B8V7|A0A480B8V7_9FIRM GTP cyclohydrolase 1; OS = Veillonella tobetsuensis OX=1110546 GN=folE_1 PE=3 SV=1
MDTNRIESLVYQLLEALGENPNREGLVETPKRVAQMMEEMFEGIQYTNADIADMFGKTFEVDTNQMVVVKDITCFSHCEHHMALMYDMNISIGYIPRGRVIGLSKMPRIAEMCCKRLQLQEKIGEDIAEVISIATGTDDVIVHITSSHSCVSARGVKSTNSKTTTLATKGIFEQDDMINRFLTLKNA

SEQ ID NO: 16306 - protein, 188 aa, unidentified
  source 1..188: note = Veillonellaceae bacterium
  REGION 1..188: note = tr|A0A134CB19|A0A134CB19_9FIRM GTP cyclohydrolase 1; OS = Veillonellaceae bacterium DNF00626 OX=1588754 GN=folE; PE = 3 SV=1
MDIKKLEEAGRLILEAIGEDPLREGLVETPGRFASMMAEQMAYTEKSNEDIAKEFDKTFVSPGSDVVIVKDISLFSHCEHHLALMYHMTASIGYIPKGRVIGLSKVARIAEAVSKRLQIQERIGSDIRDIMERITGAEDIIVYIEGEHSCMTARGIKKPGSVTQTLSSSGRYRTDPVLRQEFLQTIGL

SEQ ID NO: 16307 - protein, 186 aa, unidentified
  source 1..186: note = Veillonellaceae bacterium
  REGION 1..186: note = tr|A0A316LDX3|A0A316LDX3_9FIRM GTP cyclohydrolase 1; OS = Veillonellaceae bacterium OX=2049049 GN=folE PE=3 SV=1
MADRKKLEQAARLILEAIGEDPNREGLLETPRRFAEMMEEQMAYTTVSNEEIARQFGKTFTSSEEGPVVVKDISIFSHCEHHLALMYHMHVSVGYIPSGRVIGLSKVARIADAVSRRLQIQERIGADIRTIIEKVTGSQDVIVRIDGEHSCMTARGIKKPGAVTTTISSSGKFNTPEYRQLFKEML

SEQ ID NO: 16308 - protein, 181 aa, unidentified
  source 1..181: note = Ventosimonas gracilis
  REGION 1..181: note = tr|A0A139SHD3|A0A139SHD3_9GAMM GTP cyclohydrolase 1; OS = Ventosimonas gracilis OX=1680762 GN=folE PE=3 SV=1
MNLQSHYHGILEALGEDPCREGLADTPKRAAKAMQYLCRGYQQTLEEVTNGALFATSSSEMVLVKNIELYSLCEHHLLPFIGKAHVAYLPNGKVLGLSKVARIVDMYARRLQIQENLSRQIAEAVQQVTNAFGVAVVIEAQHMCMMMRGVEKQNSSMVTSVMLGQFRKNAATRSEFLSLLD

SEQ ID NO: 16309 - protein, 267 aa, Verminephrobacter eiseniae
  REGION 1..267: note = tr|A1WHI9|A1WHI9_VEREI GTP cyclohydrolase; OS = Verminephrobacter eiseniae (strain EF01-2) OX=391735; GN = Veis_1329 PE=4 SV=1
MTYDWLAPGAKTIAPVRGPFTGTMRAMSSPPAGAMAPLPPDPGSPVSVKIRERLVAARKRFHANDNIAQFIEPGELAQLLDEVEVKIEGMLDSLVIDTEDDHNTRHTARRMAKMYLNEVFKGRYVPAPPITEFPNVERLNELMIVGPLTVRSACSHHFCPVVGRIWIGVLPSEHTNVIGLSKYARLVDWIMGRPQIQEEAVVQLADLIMEKTQPDGLAIMMEASHFCMSWRGVREMDSKMINSVMRGVFLKDSALRREFLALLPGRN

SEQ ID NO: 16310 - protein, 173 aa, unidentified
  source 1..173: note = Verrucomicrobia bacterium
  REGION 1..173: note = tr|A0A1Q6V6I5|A0A1Q6V6I5_9BACT GTP cyclohydrolase 1; OS = Verrucomicrobia bacterium 13_2_20CM_55_10 OX=1805420; GN = folE PE=3 SV=1
MLDGIGEDLDREGLRRTPDRAARALEFLTQGYRQDLDEIINDAVFESDASEIILVKDIELYSLCEHHLLPFIGRAHVAYIPNGKVIGLSKVARIVDVFARRLQIQENLTTRIAESLMTCLEPSGVAVVVEAKHLCMMMRGVEKQNSIMKTSCLLGVFKEDARTRSEFLSLLKD

SEQ ID NO: 16311 - protein, 209 aa, unidentified
  source 1..209: note = Verrucomicrobia bacterium
  REGION 1..209: note = tr|A0A2V5RJB5|A0A2V5RJB5_9BACT GTP cyclohydrolase 1; OS = Verrucomicrobia bacterium OX=2026799 GN=folE PE=3 SV=1
MIQRGNSNFDLEERFTRDRNRLGEKDLDRIAKAYRELLHGVGEDLDREGLRRTPDRAARALEFLTQGYRQDLDEIINDAVFESDASEIILVKDIELYSLCEHHLLPFIGRAHVAYIPNGKVIGLSKVARIVDVFARRLQIQENLTTQIAESLMGCLEPAGVAVVVEAKHLCMMMRGVEKQNSVMKTSCLLGVFKEDARTRSEFLSLLKD

SEQ ID NO: 16312 - protein, 279 aa, unidentified
  source 1..279: note = Verrucomicrobia subdivision
  REGION 1..279: note = tr|A0A5C9DUD9|A0A5C9DUD9_9BACT GTP cyclohydrolase FolE2 OS=Verrucomicrobia subdivision 3 bacterium; OX = 2052186 GN=folE2 PE=3 SV=1
MIRASDSAAGTTVAKQSDPPAKAPLHDVQSGRDHRELRIDKVGVRGLRFPIQIRDKAHSHQNTIATIAMCVDLPKEFKGTHMSRFIEVLNAHGSVVHVENIEDILHAMQAKLHAATAHLEMEFPFFLTKKAPVTGMEGVMDYTARFAATACGKEIDFVLTVIVGVTTLCPCSKAISQYGAHNQRGNVTVSIRSDEVVWIEDLIALVEASASSELYSLLKRQDEKAVTERAYENPVFVEDLVRNVALKLNAHDDVTWYRVEAENFESIHNHNAYACIEKG

SEQ ID NO: 16313 - protein, 268 aa, unidentified
  source 1..268: note = Verrucomicrobia subdivision
  REGION 1..268: note = tr|A0A520RJL7|A0A520RJL7_9BACT GTP cyclohydrolase FolE2 OS=Verrucomicrobia subdivision 3 bacterium; OX = 2052186 GN=folE2 PE=3 SV=1
MPKSGALVDTQNQKDERCIPIDKVGVRGLRFPIQVRDRARHHQDTIASVGMYVDLPHEFKGTHMSRFVEVLSSHGNLVHVEIIPQILQEMQSKLHAKNAHLEMEFPYFLEKTAPVTRKKSLMDYTVSFDASADGDDLDFVLKVVVPVTTLCPCSKAISRYGAHNQRGEVTVAVRFNDIVWIEDLIEQVESSASSELYALLKRPDEKAVTEAAYENPVFVEDLVRNVVMRLKAMPQVTWYRVEAENFESIHNHNAYASIEAHSDSMDFV

SEQ ID NO: 16314 - protein, 261 aa, unidentified
  source 1..261: note = Verrucomicrobiaceae bacterium
  REGION 1..261: note = tr|A0A4Q2XZU6|A0A4Q2XZU6_9BACT GTP cyclohydrolase FolE2 OS=Verrucomicrobiaceae bacterium OX=2026800 GN=folE2; PE = 3 SV=1
MSELTDTQNEIDDRLIPIDRVGIKGLRFPVEVREKDGGTQRTVATAALTVDLAAHLKGTHMSRFVEALHEHGTLLDVATVEDLPRNLLDRLFARRAHVEFQFPFFISKAAPVTGKPGLVDYEVKFTVEVDVDNGCDFILTVIVPVATLCPCSKAISERGAHNQRGTITYSVRSSAPLAIEELIRIAEESASCELYSMLKRPDEKAVTERAYDNPVFVEDVVRNVAKFSDARPEITWYRIEVENFESIHNHSAYAVIEKQVR

SEQ ID NO: 16315 - protein, 278 aa, unidentified
  source 1..278: note = Verrucomicrobiaceae bacterium
  REGION 1..278: note = tr|A0A1Z8ZUT8|A0A1Z8ZUT8_9BACT GTP cyclohydrolase FolE2 OS=Verrucomicrobiaceae bacterium TMED86 OX=1986881; GN = folE2 PE=3 SV=1
MSKTSPTAPQADPQSGEDTRGIPLEQVGISKVSYPVTIRGWQTDSNFQKEVEGLFDLTVSLASENRGIHMSRLIESLHHWQEPLGPSSLQDFLGKLRKQQEAAVASMNCHFTWFVNRPAPESGRPAWLGIPTTWHGTQSDDGGSSGYTLRIPVTTLCPCSKAISEYGAHSQRSWISVKIEWPLSVDIVPPEQIFEKLQHAGSAPIYPLLKRIDERHVTMKAYEQPAFVEDAARRAALSLQEDSRISNFRIEVRNEESIHTHDAVARFTSGEVSEDNFS

SEQ ID NO: 16316 - protein, 260 aa, unidentified
  source 1..260: note = Verrucomicrobiae bacterium
  REGION 1..260: note = tr|A0A2A2PYY4|A0A2A2PYY4_9BACT GTP cyclohydrolase FolE2 OS=Verrucomicrobiae bacterium Tous-C2TDCM OX=1982329; GN = folE2 PE=3 SV=1
METLTDTQNQPDSRNLAIDRVGVKNLRFPLRIRDKANSEQGTVATISMAVDLPKHYKGTHMSRFVEVLNSHGPVLDVHTISGIPAELLERLDAQQAHVEFRFPFFLKKEAPVTKREGMLDYEVIFDVDASRERTDFTVTVLVPVTTLCPCSKAISARGAHNQRGIVTYAVKFSGEPIWIEDLIRLVERCASCELYSVLKRPDEKHVTEQAYDNPVFVEDLVRNVAAASNLQEGIAWYRVEAENFESIHNHNAYAVIEKIP

SEQ ID NO: 16317 - protein, 327 aa, unidentified
  source 1..327: note = Verrucomicrobiae bacterium
  REGION 1..327: note = tr|B5JE74|B5JE74_9BACT GTP cyclohydrolase FolE2; OS = Verrucomicrobiae bacterium DG1235 OX=382464 GN=folE2; PE = 3 SV=1
MSIKNKPKMYLHKTDPAEAAPVERKYDADFKPSEDYRDSMPDIMDAVESEQGAAVPIQQVGVSNFKLPLTFRAADGKLLTLEASVTGSVSLEANLKGINMSRIMRSFYELKEEVFTIDTVHTVLDLFREKVESFDARIIIRFNYPIMQPSLRSGLEGYQYYKCAFEGRLSKSGLFERLIHFDFVYSSSCPCSAELSEHARDLRDAYSIPHSQRSKARVFVKLAAGASLGIEDLQRHLSLALKTETQVMVKREDEQAFAELNGVYIKFVEDAARLVYEQLASDERISDFQVACSHLESLHSHDAVSVICKGVPGGFAADFSDFDSLIC

SEQ ID NO: 16318 - protein, 261 aa, unidentified
  source 1..261: note = Verrucomicrobiales bacterium
  REGION 1..261: note = tr|A0A355S6A1|A0A355S6A1_9BACT GTP cyclohydrolase FolE2 OS=Verrucomicrobiales bacterium OX=2026801 GN=folE2; PE = 3 SV=1
MQELTDTQNERDDRNLPIDRVGIKSLKHPVDVLGRDGELQHTVADVSLAVDLPHEKRGTHMSRFVEALNEHGNYLDVSDPGEVPRQLQKRLEAERAWVTYQFPFFCSKEAPVTGKRSRLSYEVRLEVEAGKAERESLVLTVIVPVTTLCPCSKAISERGAHNQRGIVTFSIRSSKVIWIEDAIEIVEESASSELYSLLKRPDEKAVTERAYDHPVFVEDLVRNVAQRSEKQGSILWYRVEAENFESIHNHSAYAEIENEVG

SEQ ID NO: 16319 - protein, 193 aa, unidentified
  source 1..193: note = Verrucomicrobiales bacterium
  REGION 1..193: note = tr|A0A3B9GAM8|A0A3B9GAM8_9BACT GTP cyclohydrolase 1; OS = Verrucomicrobiales bacterium OX=2026801 GN=folE PE=3; SV = 1
MSDSKDIDFDRIENAVRELLGAIGEDPERDGLLDTPARVARMYGEICSGLREEPADHLEKTFQVEHDEIIVVRDISFYSICEHHLIPFFGKAHVAYLPEKDGRITGLSKLARLVDGFARRPQVQERLTGQIADAIDEKLSPRGAAVVLEAEHLCMSMRGIRKPGARTVTSSMRGIFRSNSASREEVLNLIQRS

SEQ ID NO: 16320 - protein, 285 aa, Verrucomicrobium sp.
  REGION 1..285: note = tr|A0A1H2EY79|A0A1H2EY79_9BACT GTP cyclohydrolase FolE2 OS=Verrucomicrobium sp. GAS474 OX=1882831 GN=folE2; PE = 3 SV=1
MTASAASIPDRQGERDTRNIPIDRVGVKGLRYPIEVKDRAHATQSTVATFAMTVDLPHQFKGTHMSRFVEILNAHGRLIHVENVEKMLRALQKRLHAERAHIEMEFPYFIGKKAPATGAVGLVDYVVKFETTVDGPKRDFVLTVIVPVTTLCPCSKAISAYGAHNQRGYVSLAVRFEKTVWIEELIALIEASASSEIFSLLKRPDEKAVTERAYDNPVFVEDLVRNVALRVNAHPQVTWYKVEAENMESIHNHAAYALIEKRKDAPKRKPAAKKAALKKAAMKRK

SEQ ID NO: 16321 - protein, 155 aa, Verrucosispora maris
  REGION 1..155: note = tr|F4FHW2|F4FHW2_VERMA GTP cyclohydrolase 1; OS = Verrucosispora maris (strain AB-18-032) OX=263358; GN = folE PE=3 SV=1
MARAYAELFAGLRVDPATVLTTTFEANHEELVLVRDIDVMSLCEHHLLPFRGSAHIGYIPGPDGRITGLSKLARLVEVYARRPQVQERLTSQIADLLMDRLAPRGVVVVLECEHMCMAMRGIQKSGAKTITSAVRGTLQRDAKSRAEAMALIHPR

SEQ ID NO: 16322 - protein, 187 aa, Verrucosispora sediminis
  REGION 1..187: note = tr|A0A1I1TE78|A0A1I1TE78_9ACTN GTP cyclohydrolase 1; OS = Verrucosispora sediminis OX=547162 GN=folE PE=3 SV=1
MDLGRIEKAVREILIAVGEDPDRDGLQQTPARVARAYAELFAGLRVDPGTVLTTTFEANHEELVLVRDIDVMSLCEHHLLPFRGSAHIGYIPGPDGRITGLSKLARLVEVFARRPQVQERLTSQIADLLMTRLAPRGVVVVLECEHMCMAMRGIQKSGAKTITSAVRGTLQHDAKSRAEAMALIIPR

SEQ ID NO: 16323 - protein, 205 aa, Verrucosispora sp.
  REGION 1..205: note = tr|A0A4Q9CS55|A0A4Q9CS55_9ACTN GTP cyclohydrolase 1; OS = Verrucosispora sp. SN26_14.1 OX=2527879 GN=folE PE=3; SV = 1
MAARLVNGRLTGRPVEDTMDLGRIEKAVREILIAVGEDPDRDGLQQTPARVARAYAELFAGLRVDPATVLTTTFEANHEELVLVRDIDVMSLCEHHLLPFRGSAHIGYIPGPDGRITGLSKLARLVEVFARRPQVQERLTSQIADLLMERLAPRGVVVVLECEHMCMAMRGIQKSGAKTITSAVRGTLQRDAKSRAEAMALIIPR

SEQ ID NO: 16324 - protein, 234 aa, Verrucosispora sp.
  REGION 1..234: note = tr|A0A2G7DC64|A0A2G7DC64_9ACTN GTP cyclohydrolase 1; OS = Verrucosispora sp. CNZ293 OX=2035249 GN=folE PE=3 SV=1
MSTDDTAASFPQRGLAASATEPDTDGLDYIAARLINGRLTGRPVEDTMDLGRIERAVREILIAVGEDPDRDGLQQTPARVARAYAELFAGLRVDPATVLTTTFEANHEELVLVRDIDVMSLCEHHLLPFRGSAHIGYIPGPDGRITGLSKLARLVEVFARRPQVQERLTSQIADLLMKRLDPRGVVVVLECEHMCMAMRGIQKSGAKTITSAVRGTLQRDAKSRAEAMALIIPR

SEQ ID NO: 16325 - protein, 181 aa, unidentified
  source 1..181: note = Verticiella sediminum
  REGION 1..181: note = tr|A0A556ACL3|A0A556ACL3_9BURK GTP cyclohydrolase 1; OS = Verticiella sediminum OX=1247510 GN=folE PE=3 SV=1
MTLEEHYAAILTELGEDVTREGLARTPHRAAKAMQYLCKGYHEDLETIINGALFTSSTREMVLVKNIELYSLCEHHLLPFIGKAHVAYLPNGKVLGLSKVARIVDMYARRLQIQENLCREIAEAVQQVTDALGVAVVIEAQHMCMMMRGVEKQNSVMVSSMMLGAFHDSPATRSEFLSLIR

SEQ ID NO: 16326 - protein, 267 aa, unidentified
  source 1..267: note = Verticiella sediminum
  REGION 1..267: note = tr|A0A556ACD0|A0A556ACD0_9BURK GTP cyclohydrolase FolE2 OS=Verticiella sediminum OX=1247510 GN=folE2 PE=3; SV = 1
MNSPLDSALAMPDVQSSYDPRQIAIQRVGIRGVRHPFIVAGEDGEAMPTVADWTLTVALPADQKGTHMSRFVALLEKHRRTPADLDGFSAMAAEMLGLLNAQRGELIASFPYFINKTAPISGVQSLLDYAVTWTARATTGGVQREVKVVVPVTSLCPCSKTISQYGAHNQRSHVTVAVVLEEGEAFSMDGLIRAIESEGSCELWGLLKRTDEKFVTEHAYDNPKFVEDLVRDVAARIAIHPGVASYVVEAENFESIHNHSAYAVVEG

SEQ ID NO: 16327 - protein, 264 aa, unidentified
  source 1..264: note = Vesicomyosocius okutanii
  REGION 1..264: note = sp|A5CXA1|GCH4_VESOH GTP cyclohydrolase FolE2; OS = Vesicomyosocius okutanii subsp. Calyptogena okutanii (strain HA) OX=412965 GN=folE2 PE=3 SV=1
MSATHLPDTQNSADTRHIIIDKVGIKDIIHPITYIDCDGNKMPTIGMFTMTVSLPEHVKGTHMSRFIEILNENSCEFSAHNFDQIIDKVKEKLESDTAHITLNFPFFRKKEAPSSGVKSMMDYQVTLYGTLNKGEVQVMIKVVVPVTSLCPCSKSISKYGAHNQRSHITIKAKVSKGRTLHIEDLIDLAERKASCELYALLKRDDEKMVTERAYDNPAFVEDLVRDIAVDLNADDKISYYCLESENFESIHNHSAYALIENLKC

SEQ ID NO: 16328 - protein, 218 aa, unidentified
  source 1..218: note = Vespertiliibacter pulmonis
  REGION 1..218: note = tr|A0A3N4VWU7|A0A3N4VWU7_9PAST GTP cyclohydrolase 1; OS = Vespertiliibacter pulmonis OX=1443036 GN=folE PE=3 SV=1
MNKISPEAQGVRAALLAKGIETPTVEQNKDKALRREEIQQHMRSVLELLGLDLRDDSLEETPKRLAKMYVDEIFSGLDYETFPKITKIQNRMKVSEMVLVDDITLTSTCEHHFVTIDGKVAVAYYPKDWVIGLSKINRVVQFFAQRPQVQERFTEQILTAFQTILETEDVAVYVKATHFCVKCRGVKDTNSQTLTSAFGGVFLQDRETRKEFLSLLSR

SEQ ID NO: 16329 - protein, 218 aa, Vibrio aerogenes
  REGION 1..218: note = tr|A0A1M5ZLG1|A0A1M5ZLG1_9VIBR GTP cyclohydrolase 1; OS = Vibrio aerogenes CECT 7868 OX=1216006 GN=folE PE=3 SV=1
MSGLSEAALLVKNALESRGLETPMCPNTVGRSEKKDKIEYHMREILHLLGLDLTDDSLEETPHRIAKMYVDEVFSGLDYHNFPKITVIENKMNVSEMVRVKDITVTSTCEHHLVTIDGKAAVAYIPRGKIIGLSKINRIVRFFAQRPQVQERMTQQILVALQTLLESDDVAVTMDATHYCVKSRGVMDATSETTTTALGGLFKTNPATRAEFLHGLKS

SEQ ID NO: 16330 - protein, 250 aa, Vibrio aerogenes
  REGION 1..250: note = tr|A0A1M5W338|A0A1M5W338_9VIBR Putative GTP cyclohydrolase 1 type 2 OS=Vibrio aerogenes CECT 7868; OX = 1216006 GN=VA7868_00578 PE=4 SV=1
MNNLTLESILNEKLCPEMVKDYCPNGLQIEGKSEVKRIITGVTASQALIEKAIELEADALLVHHGYFWKGEPESIRGMKGKRIRALIRHDINLYAYHLPLDIHPELGNNARLADLLDIHVEGGLEGHPQSVAMYGHLSQPLKAEVFGQIIERVLDRKPLHISAGDQLIRTVGWCTGGGQDYIELAAAKGLDAFISGEISERTTYSAREQGVHFFSAGHHATERYGVKALGEWLAEHHALDVTFIDIDNPV

SEQ ID NO: 16331 - protein, 217 aa, Vibrio agarivorans
  REGION 1..217: note = tr|A0A2K1CF51|A0A2K1CF51_9VIBR GTP cyclohydrolase 1; OS = Vibrio agarivorans OX=153622 GN=folE PE=3 SV=1
MSGLSQSAKIVKEALELRGLETPMSPNQVSREEKKQKIEYHMREILTLLELDLTDDSLEETPHRIAKMYVDEIFSGLDYANFPKITVIENKMNVSEMVRVRDITVTSTCEHHLVTIDGKTAVAYIPRGKIIGLSKINRIVRFFAQRPQVQERMTQQILVALQTLLESEDVAVTMDATHYCVKSRGVMDATSSTTTTALGGIFKSNPATRAEFLHGLR

SEQ ID NO: 16332 - protein, 217 aa, unidentified
  source 1..217: note = Vibrio alfacsensis
  REGION 1..217: note = tr|A0A347UVE3|A0A347UVE3_9VIBR GTP cyclohydrolase 1; OS = Vibrio alfacsensis OX=1074311 GN=folE PE=3 SV=1
MSDLSESAKLVKEALEQRGLETPMCPNNVSREEKKEKIEYHMREILGLLQLDLTDDSLEETPHRIAKMYVDEIFSGLDYANFPKITVIENKMNVSEMVRVKDITVTSTCEHHLVTIDGKAAVAYIPRGKIIGLSKINRIVRFFAQRPQVQERMTQQILVALQTLLESDDVAVTIDATHYCVKSRGVMDATSETTTTALGGIFKTNPATRAEFLHGLR

SEQ ID NO: 16333 - protein, 217 aa, Vibrio alginolyticus
  REGION 1..217: note = tr|D0X0S6|D0X0S6_VIBAL GTP cyclohydrolase 1; OS = Vibrio alginolyticus 40B OX=674977 GN=folE PE=3 SV=1
MSGLSESAKLVKEALEQRGLETPMRPNNVSREEKKEKIEHHMREILGLLQLDLTDDSLEETPHRIAKMYVDEIFSGLDYSNFPKITVIENKMNVSEMVRVKDITVTSTCEHHLVTIDGKAAVAYIPRGKIIGLSKINRIVRFFAQRPQVQERMTQQILVALQTLLESDDVAVTIDATHYCVKSRGVMDATSETTTTALGGIFKSNPATRAEFLHGLR

SEQ ID NO: 16334 - protein, 217 aa, Vibrio alginolyticus
  REGION 1..217: note = tr|A0A0L7YNR2|A0A0L7YNR2_VIBAL GTP cyclohydrolase 1; OS = Vibrio alginolyticus OX=663 GN=folE PE=3 SV=1
MLGLSESAKLVKDALESRGLETPMCPNAVTREEKKEKIEHHMREILTLLGLDLTDDSLEETPHRIAKMYVDEVFSGLDYQNFPKITVIENKMNVSEMVRVKDITVTSTCEHHLVTIDGKAAVAYIPRGKIIGLSKINRIVRFFAQRPQVQERMTQQILVALQTLLESDDVAVTIDATHYCVKSRGVMDATSETTTTALGGIFKSNPATRAEFLHGLR

SEQ ID NO: 16335 - protein, 227 aa, unidentified
  source 1..227: note = Vibrio algivorus
  REGION 1..227: note = tr|A0A557PFB7|A0A557PFB7_9VIBR GTP cyclohydrolase 1; OS = Vibrio algivorus OX=1667024 GN=folE PE=3 SV=1
MANLETHAVANSELSEAALLVQNALAKRGIETPMYPNDVSREEKKERIEYHMREILSLLELDLADDSLEETPRRIAKMYVDEVFSGLDYKNFPKITVIENKMSCSEMVRVKDITVTSTCEHHLVTIDGQAAVAYIPRSKIIGLSKINRIVRFFAQRPQVQERMTQQILVALQALLETDDVAITMDATHYCVKSRGVMDATSVTTTTALGGIFKSNPATRAEFLHGLR

SEQ ID NO: 16336 - protein, 217 aa, Vibrio anguillarum
  REGION 1..217: note = tr|A0A191W7W5|A0A191W7W5_VIBAN GTP cyclohydrolase 1; OS = Vibrio anguillarum OX=55601 GN=folE PE=3 SV=1
MLGLSESAKLVKDALESRGLETPMRPNEVTREEKKEKIEHHMREILTLLGLDLTDDSLEETPHRIAKMYVDEVFSGLDYQNFPKITVIENKMNVSEMVRVKEITVTSTCEHHLVTIDGKAAVAYIPRGKIIGLSKINRIVRFFAQRPQVQERMTQQILVALQTLLGSDDVAVTIDATHYCVKSRGVMDATSETTTTALGGIFKSNPATRAEFFHGLH

SEQ ID NO: 16337 - protein, 217 aa, Vibrio anguillarum; identical to SEQ ID NO: 16336
  REGION 1..217: note = tr|F7YRZ1|F7YRZ1_VIBA7 GTP cyclohydrolase 1; OS = Vibrio anguillarum (strain ATCC 68554 / 775) OX=882102; GN = folE PE=3 SV=1

SEQ ID NO: 16338 - protein, 217 aa, unidentified
  source 1..217: note = Vibrio antiquarius
  REGION 1..217: note = tr|A7JYL2|A7JYL2_VIBAE GTP cyclohydrolase 1; OS = Vibrio antiquarius (strain Ex25) OX=150340 GN=folE PE=3; SV = 1
MSGLSESAKLVKEALEQRGLETPMRPNAVSREEKKEKIEYHMREILGLLQLDLTDDSLEETPHRIAKMYVDEIFSGLDYSNFPKITVIENKMNVSEMVRVKDITVTSTCEHHLVTIDGKAAVAYIPRGKIIGLSKINRIVRFFAQRPQVQERMTQQILVALQTLLESDDVAVTIDATHYCVKSRGVMDATSETTTTALGGIFKSNPATRAEFLHGLR

SEQ ID NO: 16339 - protein, 212 aa, Vibrio atlanticus
  REGION 1..212: note = tr|A0A1C3IMY7|A0A1C3IMY7_9VIBR GTP cyclohydrolase 1; OS = Vibrio atlanticus OX=693153 GN=folE_1 PE=3 SV=1
MLNTEAEKVREALLARGLETPMTPSEMNPNQKYNRIKGLLTEVVSTLGLDLTDDSLAETPHRIAKMYVHEIFSGLDYDNFPKISVIENKMSVDEMVKVSDIDLTSTCEHHFITIDGLAEVAYIPENKILGLSKINRIVRFFAQRPQVQERLTQQILVAIQTLVETENVAVTIKATHYCVKSRGVMDANSETSTTALGGIFKTNPQTRAEFLR

SEQ ID NO: 16340 - protein, 217 aa, Vibrio atlanticus
  REGION 1..217: note = tr|A0A1C3J0F8|A0A1C3J0F8_9VIBR GTP cyclohydrolase 1; OS = Vibrio atlanticus OX=693153 GN=folE_2 PE=3 SV=1
MSGLSESAKLVKDALASRGLETPMRPNQVSREEKKERIEHHMREILTLLELDLADDSLEETPQRIAKMYVDEIFSGLDYANFPKITVIENKMGVREMVRVKDITVTSTCEHHLVTIDGKTAVAYIPQGKIIGLSKINRIVRFFAQRPQVQERMTQQILVALQTLLETDDVAVTMDAVHYCVKSRGVMDATSETTTTALGGIFRSNPATRHEFLHGLR

SEQ ID NO: 16341 - protein, 223 aa, Vibrio azureus
  REGION 1..223: note = tr|U3AW66|U3AW66_9VIBR GTP cyclohydrolase 1; OS = Vibrio azureus NBRC 104587 OX=1219077 GN=folE PE=3 SV=1
MSGLSQSTKLSESARIVKEALESRGLETPMNPNQFSREEKKQKIEHHMREILTLLELDLTDDSLEETPHRIAKMYVDEIFSGLDYANFPKITVIENKMNVSEMVRVKDITVTSTCEHHLVTIDGKTAVAYIPRGKIIGLSKINRIVRFFAQRPQVQERMTQQILVALQTLLESEDVAVTMDATHYCVKSRGVMDATSSTTTTALGGLFKSNPATRAEFLHGLR

SEQ ID NO: 16342 - protein, 217 aa, unidentified
  source 1..217: note = Vibrio barjaei
  REGION 1..217: note = tr|A0A1J4QTZ1|A0A1J4QTZ1_9VIBR GTP cyclohydrolase 1; OS = Vibrio barjaei OX=1676683 GN=folE PE=3 SV=1
MSGLSESAKMVKAALSERGLETPMLPNEVSREEKKERIEHHMREILTLLQLDLQDDSLMETPHRIAKMYVDEIFSGLDYENFPKITVIENKMDVSEMVRVKDITVTSTCEHHLVTIDGKAAVAYIPRGKIIGLSKINRIVRFFAQRPQVQERMTQQILVALQALLETDDVAVTIDAVHYCVKSRGVMDATSETTTTALGGIFKSKPATRHEFLHGLR

SEQ ID NO: 16343 - protein, 217 aa, unidentified
  source 1..217: note = Vibrio bivalvicida
  REGION 1..217: note = tr|A0A177Y4C1|A0A177Y4C1_9VIBR GTP cyclohydrolase 1; OS = Vibrio bivalvicida OX=1276888 GN=folE PE=3 SV=1
MSGLSESAKLVKDALEQRGLETPMAPNQFSREEKKEKIQHHMREILSLLELDLTDDSLEETPHRIAKMYVDEIFSGLDYSNFPKITVIENKMNVSEMVRVKDITVTSTCEHHLVTIDGRAAVAYIPRGKIIGLSKINRIVRFFAQRPQVQERMTQQILVALQTLLESDDVAVTIDATHYCVKSRGVMDATSETTTTALGGIFKSIPATRHEFLHGIR

SEQ ID NO: 16344 - protein, 217 aa, Vibrio brasiliensis
  REGION 1..217: note = tr|E8LWE4|E8LWE4_9VIBR GTP cyclohydrolase 1; OS = Vibrio brasiliensis LMG 20546 OX=945543 GN=folE PE=3; SV = 1
MSGLSESAKLVKDALEQRGLETPMAPNSFSREEKKEKIQHHMREILSLLELDLTDDSLEETPHRIAKMYVDEIFSGLDYSNFPKITVIENKMNVSEMVRVKDITVTSTCEHHLVTIDGRAAVAYIPRGKIIGLSKINRIVRFFAQRPQVQERMTQQILVALQTLLESDDVAVTIDATHYCVKSRGVMDATSETTTTALGGIFKSNPATRHEFLHGIR

SEQ ID NO: 16345 - protein, 217 aa, Vibrio breoganii
  REGION 1..217: note = tr|A0A193KGD6|A0A193KGD6_9VIBR GTP cyclohydrolase 1; OS = Vibrio breoganii OX=553239 GN=folE PE=3 SV=1
MSGLSESALLVKEALANRGLETPMVASDLTAEDKKQQIEHHMREILGLLQLDLTDDSLQDTPKRIAKMYVDEVFSGLDYARFPKITVIENKMDVSEMVRVKDITLTSTCEHHLVTIDGRAAVAYIPRTKIIGLSKINRIVRFFAQRPQVQERMTQQILIALQTLLESEDVAVTIDATHYCVKSRGVMDATSETTTTALGGIFKSNAATRHEFLHGLR

SEQ ID NO: 16346 - protein, 217 aa, Vibrio campbellii; identical to SEQ ID NO: 16333
  REGION 1..217: note = sp|A7N6L2|GCH1_VIBCB GTP cyclohydrolase 1 OS=Vibrio campbellii (strain ATCC BAA-1116 / BB120) OX=338187; GN = folE PE=3 SV=1

SEQ ID NO: 16347 - protein, 217 aa, Vibrio campbellii; identical to SEQ ID NO: 16333
  REGION 1..217: note = tr|A0A0A3FL89|A0A0A3FL89_9VIBR GTP cyclohydrolase 1; OS = Vibrio campbellii OX=680 GN=folE PE=3 SV=1

SEQ ID NO: 16348 - protein, 217 aa, unidentified
  source 1..217: note = Vibrio caribbeanicus
  REGION 1..217: note = tr|E3BKK0|E3BKK0_9VIBR GTP cyclohydrolase 1; OS = Vibrio caribbeanicus ATCC BAA-2122 OX=796620 GN=folE; PE = 3 SV=1
MSELSESAKLVKAALESRGLETPMLPNQYSREEKKEKIQYHMREILSLLALDLSDDSLEETPQRIAKMYVDEIFSGLDYKNFPKVTMIENKMNVNEMVRVKGITLTSTCEHHLVTIDGMATVAYIPRGKIIGLSKINRIVRFFSQRPQVQERMTQQILVALQTLLETDDVAVTMDATHYCVKSRGVMDATSETTTTALGGIFKSNPATRHEFLHGIR

SEQ ID NO: 16349 - protein, 217 aa, unidentified
  source 1..217: note = Vibrio caribbeanicus
  REGION 1..217: note = tr|A0A0A6QS85|A0A0A6QS85_9VIBR GTP cyclohydrolase 1; OS = Vibrio caribbeanicus OX=701175 GN=folE PE=3 SV=1
MSGLSESAKLVKDALESRGLETPMVPNQFTREEKKQKIEHHMHEILSLLELDLTDDSLEETPRRIAKMYVDEIFSGLDYSNFPKITVIENKMNVSEMVRVKDITVTSTCEHHLVTIDGRAAVAYIPRGKIIGLSKINRIVRFFAQRPQVQERMTQQILVALQTLLESDDVAVTIDATHYCVKSRGVMDATSETTTTALGGIFKSNPATRHEFLHGIR

SEQ ID NO: 16350 - protein, 227 aa, Vibrio casei
  REGION 1..227: note = tr|A0A368LHS7|A0A368LHS7_9VIBR GTP cyclohydrolase 1; OS = Vibrio casei OX=673372 GN=folE PE=3 SV=1
MAKLEIQSQNNPELSESAALVQSALETRGIETPMQPNEITKEEKKERIEHHMREILTLLELDLADDSLEETPRRIAKMYVDEVFSGLDYKNFPKITVIENKMSCSEMVRVKDITLTSTCEHHLVTIDGQAAVAYIPRSKIIGLSKINRIVRFFAQRPQVQERMTQQILVALQTLLESDDVAVTIDATHYCVKSRGVMDATSVTTTTALGGIFKSNPATRAEFLHGLR

SEQ ID NO: 16351 - protein, 217 aa, Vibrio celticus
  REGION 1..217: note = tr|A0A1C3JD50|A0A1C3JD50_9VIBR GTP cyclohydrolase 1; OS = Vibrio celticus OX=446372 GN=folE_2 PE=3 SV=1
MSGLSESAKLVKDALASRGLETPMSPNQVSREEKKERIEHHMREILTLLELDLTDDSLEETPQRIAKMYVDEIFSGLDYANFPKITVIENKMGVREMVRVKDITVTSTCEHHLVTIDGKTAVAYIPRGKIIGLSKINRIVRFFAQRPQVQERMTQQILVALQTLLETDDVAVTMDAVHYCVKSRGVMDATSETTTTALGGIFRSNPATRHEFLHGLR

SEQ ID NO: 16352 - protein, 252 aa, Vibrio celticus
  REGION 1..252: note = tr|A0A1C3JBE2|A0A1C3JBE2_9VIBR Putative GTP cyclohydrolase 1 type 2 OS=Vibrio celticus OX=446372; GN = VCE7224_01224 PE=4 SV=1
MNNLQLEKLLNEKLQPQQIKDYCPNGLQVEGATEVKRIVTGVTASQALIDKAVELNADALLVHHGFFWKGESEAIRGMKGKRIRTLIKNDINLLGYHLPLDIHPELGNNAKLAELLEIEVEGGLEGHPQSVAMFGKLKTPMTGTEFAAKIDKVLNRKPLHIAPENQDKMITTVGWCTGGGQDYIELAASQGIDAFISGEVSERTTYSAREQDIHYFAAGHHATERYGVKALGEWLAREHGLDVEFIDIDNPV

SEQ ID NO: 16353 - protein, 217 aa, Vibrio chagasii
  REGION 1..217: note = tr|A0A2S7VQ53|A0A2S7VQ53_9VIBR GTP cyclohydrolase 1; OS = Vibrio chagasii OX=170679 GN=folE PE=3 SV=1
MSGLSESAKLVKDALASRGLETPMSPNQVSREEKKERIEHHMREILTLLELDLTDDSLEETPHRIAKMYVDEIFSGLDYANFPKITVIENKMGVREMVRVKDITVTSTCEHHLVTIDGKTAVAYIPRGKIIGLSKINRIVRFFAQRPQVQERMTQQILVALQTLLETEDVAVTMDAVHYCVKSRGVMDATSETTTTALGGIFKSNPATRHEFLHGLR

SEQ ID NO: 16354 - protein, 212 aa, Vibrio chagasii
  REGION 1..212: note = tr|A0A2S7VDP1|A0A2S7VDP1_9VIBR GTP cyclohydrolase 1; OS = Vibrio chagasii OX=170679 GN=folE PE=3 SV=1
MLSTEAEQVRTALLARGLETPMTASEMNSDQKYNRIKGLLTEVVSTLGLDLTDDSLAETPHRIAKMYVHEIFSGLDYNNFPKISVIENKMSVDEMVKVSDIDLTSTCEHHFITIDGLAQVAYIPESKILGLSKINRIVRFFAQRPQVQERLTQQVLIAIQTLVETENVAVTIKATHYCVKSRGVMDANSETTTTALGGIFKTNPQTRAEFLR

SEQ ID NO: 16355 - protein, 217 aa, Vibrio cholerae
  REGION 1..217: note = sp|Q9KLX5|GCH1_VIBCH GTP cyclohydrolase 1 OS=Vibrio cholerae serotype O1 (strain ATCC 39315 / El Tor Inaba N16961) OX=243277 GN=folE PE=3 SV=2
MSGLSESAKLVKDALERRGLETPMQPNLATPAEKKEKIEQHMREILNLLGLDLTDDSLEETPQRIAKMYVDEIFSGLDYANFPKITVIENKMKVSEMVKVKDITLTSTCEHHLVTIDGTAAVAYIPRGKIIGLSKINRIVRFFAQRPQVQERMTQQILVALQTLLESDDVAVTIDATHYCVKSRGVMDATSVTTTTALGGIFKSNPATRAEFLHGLR

SEQ ID NO: 16356 - protein, 217 aa, Vibrio cholerae; identical to SEQ ID NO: 16355
  REGION 1..217: note = tr|A0A085SY41|A0A085SY41_VIBCL GTP cyclohydrolase 1; OS = Vibrio cholerae OX=666 GN=folE PE=3 SV=1

SEQ ID NO: 16357 - protein, 217 aa, unidentified
  source 1..217: note = Vibrio cidicii
  REGION 1..217: note = tr|A0A151KSP2|A0A151KSP2_9VIBR GTP cyclohydrolase 1; OS = Vibrio cidicii OX=1763883 GN=folE PE=3 SV=1
MSGLSESAKLVKDALEKRGLETPMVPNQFSREEKKEKIEHHMREILALLELDLTDDSLEETPRRIAKMYVDEVFSGLDYQNFPKITVIENKMNVSEMVRVKDITLTSTCEHHLVTIDGKAAVAYIPRGKIIGLSKINRIVRFFAQRPQVQERMTQQILVALQTLLESDDVAVTIDATHYCVKSRGVMDATSETTTTALGGIFKSNPATRAEFLHGLR

SEQ ID NO: 16358 - protein, 217 aa, Vibrio cincinnatiensis
  REGION 1..217: note = tr|A0A1T4LIP6|A0A1T4LIP6_VIBCI GTP cyclohydrolase 1; OS = Vibrio cincinnatiensis DSM 19608 OX=1123491 GN=folE; PE = 3 SV=1
MSGLSESAQLVKTALESRGQETPMQPNTISREEKKTQIEHHMREILNLLGLDLTDDSLEETPHRIAKMYVDEIFSGLDYKNFPKITVIENKMKVSEMVCVKDITLTSTCEHHLVTIDGKAAVAYIPRGKIIGLSKINRIVRFFAQRPQVQERLTQQILVALQTLLESDDVAVTIDATHYCVKSRGVMDATSMTTTTALGGIFKSNASTRAEFLHSIR

SEQ ID NO: 16359 - protein, 217 aa, Vibrio comitans
  REGION 1..217: note = tr|A0A4Y3IR45|A0A4Y3IR45_9VIBR GTP cyclohydrolase 1; OS = Vibrio comitans NBRC 102076 OX=1219078 GN=folE PE=3 SV=1
MSGLSESALLVKEALANRGLETPMVASDLTAEDKKQQIEYHMREILGLLQLDLTDDSLQDTPKRIAKMYVDEVFSGLDYARFPKITVIENKMDVSEMVRVKDITLTSTCEHHLVTIDGRAAVAYIPRTKIIGLSKINRIVRFFAQRPQVQERMTQQILVALQTLLESEDVAVTIDATHYCVKSRGVMDATSETTTTALGGIFKSNAATRHEFLHGLR

SEQ ID NO: 16360 - protein, 217 aa, Vibrio coralliilyticus
  REGION 1..217: note = tr|A0A0A0T4A3|A0A0A0T4A3_9VIBR GTP cyclohydrolase 1; OS = Vibrio coralliilyticus OX=190893 GN=folE PE=3 SV=1
MSGLSESAKLVKDALESRGLETPMSPNQISREEKKEKIQHHMREILSLLELDLTDDSLEETPHRIAKMYVDEIFSGLDYANFPKITVIENKMDVSEMVRVKGITLTSTCEHHLVTIDGRATVAYIPRGKIIGLSKINRIVRFFAQRPQVQERMTQQILVALQTLLESDDVAVTIDATHYCVKSRGVMDATSETTTTALGGIFKSNPATRHEFLHGIR

SEQ ID NO: 16361 - protein, 212 aa, Vibrio coralliilyticus
  REGION 1..212: note = tr|A0A1V0I9B5|A0A1V0I9B5_9VIBR GTP cyclohydrolase 1; OS = Vibrio coralliilyticus OX=190893 GN=folE PE=3 SV=1
MISPEAQKVQEALIARGLETPLVPSEMTADEKYQRIRGLLTEVISTLGLDLTDDSLAETPHRISKMYVHEIFSGLEYQNFPKISVIENKMAVDEMVKVSDVNITSTCEHHFITIDGLAQVAYIPSNKIIGLSKINRIVRFFAQRPQVQERLTQQILVAIQTLTETENVAVSIKATHYCVKSRGVMDTSSETSTTALGGIFKTNPQTRAEFLG

SEQ ID NO: 16362 - protein, 217 aa, Vibrio crassostreae
  REGION 1..217: note = tr|A0A4R3PCX5|A0A4R3PCX5_9VIBR GTP cyclohydrolase 1; OS = Vibrio crassostreae OX=246167 GN=folE PE=3 SV=1
MSGLSESAKLVKDALASRGLETPMRPNQVSREEKKERIEHHMREILTLLELDLTDDSLEETPQRIAKMYVDEIFSGLDYANFPKITVIENKMGVREMVRVKDITVTSTCEHHLVTIDGKTAVAYIPRGKIIGLSKINRIVRFFAQRPQVQERMTQQILVALQTLLETDDVAVTMDAVHYCVKSRGVMDATSETTTTALGGIFRSNPATRHEFLHGLR

SEQ ID NO: 16363 - protein, 212 aa, Vibrio crassostreae
  REGION 1..212: note = tr|A0A4R2FPL0|A0A4R2FPL0_9VIBR GTP cyclohydrolase 1; OS = Vibrio crassostreae OX=246167 GN=folE PE=3 SV=1
MLNTEAEKVREALLEKGLETPMTPSEMNPNQKYNRIKGLLTEVVSTLGLDLTDDSLAETPHRIAKMYVHEIFSGLDYDNFPKISVIENKMSVDEMVKVSNIDLTSTCEHHFITIDGLAEVAYIPETKILGLSKINRIVRFFAQRPQVQERLTQQILVAIQTLVETENVAVTIKATHYCVKSRGVMDANSETSTTALGGIFKTNPQTRAEFLR

SEQ ID NO: 16364 - protein, 217 aa, Vibrio diabolicus; identical to SEQ ID NO: 16338
  REGION 1..217: note = tr|A0A0T7DYN3|A0A0T7DYN3_9VIBR GTP cyclohydrolase 1; OS = Vibrio diabolicus OX=50719 GN=folE PE=3 SV=1

SEQ ID NO: 16365 - protein, 218 aa, Vibrio diazotrophicus
  REGION 1..218: note = tr|A0A2J8HJ92|A0A2J8HJ92_VIBDI GTP cyclohydrolase 1; OS = Vibrio diazotrophicus OX=685 GN=folE PE=3 SV=1
MSSGLSESAKLVKDALERRGLETPMQPNTVSREEKKEKIESHMREILNLLGLDLTDDSLEETPHRIAKMYVDEIFSGLDYSNFPKITVIENKMNVSEMVKVKDITVTSTCEHHLVTIDGKAAVAYIPRGKIIGLSKINRIVRFFAQRPQVQERMTQQILVALQALLESDDVAVTIDATHYCVKSRGVMDATSVTTTTALGGIFKSNPATRAEFLHGLR

SEQ ID NO: 16366 - protein, 218 aa, Vibrio diazotrophicus
  REGION 1..218: note = tr|A0A2J8GJY3|A0A2J8GJY3_VIBDI GTP cyclohydrolase 1; OS = Vibrio diazotrophicus OX=685 GN=folE PE=3 SV=1
MSSGLSESAKLVKDALERRGLETPMQPNTVSREEKKEKIENHMREILNLLGLDLTDDSLEETPHRIAKMYVDEIFSGLDYSNFPKITVIENKMKVSEMVKVKDITVTSTCEHHLVTIDGKAAVAYIPRGKIIGLSKINRIVRFFAQRPQVQERMTQQILVALQALLESDDVAVTIDATHYCVKSRGVMDATSVTTTTALGGIFKSNPATRAEFLHGLR

SEQ ID NO: 16367 - protein, 217 aa, unidentified
  source 1..217: note = Vibrio europaeus
  REGION 1..217: note = tr|A0A178J8K7|A0A178J8K7_9VIBR GTP cyclohydrolase 1; OS = Vibrio europaeus OX=300876 GN=folE PE=3 SV=1
MSGLSESAKLVKDALERRGLETPMAPNQFNREEKKEKIQHHMREILSLLELDLTDDSLEETPHRIAKMYVDEIFSGLDYSNFPKITVIENKMDVSEMVRVKDITVTSTCEHHLVTIDGRAAVAYIPRGKIIGLSKINRIVRFFAQRPQVQERMTQQILVALQTLLESDDVAVTIDATHYCVKSRGVMDATSETTTTALGGIFKSNSATRHEFLHGIR

SEQ ID NO: 16368 - protein, 217 aa, Vibrio ezurae
  REGION 1..217: note = tr|U3B379|U3B379_9VIBR GTP cyclohydrolase 1; OS = Vibrio ezurae NBRC 102218 OX=1219080 GN=folE PE=3 SV=1
MSALSESALLVKQALADRGLETPMVANELTAEDKKRKIEHHMREVLEILQLDLTDDSLQDTPKRIAKMYVDEVFSGLDYARFPKITVIENKMDVSEMVRVKDITLTSTCEHHLVTIDGRVTVAYIPRTKIIGLSKINRIVRFFAQRPQVQERMTQQILVAMQTLLESDDVAVKIDATHYCVKSRGVMDATSETTTTALGGIFKSNPATRHEFLHGLS

SEQ ID NO: 16369 - protein, 217 aa, Vibrio fluvialis
  REGION 1..217: note = tr|A0A1L9KXS7|A0A1L9KXS7_VIBFL GTP cyclohydrolase 1; OS = Vibrio fluvialis OX=676 GN=folE PE=3 SV=1
MSGLSESAQLVKQALEKRGLETPMVPNQFSREEKKEKIEHHMREILSLLELDLTDDSLEETPRRIAKMYVDEVFSGLDYQNFPKITVIENKMNVSEMVRVKDITLTSTCEHHLVTIDGKAAVAYIPRGKIIGLSKINRIVRFFAQRPQVQERMTQQILVALQTLLESDDVAVTIDATHYCVKSRGVMDATSETTTTALGGIFKSNPATRAEFLHGLR

SEQ ID NO: 16370 - protein, 217 aa, Vibrio fluvialis
  REGION 1..217: note = tr|S7I8H3|S7I8H3_VIBFL GTP cyclohydrolase 1; OS = Vibrio fluvialis PG41 OX=1336752 GN=folE PE=3 SV=1
MSGLSESAKLVKDALERRGLETPMQPNTISRDEKKERIEHHMREILTLLGLDLTDDSLEETPHRISKMYVDEIFSGLDYQNFPKITVIENKMNVSEMVRVKDITVTSTCEHHLVTIDGKAAVAYIPRGKIIGLSKINRIVRFFAQRPQVQERMTQQILVALQTLLESEDVAVTIDATHYCVKSRGVMDATSETTTTALGGIFKSNPATRAEFLHGLR

SEQ ID NO: 16371 - protein, 217 aa, Vibrio fortis
  REGION 1..217: note = tr|A0A066UTC0|A0A066UTC0_9VIBR GTP cyclohydrolase 1; OS = Vibrio fortis OX=212667 GN=folE PE=3 SV=1
MSGLSESAKLVKDALASRGLETPMSPNQVSREEKKERIEHHMREILTLLELDLTDDSLEETPHRIAKMYVDEIFSGLDYANFPKITVIENKMGVREMVRVKDITVTSTCEHHLVTIDGKTAVAYIPRGKIIGLSKINRIVRFFAQRPQVQERMTQQILVALQILLETDDVAVTMDAVHYCVKSRGVMDATSETTTTALGGIFKSNPATRHEFLHGLR

SEQ ID NO: 16372 - protein, 212 aa, Vibrio fortis
  REGION 1..212: note = tr|A0A066UN67|A0A066UN67_9VIBR GTP cyclohydrolase 1; OS = Vibrio fortis OX=212667 GN=folE PE=3 SV=1
MLSTEAEKVREALLAKGLETPMTPSEMNSDQKYNRIKGLLTEVVSTLGLNLTDDSLAETPHRIAKMYVHEIFSGLDYNNFPKISMIDNKMSVDEMVKVSDIDLTSTCEHHFITIDGMAQVAYIPESKILGLSKINRIVRFFAQRPQVQERLTQQILVAIQALVETENVAVTIKATHYCVKSRGVMDANSETTTTALGGIFKTNPQTRAEFLR

SEQ ID NO: 16373 - protein, 217 aa, Vibrio furnissii
  REGION 1..217: note = tr|A0A0Q2MIH0|A0A0Q2MIH0_VIBFU GTP cyclohydrolase 1; OS = Vibrio furnissii OX=29494 GN=folE PE=3 SV=1
MSGLSESAKLVKDALERRGLETPMQPNTISRDEKKERIEHHMREILTLLGLDLTDDSLEETPHRISKMYVDEIFSGLDYHNFPKITVIENKMNVSEMVRVKDITVTSTCEHHLVTIDGKAAVAYIPRGKIIGLSKINRIVRFFAQRPQVQERMTQQILVALQTLLESEDVAVTIDATHYCVKSRGVMDATSETTTTALGGIFKSNPATRAEFLHGLR

SEQ ID NO: 16374 - protein, 214 aa, Vibrio furnissii
  REGION 1..214: note = tr|F0M0L7|F0M0L7_VIBFN GTP cyclohydrolase 1; OS = Vibrio furnissii (strain DSM 14383 / NCTC 11218 / VL 6966) OX=903510 GN=folE PE=3 SV=1
MSESAKLVKDALERRGLETPMQPNTISRDEKKERIEHHMREILTLLGLDLTDDSLEETPHRISKMYVDEIFSGLDYHNFPKITVIENKMNVSEMVRVKDITVTSTCEHHLVTIDGKAAVAYIPRGKIIGLSKINRIVRFFAQRPQVQERMTQQILVALQTLLESEDVAVTIDATHYCVKSRGVMDATSETTTTALGGIFKSNPATRAEFLHGLR

SEQ ID NO: 16375 - protein, 217 aa, unidentified
  source 1..217: note = Vibrio galatheae
  REGION 1..217: note = tr|A0A0F4NLT5|A0A0F4NLT5_9VIBR GTP cyclohydrolase 1; OS = Vibrio galatheae OX=579748 GN=folE PE=3 SV=1
MSGLSESAKLVKDALERRGLETPMAPNPFSREEKKEKIQHHMREILSLLELDLTDDSLEETPHRIAKMYVDEIFSGLDYSNFPKITVIENKMNVSEMVRVKDITVTSTCEHHLVTIDGRAAVAYIPRGKIIGLSKINRIVRFFAQRPQVQERMTQQILVALQTLLESDDVAVTIDATHYCVKSRGVMDATSETTTTALGGIFKSNPATRHEFLHGIR

SEQ ID NO: 16376 - protein, 218 aa, Vibrio gazogenes
  REGION 1..218: note = tr|A0A1Z2SK62|A0A1Z2SK62_VIBGA GTP cyclohydrolase 1; OS = Vibrio gazogenes OX=687 GN=folE PE=3 SV=1
MSGLSESALLVKNALENRGLETPMRPNPIGREEKKEKIEYHMREILNLLGLDLTDDSLEETPHRIAKMYVDEVFSGLDYHNFPKITLIENKMKVSEMVRVKDITVTSTCEHHLVTIDGKAAVAYIPRGKIIGLSKINRIVRFFSQRPQVQERMTQQILVALQALLETDDVAVTIDATHYCVKARGVMDATSETTTTALGGLFKSNPATRSEFLHGLLG

SEQ ID NO: 16377 - protein, 218 aa, Vibrio gazogenes
  REGION 1..218: note = tr|A0A1M5C851|A0A1M5C851_VIBGA GTP cyclohydrolase 1; OS = Vibrio gazogenes DSM 21264 = NBRC 103151 OX=1123492; GN = folE PE=3 SV=1
MSGLSESALLVKNALENRGLETPMRPNPIGREEKKEKIEYHMREILNLLGLDLTDDSLEETPHRIAKMYVDEVFSGLDYHNFPKITLIENKMKVSEMVRVKDITVTSTCEHHLVTIDGKAAVAYIPRGKIIGLSKINRIVRFFSQRPQVQERMTQQILVALQALLETDDVAVTIDATHYCVKARGVMDATSETTTTALGGLFKSNPSTRSEFLHGLLG

SEQ ID NO: 16378 - protein, 217 aa, unidentified
  source 1..217: note = Vibrio genomosp.
  REGION 1..217: note = tr|A0A1E5CLY4|A0A1E5CLY4_9VIBR GTP cyclohydrolase 1; OS = Vibrio genomosp. F6 str. FF-238 OX=1191298 GN=folE PE=3; SV = 1
MSGLSESALLVKDALSSRGLETPMRPNDVSREEKKEKIEHHMREILSLLELDLTDDSLEETPQRIAKMYVDEVFSGLDYTNFPKITVIENKMNVSEMVRVKDITVTSTCEHHLVTIDGKAAVAYIPRGKIIGLSKINRIVRFFAQRPQVQERMTQQILVALQTLLETEDVAVTMDAVHYCVKSRGVMDATSETTTTALGGIFKSNPATRHEFLSGLR

SEQ ID NO: 16379 - protein, 217 aa, unidentified; identical to SEQ ID NO: 16378
  source 1..217: note = Vibrio genomosp.
  REGION 1..217: note = tr|A0A4U1YLC3|A0A4U1YLC3_9VIBR GTP cyclohydrolase 1; OS = Vibrio genomosp. F6 OX=723172 GN=folE PE=3 SV=1

SEQ ID NO: 16380 - protein, 217 aa, Vibrio halioticoli
  REGION 1..217: note = tr|V5F0H9|V5F0H9_9VIBR GTP cyclohydrolase 1; OS = Vibrio halioticoli NBRC 102217 OX=1219072 GN=folE PE=3; SV = 1
MSALSESALLVKQALADRGLETPMVANELTAEDKKRKIEHHMREVLEILQLDLTDDSLQDTPKRIAKMYVDEVFSGLDYARFPKITVIENKMDVSEMVRVKDITLTSTCEHHLVTIDGRVAVAYIPRTKIIGLSKINRIVRFFAQRPQVQERMTQQILVALQTLLESDDVAVKIDATHYCVKSRGVMDATSETTTTALGGIFKSNPATRHEFLHGLS

SEQ ID NO: 16381 - protein, 217 aa, Vibrio hangzhouensis
  REGION 1..217: note = tr|A0A1H6C7D7|A0A1H6C7D7_9VIBR GTP cyclohydrolase 1; OS = Vibrio hangzhouensis OX=462991 GN=folE PE=3 SV=1
MSGLSESAKLVKAALAERGLETPMLPNQVSREEKKERIEHHMREILSLLQLDLADDSLMETPHRIAKMYVDEIFSGLDYENFPKITVIENKMNVSEMVRVKDITVTSTCEHHLVTIDGKAAVAYIPRGKIIGLSKINRIVRFFAQRPQVQERMTQQILVALQTLLESEDVAVTMDAVHYCVKSRGVMDATSETTTTALGGIFKSNPATRHEFLHGLR

SEQ ID NO: 16382 - protein, 217 aa, Vibrio harveyi
  REGION 1..217: note = tr|A0A1E3EAW7|A0A1E3EAW7_VIBHA GTP cyclohydrolase 1; OS = Vibrio harveyi OX=669 GN=folE PE=3 SV=1
MSGLSESAKLVKEALEQRGLETPMRPNNVSREEKKEKIEHHMREILSLLQLDLTDDSLEETPHRIAKMYVDEIFSGLDYANFPKITVIENKMNVSEMVRVKDITVTSTCEHHLVTIDGKAAVAYIPRGKIIGLSKINRIVRFFAQRPQVQERMTQQILVALQTLLGSDDVAVTIDATHYCVKSRGVMDATSETTTTALGGIFKSNPATRAEFLHGLR

SEQ ID NO: 16383 - protein, 217 aa, Vibrio harveyi; identical to SEQ ID NO: 16333
  REGION 1..217: note = tr|A0A0D0J8D9|A0A0D0J8D9_VIBHA GTP cyclohydrolase 1; OS = Vibrio harveyi OX=669 GN=folE PE=3 SV=1

SEQ ID NO: 16384 - protein, 217 aa, Vibrio hepatarius
  REGION 1..217: note = tr|A0A0M0I4U8|A0A0M0I4U8_9VIBR GTP cyclohydrolase 1; OS = Vibrio hepatarius OX=171383 GN=folE PE=3 SV=1
MSGLSESAKLVKDALERRGLETPMVPNQFSREVKKEKIQHHMREILSLLELDLSDDSLEETPHRIAKMYVDEIFSGLDYSNFPKITVIENKMDVSEMVRVKDITVTSTCEHHLVTIDGRAAVAYIPRGKIIGLSKINRIVRFFAQRPQVQERMTQQILVALQTLLESDDVAVTIDATHYCVKSRGVMDATSETTTTALGGIFKSNPATRHEFLHGIR

SEQ ID NO: 16385 - protein, 217 aa, Vibrio ichthyoenteri
  REGION 1..217: note = tr|F9S673|F9S673_9VIBR GTP cyclohydrolase 1; OS = Vibrio ichthyoenteri ATCC 700023 OX=870968 GN=folE PE=3; SV = 1
MSGLSESALLVKDALESRGLETPMVPSQFSREEKKEKIQHHMREILSLLDLDLTDDSLEETPHRIAKMYVDEIFSGLDYQNFPKITVIENKMNVSEMVRVKDITLTSTCEHHLVTIDGKAAVAYIPRGKIIGLSKINRIVRFFAQRPQVQERLTQQILVALQTLLESDDVAVTIDATHYCVKSRGVMDATSQTTTTALGGIFKSIPATRAEFLHGLR

SEQ ID NO: 16386 - protein, 217 aa, Vibrio inusitatus
  REGION 1..217: note = tr|A0A4Y3I1B6|A0A4Y3I1B6_9VIBR GTP cyclohydrolase 1; OS = Vibrio inusitatus NBRC 102082 OX=1219070 GN=folE PE=3; SV = 1
MSGLSESALLVKEALANRGLETPMIDSDLTAEDKKQQIEYHMREILGLLQLDLTDDSLQDTPKRIAKMYVDEVFSGLDYARFPKITVIENKMNVSEMVRVKDITLTSTCEHHLVTIDGRAAVAYIPRTKIIGLSKINRIVRFFAQRPQVQERMTQQILVALQTLLESEDVAVTIDATHYCVKSRGVMDATSETTTTALGGIFKSNAATRHEFLHGLR

SEQ ID NO: 16387 - protein, 65 aa, unidentified
  source 1..65: note = Vibrio ishigakensis
  REGION 1..65: note = tr|A0A0B8NXT2|A0A0B8NXT2_9VIBR GTP cyclohydrolase I type 1 OS=Vibrio ishigakensis OX=1481914 GN=JCM19231_5025; PE = 4 SV=1
MTQQILVALQTLLGSDDVAVTIDATHYCVKSRGVMDATSETTTTALGGIFKSNAATRHEFLHGLR

SEQ ID NO: 16388 - protein, 212 aa, unidentified
  source 1..212: note = Vibrio ishigakensis
  REGION 1..212: note = tr|A0A0B8NMM5|A0A0B8NMM5_9VIBR GTP cyclohydrolase 1; OS = Vibrio ishigakensis OX=1481914 GN=folE PE=3 SV=1
MLSKEAEIVKEALLAKGLETPMTPSEMNSDQKYNRIKGLLTEVVSTLGLDLTDDSLAETPHRIAKMYVHEIFSGLDYANFPKISVIDNKMSVDEMVKVSEIDLTSTCEHHFITIDGLAQVAYIPESKILGLSKINRIVRFFAQRPQVQERLTQQILVAIQALVETENVAVTITATHYCVKSRGVMDANSETTTTALGGIFKTNPQTRAEFLR

SEQ ID NO: 16389 - protein, 217 aa, unidentified
  source 1..217: note = Vibrio jasicida
  REGION 1..217: note = tr|A0A2S7W7I0|A0A2S7W7I0_9VIBR GTP cyclohydrolase 1; OS = Vibrio jasicida OX=766224 GN=folE PE=3 SV=1
MSGLSESAKLVKEALEQRGLETPMRPNNVSREEKKEKIEHHMREILGLLQLDLTDDSLEETPHRIAKMYVDEIFSGLDYTNFPKITVIENKMNVSEMVRVKDITVTSTCEHHLVTIDGKAAVAYIPRGKIIGLSKINRIVRFFAQRPQVQERMTQQILVALQTLLESDDVAVTIDATHYCVKSRGVMDATSETTTTALGGIFKSNPATRAEFLHGLR

SEQ ID NO: 16390 - protein, 217 aa, Vibrio kanaloae
  REGION 1..217: note = tr|A0A1E5DVG9|A0A1E5DVG9_9VIBR GTP cyclohydrolase 1; OS = Vibrio kanaloae 5S-149 OX=1191299 GN=folE PE=3 SV=1
MSGLSESAKLVKDALASRGLETPMSPNQISREEKKERIEHHMREILTLLELDLTDDSLEETPQRIAKMYVDEIFSGLDYANFPKITVIENKMGVREMVRVKDITVTSTCEHHLVTIDGKTAVAYIPQGKIIGLSKINRIVRFFAQRPQVQERMTQQVLVALQTLLETDDVAVTMDAVHYCVKSRGVMDATSETTTTALGGIFRSNPATRHEFLHGLR

SEQ ID NO: 16391 - protein, 217 aa, Vibrio kanaloae; identical to SEQ ID NO: 16390
  REGION 1..217: note = tr|A0A2N7J7M4|A0A2N7J7M4_9VIBR GTP cyclohydrolase 1; OS = Vibrio kanaloae OX=170673 GN=folE PE=3 SV=1

SEQ ID NO: 16392 - protein, 212 aa, Vibrio lentus
  REGION 1..212: note = tr|A0A4U2AKB6|A0A4U2AKB6_9VIBR GTP cyclohydrolase 1; OS = Vibrio lentus OX=136468 GN=folE PE=3 SV=1
MLNTEAEKVREALLARGLETPMTESEMNPNQKYNRIKGLLTEVVSTLGLDLTDDSLAETPHRIAKMYVHEIFSGLDYDNFPKISVIENKMSVDEMVKVSDIDLTSTCEHHFITIDGLAEVAYIPENKILGLSKINRIVRFFAQRPQVQERLTQQILVAIQTLVETENVAVTIKATHYCVKSRGVMDANSETSTTALGGIFKTNPQTRAEFLR

SEQ ID NO: 16393 - protein, 212 aa, Vibrio lentus
  REGION 1..212: note = tr|A0A4U2AW31|A0A4U2AW31_9VIBR GTP cyclohydrolase 1; OS = Vibrio lentus OX=136468 GN=folE PE=3 SV=1
MLNTEAEKVREALLAKGLETPMTPSEMNPNQKYNRIKGLLTEVVSTLGLDLTDDSLAETPHRIAKMYVHEIFSGLDYDNFPKISVIENKMSVDEMVKVSNIDLTSTCEHHFITIDGLAEVAYIPETKILGLSKINRIVRFFAQRPQVQERLTQQILVAIQTLVETENVAVTIKATHYCVKSRGVMDANSETSTTALGGIFKTNPQTRAEFLR

SEQ ID NO: 16394 - protein, 218 aa, Vibrio mangrovi
  REGION 1..218: note = tr|A0A1Y6IUL1|A0A1Y6IUL1_9VIBR GTP cyclohydrolase 1; OS = Vibrio mangrovi OX=474394 GN=folE PE=3 SV=1
MSGLSESALLVKNALEHRGLETPMYPNPVGREEKKERIEYHMREILNLLGLDLTDDSLEETPHRIAKMYVDEVFSGLDYHNFPKITLIENKMKVSEMVRVKDITVTSTCEHHLVTIDGKAAVAYIPRGKIIGLSKINRIVRFFSQRPQVQERMTQQILVALQVLLETDDVAVTIDATHYCVKARGVMDATSETTTTALGGLFKSNPATRAEFLHGLLN

SEQ ID NO: 16395 - protein, 251 aa, Vibrio mangrovi
  REGION 1..251: note = tr|A0A1Y6IWS6|A0A1Y6IWS6_9VIBR Putative GTP cyclohydrolase 1 type 2 OS=Vibrio mangrovi OX=474394; GN = VIM7927_01759 PE=4 SV=1
MNNFELEALLHEKLRPDLIQDYSPNGLQIEGKSEIRKVVTGVTASQALIEKAIALQADAILVHHGYFWKREPEPIRGMKGKRIRTLIQHDINLYAYHLPLDIHPELGNNACLARLLGIDVTGGLEGHEQSVAMYGSFREPVSSTDLSQRIAAVLQRAPLHIPSGEEQLISTVGWCTGGGQDFIDLAAAKGLDAFISGEISERTTYSAREQGIHYFSAGHHATERYGVKALGEWLAQTQDLEVEFVDIDNPV

SEQ ID NO: 16396 - protein, 217 aa, Vibrio maritimus
  REGION 1..217: note = tr|A0A090RRX3|A0A090RRX3_9VIBR GTP cyclohydrolase 1; OS = Vibrio maritimus OX=990268 GN=folE PE=3 SV=1
MSGLSESAKLVKEALSERGLETPMLPNEVTREEKKERIEHHMREILTLLQLDLADDSLMETPHRIAKMYVDEIFSGLDYSNFPKITVIENKMDVSEMVRVKDITVTSTCEHHLVTIDGKAAVAYIPRGKIIGLSKINRIVRFFAQRPQVQERMTQQILVALQTLLETDDVAVTMDAVHYCVKSRGVMDATSETTTTALGGIFKSNPATRHEFLHGLR

SEQ ID NO: 16397 - protein, 152 aa, Vibrio maritimus
  REGION 1..152: note = tr|A0A090TLB9|A0A090TLB9_9VIBR GTP cyclohydrolase 1; OS = Vibrio maritimus OX=990268 GN=JCM19240_5528 PE=3 SV=1
MSGLSESAKLVKAALSERGLETPMLPNEVSREEKKERIEHHMREILTLLQLDLADDSLMETPQRIAKMYVDEIFSGLDYQNFPKITVIENKMDVSEMVRVKDITVTSTCEHHLVTIDGKAAVAYIHVEKSSAYRRSTALSDFSLSAHKCKSA

SEQ ID NO: 16398 - protein, 217 aa, Vibrio mediterranei
  REGION 1..217: note = tr|A0A3G4VHR0|A0A3G4VHR0_9VIBR GTP cyclohydrolase 1; OS = Vibrio mediterranei OX=689 GN=folE PE=3 SV=1
MSGLSESAKLVKAALSKRGLETPMLPNEVSREEKKERIEHHMREILTLLQLDLQDDSLMETPHRIAKMYVDEIFSGLDYENFPKITVIENKMDVSEMVRVKDITVTSTCEHHLVTIDGKAAVAYIPRGKIIGLSKINRIVRFFAQRPQVQERMTQQILVALQALLETDDVAVTIDAVHYCVKSRGVMDATSETTTTALGGIFKSKPATRHEFLHGLR

SEQ ID NO: 16399 - protein, 217 aa, Vibrio mediterranei
  REGION 1..217: note = tr|A0A241TAP6|A0A241TAP6_9VIBR GTP cyclohydrolase 1; OS = Vibrio mediterranei OX=689 GN=folE PE=3 SV=1
MSGLSESAKLVKAALSERGLETPMLPNEVSREEKKERIEHHMREILTLLQLDLQDDSLMETPHRIAKMYVDEIFSGLDYENFPKITVIENKMDVSEMVRVKDITVTSTCEHHLVTIDGKAAVAYIPRGKIIGLSKINRIVRFFAQRPQVQERMTQQILVALQALLETDDVAVTIDAVHYCVKSRGVMDATSETTTTALGGIFKSKPATRHEFLHGLR

SEQ ID NO: 16400 - protein, 217 aa, unidentified
  source 1..217: note = Vibrio metoecus
  REGION 1..217: note = tr|A0A0Q0VN51|A0A0Q0VN51_9VIBR GTP cyclohydrolase 1; OS = Vibrio metoecus OX=1481663 GN=folE PE=3 SV=1
MSGLSESAKLVKDALERRGLETPMQPSLASPAEKKDKIEHHMREILNLLGLDLTDDSLEETPQRIAKMYVDEIFSGLDYANFPKITVIENKMKVSEMVKVKDITLTSTCEHHLVTIDGTAAVAYIPRGKIIGLSKINRIVRFFAQRPQVQERMTQQILVALQALLESDDVAVTIDATHYCVKSRGVMDATSVTTTTALGGIFKSNPATRAEFLHGLR

SEQ ID NO: 16401 - protein, 217 aa, Vibrio metschnikovii
  REGION 1..217: note = tr|C9P754|C9P754_VIBME GTP cyclohydrolase 1; OS = Vibrio metschnikovii CIP 69.14 OX=675813 GN=folE PE=3; SV = 1
MSILSESAQLVKAALESRGQETPMQPNAISREEKKAQIEFHMREVLTLLGLDLADDSLQETPHRIAKMYVDEIFSGLDYKNFPKITVIENKMKVSEMVRVKDITVTSTCEHHLVTIDGKAAVAYIPRGKIIGLSKINRIVRFFAQRPQVQERLTQQILVALQTLLESDDVAVTIDATHYCVKSRGVMDATSVTTTTALGGIFKSNPATRAEFLHGLR

SEQ ID NO: 16402 - protein, 126 aa, Vibrio metschnikovii
  REGION 1..126: note = tr|A0A380NRS9|A0A380NRS9_VIBME GTP cyclohydrolase 1; OS = Vibrio metschnikovii OX=28172 GN=folE_1 PE=3 SV=1
MKVSEMVRVKDITVTSTCEHHLVTIDGKAAVAYIPRGKIIGLSKINRIVRFFAQRPQVQERLTQQILVALQTLLESDDVAVTIDATHYCVKSRGVMDATSVTTTTALGGIFKSNPATRAEFLHGLR

SEQ ID NO: 16403 - protein, 221 aa, Vibrio mimicus
  REGION 1..221: note = tr|D2YGZ7|D2YGZ7_VIBMI GTP cyclohydrolase 1; OS = Vibrio mimicus VM603 OX=671074 GN=folE PE=3 SV=1
MSGLSESAKLVKDALERRGLETPMQPSLASPAEKKDKIEHHMREILNLLGLDLTDDSLEETPQRIAKMYVDEIFSGLDYANFPKITVIENKMKVSEMVKVKDITLTSTCEHHLVTIDGTAAVAYIPRGKIIGLSKINRIVRFFAQRPQVQERMTQQILVALQALLESDDVAVTIDATHYCVKSRGVMDATSVTTTTALGVFSNLTQRRVLNSYTVCVNSLS

SEQ ID NO: 16404 - protein, 217 aa, Vibrio mimicus
  REGION 1..217: note = tr|A0A5B6XJI6|A0A5B6XJI6_VIBMI GTP cyclohydrolase 1; OS = Vibrio mimicus OX=674 GN=folE PE=3 SV=1
MSGLSESVKLVKDALERRGLETPMQPSLASPAEKKDKIEHHMREILNLLGLDLTDDSLEETPQRIAKMYVDEIFSGLDYANFPKITVIENKMKVSEMVKVKDITLTSTCEHHLVTIDGTAAVAYIPRGKIIGLSKINRIVRFFAQRPQVQERMTQQILVALQALLESDDVAVTIDATHYCVKSRGVMDATSVTTTTALGGIFKSNPATRAEFLHGLR

SEQ ID NO: 16405 - protein, 217 aa, Vibrio mytili
  REGION 1..217: note = tr|A0A0C3DMA1|A0A0C3DMA1_9VIBR GTP cyclohydrolase 1; OS = Vibrio mytili OX=50718 GN=folE PE=3 SV=1
MSGLSESAKLVKEALEERGLETPMRPNNASREEKKEKIEYHMREILGLLQLDLTDDSLEETPHRIAKMYVDEIFSGLDYSNFPKITVIENKMNVSEMVRVKDITVTSTCEHHLVTIDGKAAVAYIPRGKIIGLSKINRIVRFFAQRPQVQERMTQQILTALQTLLESDDVAVTIDATHYCVKSRGVMDATSETTTTALGGIFKSNPATRAEFLHGLR

SEQ ID NO: 16406 - protein, 217 aa, Vibrio natriegens
  REGION 1..217: note = tr|A0A1B1EH20|A0A1B1EH20_VIBNA GTP cyclohydrolase 1; OS = Vibrio natriegens OX=691 GN=folE PE=3 SV=1
MSGLSESAKLVKEALEQRGLETPMRPNNVSREEKKEKIEYHMREILGLLQLDLTDDSLEETPHRIAKMYVDEIFSGLDYSNFPKITVIENKMNVSEMVRVKDITVTSTCEHHLVTIDGKAAVAYIPRGKIIGLSKINRIVRFFAQRPQVQERMTQQILIALQTLLESDDVAVTIDATHYCVKSRGVMDATSETTTTALGGIFKSNPATRAEFLHGLR

SEQ ID NO: 16407 - protein, 217 aa, Vibrio navarrensis
  REGION 1..217: note = tr|A0A099MF64|A0A099MF64_9VIBR GTP cyclohydrolase 1; OS = Vibrio navarrensis OX=29495 GN=folE PE=3 SV=1
MSGLSESAKLVKDALEKRGLETPMVPNQFSREEKKEKIEHHMREILALLELDLTDDSLEETPRRIAKMYVDEIFSGLDYQNFPKITVIENKMNVSEMVRVKDITLTSTCEHHLVTIDGKAAVAYIPRGKIIGLSKINRIVRFFAQRPQVQERMTQQILVALQTLLESDDVAVTIDATHYCVKSRGVMDATSETTTTALGGIFKSNPATRAEFLHGLR

SEQ ID NO: 16408 - protein, 217 aa, unidentified; identical to SEQ ID NO: 16333
  source 1..217: note = Vibrio neocaledonicus
  REGION 1..217: note = tr|A0A4P8G689|A0A4P8G689_9VIBR GTP cyclohydrolase 1; OS = Vibrio neocaledonicus OX=1208308 GN=folE PE=3 SV=1

SEQ ID NO: 16409 - protein, 217 aa, Vibrio neptunius
  REGION 1..217: note = tr|A0A0F4NX20|A0A0F4NX20_9VIBR GTP cyclohydrolase 1; OS = Vibrio neptunius OX=170651 GN=folE PE=3 SV=1
MSGLSESAKLVKDALESRGLETPMSPNQISREEKKEKIQYHMREILSLLELDLTDDSLEETPHRIAKMYVDEIFSGLDYTNFPKITVIENKMDVSEMVRVKDITLTSTCEHHLVTIDGRATVAYIPRGKIIGLSKINRIVRFFAQRPQVQERMTQQILIALQTLLESDDVAVTIDATHYCVKSRGVMDATSETTTTALGGIFKSNPATRHEFLHGIR

SEQ ID NO: 16410 - protein, 212 aa, Vibrio neptunius
  REGION 1..212: note = tr|A0A0F4P9M6|A0A0F4P9M6_9VIBR GTP cyclohydrolase 1; OS = Vibrio neptunius OX=170651 GN=folE PE=3 SV=1
MISPEAHKVQQALIARGLETPLVPSDMTPDEKYHRIRGLLTEVVSTLGLDLTDDSLSETPHRIAKMYVHEIFSGLDYQNFPKISVIENKMAVDEMVKVSDVNLTSTCEHHFITIDGLAQVAYIPDNKILGLSKINRIVRFFAQRPQVQERLTQQVLVAIQTLTETENVAVSIKATHYCVKSRGVMDTSSETSTTALGGIFKTNPQTRAEFLG

SEQ ID NO: 16411 - protein, 217 aa, Vibrio nereis
  REGION 1..217: note = tr|A0A0M0HQI8|A0A0M0HQI8_VIBNE GTP cyclohydrolase 1; OS = Vibrio nereis OX=693 GN=folE PE=3 SV=1
MSGLSESAMLVKDALERRGLETPMVPNQFSREEKKEKIQYHMREILSLLELDLTDDSLEETPHRIAKMYVDEIFSGLDYSNFPKITVIENKMDVSEMVRVKDITVTSTCEHHLVTIDGRAAVAYIPRGKIIGLSKINRIVRFFAQRPQVQERMTQQILVALQTLLESDDVAVTIDATHYCVKSRGVMDATSETTTTALGGIFKSNSATRHEFLHGIR

SEQ ID NO: 16412 - protein, 217 aa, Vibrio nigripulchritudo
  REGION 1..217: note = tr|U4K699|U4K699_9VIBR GTP cyclohydrolase 1; OS = Vibrio nigripulchritudo OX=28173 GN=folE PE=3 SV=1
MPGLSESALLVQQALVEKGIETPMAPNSVSREEKKERIEHHMREILQLLELDLSDDSLEETPHRIAKMYVDEIFSGLDYKNFPKITVIDNKMACSEMVRVKDITVTSTCEHHLVTIDGKAAVAYIPRKKIIGLSKINRIVRFFAQRPQVQERMTQQILVALQTLLETDDVAITMDAVHYCVKSRGVMDATSETTTTALGGIFKSNPATRHEFLHGLR

SEQ ID NO: 16413 - protein, 217 aa, Vibrio nigripulchritudo; identical to SEQ ID NO: 16412
  REGION 1..217: note = tr|U4DUC1|U4DUC1_9VIBR GTP cyclohydrolase 1; OS = Vibrio nigripulchritudo FTn2 OX=1238441 GN=folE PE=3; SV = 1

SEQ ID NO: 16414 - protein, 217 aa, Vibrio orientalis
  REGION 1..217: note = tr|C9QDY8|C9QDY8_VIBOR GTP cyclohydrolase 1; OS = Vibrio orientalis CIP 102891 = ATCC 33934 OX=675816; GN = folE PE=3 SV=1
MSGLSESAKLVKDALEQRGLETPMAPNQFSRDEKKEKIQHHMREILSLLELDLTDDSLEETPQRIAKMYVDEIFSGLDYSNFPKITVIENKMNVSEMVRVKDITVTSTCEHHLVTIDGRAAVAYIPRGKIIGLSKINRIVRFFAQRPQVQERMTQQILVALQTLLESDDVAVTIDATHYCVKSRGVMDATSETTTTALGGIFKSNSATRHEFLHGIR

SEQ ID NO: 16415 - protein, 217 aa, Vibrio owensii; identical to SEQ ID NO: 16333
  REGION 1..217: note = tr|A0A0C1W176|A0A0C1W176_9VIBR GTP cyclohydrolase 1; OS = Vibrio owensii CAIM 1854 = LMG 25443 OX=1229493 GN=folE; PE = 3 SV=1

SEQ ID NO: 16416 - protein, 217 aa, Vibrio owensii; identical to SEQ ID NO: 16333
  REGION 1..217: note = tr|A0A3G2Q2V4|A0A3G2Q2V4_9VIBR GTP cyclohydrolase 1; OS = Vibrio owensii OX=696485 GN=folE PE=3 SV=1

SEQ ID NO: 16417 - protein, 299 aa, unidentified
  source 1..299: note = Vibrio palustris
  REGION 1..299: note = tr|A0A1R4B396|A0A1R4B396_9VIBR GTP cyclohydrolase FolE2 OS=Vibrio palustris OX=1918946 GN=folE2 PE=4 SV=1
MKQDLNLPDVMKTAKTSMPANLQWVGMSDISVPFYVKNHNNTIGVTGHANVYVSLDAEEEKGIHMSRLYTSLYQQLSQQILLQERIEAFLLELVSSQAGISHNARLELAFELPIHKPALLSGKMGYQTYSIEWNLMLEDDQWRTEVVLHIPYSSTCPCSASLSRQLLSQAIDQRFNEPLVDKATLLAWIESEQGSIATPHSQRSLAHIHLTWTGIYCPDFEHLLRYFEQAIGTPVQTAVKRADEQEFARLNAKNLMFCEDAARKLKQALVMMSSLQDYWFKVEHQESLHAHNAVVIDRK

SEQ ID NO: 16418 - protein, 217 aa, unidentified
  source 1..217: note = Vibrio palustris
  REGION 1..217: note = tr|A0A1R4B706|A0A1R4B706_9VIBR GTP cyclohydrolase 1; OS = Vibrio palustris OX=1918946 GN=folE PE=3 SV=1
MSGLSDSAKKVIAALESRGLETPMAPNEFGRAEKKEKIEHHMGEILNVLGLDLTDDSLEETPRRIAKMYVDEIFSGLDYQNFPKITVIENKMNVSEMVRVKDITVTSTCEHHLVTIDGKAAVAYIPRGKIIGLSKINRIVRFFAQRPQVQERMTQQILVALQTLLESDDVAVTIDATHYCVKSRGVMDATSETTTTALGGIFKSNASTRAEFLSGLR

SEQ ID NO: 16419 - protein, 217 aa, unidentified
  source 1..217: note = Vibrio panuliri
  REGION 1..217: note = tr|A0A1Q9HLF4|A0A1Q9HLF4_9VIBR GTP cyclohydrolase 1; OS = Vibrio panuliri OX=1381081 GN=folE PE=3 SV=1
MSGLSESAKLVKDALESRGLETPMVPSEFTREEKKEKIQHHMREILSLLDLDLTDDSLEETPHRIAKMYVDEIFSGLDYQNFPKITVIENKMNVSEMVRVKDITLTSTCEHHLVTIDGKAAVAYIPRGKIIGLSKINRIVRFFSQRPQVQERLTQQILVALQTLLESEDVAVTIDATHYCVKSRGVMDATSETTTTALGGIFKSIPATRAEFLHGLR

SEQ ID NO: 16420 - protein, 217 aa, Vibrio parahaemolyticus
  REGION 1..217: note = sp|Q87GZ6|GCH1_VIBPA GTP cyclohydrolase 1 OS=Vibrio parahaemolyticus serotype O3:K6 (strain RIMD 2210633); OX = 223926 GN=folE PE=3 SV=1
MSGLSESAKLVKEALEQRGLETPMRPNAVSREEKKEKIEHHMREILTLLQLDLTDDSLEETPHRIAKMYVDEIFSGLDYSNFPKITVIENKMNVSEMVRVKDITVTSTCEHHLVTIDGKAAVAYIPRGKIIGLSKINRIVRFFAQRPQVQERMTQQILVALQTLLESDDVAVTIDATHYCVKSRGVMDATSETTTTALGGIFKSNPATRAEFLHGLR

SEQ ID NO: 16421 - protein, 217 aa, Vibrio parahaemolyticus; identical to SEQ ID NO: 16420
  REGION 1..217: note = tr|A0A072FSE1|A0A072FSE1_VIBPH GTP cyclohydrolase 1; OS = Vibrio parahaemolyticus OX=670 GN=folE PE=3 SV=1

SEQ ID NO: 16422 - protein, 217 aa, Vibrio pectenicida
  REGION 1..217: note = tr|A0A427TVW1|A0A427TVW1_9VIBR GTP cyclohydrolase 1; OS = Vibrio pectenicida OX=62763 GN=folE PE=3 SV=1
MSDLSESAILVKKALENRGLETPMQPNQISREEKKEKIQHHMREILTLLELDLTDDSLEETPHRIAKMYVDEIFSGLDYSNFPKITVIENKMDMSEMVRVKDITVTSTCEHHLVTIDGRATVAYIPRGKIIGLSKINRIVRFFAQRPQVQERMTQQILVALQTLLESDDVAVTIDATHYCVKSRGVMDATSETTTTALGGIFKSNPATRYEFLHGIR

SEQ ID NO: 16423 - protein, 212 aa, Vibrio pectenicida
  REGION 1..212: note = tr|A0A3R9FQY9|A0A3R9FQY9_9VIBR GTP cyclohydrolase 1; OS = Vibrio pectenicida OX=62763 GN=folE PE=3 SV=1
MISDEAKRVKEVLIEQGLETPLVDSFMSPEQKYERLKGLLTEMISVIGLDLNDDSLAETPHRIAKMYVNEIFSGLDYMNFPKITVIENKMNVDEMVKVSNINLTSTCEHHFVTIDGLAKVAYLPKLKVIGLSKINRIVRFFAQRPQVQERLTQQILIAIQTLAETKNVAVTIDATHYCVKSRGVMDVNSNTTTTALGGCFKTDPQTRAEFLQ

SEQ ID NO: 16424 - protein, 217 aa, Vibrio penaeicida
  REGION 1..217: note = tr|A0A3S0MRM6|A0A3S0MRM6_9VIBR GTP cyclohydrolase 1; OS = Vibrio penaeicida OX=104609 GN=folE PE=3 SV=1
MPGLSESALLVQKALVEKGIETPMLPNKVSREEKKARIENHMREILQLLELDLSDDSLEETPRRIAKMYVDEVFSGLDYKNFPKITVIENKMACSEMVRVKDITVTSTCEHHLVTIDGKAAVAYIPRKKIIGLSKINRIVRFFAQRPQVQERMTQQVLVALQTLLETDDVAITMDAVHYCVKSRGVMDATSETTTTALGGIFKSNPATRHEFLHGLR

SEQ ID NO: 16425 - protein, 65 aa, Vibrio ponticus
  REGION 1..65: note = tr|A0A090P715|A0A090P715_9VIBR GTP cyclohydrolase I type 1 OS=Vibrio ponticus OX=265668 GN=JCM19238_2462 PE=4; SV = 1
MTQQILVALQTLLESDDVAVTIDATHYCVKSRGVMDATSETTTTALGGIFKSNPATRAEFLHGLR

SEQ ID NO: 16426 - protein, 217 aa, Vibrio ponticus
  REGION 1..217: note = tr|A0A3N3DZD4|A0A3N3DZD4_9VIBR GTP cyclohydrolase 1; OS = Vibrio ponticus OX=265668 GN=folE PE=3 SV=1
MSGLSESAKLVKDALESRGLETPMVPSEFSREEKKEKIQYHMREILSLLDLDLTDDSLEETPHRIAKMYVDEIFSGLDYQNFPKITVIENKMNVSEMVRVKDITLTSTCEHHLVTIDGKAAVAYIPRGKIIGLSKINRIVRFFSQRPQVQERLTQQILVALQTLLESDDVAVTIDATHYCVKSRGVMDATSETTTTALGGIFKSNPATRAEFLHGLR

SEQ ID NO: 16427 - protein, 217 aa, Vibrio proteolyticus
  REGION 1..217: note = tr|U3A149|U3A149_VIBPR GTP cyclohydrolase 1; OS = Vibrio proteolyticus NBRC 13287 OX=1219065 GN=folE PE=3; SV = 1
MSGLSESAKLVKEALERRGLETPMRPNSISREEKKEKIEHHMREILNLLALDLTDDSLEETPHRIAKMYVDEIFSGLDYQNFPKITVIENKMNVSEMVRVKDITVTSTCEHHLVTIDGKAAVAYIPRGKIIGLSKINRIVRFFAQRPQVQERMTQQILVALQTLLESDDVAVTIDATHYCVKSRGVMDATSETTTTALGGIFKSNPATRHEFLHGLR

SEQ ID NO: 16428 - protein, 217 aa, unidentified
  source 1..217: note = Vibrio qinghaiensis
  REGION 1..217: note = tr|A0A223N2D5|A0A223N2D5_9VIBR GTP cyclohydrolase 1; OS = Vibrio qinghaiensis OX=2025808 GN=folE PE=3 SV=1
MLGLSESAKLVKDALESRGLETPMRPNEVTREEKKEKIEHHMREILTLLGLDLTDDSLEETPHRIAKMYVDEVFSGLDYQNFPKITVIENKMNVSEMVRVKEITVTSTCEHHLVTIDGKAAVAYIPRGKIIGLSKINRIVRFFAQRPQVQERMTQQILVALQTLLGSADVAVTIDATHYCVKSRGVMDATSETTTTALGGIFKSNPATRAEFFHGLH

SEQ ID NO: 16429 - protein, 218 aa, unidentified
  source 1..218: note = Vibrio quintilis
  REGION 1..218: note = tr|A0A1M7Z327|A0A1M7Z327_9VIBR GTP cyclohydrolase 1; OS = Vibrio quintilis OX=1117707 GN=folE PE=3 SV=1
MSGLSEAALLVKNALESRGLETPMCPNTVGRSEKKEKIEYHMREILHLLGLDLTDDSLEETPHRIAKMYVDEVFSGLDYHNFPKITVIENKMNVSEMVRVKDITVTSTCEHHLVTIDGKAAVAYIPRGKIIGLSKINRIVRFFAQRPQVQERMTQQILVALQTLLESDDVAVTMDATHYCVKSRGVMDATSETTTTALGGLFKSNPATRAEFLHGLKS

SEQ ID NO: 16430 - protein, 250 aa, unidentified
  source 1..250: note = Vibrio quintilis
  REGION 1..250: note = tr|A0A1M7YTJ5|A0A1M7YTJ5_9VIBR Putative GTP cyclohydrolase 1 type 2 OS=Vibrio quintilis OX=1117707; GN = VQ7734_01652 PE=4 SV=1
MNHLTLEALLNEKLRPEMVKDYCPNGLQIEGKAEVKRVITGVTASQALIEKAIELEADALLVHHGYFWKGEPEPVRGMKGKRIRSLVKHDINLYAYHLPLDIHPELGNNARLADLLGIQVAGGLEEHPQSVAMYGTLSQPLDAEVFGQKIEQVLERKPLHISAGHKVIHTIGWCTGGGQDYIELAAAKGLDAFISGEISERTTYSAREQGVHFFSAGHHATERYGVKALGEWLAEHHELDVTFIDIDNPV

SEQ ID NO: 16431 - protein, 217 aa, unidentified; identical to SEQ ID NO: 16385
  source 1..217: note = Vibrio renipiscarius
  REGION 1..217: note = tr|A0A0C2NSA8|A0A0C2NSA8_9VIBR GTP cyclohydrolase 1; OS = Vibrio renipiscarius OX=1461322 GN=folE PE=3 SV=1

SEQ ID NO: 16432 - protein, 217 aa, Vibrio rotiferianus
  REGION 1..217: note = tr|A0A2K7SS23|A0A2K7SS23_9VIBR GTP cyclohydrolase 1; OS = Vibrio rotiferianus OX=190895 GN=folE PE=3 SV=1
MSGLSESAKLVKEALEQRGLETPMRPNSVSREEKKEKIEHHMREILGLLQLDLTDDSLEETPHRIAKMYVDEIFSGLDYSNFPKITVIENKMNVSEMVRVKDITVTSTCEHHLVTIDGKAAVAYIPRGKIIGLSKINRIVRFFAQRPQVQERMTQQILVALQTLLESDDVAVTIDATHYCVKSRGVMDATSETTTTALGGIFKSNPATRAEFLHGLR

SEQ ID NO: 16433 - protein, 217 aa, Vibrio rotiferianus; identical to SEQ ID NO: 16333
  REGION 1..217: note = tr|A0A510IBF7|A0A510IBF7_9VIBR GTP cyclohydrolase 1; OS = Vibrio rotiferianus OX=190895 GN=folE PE=3 SV=1

SEQ ID NO: 16434 - protein, 251 aa, Vibrio ruber
  REGION 1..251: note = tr|A0A1R4LED3|A0A1R4LED3_9VIBR Putative GTP cyclohydrolase 1 type 2 OS=Vibrio ruber DSM 16370; OX = 1123498 GN=VR7878_00925 PE=4 SV=1
MNNLELEALLNEKLRPDLIQDYSPNGLQIEGRSEIKKIVTGVTASQALIEKAIDLQADAILVHHGYFWKREPEPIRGMKGKRIRRLIQQDINLYAYHLPLDIHPELGNNACLARLLGIDVMGGLEGHAQSVAMYGTFKEPMSGADLRQRISTVLQREPLHIASGENQLISTVGWCTGGGQDFIDLAASKGMDAFISGEVSERTTHSAREQGIHYFAAGHHATERYGVKALGEWLSQTHNLTVEFVDIDNPV

SEQ ID NO: 16435 - protein, 218 aa, Vibrio ruber
  REGION 1..218: note = tr|A0A1R4LTP2|A0A1R4LTP2_9VIBR GTP cyclohydrolase 1; OS = Vibrio ruber DSM 16370 OX=1123498 GN=folE PE=3 SV=1
MSGLSESALLVKNALEHRGLETPMRLNSIGREEKKEKIEYHMREILNLLGLDLTDDSLEETPHRIAKMYVDEVFSGLDYQNFPKITLIENKMKVSEMVRVKDITVTSTCEHHLVTIDGKAAVAYIPRGKIIGLSKINRIVRFFSQRPQVQERMTQQILVALQVLLETDDVAVTIDATHYCVKARGVMDATSETTTTALGGLFKSNPATRSEFLHGLLG

SEQ ID NO: 16436 - protein, 233 aa, Vibrio rumoiensis
  REGION 1..233: note = tr|A0A1E5DZF1|A0A1E5DZF1_9VIBR GTP cyclohydrolase 1; OS = Vibrio rumoiensis 1S-45 OX=1188252 GN=folE PE=3 SV=1
MANLNSQVLGDQAVANDQTLSESAQLVKAALQQRGIETPMRLNDTPRAEKKERIEHHMREILTLLELDLTDDSLEETPRRIAKMYVDEVFSGLDYKNFPKITVIENKMSCSEMVRVKNITVTSTCEHHLVTIDGQAAVAYIPRGKIIGLSKINRIVRFFAQRPQVQERMTQQILVALQALLETDDVAITMDATHYCVKSRGVMDATSVTTTTALGGIFKSNPATRAEFLHGLR

SEQ ID NO: 16437 - protein, 217 aa, Vibrio sagamiensis; identical to SEQ ID NO: 16331
  REGION 1..217: note = tr|A0A511QJ53|A0A511QJ53_9VIBR GTP cyclohydrolase 1; OS = Vibrio sagamiensis NBRC 104589 OX=1219064 GN=folE PE=3; SV = 1

SEQ ID NO: 16438 - protein, 217 aa, Vibrio scophthalmi; identical to SEQ ID NO: 16385
  REGION 1..217: note = tr|F9RUM4|F9RUM4_9VIBR GTP cyclohydrolase 1; OS = Vibrio scophthalmi LMG 19158 OX=870967 GN=folE PE=3 SV=1

SEQ ID NO: 16439 - protein, 217 aa, Vibrio scophthalmi; identical to SEQ ID NO: 16385
  REGION 1..217: note = tr|A0A1B1NV07|A0A1B1NV07_9VIBR GTP cyclohydrolase 1; OS = Vibrio scophthalmi OX=45658 GN=gch1 PE=3 SV=1

SEQ ID NO: 16440 - protein, 217 aa, Vibrio shilonii; identical to SEQ ID NO: 16398
  REGION 1..217: note = tr|A6CYY2|A6CYY2_9VIBR GTP cyclohydrolase 1; OS = Vibrio shilonii AK1 OX=391591 GN=folE PE=3 SV=1

SEQ ID NO: 16441 - protein, 217 aa, Vibrio sinaloensis
  REGION 1..217: note = tr|E8M5F3|E8M5F3_9VIBR GTP cyclohydrolase 1; OS = Vibrio sinaloensis DSM 21326 OX=945550 GN=folE PE=3 SV=1
MSGLSESAKLVKDALERRGLETPMVPNQFSREEKKEKIQHHMREILTLLELDLTDDSLEETPHRIAKMYVDEIFSGLDYSNFPKITVIENKMDVSEMVRVKDITVTSTCEHHLVTIDGRAAVAYIPRGKIIGLSKINRIVRFFAQRPQVQERMTQQILVALQTLLESDDVAVTIDATHYCVKSRGVMDATSETTTTALGGIFKSNPATRHEFLHGIR

SEQ ID NO: 16442 - protein, 217 aa, Vibrio sinaloensis; identical to SEQ ID NO: 16349
  REGION 1..217: note = tr|A0A0A5I3T0|A0A0A5I3T0_9VIBR GTP cyclohydrolase 1; OS = Vibrio sinaloensis OX=379097 GN=folE PE=3 SV=1

SEQ ID NO: 16443 - protein, 217 aa, Vibrio sp.
  REGION 1..217: note = tr|A0A3N9TLU7|A0A3N9TLU7_9VIBR GTP cyclohydrolase 1; OS = Vibrio sp. LJC006 OX=2487322 GN=folE PE=3 SV=1
MSGLSESAVLVKNALESRGLETPMKPNDISQQEKKEKIEHHMREILNLLGLDLTDDSLEETPHRIAKMYVDEVFSGLDYRNFPKITVIENKMNVSEMVRVKDITVTSTCEHHLVTIDGKAAVAYIPRGKIIGLSKINRIVRFFAQRPQVQERMTQQILVALQTLLESDDVAVTIDATHYCVKSRGVMDATSETTTTALGGIFKSNPSTRSEFLSGLK

SEQ ID NO: 16444 - protein, 217 aa, Vibrio sp.; identical to SEQ ID NO: 16399
  REGION 1..217: note = tr|A0A084TAB2|A0A084TAB2_9VIBR GTP cyclohydrolase 1; OS = Vibrio sp. ER1A OX=1517681 GN=folE PE=3 SV=1

SEQ ID NO: 16445 - protein, 251 aa, unidentified
  source 1..251: note = Vibrio spartinae
  REGION 1..251: note = tr|A0A1N6M0Q0|A0A1N6M0Q0_9VIBR Putative GTP cyclohydrolase 1 type 2 OS=Vibrio spartinae OX=1918945; GN = VSP9026_00579 PE=4 SV=1
MNNLELEALLDEKLRPDLIQDYSPNGLQIEGRSDIRKIVTGVTASQALIEKAITLQADAILVHHGYFWKREPEPIRGMKGKRIRRLIQHDINLYAYHLPLDIHPELGNNACLARLLGIDVMGGLEGHAQSVAMYGAFKAPISGADLSRKIATVLQREPLHIASGEEQLIATVGWCTGGGQDFIDLAAAKGLDAFISGEISERTTHSAREQGIHYFSAGHHATERYGVKALGEWLSQTQNIAVEFVDIDNPA

SEQ ID NO: 16446 - protein, 218 aa, unidentified
  source 1..218: note = Vibrio spartinae
  REGION 1..218: note = tr|A0A1N6MAH1|A0A1N6MAH1_9VIBR GTP cyclohydrolase 1; OS = Vibrio spartinae OX=1918945 GN=folE PE=3 SV=1
MSGLSESALLVKNALENRGLETPMRPNPIGREEKKEKIEYHMREILNLLGLDLTDDSLEETPHRIAKMYVDEVFSGLDYYNFPKITLIENKMKVSEMVRVKDITVTSTCEHHLVTIDGKAAVAYIPRGKIIGLSKINRIVRFFSQRPQVQERMTQQILVALQALLETDDVAVTVDATHYCVKARGVMDATSETTTTALGGLFKSNPATRSEFLHGLLG

SEQ ID NO: 16447 - protein, 212 aa, Vibrio splendidus
  REGION 1..212: note = tr|A0A0P6YF07|A0A0P6YF07_VIBSP GTP cyclohydrolase 1; OS = Vibrio splendidus OX=29497 GN=folE_2 PE=3 SV=1
MLNTEAEKVREALLAKGLETPMTPSEMNPNQKYNRIKGLLTEVVSTLGLDLTDDSLAETPHRIAKMYVHEIFSGLDYDNFPKISVIENKMSVDEMVKVSNIDLTSTCEHHFITIDGLAEVAYIPESKILGLSKINRIVRFFAQRPQVQERLTQQILVAIQTLVETENVAVTIKATHYCVKSRGVMDANSETSTTALGGIFKTNPQTRAEFLR

SEQ ID NO: 16448 - protein, 217 aa, Vibrio splendidus; identical to SEQ ID NO: 16340
  REGION 1..217: note = tr|A0A0P6Z385|A0A0P6Z385_VIBSP GTP cyclohydrolase 1; OS = Vibrio splendidus OX=29497 GN=folE_1 PE=3 SV=1

SEQ ID NO: 16449 - protein, 217 aa, Vibrio superstes; identical to SEQ ID NO: 16345
  REGION 1..217: note = tr|A0A511QKT1|A0A511QKT1_9VIBR GTP cyclohydrolase 1; OS = Vibrio superstes NBRC 103154 OX=1219062 GN=folE PE=3; SV = 1

SEQ ID NO: 16450 - protein, 217 aa, Vibrio tapetis
  REGION 1..217: note = tr|A0A2N8ZLF6|A0A2N8ZLF6_9VIBR GTP cyclohydrolase 1; OS = Vibrio tapetis subsp. tapetis OX=1671868 GN=folE PE=3; SV = 1
MSGLSESAKLVKSALAQNGIETPLRPNNIGRDEKKEKIEHHMREILNLLELDLSDDSLEETPRRIAKMYVDEVFSGLDYANFPKITVIENKMSCSEMVRVKDITVTSTCEHHLVTIDGRAAVAYIPRSKIIGLSKINRIVRFFAQRPQVQERMTQQVLVALQTLLETDDVAITMDAVHYCVKSRGVMDATSVTTTTALGGIFKSNPATRHEFLHGIR

SEQ ID NO: 16451 - protein, 212 aa, Vibrio tasmaniensis
  REGION 1..212: note = tr|B7VPI4|B7VPI4_VIBTL GTP cyclohydrolase 1; OS = Vibrio tasmaniensis (strain LGP32) OX=575788 GN=folE; PE = 3 SV=1
MLNTEAEKVREALLARGLETPMTPSEMNPNQKYNRIKGLLTEVVSTLGLDLNDDSLAETPHRIAKMYVHEIFSGLDYDNFPKISVIENKMSVDEMVKVSDIDLTSTCEHHFITIDGLAEVAYIPENKILGLSKINRIVRFFAQRPQVQERLTQQILVAIQTLVETENVAVTIKASHYCVKSRGVMDANSETSTTALGGIFKTNPQTRAEFLR

SEQ ID NO: 16452 - protein, 217 aa, Vibrio tasmaniensis; identical to SEQ ID NO: 16340
  REGION 1..217: note = tr|A0A1A6L599|A0A1A6L599_9VIBR GTP cyclohydrolase 1; OS = Vibrio tasmaniensis OX=212663 GN=folE PE=3 SV=1

SEQ ID NO: 16453 - protein, 252 aa, unidentified
  source 1..252: note = Vibrio thalassae
  REGION 1..252: note = tr|A0A240EGC5|A0A240EGC5_9VIBR GTP cyclohydrolase 1 type 2 OS=Vibrio thalassae OX=1243014 GN=VTH8203_00934; PE = 4 SV=1
MNNLQLEAVLNDKLSPQLIKDYSPNGLQIEGTSEIKKMVTGVTASQALIDYAVSVNADALLVHHGYFWKGEPEPIRGMKGKRIRTLIKNDLNLYGYHLPLDIHPELGNNARLADLLGIEVIDGLEGHPQSVAMFGKLANPMSGEALAQKIAQVLAREPLHITPDQANKMIETVGWCTGGGQDYIELAASKGLDAFISGEISERTTYTARELNIHYFAAGHHATERYGIKALGEWLASEHGLDVEFIDIDNPV

SEQ ID NO: 16454 - protein, 217 aa, unidentified; identical to SEQ ID NO: 16399
  source 1..217: note = Vibrio thalassae
  REGION 1..217: note = tr|A0A240EIQ6|A0A240EIQ6_9VIBR GTP cyclohydrolase 1; OS = Vibrio thalassae OX=1243014 GN=folE PE=3 SV=1

SEQ ID NO: 16455 - protein, 212 aa, unidentified
  source 1..212: note = Vibrio toranzoniae
  REGION 1..212: note = tr|A0A109D9F3|A0A109D9F3_9VIBR GTP cyclohydrolase 1; OS = Vibrio toranzoniae OX=1194427 GN=folE PE=3 SV=1
MLNTEAEKVREALLAKGLETPMTSSEMNPNQKYNRIKGLLTEVVSTLGLDLTDDSLAETPHRIAKMYVHEIFSGLDYNNFPKVSVIDNKMSVDEMVKVSDINLTSTCEHHFITIDGLAEVAYIPENKILGLSKINRIVRFFAQRPQVQERLTQQILVAIQTLVETENVAVTIKATHYCVKSRGVMDANSETSTTALGGIFKTNPQTRAEFLR

SEQ ID NO: 16456 - protein, 217 aa, unidentified; identical to SEQ ID NO: 16390
  source 1..217: note = Vibrio toranzoniae
  REGION 1..217: note = tr|A0A109D5B4|A0A109D5B4_9VIBR GTP cyclohydrolase 1; OS = Vibrio toranzoniae OX=1194427 GN=folE PE=3 SV=1

SEQ ID NO: 16457 - protein, 217 aa, Vibrio tubiashii
  REGION 1..217: note = tr|F9TA08|F9TA08_9VIBR GTP cyclohydrolase 1; OS = Vibrio tubiashii ATCC 19109 OX=1051646 GN=folE PE=3 SV=1
MSGLSESAKLVKDALERRGLETPMAPNQFNREEKKEKIQHHMREILSLLELDLTDDSLEETPHRIAKMYVDEIFSGLDYSNFPKITVIENKMDVSEMVRVKDITVTSTCEHHLVTIDGRAAVAYIPRGKIIGLSKINRIVRFFAQRPQVQERMTQQILVALQTLLESDDVAVTIDATHYCVKSRGVMDATSETTTTALGGIFKSNPATRHEFLHGIR

SEQ ID NO: 16458 - protein, 217 aa, Vibrio tubiashii
  REGION 1..217: note = tr|A0A0A5I6A5|A0A0A5I6A5_9VIBR GTP cyclohydrolase 1; OS = Vibrio tubiashii OX=29498 GN=folE PE=3 SV=1
MSGLSESAKLVKDALEQRGLETPMAPNSFSREEKKEKIQHHMREILSLLELDLTDDSLEETPHRIAKMYVDEIFSGLDYSNFPKITVIENKMNVSEMVRVKDITVTSTCEHHLVTIDGRAAVAYIPRGKIIGLSKINRIVRFFAQRPQVQERMTQQILVALQTLLESDDVAVTMDATHYCVKSRGVMDATSETTTTALGGIFKSNPATRHEFLHGIR

SEQ ID NO: 16459 - protein, 191 aa, Vibrio variabilis
  REGION 1..191: note = tr|A0A090ST61|A0A090ST61_9VIBR GTP cyclohydrolase 1; OS = Vibrio variabilis OX=990271 GN=folE PE=3 SV=1
MTSSEMSSDQKYNRIKGLLTEVVSTLGLDLTDDSLAETPHRIAKMYVHEIFSGLDYDNFPKISVIDNKMSVDEMVNVSDIDLTSTCEHHFITIDGLAQVAYIPKSKILGLSKINRIVRFFAQRPQVQERLTQQILVAIQTLVETENVAVTIKATHYCVKSRGVMDANSETTTTALGGTFKTNPQTRAEFLR

SEQ ID NO: 16460 - protein, 217 aa, Vibrio variabilis; identical to SEQ ID NO: 16396
  REGION 1..217: note = tr|A0A090SNT7|A0A090SNT7_9VIBR GTP cyclohydrolase 1; OS = Vibrio variabilis OX=990271 GN=folE PE=3 SV=1

SEQ ID NO: 16461 - protein, 217 aa, Vibrio vulnificus
  REGION 1..217: note = sp|Q8D6I7|GCH1_VIBVU GTP cyclohydrolase 1 OS=Vibrio vulnificus (strain CMCP6) OX=216895 GN=folE PE=3 SV=1
MSGLSESAQLVKQALEKRGLETPMVPNQFSREEKKEKIEHHMREILSLLELDLTDDSLEETPRRIAKMYVDEVFSGLDYQNFPKITVIENKMNVSEMVRVKEITLTSTCEHHLVTIDGKAAVAYIPRGKIIGLSKINRIVRFFAQRPQVQERMTQQILVALQTLLESDDVAVTIDATHYCVKSRGVMDATSETTTTALGGIFKSNPATRAEFLHGLR

SEQ ID NO: 16462 - protein, 217 aa, Vibrio vulnificus; identical to SEQ ID NO: 16461
  REGION 1..217: note = tr|A0A087IB10|A0A087IB10_VIBVL GTP cyclohydrolase 1; OS = Vibrio vulnificus OX=672 GN=folE PE=3 SV=1

SEQ ID NO: 16463 - protein, 304 aa, unidentified
  source 1..304: note = Vibrio xiamenensis
  REGION 1..304: note = tr|A0A1G7XFT1|A0A1G7XFT1_9VIBR GTP cyclohydrolase FolE2 OS=Vibrio xiamenensis OX=861298 GN=folE2 PE=3 SV=1
MNQSHSLPDITMADKARNPSTLQWVGMSDIAVPFFVAISAVDSTQVAAKADIYVSLDKADAKGIHMSRLYRLLYQQLAHSHLSAGQITDLLDTGIKTQHGISQSAQLKLSFDLTLRKTSLLSQQAGYQAYHVALTFTQTPNASFSDVEITIPYSSTCPCSASLSQQLLAQAIDQQFDQDAIDKETLLKWIESAQGSIATPHSQRSFANLQLRWNGIVCPDLRELIEYFEAAIGTPVQTAVKREDEQAFAKLNAENLLFCEDAARRLKNALNEFSGLIGYRFKVDHQESLHAHNAVAFDQYGFDG

SEQ ID NO: 16464 - protein, 217 aa, unidentified
  source 1..217: note = Vibrio xiamenensis
  REGION 1..217: note = tr|A0A1G8CUX5|A0A1G8CUX5_9VIBR GTP cyclohydrolase 1; OS = Vibrio xiamenensis OX=861298 GN=folE PE=3 SV=1
MSGLSDSAKLVKDALESRGLETPMSPNNIGRDEKKQKIEHHMREILTLLELDLTDDSLEETPHRIAKMYVDEIFSGLNYQNFPKITVIENKMKVSEMVCVKDITVTSTCEHHLVTIDGKAAVAYIPRGKIIGLSKINRIVRFFAQRPQVQERMTQQILVALQTLLESDDVAVTIDATHYCVKSRGVMDATSATTTTALGGIFKSNPSTRAEFLHGLR

SEQ ID NO: 16465 - protein, 217 aa, unidentified; identical to SEQ ID NO: 16378
  source 1..217: note = Vibrionales bacterium
  REGION 1..217: note = tr|A0A366XJU4|A0A366XJU4_9GAMM GTP cyclohydrolase 1; OS = Vibrionales bacterium C3R12 OX=2267228 GN=folE PE=3 SV=1

SEQ ID NO: 16466 - protein, 212 aa, unidentified
  source 1..212: note = Vibrionales bacterium
  REGION 1..212: note = tr|A5L767|A5L767_VIBBS GTP cyclohydrolase 1; OS = Vibrionales bacterium (strain SWAT-3) OX=391574 GN=folE; PE = 3 SV=1
MLTTEAEKVREALLGKGLETPMTSSEMNNDQKYNRIKGLLTEVVSTLGLDLTDDSLAETPHRIAKMYVHEIFSGLDYNNFPKISVIDNKMSVDEMVKVSDIDLTSTCEHHFITIDGLAQVAYIPKSKILGLSKINRIVRFFAQRPQVQERLTQQILVAIQTLVETENVAVTIKATHYCVKSRGVMDANSETTTTALGGSFKTNPQTRAEFLR

SEQ ID NO: 16467 - protein, 198 aa, unidentified; identical to SEQ ID NO: 9065
  source 1..198: note = Vibrionimonas magnilacihabitans
  REGION 1..198: note = tr|A0A2S8SIE0|A0A2S8SIE0_9BACT GTP cyclohydrolase 1; OS = Vibrionimonas magnilacihabitans OX=669455 GN=folE PE=3; SV = 1

SEQ ID NO: 16468 - protein, 255 aa, unidentified
  source 1..255: note = Vibrionimonas magnilacihabitans
  REGION 1..255: note = tr|A0A2S8SKW3|A0A2S8SKW3_9BACT GTP cyclohydrolase 1; OS = Vibrionimonas magnilacihabitans OX=669455 GN=folE PE=3; SV = 1
MARYFFMTNFFIFLVRQNRTSFMFQITQNIMQIQYQRALACQMASVSGEEDHFSNGSQTPLRPDAFAMSAEEKVHDIAYHFRSIMHTLGLDLSDDSLKDTPMRVAKMYVRELFSGLDPVNKPAISLFNNSYGYGQLLLEKNIPFVSQCEHHFVPIRGKAHVAYFAGDKVIGLSKLNRIVDYFARRPQVQERLTVQIGQELQQVLSTEDVAVIIDAEHMCVSMRGIRQDGCSTVSSFYGGRFNNASVKNELLLQLK

SEQ ID NO: 16469 - protein, 205 aa, unidentified
  source 1..205: note = Vicingus serpentipes
  REGION 1..205: note = tr|A0A5C6RWH9|A0A5C6RWH9_9FLAO GTP cyclohydrolase 1; OS = Vicingus serpentipes OX=1926625 GN=folE PE=3 SV=1
MMKENNMDGYEKVEQYNEKKIESLSKHYENIITELGEDINREGLQKTPERVAKAMQYLTHGYDLDPAEILKGAMFAENHDHMVIVKDIELYSMCEHHMLPFFGKAHIAYIPNGHIVGLSKIPRVVDAFARRLQVQERLTDQIMNCIQETLNPKGVAVVIEAKHMCMQMRGIQKQNSTTTTSSFTGAFEKDSTRKEFIALISHKMS

SEQ ID NO: 16470 - protein, 235 aa, unidentified
  source 1..235: note = Vicingus serpentipes
  REGION 1..235: note = tr|A0A5C6RWZ7|A0A5C6RWZ7_9FLAO GTP cyclohydrolase 1; OS = Vicingus serpentipes OX=1926625 GN=folE PE=3 SV=1
MKLEKTMLNTQSINDNPLNGYTFEDIGDDHLFTNLDTPLKEGAFDISDKEKKEKIEGLFAEIMDVLGLDLTDDSLKGTPKRVAKMYIEEIFSGLNPANKPKIALFDNKYQYNQMLVEKNITFYSNCEHHFVPIIGKAHVAYISSGKVIGLSKLNRIVQYYAKRPQVQERLTNQIGKDLQNILNTEDVAIIIDAKHLCVSSRGVQDDNSATVTTFYGGQFNSPEKIRELQSYITNK

SEQ ID NO: 16471 - protein, 179 aa, unidentified
  source 1..179: note = Victivallales bacterium
  REGION 1..179: note = tr|A0A2S0KSC3|A0A2S0KSC3_9BACT GTP cyclohydrolase 1; OS = Victivallales bacterium CCUG 44730 OX=2094242 GN=folE; PE = 3 SV=1
MQQQIHDILVEMGEDPSREGLLDTPKRVEKSLRFLTRGYGQTLEEVVNGALFEAESDDMVIVRDIEFFSLCEHHMLPFFGKCHVGYIPKGKIIGVSKVARIVDMFARRLQVQERLTKQVSEALMKILGAEGVGVVVEAQHLCMQMRGVEKQHSVMTTSSMVGSFRRELATRNEFTRLIR

SEQ ID NO: 16472 - protein, 179 aa, Victivallis vadensis
  REGION 1..179: note = tr|A0A2U1AUJ4|A0A2U1AUJ4_9BACT GTP cyclohydrolase 1; OS = Victivallis vadensis OX=172901 GN=folE PE=3 SV=1
MQQQIRDILVEIGEDPEREGLLDTPKRVEKSLKFLTRGYRQTLEEVVNGALFEAESDDMVIVRDIEFFSMCEHHMLPFFGKCHVGYIPKGKILGVSKVARIVDMFARRLQIQERLTRQISGALMEILGAEGVGVVMEARHLCMQMRGVEKQHSVMTTSSMVGSFRRELATRNEFTRLIR

SEQ ID NO: 16473 - protein, 310 aa, Virgibacillus chiguensis
  REGION 1..310: note = tr|A0A1M5L906|A0A1M5L906_9BACI GTP cyclohydrolase FolE2 OS=Virgibacillus chiguensis OX=411959 GN=folE2 PE=3; SV = 1
MKHQAKALPVKQLPSKEKRHQLFGSVKPAPKTKPVDKMHMADLQNTKKDFLFDLDAVGVTKVKHPILIYSFMPPYTQTSVAEFTFTSSLKQTNKGTNMSRFIEQLASYQKNGFSTDLELLKKFTKDMAKRVEQQDATIEVSFPWFFERQAPDTSLIGLNHANASIKMEYHETKGFHIQLSLGVSITTLCPCSKEISEYSAHNQRGNVTMEIRVSDDYQEEDLDWKKVLLEAAESNASARLHPILKRTDEKFVTEQAYENPRFVEDMVRLIAADLYETPFIEKFKVTCQNEESIHMHDAIAEITYDKTKGI

SEQ ID NO: 16474 - protein, 310 aa, Virgibacillus dokdonensis
  REGION 1..310: note = tr|A0A3E0WZK4|A0A3E0WZK4_9BACI GTP cyclohydrolase FolE2 OS=Virgibacillus dokdonensis OX=302167 GN=folE2 PE=3; SV = 1
MKHQAKAFPVKQLPSKEKRHQLFGSVKPAPKTKPVDKMHMADLQNTKKDFLFDLDAVGVTKVKHPILIYSFMPPYTQTSVAEFTFTSSLKQTSKGTNMSRFIEQLASYQKNGFSTDLELLKKFTKDMAKRVEQQDATIEVSFPWFFERQAPDTSLIGLNHANASIKMEYHETKGFHIQLSLGVSITTLCPCSKEISEYSAHNQRGNVTMEIRVSDDYQEEDLDWKKVLLEAAESNASARLHPILKRTDEKFVTEQAYENPRFVEDMVRLIAADLYETPFIEKFKVTCQNEESIHMHDAIAEITYDKTKGI

SEQ ID NO: 16475 - protein, 310 aa, Virgibacillus dokdonensis
  REGION 1..310: note = tr|A0A2K9J467|A0A2K9J467_9BACI GTP cyclohydrolase FolE2 OS=Virgibacillus dokdonensis OX=302167 GN=folE2 PE=3; SV = 1
MKHQAKAFPVKQLPSKEKRHQLFGSVKPAPKTKPVDKMHMADLQNTKKDFLFDLDAVGVTKVKHPILIYSFMPPYTQTSIAEFTLTSSLKQTNKGTNMSRFIEQLASYQKNGFSTDLELLKKFTKDMAKRVEQQDATIEVNFPWFFERQAPDTSLIGLNHANASIKMEYHETKGFHIQLSLGVSITTLCPCSKEISEYSAHNQRGNVTMEIRVSDDYQEEDLDWKKVLLEAAESNASARLHPILKRTDEKFVTEQAYENPRFVEDMVRLIAADLYETPFIEKFKVTCQNEESIHMHDAIAEITYDKTKGI

SEQ ID NO: 16476 - protein, 312 aa, Virgibacillus halodenitrificans
  REGION 1..312: note = tr|A0A1J0H213|A0A1J0H213_VIRHA GTP cyclohydrolase FolE2 OS=Virgibacillus halodenitrificans OX=1482 GN=folE2; PE = 3 SV=1
MGNTKTFPSRKLPNKKERHKLFGSVTPVLKTKPVEKSEMADLQNTKKDFLFDLDAVGVANVKHPVTIYSKLEPHVQTSVGEIQFTSSLKNTSKGTNMSRFTEQLAYYHEKGFTAEFSTLKQFVKELTERLEQSDATIEMEFPWFYERKGPQTELAGMNHANVAMRVTYDQHTGFSLGASLSVFVTTLCPCSKEISEYSAHNQRGEVSIDVELDELEAVNVDDWKQMLLEAAESNASSRLHPVLKRPDEKMVTEQAYENPRFVEDMVRLVAADLYEMDLVTKFKVQCRNEESIHMHDAIASITYDKNNMTFPS

SEQ ID NO: 16477 - protein, 312 aa, unidentified
  source 1..312: note = Virgibacillus indicus
  REGION 1..312: note = tr|A0A265NDY4|A0A265NDY4_9BACI GTP cyclohydrolase FolE2 OS=Virgibacillus indicus OX=2024554 GN=folE2 PE=3; SV = 1
MEQTKTFPLKQLPNKEQRHKLFGSVQPIKKTKPVIKEKMADLQNIKRDFLFDLDAVGISNVKHPITVYSSLTPSTQTSIGTFHFSSSLNSTSKGTNMSRFTEQLSHYHKKGFIVDLKTLKKFTKELAERLEQKDAAITVTFPWFFERKGPDSGLTGMNHANCTITVSYDIDKGYSIQASLSALITTLCPCSKEISEYSAHNQRGEVTMEVSLAEDFNDINLDWKEMLLEAAESNASARLHPVLKRPDEKYVTEQAYENPRFVEDIVRLVAADLYEMSFVTKFKVSCRNEESIHLHDAIASVTYDKKLEGTRG

SEQ ID NO: 16478 - protein, 308 aa, unidentified
  source 1..308: note = Virgibacillus massiliensis
  REGION 1..308: note = tr|A0A024QCH1|A0A024QCH1_9BACI GTP cyclohydrolase FolE2 OS=Virgibacillus massiliensis OX=1462526 GN=folE2; PE = 3 SV=1
MENTKTFPQKKLPSKAQRHKLFGSVMPVPRSKPVDKVHMADLQNTKKDFLFDLDAVGITKVKHPITIYSSIAPTVQTSIGEFTFSSSLSHSNKGTNMSRFNEQLAKYHRQGFSTDLTTLKTFTKELAERLDQQDASLRVDYTWFYERNAPDTQLAGLNHADVSISVNYDKQQGYDIRLSLSVSITTLCPCSKEISEYSAHNQRGNVTMDVKIIEDFDETTSDWKEILLEAAESNASARLHPILKRTDEKMVTEQAYENPRFVEDMVRLVAADLYEVSEIRQFKVTCQNEESIHMHDAVASVTYDKDNE

SEQ ID NO: 16479 - protein, 311 aa, Virgibacillus necropolis
  REGION 1..311: note = tr|A0A221MDF4|A0A221MDF4_9BACI GTP cyclohydrolase FolE2 OS=Virgibacillus necropolis OX=163877 GN=folE2 PE=3; SV = 1
MNNTQTSLNVNLPNKEKRHQLFGSVAPGPRTKPTEKEKMADLQNAKKDFLFDLDQVGITNVKYPITVESNIAPFSQSTIGTFTFSSSIKKNSKGTNMSRFMEQLNMYHQNGFVANLSTLKAFTKELAIRLNQDDAELQLTFPWFYERTGPQSAIPGMNHATISLKITYDMEKGFTVRTSLSALITTLCPCSKEISEYSAHNQRGSVSMDVSISDDFDEEKVDWKEMLLEAAESNASARLHPVLKRTDEKIVTEKAYENPRFVEDMVRLVAADLFEMPFVTKFKVSCRNEESIHMHDALASVTIDKMDYTTQ

SEQ ID NO: 16480 - protein, 310 aa, Virgibacillus pantothenticus
  REGION 1..310: note = tr|A0A0L0QPX9|A0A0L0QPX9_VIRPA GTP cyclohydrolase FolE2 OS=Virgibacillus pantothenticus OX=1473 GN=folE2; PE = 3 SV=1
MGHQTKAFPIKQLPSKEKRHQLFGSVKPAPRTKPVDKMHMADLQNTKKDFLFDLDAVGVTKVKNPIMIYSSIAPYTQTSIGEFTFTSSLKQTNKGTNMSRFMEQLANYQKNGFSTELDVLKKFTKEIAKRVEQQDAALEVNFPWFFERQAPDTGLTGLNHADAGIRIEYHELKGFCIYLSLSAAITTLCPCSKEISEYSAHNQRGNVIMEISVSEDYQEADLDWKKVLLEAAESNASARLHPILKRTDEKMVTEQAYENPRFVEDMVRLIAADLYETSFITKFKVTCQNEESIHMHDAIAAVTYDKTKEV

SEQ ID NO: 16481 - protein, 311 aa, unidentified
  source 1..311: note = Virgibacillus phasianinus
  REGION 1..311: note = tr|A0A220U5Q8|A0A220U5Q8_9BACI GTP cyclohydrolase FolE2 OS=Virgibacillus phasianinus OX=2017483 GN=folE2; PE = 3 SV=1
MTYTPTSLTVNLPNKEERHQLFGSVAPGPRTKPEEKDKMADLQNTKKDFLFDLDEVGISNVKHPITVKSHIEPLTQSTIGTFSFTSSIKKTNKGTNMSRFMEQLNAYYHNGSVTSLSTLKQFTKDLATRLNQEDAEVQISFPWFYERTGPKSNIAGMNHADVSITVSYDNKNGFDIYATLSASITTLCPCSKEISEYSAHNQRGLVSMEVSIADDFDEEKTDWKLMLLEAAESNASARLHPVLKRTDEKTITEQAYENPRFVEDIVRLVAADLFEMPFVTKFKVACRNEESIHMHDAIASVTIDKADYISQ

SEQ ID NO: 16482 - protein, 310 aa, unidentified
  source 1..310: note = Virgibacillus profundi
  REGION 1..310: note = tr|A0A2A2IE29|A0A2A2IE29_9BACI GTP cyclohydrolase FolE2 OS=Virgibacillus profundi OX=2024555 GN=folE2 PE=3; SV = 1
MDQIKTFPLKQLPNKEQRHLLFGSVKPIEKTKPVDKSKMADLQNIKKDFLFDLDAVGIANVKHPITVYSNLNPTTQTSIGTIQFSSSLDNTSKGTNMSRFTEQLNYYHEQGFIVDFATLKKFTKELAERLEQKDATIIVDFPWFFERKGPESGLSGMNHADISITVDYHIEHGFSINAALSALITTLCPCSKEISEYSAHNQRGEVSMEVSFTDDFNDLNIDWKEALLEAAESNASARLHPVLKRPDEKLVTEQAYENPRFVEDIVRLVAADLYEMAFVTKFKVSCRNEESIHLHDAIASVTYDKNHECK

SEQ ID NO: 16483 - protein, 313 aa, Virgibacillus salinus
  REGION 1..313: note = tr|A0A1H1C2W7|A0A1H1C2W7_9BACI GTP cyclohydrolase FolE2 OS=Virgibacillus salinus OX=553311 GN=folE2 PE=3 SV=1
MDKIKSFPKKQLPNKIQRHKLFGSVQPGPRTKPSEKKEMADLQNTKKDFLFDLDEVGIENVKHPITVKSSLVPNEQTTIGTFKFSSSIDKASKGTNMSRFTEQLQSYYQKGFTVDLLTLKTFTKDLADRLKQSDAEVEVSFPWFYERKGPQSNLPGMNHADITLNVKYDDVKGYTIQASLASLITTLCPCSKEISEYSAHNQRGLVKMTVSLADDFDERLLDWKETLLEAAESNASSRLHPVLKRPDEKMVTEQAYENPRFVEDMVRLVAADIYEMPFVTKFSVKCRNEESIHMHDAIASVTYDKLQNEMNEG

SEQ ID NO: 16484 - protein, 211 aa, Virgibacillus soli; identical to SEQ ID NO: 5024
  REGION 1..211: note = tr|A0A0Q9YIC1|A0A0Q9YIC1_9BACI GTP cyclohydrolase 1; OS = Virgibacillus soli OX=480284 GN=folE PE=3 SV=1

SEQ ID NO: 16485 - protein, 312 aa, Virgibacillus sp.
  REGION 1..312: note = tr|A0A075JQC1|A0A075JQC1_9BACI GTP cyclohydrolase FolE2 OS=Virgibacillus sp. SK37 OX=403957 GN=folE2 PE=3; SV = 1
MGNTKTFPSRKLPNKEERHKLFGSVTPVLKTKPIEKSEMADLQNTKKDFLFDLDAVGVANVKHPVTIYSNLKPLVQTSVGKIQFTSSLKNTSKGTNMSRFTEQLAYYHEKGFTADFSTLKQFVKELTERLEQSDATIEMEFPWFYERKGPQTELAGMNHANVSMRVTYDQINGFSLGASLSVFVTTLCPCSKEISEYSAHNQRGEVSIEVELDDLEFDNVDDWKQMLLEAAESNASSRLHPVLKRPDEKMVTEQAYENPRFVEDMVRLVAADLYEMELVTKFKVQCRNEESIHMHDAIASITYDKNSMTFPS

SEQ ID NO: 16486 - protein, 310 aa, Virgibacillus sp.
  REGION 1..310: note = tr|A0A268I2G0|A0A268I2G0_9BACI GTP cyclohydrolase FolE2 OS=Virgibacillus sp. 7505 OX=2022548 GN=folE2 PE=3; SV = 1
MQHLHTPTKKQLPSKAERHKLFGSVAPGKKTKPENKADMADLQNTKKNFLFHIDAVGIAKVKHPIQVISNTRPAMQTTIGTFEFTSSIQQDSKGTNMSRFTEQLDLYHKNGFTVSVKSLQLFVAELADRLKQEDARVKVTFPWFFERSGPASGMTGLNHADATLEVAYDKQTGFRTTAKLSGTVTTLCPCSKEISEYSAHNQRGIVSMEVQLTDAFDEDVRDWKEDLLEAAESNASARIHPVLKRPDEKMVTETAYENPRFVEDMVRLVAADLYELDYVEKFTVSCSNEESIHLHDAVATLSYDKRDEEE

SEQ ID NO: 16487 - protein, 189 aa, Viridibacillus arenosi
  REGION 1..189: note = tr|W4EKP4|W4EKP4_9BACL GTP cyclohydrolase 1; OS = Viridibacillus arenosi FSL R5-213 OX=1227360 GN=folE; PE = 3 SV=1
MTTTDLNKIEQAIKMILEAVGEDPNREGLLDTPKRVAKMYQEMFSGLHEDPKKYFETVFHEGHDEVVLVKDIPFYSMCEHHLVPFYGKAHIAYIPKDGVVAGLSKLARTVETVSHRPQLQERITATIADTLMEMLKPQGVYVVVEAEHMCMTMRGIKKPGAKTITSVSKGIFEEDDIKRSEILSFIQMS

SEQ ID NO: 16488 - protein, 190 aa, Viridibacillus arvi
  REGION 1..190: note = tr|A0A0M0LDA8|A0A0M0LDA8_9BACL GTP cyclohydrolase 1; OS = Viridibacillus arvi OX=263475 GN=folE PE=3 SV=1
MLTTTDLNKIEQAIKMILEAVGEDPNREGLLDTPKRVAKMYQEMFSGLHEDPKKYFETVFHEGHDEVVLVKDIPFFSMCEHHLVPFYGKAHIAYIPKDGVVAGLSKLARTVETVSHRPQLQERITATIADTLMEMLNPQGVYVVVEAEHMCMTMRGIKKPGAKTITSVAKGIFEEDDVKRSEILSFIQMS

SEQ ID NO: 16489 - protein, 189 aa, Viridibacillus sp.
  REGION 1..189: note = tr|A0A2N0F583|A0A2N0F583_9BACL GTP cyclohydrolase 1; OS = Viridibacillus sp. OK051 OX=1884360 GN=folE PE=3 SV=1
MTTMDLNKIEQAIKLILEAVGEDPNREGLLDTPKRVSKMYQEMFAGLHEDPKKYFETVFHEGHDEVVLVKDIPFFSMCEHHLVPFYGKAHIAYIPKDGVVAGLSKLARTVETVSHRPQLQERITATIADTLMEMLNPQGVYVVVEAEHMCMTMRGIKKPGAKTITSVAKGIFEENDVKRSEILSFIQMS

SEQ ID NO: 16490 - protein, 199 aa, unidentified
  source 1..199: note = Vitellibacter aquimaris
  REGION 1..199: note = tr|A0A137RJF1|A0A137RJF1_9FLAO GTP cyclohydrolase 1; OS = Vitellibacter aquimaris OX=1548749 GN=folE PE=3 SV=1
MASYRYFEEYDQPVTDTLIENYSKILHTVGEDISRDGIVKTPERAAKAIQFLTSGNCQDPAEILKSAMFAEAYHDMVIIKDIELYSLCEHHMLPFFGKAHIAYIPDGHIVGLSKIPRVVDVFARRLQVQERLTHDILECINNTLKPKGVAVVIEASHMCMMMRGVQKQNSVTTTSGFRGQFEAIETRSEFLKLISSDLG

SEQ ID NO: 16491 - protein, 225 aa, unidentified; identical to SEQ ID NO: 4095
  source 1..225: note = Vitellibacter aquimaris
  REGION 1..225: note = tr|A0A137REN0|A0A137REN0_9FLAO GTP cyclohydrolase 1; OS = Vitellibacter aquimaris OX=1548749 GN=folE PE=3 SV=1

SEQ ID NO: 16492 - protein, 266 aa, Vitreoscilla filiformis
  REGION 1..266: note = tr|A0A221KEL8|A0A221KEL8_VITFI GTP cyclohydrolase FolE2 OS=Vitreoscilla filiformis OX=63 GN=folE2 PE=3 SV=1
MTHLTEALHIPDTQSERDERHVAIQRVGVKGVRYPLTVRVGGAEQSTAARWTLDVALPAEQKGTHMSRFVAWLEALDAPMDAAELHRQLAVMLDKLHASEGSIEARFAFFIKKRAPVSGLQSLLDHEGAFVAERRNGRDAIWLEVGVPVKSLCPCSKEISDYGAHNQRSLVTIRVELADPLGAPIQWHELVRYAEESASSEIWPMLKRADEKWITERAYENPKFVEDLVRDVALRLNADVRIGRYRVEVENFESIHNHSAWACIER

SEQ ID NO: 16493 - protein, 233 aa, Vitreoscilla sp.
  REGION 1..233: note = tr|A0A2L0PIN3|A0A2L0PIN3_VITS1 GTP cyclohydrolase FolE2 OS=Vitreoscilla sp. (strain C1) OX=96942 GN=folE2; PE = 3 SV=1
MRFPIHIATASGPQTTVANLTMTVFLPADQKGTHMSRFVQLMEDEAQTVLDAAQLQRLTQDMLQRLDSHSGRLDMSFPYFRSKTAPISGIKSLLDYDVRVVGEIKDGQYQSQLQVLIPVTSLCPCSKEISQYGAHNQRSHVTINLTHTGGIQVDELIDIVEEQASCQLYGLLKRPDEKYVTERAYENPKFVEDMVRDVAATLRDDERVLAFTVESENFESIHNHSAYAVIQYP

SEQ ID NO: 16494 - protein, 218 aa, Volucribacter psittacicida
  REGION 1..218: note = tr|A0A4R1G0S9|A0A4R1G0S9_9PAST GTP cyclohydrolase 1; OS = Volucribacter psittacicida OX=203482 GN=folE PE=3 SV=1
MAQISPEALKVRQALLDKGIETPMIDLTKDKDQRRGEIEHHMREVMHLIGLDLTDDSLEETPKRIAKMFIDEIFSGLDYTNFPKITNIQNRMQVSEMVLVNDVTLTSTCEHHFVTIDGLVSVAYYPKNWVIGLSKINRIISFFAQRPQVQERFTEQVLLAFQTILETEDVAVYVKATHFCVKCRGIKDSNSYTVTSAFGGVFLNDRETRKEFLTAINR

SEQ ID NO: 16495 - protein, 198 aa, Vulcanibacillus modesticaldus
  REGION 1..198: note = tr|A0A1D2YW02|A0A1D2YW02_9BACI GTP cyclohydrolase 1; OS = Vulcanibacillus modesticaldus OX=337097 GN=folE PE=3; SV = 1
MAIDKKAIEEHIRGILIALGENPDREGLRETPKRVANMYEEVFEGISYTNDDIAGMFNKTFEEDISLSEENKDIVIVRDIEIFSHCEHHIALMYNMKVTVAYLPNRKIIGLSKIARIADMVGKRLQLQERIGSDIAEIMQKITETEDVAVIIEGEHACMTTRGIKKINSKTVTTTLRGKFNTDPFLNNKLMMLYYNGK

SEQ ID NO: 16496 - protein, 196 aa, unidentified
  source 1..196: note = Vulcaniibacterium tengchongense
  REGION 1..196: note = tr|A0A3N4W4M4|A0A3N4W4M4_9GAMM GTP cyclohydrolase 1; OS = Vulcaniibacterium tengchongense OX=1273429 GN=folE PE=3; SV = 1
MADTDKPTREQAEAAVRTLLRWAGDDPQREGLLDTPKRVVEAYADWFSGYAEDPGEYLKRTFEEVEGYDEMIVLRDISFESHCEHHMAPIIGKAHVGYLPDGKVVGISKLARVVETYARRLQVQEKMTAQIAQVIQDVLHPRGVGVVVEAAHECMTTRGVHKRGVSMITSKMLGSFRDDARTRAEFLRFIDVGQGR

SEQ ID NO: 16497 - protein, 310 aa, unidentified
  source 1..310: note = Vulcaniibacterium tengchongense
  REGION 1..310: note = tr|A0A3N4W9V3|A0A3N4W9V3_9GAMM GTP cyclohydrolase FolE2 OS=Vulcaniibacterium tengchongense OX=1273429; GN = folE2 PE=3 SV=1
MSTLPLPPRRLPDVAFDAAAAARPLDWVGMANIALPLRVAGSDGEVLTVAASVDVAVDLKDADTRGIHMSRMYLQLQHAFASETVTPAGLRRVLQTLIDNQGGISSAARLALRYEMLLLRPALASANAGWKRYPVEIEATLREGHLHLALRFAVEYSSTCPASAALSRQLNAERFAGDFAAARPLSAAVVAEWLASERGLAATPHAQRSRADVRVELRPSFDELPLTALIDAIERALGTPVQTAVKREDEQAFARLNAENLMFCEDAARRVAAALSADPRVERFEAEVAHFESLHPHDAVARVAGRGASA

SEQ ID NO: 16498 - protein, 206 aa, unidentified
  source 1..206: note = Vulgatibacter incomptus
  REGION 1..206: note = tr|A0A0K1PCY4|A0A0K1PCY4_9DELT GTP cyclohydrolase 1; OS = Vulgatibacter incomptus OX=1391653 GN=folE PE=3 SV=1
MGADRDAAPGETPRIAPPDPEKMAAGIRLFLEGCGVDLSDANVRETPHRVAKAWAEEFLDGYDRSAREVLGDFYEERKPAADEMVVVTSIDFQSMCPHHLLPYRGVAHVAYLPAGRVVGFSRLARLVDAFAHRLILQETLAREIAEAIRRELGSAGAAVVLEAEQTCMTTRGERRSQARAITEAFTGEFASRPELRERFVGRISGR

SEQ ID NO: 16499 - protein, 221 aa, Waddlia chondrophila
  REGION 1..221: note = tr|D6YRV5|D6YRV5_WADCW GTP cyclohydrolase 1; OS = Waddlia chondrophila (strain ATCC VR-1470 / WSU 86-1044) OX=716544 GN=folE PE=3 SV=1
MHQSKIDQQAITTNFPSPVKAPPQMSDEERIHYIAVRFKEIMEALGLDLNDKSLERTPQRVARMYVKEVFSGLNPSTFPPISYIEDQYKTLNRSNMLFMKVFVTSFCEHHFVPMIGTAYVAYLPNKKLIGLSKIPRIVRFFARRPQVQERLTAQIADSLSRILETEDVAVSINCQHFCIAARGIEDQNGWCTTQVLRGKFHDEALQRQEFFDAIKRSSLNP

SEQ ID NO: 16500 - protein, 221 aa, Waddlia chondrophila
  REGION 1..221: note = tr|F8LBX3|F8LBX3_9BACT GTP cyclohydrolase 1; OS = Waddlia chondrophila 2032/99 OX=765953 GN=folE PE=3 SV=1
MHQSKIDQQAITTNFPSPVKAPPQMSDEERIHYIAVRFKEIMEALGLDLSDKSLERTPQRVARMYVKEVFSGLNPSTFPPISYIEDQYKTLDRSNMLFMKVFVTSFCEHHFVPMIGTAYVAYLPNKKLIGLSKIPRIVRFFARRPQVQERLTAQIADSLSRILETEDVAVSINCQHFCIAARGIEDQNGWCTTQVLRGKFHDEALQRQEFFDAIKRSSLNP

SEQ ID NO: 16501 - protein, 200 aa, unidentified
  source 1..200: note = Waddliaceae bacterium
  REGION 1..200: note = tr|A0A2E3LXK7|A0A2E3LXK7_9BACT GTP cyclohydrolase 1; OS = Waddliaceae bacterium OX=2026802 GN=folE PE=3 SV=1
MTYQTTEFSDFSSELTSSKEMTDAVLTLLRGMGEDPNREGLLDTPKRVVKMYKELTAGYSKSEVEVINGAIFTVEHHDIVVVEDIPFYSLCEHHMLPFFGTCTIAYLPNGRVLGLSKFARVVELFARGLQVQERMTEEIADCIQRHLEAEGVAVFVEAQHLCMAMRGVQKPHAKMRTRTYRGCFVNDQLKKNDLIQAMRS

SEQ ID NO: 16502 - protein, 224 aa, Weeksella virosa
  REGION 1..224: note = tr|F0P2Y7|F0P2Y7_WEEVC GTP cyclohydrolase 1; OS = Weeksella virosa (strain ATCC 43766 / DSM 16922 / JCM 21250 / NBRC 16016 / NCTC 11634 / CL345/78) OX=865938; GN = folE PE =3 SV=1
MCDKHIDELADEHIMTNLETPLRADAFDLAVDEKVKLIEDDFKKIMLTLGLDLTDDSLKGTPKRVAKMFVKEIFGGLLPENRPGMSTFENKYNYNQMLVEKDIVVYSTCEHHFLPIVGRAHVAYISKGRVIGLSKMNRIVDYFAKRPQVQERLTMQVVKALQDALGTEDVACVIDAKHLCVNSRGIRDIESSTVTAEYGGQFKKDENLRKEFLSYLRLNTTFNV

SEQ ID NO: 16503 - protein, 181 aa, Weissella cibaria
  REGION 1..181: note = tr|A0A0D1K9D8|A0A0D1K9D8_9LACT GTP cyclohydrolase 1; OS = Weissella cibaria OX=137591 GN=folE PE=3 SV=1
MQTSEEDVRRLLTAIGDDPSRPGLIETPARVVKANAEIFAHTGESTFTDYKLFEVATDTDMVVVADIPFYSMCEHHLLPFFGTVTVAYQPKQQVIGLSKIPRLVDWAARRPSVQEGLTTLIADELSRIVSAEGVAVHISARHMCMEMRGINRPGTTTTTQVTRGIFKTDAMLRQEFQQQVH

SEQ ID NO: 16504 - protein, 181 aa, Weissella cibaria
  REGION 1..181: note = tr|A0A3R6C002|A0A3R6C002_9LACT GTP cyclohydrolase 1; OS = Weissella cibaria OX=137591 GN=folE PE=3 SV=1
MQTSEEDVRRLLTAIGDDPSRSGLIETPARVVKANAEIFAHTGETTFTDYKLFEVATDTDMVVVTDIPFYSMCEHHLLPFFGTVTVAYQPKQQVIGLSKIPRLVDWAARRPSVQEGLTTLIADELSRIVSAEGVAVHISARHMCMEMRGINRPGTTTTTQVTRGIFKTDAVLRQEFQQQVH

SEQ ID NO: 16505 - protein, 182 aa, Weissella confusa
  REGION 1..182: note = tr|A0A482PQT6|A0A482PQT6_WEICO GTP cyclohydrolase 1; OS = Weissella confusa OX=1583 GN=folE PE=3 SV=1
MNEMKEAAVRQFLLAIGDDPQRAGLVDTPGRVVKANAEIFAHTGEKHFANYKLFDVDTDAEMVVLADIPFYSMCEHHLLPFFGTATIAYQPKQHVIGLSKLPRLVEWAARRPNMQEELTTLIADELERILGAEGIGVHLSARHMCMEMRGINQPGTTTTSYVTRGSLKTDHGLRREFMEQVN

SEQ ID NO: 16506 - protein, 186 aa, Weissella minor
  REGION 1..186: note = tr|A0A0R2JIA0|A0A0R2JIA0_9LACT GTP cyclohydrolase 1; OS = Weissella minor OX=1620 GN=folE PE=3 SV=1
MDQALIEESIRNIFKAIGEDANRPGIQETPTRVARMYEEIFSTLETPDFINYKLFDTDDSINGEMITVADIPFYSMCEHHLLPFFGTVSVGYIPKNNKVIGLSKIPRLVDYATKKPTLQEEVTSTIGNTLMDILDPAGVAVFVKARHMCVEMRGVKKSNSMTKSSFYRGGFTNIDTQQEFFNTLNN

SEQ ID NO: 16507 - protein, 350 aa, unidentified
  source 1..350: note = Weissella oryzae
  REGION 1..350: note = tr|A0A069CS36|A0A069CS36_WEIOS GTP cyclohydrolase 1; OS = Weissella oryzae (strain DSM 25784 / JCM 18191 / SG25); OX = 1329250 GN=folE PE=3 SV=1
METVYLSLGSNLGDRQHYLEQALTLLGTNQKVMVSKQSSFYETSPVGGVVQDNFINLAIEIMTTLSAQELLDLIHTIEKQLNRQRLVHWGPRTIDIDIIFYGEQQIDQANLKVPHPEAFNRYFVLQPLAEIMEDSAPVKAQVNTALEQLAKTVTDQRLEKVAVDLTPKEKIAAAVKTILSAVGEDPQREGLVETPQRVAKMYEEILASQTKGPFEDYKLFETSPDERNQLIVMKDIPFYSMCEHHMLPFFGQVHVAYLPQAGKIIGLSKIPRLVEYVSQKLQVQENLTREIAETLVEILAPLGVAVVVEARHMCVEMRGIKKLNSHTKTSYYTGVFETDANMRQEFLAGL

SEQ ID NO: 16508 - protein, 196 aa, Weissella sp.
  REGION 1..196: note = tr|A0A4P6YRJ7|A0A4P6YRJ7_9LACT GTP cyclohydrolase 1; OS = Weissella sp. 26KH-42 OX=2506420 GN=folE PE=3 SV=1
MKEFNEEQLTTLAHGTTDLLQVIGDDVNRSGVIETPGRVAQAYAEIFAHTGETEFTNYKLFPAEKNADMVVIRDIPFYSMCEHHLLPFFGTVDVAYIPTGEIIGLSKVPRLVDWVARRPQVQENITTMIGDELQRILNPAGIAIYVKARHMCMEMRGINQPGDQTVTNYYLGKFKDDANSRLEFLLNSGVLAQLDK

SEQ ID NO: 16509 - protein, 105 aa, Weissella sp.
  REGION 1..105: note = tr|A0A139QHC1|A0A139QHC1_9LACT GTP cyclohydrolase I type 1 OS=Weissella sp. DD23 OX=1777865 GN=WEIDD23_02112; PE = 4 SV=1
MLPFFGTVTVAYQPKQQVIGLSKIPRLVDWAARRPSVQEGLTTLIADELSRIVSAEGVAVHISARHMCMEMRGINRPGTTTTTQVTRGIFKTDAMLRQEFQQQVH

SEQ ID NO: 16510 - protein, 186 aa, Weissella viridescens
  REGION 1..186: note = tr|A0A0R2H258|A0A0R2H258_WEIVI GTP cyclohydrolase 1; OS = Weissella viridescens OX=1629 GN=folE PE=3 SV=1
MDHELIEASVRNIFKAIGEDPDRPGIQETPKRVANMYEEIFSSLQQPKFEAYKLFETDDSINGELITVADIPFYSMCEHHLLPFFGTVSVGYIPQNGQVIGLSKIPRLVDYAAKRPTLQEAVTSTIGQTLMDILEPSGVGVIVKARHMCVEMRGVNKSNSVTKTSFYRGTFKEQAVRQEFLDTLKQ

SEQ ID NO: 16511 - protein, 103 aa, Weissella viridescens
  REGION 1..103: note = tr|A0A380P199|A0A380P199_WEIVI GTP cyclohydrolase 1; OS = Weissella viridescens OX=1629 GN=folE PE=4 SV=1
MSITYYHFWYRVGRLYPTNGQVIGLSKIPRLVDYAAKRPTLQEAVTSTIGQTLMDILEPSGVGVIVKARHMCVEMRGVNKSNSVTKTSFYRGTFKEQAVRQEF

SEQ ID NO: 16512 - protein, 365 aa, Wenxinia marina
  REGION 1..365: note = tr|A0A0D0Q0Q3|A0A0D0Q0Q3_9RHOB GTP cyclohydrolase FolE2 OS=Wenxinia marina DSM 24838 OX=1123501 GN=folE2; PE = 3 SV=1
MDQMTKERTPDRAAAERALNVLRDWVASSTPEEVAQLDPLVSRLIPGQEVSNYPALARAYPEEFEVDEAYRASMPDLQNGPTSLIRGAKRMIQHVGISNFRLPIRFHTRDDGDLTLETSVTGTVSLDAGRKGINMSRIMRSFYRYAGETFSFDVIERALDDYMTDHASFDARIQMRFSFPMKLRSLRSGLEGFQYYDIALELVDKGGVRKKIFHLDYVYSSTCPCSLELSEHARQFRGQLATPHSQRSVARISVVAPEGHPTLWFEDLVDLARRAVPTETQVMVKREDEQAFAELNAANPIFVEDAARLFCAELLADPRVGDFRVIASHQESLHSHDAVSVLTEGPTFEADSLDPKLFHTLFHVG

SEQ ID NO: 16513 - protein, 222 aa, unidentified
  source 1..222: note = Wenyingzhuangia fucanilytica
  REGION 1..222: note = tr|A0A1B1Y9J7|A0A1B1Y9J7_9FLAO GTP cyclohydrolase 1; OS = Wenyingzhuangia fucanilytica OX=1790137 GN=folE PE=3; SV = 1
MMNYEEIDDIGDNHIGDVTKTPMRADAFELSDAEKIEKIQANVKEIMETLGLDLTDDSLQGTPRRVAKAYVKELFGGLNPENRPKLSTFNNSYQYGEMLVEKNIVVYSTCEHHLLPIIGRAHVAYISKGTVVGLSKMNRIVDHYAKRPQVQERLTRQIVKALQEALGTDDVACIIDAKHLCVNSRGVKDIESSTVTAEFGGAFKNVDKQKEFRDYIKLETKF

SEQ ID NO: 16514 - protein, 228 aa, unidentified
  source 1..228: note = Wenyingzhuangia marina
  REGION 1..228: note = tr|A0A1M5W3P5|A0A1M5W3P5_9FLAO GTP cyclohydrolase 1; OS = Wenyingzhuangia marina OX=1195760 GN=folE PE=3 SV=1
MSQEIDIMNYEEIDDIGDNHIGDVTKTPMRADAFELSDAEKIEKIQENVKEIMETLGLDLTDDSLQGTPRRVAKAYVKELFGGLNPENKPKLSTFNNSYQYGEMLVEKNIVVYSTCEHHLLPIIGRAHVAYISKGTVVGLSKMNRIVDHFAKRPQVQERLTRQVVKALQEALGTEDVACIIDAKHLCVNSRGVKDIESSTVTAEFGGAFKNVEKQKEFRDYIKLETKF

SEQ ID NO: 16515 - protein, 326 aa, unidentified
  source 1..326: note = Wenzhouxiangella marina
  REGION 1..326: note = tr|A0A0K0XWH6|A0A0K0XWH6_9GAMM GTP cyclohydrolase FolE2 OS=Wenzhouxiangella marina OX=1579979 GN=folE2 PE=3; SV = 1
MVPMTKPTKTAEMPDIASHAKAQVAGRLDWVGMNHIEMPLLLDTGGGHPVQTTARISAFVDLDEPDTRGIHMSRLYLHLDRTLGEQTLTPLTLRRVLKDFLGSHEGLSTQAMVRIDFDYLIKRKSLVSDNSGWKRYPFSLIASLQGKNFELEMAYQVIYSSTCPCSAALARQLIQDQFRKDFAGQDSLDPQAVVDWLGSEQGIVATPHSQRSAADVRLQLSPSYEAFPFVEMIDAIEDALKTPVQAAVKREDEQAFALLNGQNLMFCEDAARRVQAALESRDRVLDFWARCSHFESLHPHNAVSIVTKGVEGGYEPIDGHPSAWAE

SEQ ID NO: 16516 - protein, 337 aa, unidentified
  source 1..337: note = Wenzhouxiangella sediminis
  REGION 1..337: note = tr|A0A3E1KC06|A0A3E1KC06_9GAMM GTP cyclohydrolase FolE2 OS=Wenzhouxiangella sediminis OX=1792836 GN=folE2; PE = 3 SV=1
MQGVYRLNAAESLMKNRSKVANMPDVASHARAQVAGQLDWVGMNTIEMPILLDATDGKHVQTTAHISAFVDLERPEKRGIHMSRLYLHLDRALAEHTVTPALLRHLLRDFLASHEDLSSTAMVRLDFDYMLRRKSLVSDNSGWKRYPISLIASLDDREFQVEMALQIAYSSTCPCSAALARQLIQDQFRRDFGDDGPVDIEAVIEWLGSEEGIVATPHSQRSAADIRLQLAPSFEAFPFVEMIDSVEGALKTPVQAAVKREDEQAFALLNGQNLMFCEDAARRVQTVLESEERVIDFWARCRHFESLHPHNAVAIVTKGVEGGYQPIDGQPSGWRHD

SEQ ID NO: 16517 - protein, 324 aa, unidentified
  source 1..324: note = Wenzhouxiangella sp.
  REGION 1..324: note = tr|A0A372BX88|A0A372BX88_9GAMM GTP cyclohydrolase FolE2 OS=Wenzhouxiangella sp. 15181 OX=2301224 GN=folE2; PE = 3 SV=1
MKNRPKTANMPDVATHAQAQVAGQLDWVGMNSIEMPILLDATDGTHTQTTAHVNAFVDLERPEKRGIHMSRLYLHLDQALAEHTVTPALLRHLLRDFLASHEDLSSRAMIRLDFDYMLRRKALVSDNSGWRRYPISIIASLDDREFELEMALQIAYSSTCPCSAALARQLIQDQFRKDFGDEGSLDAQAVLEWLGSEEGIVATPHSQRSAADIRLQLAPSFEAFPFVEMIDAVEGALKTPVQAAVKREDEQAFALLNGQNLMFCEDAARRVQTALESQERVIDFWARCRHFESLHPHNAVAIVTKGVEGGYEPIDGQPSGWRHD

SEQ ID NO: 16518 - protein, 233 aa, unidentified
  source 1..233: note = Westiellopsis prolifica
  REGION 1..233: note = tr|A0A4Q9J403|A0A4Q9J403_9CYAN GTP cyclohydrolase 1; OS = Westiellopsis prolifica IICB1 OX=1970206 GN=folE PE=3; SV = 1
MTVRNSKHFANAVPVVVGDSNSLEIVDKNRKIHDSHEKQDSSESSNSQIALAVEEILQAVGEDPEREGLLKTPKRVAEAMRFLTSGYSHSLEDLINGAIFDEDHNEMVLVRDINVFSLCEHHMLPFIGKAHVAYIPNRKVVGLSKLARIVEMYSRRLQVQERLTRQIAEAIQVALNPKGVAVVVEASHMCMVMRGVQKSGSSTITNTMLGVFQEDHRVREEVFSLIRNKQIFF

SEQ ID NO: 16519 - protein, 235 aa, unidentified; identical to SEQ ID NO: 10479
  source 1..235: note = Westiellopsis prolifica
  REGION 1..235: note = tr|A0A4Q9J4T8|A0A4Q9J4T8_9CYAN GTP cyclohydrolase 1; OS = Westiellopsis prolifica IICB1 OX=1970206 GN=folE PE=3; SV = 1

SEQ ID NO: 16520 - protein, 216 aa, Wigglesworthia glossinidia
  REGION 1..216: note = sp|Q8D2N7|GCH1_WIGBR GTP cyclohydrolase 1; OS = Wigglesworthia glossinidia brevipalpis OX=36870 GN=folE; PE = 3 SV=1
MEVLTKEALLVKNALLNKGIETPFKKIYEKNKPDIHKISKYIKKIMDLLNLDLNNDSLSKTPNRIAYMYIEEIFSGLNYNNFPKITLIKNTSKINDLITVNNIVLNSTCEHHFLIFEGKAIVSYIPDKILIGLSKINRIVDFFSKRPQIQERLTNQILVAIQILLDTKNVAVAIKAKHLCVKARGIKDSHSKTLTLSLGGVFKSKQNIKKEFLKDF

SEQ ID NO: 16521 - protein, 221 aa, Wigglesworthia glossinidia
  REGION 1..221: note = tr|H6Q500|H6Q500_WIGGL GTP cyclohydrolase 1; OS = Wigglesworthia glossinidia endosymbiont of Glossina morsitans morsitans (Yale colony) OX=1142511 GN=folE PE=3; SV = 1
MSKFTKEALQVKHALISQGLENPFFNCFKDIKQKKVLIAKYIQKIMKLLNLNLTNDSLSQTPLRIARMYIEEIFSGLNYANFPKITVIKNITKINEMIIIDDIIFHSICEHHFLVFEGKATVAYIPEYVLIGLSKINRIVNFFSKRPQIQERLTRQILIALQILLSTKNVAVSIRARHFCVRARGIKDSESNTKTLAFGGKFRDQLHLRNEFLQITNNSKL

SEQ ID NO: 16522 - protein, 200 aa, Williamsia limnetica
  REGION 1..200: note = tr|A0A318S695|A0A318S695_9NOCA GTP cyclohydrolase 1; OS = Williamsia limnetica OX=882452 GN=folE PE=3 SV=1
MTSREKLTAITPFDADRAERAVRELLIAVGEDPDRDGLKETPARVARAYQEMFGGLHSDPDEVLATTFDVGHDELVLVKDIPMYSTCEHHLVSFHGVAHVGYIPGASGQVTGLSKLARVVDLYARRPQVQERLTTQIADAIVRKLEPRGVIVVIEAEHLCMAMRGIRKPGASTTTSAVRGQFKTSAVSRGEALDLISRRS

SEQ ID NO: 16523 - protein, 203 aa, Williamsia marianensis
  REGION 1..203: note = tr|A0A315S3A3|A0A315S3A3_9NOCA GTP cyclohydrolase 1; OS = Williamsia marianensis OX=322609 GN=folE PE=3 SV=1
MTQETSGTPAKNGAIAPFDAERAERAVRELLIAVGEDPDRDGLKETPARVARAYVEMFGGLHVNPDDVLATTFDVGHDELVLVKDIPMYSTCEHHLVSFHGVAHVGYIPGPTGQVTGLSKLARLVDLYAKRPQVQERLTTQIADAIVRKLDPRGVIVVIEAEHLCMAMRGIRKPGATTTTSAVRGQFKTSAVSRGEALDLISR

SEQ ID NO: 16524 - protein, 203 aa, Williamsia marianensis
  REGION 1..203: note = tr|A0A2G3PHB1|A0A2G3PHB1_9NOCA GTP cyclohydrolase 1; OS = Williamsia marianensis OX=322609 GN=folE PE=3 SV=1
MTQETSGAPAKNGAIAPFDAERAERAVRELLIAVGEDPDRDGLKETPARVARAYVEMFGGLHVNPDDVLATTFDVGHDELVLVKDIPMYSTCEHHLVSFHGVAHVGYIPGPTGQVTGLSKLARLVDLYAKRPQVQERLTTQIADAIVRKLDPRGVIVVIEAEHLCMAMRGIRKPGATTTTSAVRGQFKTSAVSRGEALDLISR

SEQ ID NO: 16525 - protein, 203 aa, Williamsia muralis; identical to SEQ ID NO: 16523
  REGION 1..203: note = tr|A0A495JYB7|A0A495JYB7_9NOCA GTP cyclohydrolase 1; OS = Williamsia muralis OX=85044 GN=folE PE=3 SV=1

SEQ ID NO: 16526 - protein, 200 aa, Williamsia sp.
  REGION 1..200: note = tr|A0A261CZW9|A0A261CZW9_9NOCA GTP cyclohydrolase 1; OS = Williamsia sp. 1138 OX=1903117 GN=folE PE=3 SV=1
MTSREKLTAVNPFDADRAERAVRELLIAVGEDPDRDGLKETPARVARAYQEMFGGLHSDPDEVLATTFDVGHDELVLVKDIPMYSTCEHHLVSFHGVAHVGYIPGASGQVTGLSKLARVVDLYARRPQVQERLTTQIADALVRKLDPRGVIVVIEAEHLCMAMRGIRKPGASTTTSAVRGQFKTSAVSRGEALDLISRRS

SEQ ID NO: 16527 - protein, 204 aa, Williamsia sp.
  REGION 1..204: note = tr|A0A0Q5QBE7|A0A0Q5QBE7_9NOCA GTP cyclohydrolase 1; OS = Williamsia sp. Leaf354 OX=1736349 GN=folE PE=3 SV=1
MTRTEENRAAIAPFDQPRAEAAVRELLVAIGEDPDRDGLKETPARVARAYQEMFGGLHVEPDEVLATTFDVGHDELVLVKDIPMYSTCEHHLVSFHGVAHVGYIPGKDGQVTGLSKLARVVDLYAKRPQVQERLTTQIADALVRKLDPRGVIVVIEAEHLCMAMRGIRKPGASTTTSAVRGIFKTSAVSRGEALDLIARRSAVR

SEQ ID NO: 16528 - protein, 230 aa, unidentified
  source 1..230: note = Williamsia sterculiae
  REGION 1..230: note = tr|A0A1N7CRQ3|A0A1N7CRQ3_9NOCA GTP cyclohydrolase 1; OS = Williamsia sterculiae OX=1344003 GN=folE PE=3 SV=1
MTVTDHGSRPGHDTVHAGSERTRPDGNGPDVTDATDGTGPTAFDRPRAEAAVRELLIALGEDPGRDGLRDTPARVARAYEEMFAGLFVDPDEVLATTFDVGHDELVLVKDIPMYSTCEHHLVSFHGVAHVGYIPGESGQVTGLSKLARVVDLYAKRPQVQERLTSQIADAIVRRLEPRGVIVVIEAEHLCMAMRGIRKPGATTTTSAVRGLFKTSAVSRGEALDLISRTK

SEQ ID NO: 16529 - protein, 212 aa, unidentified
  source 1..212: note = Williamwhitmania taraxaci
  REGION 1..212: note = tr|A0A1G6HPK5|A0A1G6HPK5_9BACT GTP cyclohydrolase 1; OS = Williamwhitmania taraxaci OX=1640674 GN=folE PE=3 SV=1
MEIINNGTSINENEGYAKIERWNPEKTRLIAEHYKSILSLIGEDPDREGLLDTPVRVAKAMQFLAQGYNTDPTEILRKAKFKEDYQQMVIVKDIELYSMCEHHMIPFYGKAHVAYIPNGYITGLSKIARVVDAFARRLQVQERLTVQIRDAIQETLKPLGVAVVIEASHMCMQMRGVQKQNSSTTTSAFTGAFLSHNKTREEFIHLIGVKLH

SEQ ID NO: 16530 - protein, 230 aa, Winogradskyella arenosi
  REGION 1..230: note = tr|A0A368ZDF2|A0A368ZDF2_9FLAO GTP cyclohydrolase 1; OS = Winogradskyella arenosi OX=533325 GN=folE PE=3 SV=1
MTLKATSQLTETTLESFSSDAIGDDHLFTSLDTPMRANAFEMSHEDKKDRISLLFSEIMDVLGLDLTDDSLSGTPDRVAKMYIDEVFSSLDPRNKPKVSLFDNKYQYHQMVVEKNITFYSYCEHHFVPIIGKAHVAYKSSGKVIGLSKLNRIVQYYAKRPQVQERLTNQIAHELKTVLETKDVAIIIDAKHLCVASRGVKDDASATVTTYYGGEFNTPSKIIELQNYINH

SEQ ID NO: 16531 - protein, 225 aa, Winogradskyella arenosi
  REGION 1..225: note = tr|A0A368ZDT0|A0A368ZDT0_9FLAO GTP cyclohydrolase 1; OS = Winogradskyella arenosi OX=533325 GN=folE PE=3 SV=1
MKIESDFNDVDAIGDDHIGTSSDTPLRADAFKLSNAEKIDSIKADVTHILETLGLDLNDDSLKGTPNRVAKMFVNEIFGGLDPQKKPNASTFDNKYKYGEMLVEKNITVYSTCEHHLLPIVGRAHIAYISNGTVVGLSKMNRIVDYYAKRPQVQERLTIQIVKELQEVLGTDDVACIIDAKHLCVNSRGIRDIESSTVTSEFGGKFNETNTRRELLEYIKLETKF

SEQ ID NO: 16532 - protein, 225 aa, unidentified
  source 1..225: note = Winogradskyella aurantia
  REGION 1..225: note = tr|A0A265UN81|A0A265UN81_9FLAO GTP cyclohydrolase 1; OS = Winogradskyella aurantia OX=1915063 GN=folE PE=3 SV=1
MKIDSDFNDIDAIGNDHLGSSSDTPMRPDAFKLSNTDKIDIIKDDVRHIMETLGLDLKDDSLKGTPDRVAKMFINEIFAGLDPAKKPSASTFENKYKYGEMLVEKNITVYSTCEHHLLPIVGRAHVAYISNGSVVGLSKMNRIVDYFAKRPQVQERLTIQIVKELQNVLGTQDVACVIDAKHLCVNSRGIRDIESSTVTSEFGGKFKQKEVKREFLDYIQLDTQF

SEQ ID NO: 16533 - protein, 230 aa, unidentified
  source 1..230: note = Winogradskyella aurantia
  REGION 1..230: note = tr|A0A265UWR4|A0A265UWR4_9FLAO GTP cyclohydrolase 1; OS = Winogradskyella aurantia OX=1915063 GN=folE PE=3 SV=1
MKTETLTKKNGHKLNGFSIDDIGDDHLFTGLDTPMKPNAFEMSNEEKKERISILFSEIMDVLGLDLTDDSLKGTPDRVAKMYIEEIFSGLDPKNKPKVALFDNKYQYNQMLVEKDITFYSNCEHHFVPIIGKAHVAYISSGKVIGLSKLNRIVQYYAKRPQVQERLTEQIANELKTILGTEDVAVIIDAKHLCVSSRGIKDDTSATVTTHYSGAFNTPEKINELQNYINN

SEQ ID NO: 16534 - protein, 230 aa, Winogradskyella epiphytica
  REGION 1..230: note = tr|A0A2V4YB33|A0A2V4YB33_9FLAO GTP cyclohydrolase 1; OS = Winogradskyella epiphytica OX=262005 GN=folE PE=3 SV=1
MNTVTIPNKNGHTINDFSNEEIGDDHLFTSLDTPIKPSAFELSDEEKKERISILFSEIMDVLGLDLTDDSLQGTPKRVAKMYIDEIFSGLDPKNKPKIALFDNKYQYNQMLVEKNITFYSNCEHHFVPIIGKAHVAYKSSGKVIGLSKLNRIVQYYAKRPQVQERLTNQIANELKTVLNTEDVAVIIDAKHLCVASRGVQDDTSATVTTYYGGEFNTPAKIAELQNYLNN

SEQ ID NO: 16535 - protein, 225 aa, Winogradskyella epiphytica
  REGION 1..225: note = tr|A0A2V4WUK4|A0A2V4WUK4_9FLAO GTP cyclohydrolase 1; OS = Winogradskyella epiphytica OX=262005 GN=folE PE=3 SV=1
MKIESDFNDIDAIGDDHVGSSSDTPLRADAFKLSSNEKIDIIKDDVRHILETLGLDLNDDSLKGTPNRVAKMFVNEIFGGLDPKKKPSASTFDNKYKYGEMLVEKNITVYSTCEHHLLPIVGRAHIAYISNGTVVGLSKMNRIVDYFAKRPQVQERLTIQVVKELQKVLNTEDVACVIDAKHLCVNSRGIRDIESSTVTSEFGGKFKDNQTKREFLDYIQLDTQF

SEQ ID NO: 16536 - protein, 230 aa, Winogradskyella eximia
  REGION 1..230: note = tr|A0A3D9H068|A0A3D9H068_9FLAO GTP cyclohydrolase 1; OS = Winogradskyella eximia OX=262006 GN=folE PE=3 SV=1
MNTETISKKNGHQLKGFSAEDIGDDHLFTGLETPMKPNAFEMSNTEKKERISILFSEIMDVIGLDLTDDSLQGTPDRVAKMYIEEIFSGLDPKNKPKVALFDNKYQYNQMLVEKNITFYSNCEHHFVPIIGKAHIAYKSSGKVIGLSKLNRIVQYYARRPQVQERLTNQIANELKTVLETEDVAVIIDAKHLCVSSRGIQDDTSTTVTTYYGGEFNKASKIAELQNYINN

SEQ ID NO: 16537 - protein, 225 aa, Winogradskyella eximia
  REGION 1..225: note = tr|A0A3D9H0P6|A0A3D9H0P6_9FLAO GTP cyclohydrolase 1; OS = Winogradskyella eximia OX=262006 GN=folE PE=3 SV=1
MKIENDFNDIDALGEDHLSSSSETPLRADAFELSSSEKINIIKDDVKHILETLGLDLTDDSLKGTPNRVAKMFVNEIFSGLDPDKKPSASTFDNKYKYGEMLVEKNITVYSTCEHHLLPIVGRAHIAYISNGTVVGLSKMNRIVDYYSKRPQVQERLTIQIVKELQKVLNTDDVACVIDAKHLCVNSRGIRDIESSTVTSEFGGKFKESDTRRELLEYIKLETQF

SEQ ID NO: 16538 - protein, 224 aa, unidentified
  source 1..224: note = Winogradskyella jejuensis
  REGION 1..224: note = tr|A0A1M5RYX9|A0A1M5RYX9_9FLAO GTP cyclohydrolase 1; OS = Winogradskyella jejuensis OX=1089305 GN=folE PE=3 SV=1
MKIENDFDIDAIGDDHVSSSSETPLRDDAFTLSNSEKIDSIKADVKHIMETLGLDLTDDSLKGTPNRVAKMFVNEIFAGLHPDNKPSASTFDNKYKYGEMLVEKNITVYSTCEHHLLPIVGKAHVAYISNGSVVGLSKMNRIVDYYAKRPQVQERLTIQIVKELQDVLGTKDVACVIDAKHLCVNSRGIRDIASSTVTSEFGGKFKTKETRREFLDYIKLDTEF

SEQ ID NO: 16539 - protein, 230 aa, unidentified
  source 1..230: note = Winogradskyella jejuensis
  REGION 1..230: note = tr|A0A1M5V2W6|A0A1M5V2W6_9FLAO GTP cyclohydrolase 1; OS = Winogradskyella jejuensis OX=1089305 GN=folE PE=3 SV=1
MKTETLKTKNGHALNGFSIEDIGDDHLFTSLDTPMKANAFDMPDSEKKERISILFSEIMDVLGLDLTDDSLKGTPDRVAKMYVEEIFSGLDPKNKPKVALFDNKYQYNQMLVEKDITFYSNCEHHFVPIIGKAHVAYISSGKVIGLSKLNRIVQYYAKRPQVQERLTQQIANELKTVLETEDVAVIIDAKHLCVSSRGVKDDTSATVTTYYGGVFNTPEKINELQNYINS

SEQ ID NO: 16540 - protein, 227 aa, Winogradskyella pacifica
  REGION 1..227: note = tr|A0A3D9N0F5|A0A3D9N0F5_9FLAO GTP cyclohydrolase 1; OS = Winogradskyella pacifica OX=664642 GN=folE PE=3 SV=1
MITEKISKTNGHNLSIDEMGDDHLFTGLDTPMKANAFEMSNTEKKERISILFSEIMDVLGLDLTDDSLQGTPDRVAKMYIEEIFSGLDPKNKPQVALFDNKYQYNQMLVEKNITFYSNCEHHFVPIIGKAHIAYKSSGKVIGLSKLNRIVQYYAKRPQVQERLTNQIANELKTVLETEDVAVIIDAKHLCVSSRGIQDDTSTTVTTYYGGEFNNASKILELQNYINN

SEQ ID NO: 16541 - protein, 225 aa, Winogradskyella pacifica
  REGION 1..225: note = tr|A0A3D9LMI6|A0A3D9LMI6_9FLAO GTP cyclohydrolase 1; OS = Winogradskyella pacifica OX=664642 GN=folE PE=3 SV=1
MKIESDFNDIDALGDDHIGSSSDTPLRPDAFKLSNAEKIESIKGDVKHILETLGLDLNDDSLKGTPNRVAKMFVNEIFGGLDPDKKPSASTFDNKYKYGEMLVEKNITVYSTCEHHLLPIVGRAHIAYISNGTVVGLSKMNRIVDYYAKRPQVQERLTIQVVKELQAVLGTDDVACIIDAKHLCVNSRGIRDIESSTVTSEFGGKFNEKETRRELLDYIKLDTQF

SEQ ID NO: 16542 - protein, 227 aa, unidentified
  source 1..227: note = Winogradskyella psychrotolerans
  REGION 1..227: note = tr|S7VTS4|S7VTS4_9FLAO GTP cyclohydrolase 1; OS = Winogradskyella psychrotolerans RS-3 OX=641526 GN=folE; PE = 3 SV=1
MITEKISKTNGHKLSIDEIGDDHLFSGLDTPMKASAFEMSDTEKKERISILFSEIMDVLGLDLTDDSLQGTPDRVAKMYIEEIFSGLDPKNKPKVALFDNKYQYNQMLVEKNITFYSNCEHHFVPIIGKAHIAYKSSGKVIGLSKLNRIVQYYAKRPQVQERLTNQIANELKTVLETEDVAVIIDAKHLCVSSRGIQDDTSTTVTTYYGGEFNNASKILELQNYINN

SEQ ID NO: 16543 - protein, 225 aa, unidentified
  source 1..225: note = Winogradskyella psychrotolerans
  REGION 1..225: note = tr|S7WUN5|S7WUN5_9FLAO GTP cyclohydrolase 1; OS = Winogradskyella psychrotolerans RS-3 OX=641526 GN=folE; PE = 3 SV=1
MKIESDFNDIDALGDDHIGSSSDTPLRPDAFKLSNAEKIESIKGDVKHILETLGLDLTDDSLKGTPNRVAKMFVNEIFGGLDPNKKPTASTFDNKYKYGEMLVEKNITVYSTCEHHLLPIVGRAHIAYISNGTVVGLSKMNRIVDYYAKRPQVQERLTIQVVKELQDVLGTADVACIIDAKHLCVNSRGIRDIESSTVTSEFGGKFNEKETRRELLDYIKLDTQF

SEQ ID NO: 16544 - protein, 230 aa, Winogradskyella sp.
  REGION 1..230: note = tr|A0A368MEU0|A0A368MEU0_9FLAO GTP cyclohydrolase 1; OS = Winogradskyella sp. KYW1333 OX=2282123 GN=folE PE=3 SV=1
MNTEAISKTNGHKLNGFTHEDIGDDHLFTSLETPMKANAFDMSNHEKKNRISILFSEIMDVLGLDLTDDSLKGTPDRVAKMYVEEIFSGLDPENKPKVALFDNKYQYNQMLVEKNITFYSNCEHHFVPIIGKAHIAYKSSGKVIGLSKLNRIVQYYAKRPQVQERLTNQIANELKTVLETEDVAVIIDAKHLCVSSRGVKDDTSATVTTYYGGEFNTPEKISELQNYINN

SEQ ID NO: 16545 - protein, 225 aa, Winogradskyella sp.
  REGION 1..225: note = tr|A0A368MHV8|A0A368MHV8_9FLAO GTP cyclohydrolase 1; OS = Winogradskyella sp. KYW1333 OX=2282123 GN=folE PE=3 SV=1
MRIDSDFNDIDALGDDHISSSSETPMRADAFKLSNEEKMDIIKDDVRHIMETLGLDLSDDSLSGTPRRVAKMFVNEIFGGLDPAKKPSASTFENKYKYGEMLVEKNITVYSTCEHHLLPIVGKAHVAYISNGSVVGLSKMNRIVDYFAKRPQVQERLTIQIVKELQKVLNTEDVACVIDAKHLCVNSRGIRDVESSTVTSEFGGKFKEKETKREFLDYIQLDTKF

SEQ ID NO: 16546 - protein, 225 aa, Winogradskyella thalassocola
  REGION 1..225: note = tr|A0A1G8ICA5|A0A1G8ICA5_9FLAO GTP cyclohydrolase 1; OS = Winogradskyella thalassocola OX=262004 GN=folE PE=3 SV=1
MKIESDFNDIDALGEDHISSSSETPLRADAFKLSSNEKINIIKDDVKHILETLGLDLNDDSLKGTPNRVAKMFVNEIFGGLDPDKKPSASTFDNKYKYGEMLVEKNITVYSTCEHHLLPIVGRAHIAYISNGTVVGLSKMNRIVDYYAKRPQVQERLTIQIVKELQAVLNTEDVACVIDAKHLCVNSRGIRDIESSTVTSEFGGKFKENETRRELLDYIKLDTQF

SEQ ID NO: 16547 - protein, 230 aa, Winogradskyella thalassocola
  REGION 1..230: note = tr|A0A1G8BAM5|A0A1G8BAM5_9FLAO GTP cyclohydrolase 1; OS = Winogradskyella thalassocola OX=262004 GN=folE PE=3 SV=1
MITEKNSKINGLTLNGFNKEDIGDDHLFTSLDTPMKPNAFEMSNSDKKERISILFSEIMDVLGLDLTDDSLQGTPDRVAKMYVEEIFSGLDPENKPKVTLFDNKYQYNQMLVEKNITFYSNCEHHFVPIIGKAHIAYKSSGKVIGLSKLNRIVQYYAKRPQVQERLTNQIANELKTVLETEDVAVIIDAKHLCVSSRGVQDDTSTTVTTYYGGEFSNASKILELQNYINN

SEQ ID NO: 16548 - protein, 224 aa, unidentified
  source 1..224: note = Winogradskyella wandonensis
  REGION 1..224: note = tr|A0A4R1KU16|A0A4R1KU16_9FLAO GTP cyclohydrolase 1; OS = Winogradskyella wandonensis OX=1442586 GN=folE PE=3 SV=1
MKIENDFDIDAIGDDHVSSSSETPLRDDAFVLSNSEKIKSIKADVQHIMETLGLDLTDDSLKGTPNRVAKMFVNEIFGGLHPDNKPSASTFENKYKYGEMLVEKNITVYSTCEHHLLPIVGKAHVAYISNGSVVGLSKMNRIVDYYAKRPQVQERLTIQIVKELQDVLGTEDVACVIDAKHLCVNSRGIRDIASSTVTSEFGGKFKTKETRREFLDYIKLDTEF

SEQ ID NO: 16549 - protein, 230 aa, unidentified
  source 1..230: note = Winogradskyella wandonensis
  REGION 1..230: note = tr|A0A4R1KKE8|A0A4R1KKE8_9FLAO GTP cyclohydrolase 1; OS = Winogradskyella wandonensis OX=1442586 GN=folE PE=3 SV=1
MKTETLTKTNGHALNGFTIEDIGDDHLFTSLDTPMKPNAFDMSNEEKKERISILFSEIMDVLGLDLTDDSLKGTPDRVAKMYIEEIFSGLDPKNKPKVALFDNKYQYNQMLVEKDITFYSNCEHHFVPIIGKAHVAYVSSGKVIGLSKLNRIVQYYAKRPQVQERLTQQIANELKTVLGTEDVAVIIDAKHLCVSSRGVKDNTSATVTTYYGGIFNTSEKINELQNYINS

SEQ ID NO: 16550 - protein, 199 aa, unidentified
  source 1..199: note = Woeseia oceani
  REGION 1..199: note = tr|A0A193LIF2|A0A193LIF2_9GAMM GTP cyclohydrolase 1; OS = Woeseia oceani OX=1548547 GN=folE PE=3 SV=1
MATRTPRKPKKPSRKQAEEAVSTLLLWAGDDPRREGLLDTPKRVARAYEDWFSGYNDDPVNYLKRTFEEVEGYDEMIVLRDISFESHCEHHMAPIIGCAHVGYLPNDKVVGISKLARVVETFARRFQVQEKMTAQIAHCIQDVLKPKGVGVVISASHQCMTTRGVHKSGVSMVTSQMLGTFRKDARTRAEFLNMIGPAR

SEQ ID NO: 16551 - protein, 197 aa, unidentified
  source 1..197: note = Woeseia sp.
  REGION 1..197: note = tr|A0A2E6EBF9|A0A2E6EBF9_9GAMM GTP cyclohydrolase 1; OS = Woeseia sp. OX=1980636 GN=folE PE=3 SV=1
MTKKNDLKRPSRKEAEDAISTLLLWAGEDPQREGLVDTPARVATAYEDWFSGYGQDPVRFLTRTFEEVEGYDEMIVLRDIKFESHCEHHMAPIIGVAHVGYLPSNKVVGISKLARVVDTFARRFQVQEKLTAQIANCIEEVLKPRGVGVVIDASHQCMTTRGIHKPGVSMVTSQMLGAFRKDARTRAEFLNMIGKNV

SEQ ID NO: 16552 - protein, 223 aa, unidentified
  source 1..223: note = Woeseiaceae bacterium
  REGION 1..223: note = tr|A0A2E8TN67|A0A2E8TN67_9GAMM GTP cyclohydrolase 1; OS = Woeseiaceae bacterium OX=2026806 GN=folE PE=3 SV=1
MAFNKIKTDPDLGKKVHEHLVSVGVETPVINNGLSSTEKIDKIQDNFSQILDTLGLDLSDDSLINSPKRIAKMYINEIFWGLDYEAFPKATVVENKMRYNEMVVVKNISVQSYCEHHFVVIDGLAAVAYVPKGKVLGLSKINRIVEYFSKRPQIQERLTEQIYHALSFILETEDVAVMIDGDHYCVKSRGVEDTGSSTITSRLGGGFKSDHKARAEFLALAKS

SEQ ID NO: 16553 - protein, 223 aa, unidentified
  source 1..223: note = Woeseiaceae bacterium
  REGION 1..223: note = tr|A0A2E5CFH5|A0A2E5CFH5_9GAMM GTP cyclohydrolase 1; OS = Woeseiaceae bacterium OX=2026806 GN=folE PE=3 SV=1
MSFNKIKTDPDLGQKVHEYLVSVGVETPVIANGLSNNEKINKIQNNFSQILGTLGLDLSDDSLINSPKRIAKMYINEIFWGLDYEAFPKATVVENKMKYNEMVIVKNISVQSYCEHHFVVIDGLAAVAYVPKEKVLGLSKINRIVEYFSKRPQIQERLTEQIYHALSFILETKDVAVMIDGDHYCVKSRGVEDTGSSTITSRLGGAFKSDHKARAEFLTLAKS

SEQ ID NO: 16554 - protein, 182 aa, Wohlfahrtiimonas chitiniclastica
  REGION 1..182: note = tr|L8Y199|L8Y199_9GAMM GTP cyclohydrolase 1; OS = Wohlfahrtiimonas chitiniclastica SH04 OX=1261130; GN = folE PE=3 SV=1
MSDLEKNYRAILTEIGEDPEREGLVDTPKRAAKAMQYLCRGYEQTLEEVVGGAIFSSDSNEMVLVKDIELYSLCEHHILPFIGKAHVAYLPNGKVLGLSKIARIVDMFARRLQIQEALTSEIANAIQEVTDAKGVAVVIEAKHMCMMMRGVEKQNSHMVTSAMLGAFRNNPATRAEFLSFIK

SEQ ID NO: 16555 - protein, 182 aa, Wohlfahrtiimonas chitiniclastica; identical to SEQ ID NO: 16554
  REGION 1..182: note = tr|A0A162TW91|A0A162TW91_9GAMM GTP cyclohydrolase 1; OS = Wohlfahrtiimonas chitiniclastica OX=400946 GN=folE PE=3; SV = 1

SEQ ID NO: 16556 - protein, 182 aa, Wohlfahrtiimonas sp.; identical to SEQ ID NO: 16554
  REGION 1..182: note = tr|A0A256CAZ9|A0A256CAZ9_9GAMM GTP cyclohydrolase 1; OS = Wohlfahrtiimonas sp. G9077 OX=1980118 GN=folE PE=3 SV=1

SEQ ID NO: 16557 - protein, 187 aa, Wolinella succinogenes
  REGION 1..187: note = sp|Q7M933|GCH1_WOLSU GTP cyclohydrolase 1; OS = Wolinella succinogenes (strain ATCC 29543 / DSM 1740 / LMG 7466 / NCTC 11488 / FDC 602W) OX=273121 GN=folE PE=3; SV = 1
MEDKKIAMEETIRSIFDFIGDDRHREGLLDTPKRVVKSWDKLYSGYTQDPREILGTVFEDGACDEMVVLKNIEFYSMCEHHMLPFFGKVSIGYIPDQKVVGISKLARLVEVFARRLQIQEKMTGQIADTLMEVLQPKGAMVVAEATHMCMVMRGVEKQQSVMVTSAVRGLFKRDARTREEFMGHIRH

SEQ ID NO: 16558 - protein, 242 aa, Xanthobacter autotrophicus
  REGION 1..242: note = tr|A7IFV1|A7IFV1_XANP2 GTP cyclohydrolase 1; OS = Xanthobacter autotrophicus (strain ATCC BAA-1158 / Py2); OX = 78245 GN=folE PE=3 SV=1
MDAVVKLFKAQAENEERERKLKAEAKAASKAAARPDGAPPAPKIHPPLPDGTPRPSRQEAEAAVRTLLAYIGEDPAREGLLDTPKRVVKAYDELFSGYGEDSEELLERTFGEIGTFDDFVLVRDIPFHSHCEHHMVPFVGKAHIAYFPVERVVGLSKIARVVDIFARRLQTQEHLTSQITTTLDEGLRPRGVAVMIEAEHMCMSMRGITKQGVSTLTTQFTGVFRDDPAEQVRFITLVRSKS

SEQ ID NO: 16559 - protein, 181 aa, Xanthobacter sp.
  REGION 1..181: note = tr|A0A259BJ47|A0A259BJ47_9RHIZ GTP cyclohydrolase 1 (Fragment) OS=Xanthobacter sp. 17-67-6 OX=1971593; GN = B7Y01_03765 PE=3 SV=1
MDAVVKLLRAQAENEAKARKHVKHLQAQAKRHDDAPLDAAEAHDPARPSKREAEAAVRTLLAYIGEDPDREGLLETPHRVVKAYGELFSGYRHDAAEALDRTFGEIGNFDDFVLVRDIPFYSHCEHHMVPFVGKAHVAYFPVERVVGLSKIARVVDIYAKRLQTQEHLTSQIISALDETLK

SEQ ID NO: 16560 - protein, 236 aa, Xanthobacter tagetidis
  REGION 1..236: note = tr|A0A3L7A8T9|A0A3L7A8T9_9RHIZ GTP cyclohydrolase 1; OS = Xanthobacter tagetidis OX=60216 GN=folE PE=3 SV=1
MAQAEQEAKARAEEAARRAKIGTEAEEPGTTAVLHQTIAPLLPDGTPRPSRGEAEAAVRTLLAYIGEDPAREGLLDTPRRVVAAYDELFSGYGEDATALLDRTFGEIGSFDDFVLVRDIPFHSHCEHHMVPFVGKAHVAYFPVERVVGLSKIARVVEIYARRLQTQEHLTSQVITALDEGLRPRGVAVMIEAEHMCMSMRGIAKQGVSTITTQFTGIFRDDPAEQVRFITLLRGGR

SEQ ID NO: 16561 - protein, 218 aa, unidentified
  source 1..218: note = Xanthobacteraceae bacterium
  REGION 1..218: note = tr|A0A521VZ85|A0A521VZ85_9RHIZ GTP cyclohydrolase 1; OS = Xanthobacteraceae bacterium OX=2021379 GN=folE PE=3 SV=1
MDAVIKPLRAQLSLDPHGAADRLLPGLPRPTRAEAEAAVRTLLGYIGESPDREGLIDTPRRVVEAYDELFRGYNEDPVELLDRTFGETAGYDDFVLIRDIAFNSHCEHHMMPFYGKAHVAYAPVDRVVGLSKLARLVDVFALRLQTQEHLTGQIAAAIEATLRPRGVAVLVEAEHTCMSVRGVAKQGALTVTTRFTGLFRDDRETQARFLDLVRAGAR

SEQ ID NO: 16562 - protein, 237 aa, unidentified
  source 1..237: note = Xanthomarina gelatinilytica
  REGION 1..237: note = tr|M7MG34|M7MG34_9FLAO GTP cyclohydrolase 1; OS = Xanthomarina gelatinilytica OX=1137281 GN=folE PE=3 SV=1
MTAPKKDTMKTNTLKQKTNPLNGFSHEDIGDEHLYTGLKTPLRADAFKLSDTEKKERIAILFEEIMDVMGLDLTDDSLKGTPKRVAKMYVDEIFSGLNPKNKPKVALFDNKYQYNQMLVEKNITFYSNCEHHFVPIIGTAHVAYISSGTVIGLSKLNRIVQYYAKRPQVQERLTNQIAEELKAILNTSDVAVIIDAKHLCVSSRGIQDDTSATVTTYYGGQFNTAQKISELQNYLKQ

SEQ ID NO: 16563 - protein, 212 aa, unidentified
  source 1..212: note = Xanthomarina gelatinilytica
  REGION 1..212: note = tr|M7NAH0|M7NAH0_9FLAO GTP cyclohydrolase 1; OS = Xanthomarina gelatinilytica OX=1137281 GN=folE PE=3 SV=1
MNGKEQQEINIFSNNEIKNLETISKHQEKLKTIEYHFAKIMEALGLKLDDPSLKETPKRVAKMYINEVFKGLNEENFPSISFFENVSGYREMVLVDNIKVYSYCEHHFVPFFGKAAVAYIPKDRVIGLSKINRIVQFYASKPQIQEKLTVEIGLKLKELLETDDIAIHIEANHLCVASRGVEDEKSYTKTNFFSGKFLKEKEKSRFLNSISS

SEQ ID NO: 16564 - protein, 225 aa, unidentified
  source 1..225: note = Xanthomarina sp.
  REGION 1..225: note = tr|A0A2D8CUP2|A0A2D8CUP2_9FLAO GTP cyclohydrolase 1; OS = Xanthomarina sp. OX=1931211 GN=folE PE=3 SV=1
  VARIANT 42: note = Xaa can be any naturally occurring amino acid
  VARIANT 50..51: note = Xaa can be any naturally occurring amino acid
  VARIANT 56: note = Xaa can be any naturally occurring amino acid
  VARIANT 59: note = Xaa can be any naturally occurring amino acid
  VARIANT 67..68: note = Xaa can be any naturally occurring amino acid
  VARIANT 88: note = Xaa can be any naturally occurring amino acid
  VARIANT 115: note = Xaa can be any naturally occurring amino acid
  VARIANT 120: note = Xaa can be any naturally occurring amino acid
  VARIANT 196: note = Xaa can be any naturally occurring amino acid
  VARIANT 209: note = Xaa can be any naturally occurring amino acid
  VARIANT 224: note = Xaa can be any naturally occurring amino acid
MKFDEKLEEFESLGDNHVGSSSDTPMREDAFKLTNEEKIDIXKDDVQHIXXTLGLXLTXDSLKGTPXXVAKMFVKELFGGLNPDKKPXASTFENKYQYGEMLVEKNITVYSTCEXHLLPXVGKAHVAYISNGTVVGLSKMNRIVDYYAKRPQVQERLTIQIVKELQEVLNTEDVACVIDAKHLCVNSRGIRDTESXTITSEFGGKFKDXETKREFLDYIKMDTXF

SEQ ID NO: 16565 - protein, 229 aa, unidentified
  source 1..229: note = Xanthomarina sp.
  REGION 1..229: note = tr|A0A2D8CUF5|A0A2D8CUF5_9FLAO GTP cyclohydrolase 1; OS = Xanthomarina sp. OX=1931211 GN=folE PE=3 SV=1
MKTNTLKQKTNPLNGFSHEDIGDEHLYTGLKTPLRADAFKLSDTEKKERIAILFEEIMDVMGLDLTDDSLKGTPKRVAKMYVDEIFSGLNPKNKPKVALFDNKYQYNQMLVEKNITFYSNCEHHFVPIIGTAHVAYISSGTVIGLSKLNRIVQYYAKRPQVQERLTNQIAEELKAILNTPDVAVIIDAKHLCVSSRGIQDDTSATVTTYYGGQFNTAQKISELQNYLKQ

SEQ ID NO: 16566 - protein, 300 aa, unidentified
  source 1..300: note = Xanthomonadaceae bacterium
  REGION 1..300: note = tr|A0A2M9EJ43|A0A2M9EJ43_9GAMM GTP cyclohydrolase FolE2 OS=Xanthomonadaceae bacterium NML95-0200 OX=2032577; GN = folE2 PE=3 SV=1
MSSPRPLPDVAFEAAQLARPLDWVGMDNIALPLRLDERLQVPAQVDVAVSLDDADKRGIHMSRLYLHTQTALPETRLDAASLGALMQALIASQQGLANRARLRLRFERLLLRPALLSDNQGWRRYPVSLMLEANADGELDARLQVAVEYSSTCPASAALSRQLNADAFAAAFARESVSVDEAKAWLASKAGLAATPHAQRSVAEVNVQLAADFDNLPIETLVNALEQALGTPVQTAVKREDEQAFARANAENLMFCEDAARRVGAALSALPIGQWQARVAHLESLHAHDAVASVSGCGKG

SEQ ID NO: 16567 - protein, 304 aa, unidentified
  source 1..304: note = Xanthomonadaceae bacterium
  REGION 1..304: note = tr|A0A2A3LJ55|A0A2A3LJ55_9GAMM GTP cyclohydrolase FolE2 OS=Xanthomonadaceae bacterium NML93-0399 OX=2032565; GN = folE2 PE=3 SV=1
MSTAPLSDRLPDVAGDQAQAARLLDWVGMGNIALPLRIEDADGGAVTVPASADIGVNLVDPDARGIHMSRLYLHLQDALSSRTLDRASLERVLRDCIESQRGLADRVQLTLRYGQLLRRPALASAHSGWKTYPVEIDAILSPAGLALTLSLSVEYSSTCPASAALSRQLNAARFAGDFTAATAGYDAVRDWLESPRGLAATPHAQRSRADVRLQLAEDVETFPILAIVDALEHALGTPVQTAVKREDEQAFASLNAENLMFCEDAARRVAAALSADPRIARFDATVSHFESLHAHDAVARVSGP

SEQ ID NO: 16568 - protein, 290 aa, unidentified
  source 1..290: note = Xanthomonadales bacterium
  REGION 1..290: note = tr|A0A1Q4FNP2|A0A1Q4FNP2_9GAMM GTP cyclohydrolase FolE2 OS=Xanthomonadales bacterium 63-13 OX=1895867; GN = folE2 PE=3 SV=1
MNALTAMQLLPDVQAQADFRKQRIDAVGVKGVRYPVVIHSGRHAIATIATFSMTVALAAEIKGTHMSRFIELIEARAGHLDQAGFRAMVFEMLERLDARSGSITLHFPYFVSKAAPVSGVNSLLDHDVEWCGSVDADGQFALRLRVVVPATSLCPCSKEISAYGAHNQRSHISIAANLLESMSMEELIAIAEASASCEVYGLLKRADEKFVTERAYDNPKFVEDLVRDVAHALDQDARIGGYLIEAENFESIHNHSAFARIERILPAPAAPSANRHLRAAPPCSLNGVSS

SEQ ID NO: 16569 - protein, 317 aa, unidentified
  source 1..317: note = Xanthomonadales bacterium
  REGION 1..317: note = tr|A0A1Q4FHI8|A0A1Q4FHI8_9GAMM GTP cyclohydrolase FolE2 OS=Xanthomonadales bacterium 63-13 OX=1895867; GN = folE2 PE=3 SV=1
MTMSPTSARAMPDIASDAEPGAAGQLDWVGMDEIAVPVRLANPDGSIVQSPARVAAYVNLKRADARGIHMSRLYLHVDRHLSSEPLTPCSLRRLLRDFLDSHADLSDRARIGIRFDHMIRRRALASDNSGWKTYPVTINASMDASGFAVEVETEVLYSSTCPCSAALARQLIQEQFDADFPEGQALDRQQVVAWLGSESGIRATPHSQRSSARVRVRLAAGFDLPIIDLIDLIESALQTPVQTAVKREDEQAFALLNGQNLMFCEDAARRMQEALDADERIVDFWLRAAHLESLHPHDAVAYASKGVEGGYSADSRL

SEQ ID NO: 16570 - protein, 200 aa, Xanthomonas albilineans
  REGION 1..200: note = tr|D2UGU7|D2UGU7_XANAP GTP cyclohydrolase 1; OS = Xanthomonas albilineans (strain GPE PC73 / CFBP 7063); OX = 380358 GN=folE PE=3 SV=1
MADSKHTPVPCVTQAQAEEAVRTLLRWSGDDPTREGLLDTPRRVVEAYGDWFSGYREDPREYMLRTFEEVAGYDELIVLRDIDYESHCEHHMAPIIGKVHVGYLPRGKVVGISKLARVVDAYARRFQVQEKMTAQIAECIQDALEPLGVGVVVEGSHECMTTRGVHKRGVSMVTSKMLGTFREDARTRAEFLRFIDCGAR

SEQ ID NO: 16571 - protein, 311 aa, Xanthomonas albilineans
  REGION 1..311: note = tr|D2U9Y3|D2U9Y3_XANAP GTP cyclohydrolase FolE2; OS = Xanthomonas albilineans (strain GPE PC73 / CFBP 7063); OX = 380358 GN=folE2 PE=3 SV=1
MNLPIRLPLPDVATDEPSAIAAPLRWVGMDGIAMPIRFDEGQSSAPLAALAALYVDLPSTQAKGIHMSRLYRLLDAHAQQPLTPSRLAQLLREMVDSHADCASTAARLSLRSSLLRRSPALRSEGLAGWKAYPLRIDSEFCQGMVRITLGVEVLYSSTCPCSAALARQLLSEAFLRDHAEQVLLSREAVADWLAQYGSYATPHSQRSVAAVQVGVSTLALGFDVEALIDLVEQALATPVQAAVRRADEQEFARRNGANLMYVEDAARRLQQALGARHAEVQVQVRHLESLHAHDAVAEAALTSSRPVEAMR

SEQ ID NO: 16572 - protein, 200 aa, Xanthomonas alfalfae
  REGION 1..200: note = tr|A0A1S1XKT2|A0A1S1XKT2_9XANT GTP cyclohydrolase 1; OS = Xanthomonas alfalfae OX=366650 GN=folE PE=3 SV=1
MSQSNQPDSSVTQTQAEEAVRTLLRWAGEDPTREGLLDTPRRVAEAYGDWFSGYREEPREYLERTFEEVAGYDELIVLRDISYESHCEHHMAPIIGKVHVGYLPRGKVVGISKLARVVESYARRFQVQEKMTAQIAQCIQDVLQPLGVGVVVEGAHECMTTRGIHKRGVSMVTSKMLGTFREDARTRAEFLQFIEVGGKR

SEQ ID NO: 16573 - protein, 305 aa, Xanthomonas alfalfae
  REGION 1..305: note = tr|A0A1S1XKA7|A0A1S1XKA7_9XANT GTP cyclohydrolase FolE2 OS=Xanthomonas alfalfae OX=366650 GN=folE2 PE=3 SV=1
MSATLPDVAVTEPSTLSAPLRWVGMQDIAIPVQLEAGGGQLAARASVQVDLPRAELKGIHMSRLYRLLDTQLQQPVSPAMLSGLLQALIDSHADCASRAARLTLSFELMLRTPALRSEGLSGWRAYPVHIAAQCSAGRTTIQLQVEVLYASTCPCSAALSRQLLSDAFVQQHAGRDALALDEVAQWLQDHGSYATPHSQRSVAQVRVELPADAQRLAIRQLVGLCEQALATPVQAAVRRPDEQAFARLNGANLMYVEDAARRLRQQLAEHYAAFHVAVRHLESLHAHDAVAETDSDDAVLGPTTM

SEQ ID NO: 16574 - protein, 307 aa, Xanthomonas arboricola
  REGION 1..307: note = tr|W4SGV6|W4SGV6_9XANT GTP cyclohydrolase FolE2; OS = Xanthomonas arboricola pv. pruni MAFF 301420 OX=1418095; GN = folE2 PE=3 SV=1
MSATLPDVAVTEPSPLSAPLRWVGMQDIAVPLRLADAGPSGSVAARASVQVDLPRPELKGIHMSRLYRLLDRHLEQPVSPAMVSQLLQALIDSHADCGSRAARLALNFELMLRMPALRSEGLSGWRAYPVRIDAQSRAGRTEMQLQVDVLYASTCPCSAALSRQLLSDAFLQQHQGRDALPVAEVAQWLQHNGSYATPHSQRSVAQVRVELSACVQRLDIRELVGLCEQALATPVQAAVRRIDEQAFARLNGANLMYVEDAARRLRKVLAERHAVFHVAVRHLESLHAHDAIAETDSDAGAFHPLAD

SEQ ID NO: 16575 - protein, 200 aa, Xanthomonas arboricola
  REGION 1..200: note = tr|A0A2S6Y1I6|A0A2S6Y1I6_9XANT GTP cyclohydrolase 1; OS = Xanthomonas arboricola OX=56448 GN=folE PE=3 SV=1
MSQSDQPDSPVTQAQAEDAVRTLLRWAGEDPAREGLLDTPRRVAEAYGDWFSGYREEPREYLERTFEEVAGYDELIVLRDISYESHCEHHMAPIIGKVHVGYLPRGKVVGISKLARVVESYARRFQVQEKMTAQIAQCIQDVLQPRGVGVVVEGAHECMTTRGIHKRGVSMVTSKMLGSFREDARTRAEFLQFIEVGGKR

SEQ ID NO: 16576 - protein, 200 aa, Xanthomonas axonopodis
  REGION 1..200: note = sp|Q8PEP3|GCH1_XANAC GTP cyclohydrolase 1; OS = Xanthomonas axonopodis pv. citri (strain 306) OX=190486; GN = folE PE=3 SV=2
MSQSNQPDSPVTQTQAEEAVRTLLRWAGEDPTREGLLDTPRRVAEAYGDWFSGYRDEPREYLERTFEEVAGYDELIVLRDISYESHCEHHMAPIIGKVHVGYLPRGKVVGISKLARVVESYARRFQVQEKMTAQIAQCIQDVLQPLGVGVVVEGAHECMTTRGIHKRGVSMVTSKMLGSFREDARTRAEFLQFIEVGGKR

SEQ ID NO: 16577 - protein, 305 aa, Xanthomonas axonopodis
  REGION 1..305: note = tr|A0A1T1NKY7|A0A1T1NKY7_9XANT GTP cyclohydrolase FolE2 OS=Xanthomonas axonopodis pv. melhusii OX=487834; GN = folE2 PE=3 SV=1
MSPTLPDVAVTEPSTLSAPLRWVGMQDIAIPVQLETGSSQLAARAGVQVDLPRAELKGIHMSRLYRLLDTHLQQPLSPAMLSQLLQALIDSHADCASRAARLTLSFELMLRTPALRSEGLSGWRAYPVHIAAQCRAGRTTIQLQIEVLYASTCPCSAALSRQLLSDAFVQQHAGRDTLPLRDVVQWLQDHGTYATPHSQRSVAQVRVELPADAQRLAIQQLVGLCEQALATPVQAAVRRPDEQAFARLNGANLMYVEDAARRLRKPLAEHYAAFHVAVRHLESLHAHDAVAETGSDDAVLGPTTM

SEQ ID NO: 16578 - protein, 223 aa, Xanthomonas bromi
  REGION 1..223: note = tr|A0A1C3NR34|A0A1C3NR34_9XANT GTP cyclohydrolase 1; OS = Xanthomonas bromi OX=56449 GN=folE PE=3 SV=1
MQPHLGAAGLSSGTMLAPFGCTCMSQSDQPDSTVTQTQAEEAVRTLLRWAGEDPSREGLLDTPRRVAEAYGDWFSGYRKEPREYLERTFEEVAGYDELIVLRDISYESHCEHHMAPIIGKVHVGYLPRGKVVGISKLARVVEGYARRFQVQEKMTAQIAQCIQDVLQPRGVGVVVEGAHECMTTRGIHKRGVSMVTSMMLGSFRDDARTRAEFLQFIEVGGKR

SEQ ID NO: 16579 - protein, 305 aa, Xanthomonas bromi
  REGION 1..305: note = tr|A0A1C3NQM0|A0A1C3NQM0_9XANT GTP cyclohydrolase FolE2 OS=Xanthomonas bromi OX=56449 GN=folE2 PE=3 SV=1
MSATLPDIAVTEPSTLSAPLRWVGMQDIAIPVHLDVGGSALAARAGVQVDLPRAELKGIHMSRLYRLLDLHLQQPLSPAMLSQLLQALIESHADCASRAARLTLGFEVMLRTPALRSEGLSGWRAYPVQIAAQCRAGHTTIQLHVDVLYASTCPCSAALSRQLLSDAFVQQHAGRDALPLQDVAQWLQEHGSYATPHSQRSVAQVRVDLPADAPRFAIPQLIGRCEQALATPVQAAVRRPDEQAFARLNGANLMYVEDAARRLRKQLAEHYPVFHVAVRHLESLHAHDAVAETGSDNETSFQVTD

SEQ ID NO: 16580 - protein, 200 aa, Xanthomonas campestris; identical to SEQ ID NO: 16572
  REGION 1..200: note = sp|Q3BM80|GCH1_XANC5 GTP cyclohydrolase 1; OS = Xanthomonas campestris pv. vesicatoria (strain 85-10); OX = 316273 GN=folE PE=3 SV=1

SEQ ID NO: 16581 - protein, 200 aa, Xanthomonas campestris
  REGION 1..200: note = tr|A0A2S4JR55|A0A2S4JR55_XANCA GTP cyclohydrolase 1; OS = Xanthomonas campestris OX=339 GN=folE PE=3 SV=1
MSQSDQPDSSVTQAQAEEAVRTLLRWAGEDPAREGLLDTPRRVAEAYGDWFSGYREEPRAYLERTFEEVAGYDELIVLRDISYESHCEHHMAPIIGKVHVGYLPRGKVVGISKLARVVESYARRFQVQEKMTAQIAQCIQDVLQPRGVGVVVEGAHECMTTRGIHKRGVSMVTSKMLGSFREDARTRAEFLQFIEVGGKR

SEQ ID NO: 16582 - protein, 200 aa, unidentified
  source 1..200: note = Xanthomonas cannabis
  REGION 1..200: note = tr|A0A0B2CHV9|A0A0B2CHV9_9XANT GTP cyclohydrolase 1; OS = Xanthomonas cannabis pv. cannabis OX=1885894 GN=folE; PE = 3 SV=1
MSQSDQPDSSVTQAQAEEAVRTLLRWAGEDPFREGLLDTPRRVAEAYGDWFSGYREEPRAYLERTFEEVAGYDELIVLRDISYESHCEHHMAPIIGKVHVGYLPRGKVVGISKLARVVESYARRFQVQEKMTAQIAQCIQDVLQPRGVGVVVEGAHECMTTRGIHKRGVSMVTSKMLGSFREDARTRAEFLQFIEVGGKR

SEQ ID NO: 16583 - protein, 307 aa, unidentified
  source 1..307: note = Xanthomonas cannabis
  REGION 1..307: note = tr|A0A0B2CSE3|A0A0B2CSE3_9XANT GTP cyclohydrolase FolE2 OS=Xanthomonas cannabis pv. cannabis OX=1885894; GN = folE2 PE=3 SV=1
MSATLPDVAVSETSTLSAPLRWVGMHDIAIPVRLDEAEPGATVGARASVQVDLPRPELKGIHMSRLYRLLDRHLEQPVSPAMMSRLLQALIDSHADCGSRAARVSLAFEVMLRTPALLSEGLAGWRAYPVRLEAQCRAGQCHLQLQIDVLYASTCPCSAALSRQLLSDAFLQQHAGRETLEREDVAQWLRVNGSHATPHSQRSIAQVRVDLLARQQRLEIRELIGVCERALATQVQAAVRRIDEQAFARLNGANLMYVEDAARRLRQALAERYAAFHVAVRHLESLHAHDAVAETDSDVADLHAFAR

SEQ ID NO: 16584 - protein, 200 aa, Xanthomonas citri; identical to SEQ ID NO: 16576
  REGION 1..200: note = tr|A0A2D2SIU7|A0A2D2SIU7_XANCI GTP cyclohydrolase 1; OS = Xanthomonas citri pv. phaseoli var. fuscans OX=473423; GN = folE PE=3 SV=1

SEQ ID NO: 16585 - protein, 200 aa, Xanthomonas citri; identical to SEQ ID NO: 16576
  REGION 1..200: note = tr|A0A220WBZ2|A0A220WBZ2_XANCI GTP cyclohydrolase 1; OS = Xanthomonas citri pv. vignicola OX=473426 GN=folE PE=3; SV = 1

SEQ ID NO: 16586 - protein, 200 aa, Xanthomonas codiaei; identical to SEQ ID NO: 16575
  REGION 1..200: note = tr|A0A2S7C8W8|A0A2S7C8W8_9XANT GTP cyclohydrolase 1; OS = Xanthomonas codiaei OX=56463 GN=folE PE=3 SV=1

SEQ ID NO: 16587 - protein, 307 aa, Xanthomonas codiaei
  REGION 1..307: note = tr|A0A2S7CTC9|A0A2S7CTC9_9XANT GTP cyclohydrolase FolE2 OS=Xanthomonas codiaei OX=56463 GN=folE2 PE=3 SV=1
MSATLPDVAVSEPSVPGAPLRWVGMHDIAIPVRLDEAAPSGTVNARASVQVDLPRADLRGIHMSRLYRLLDRHLEQPVAPAMLSQLLQVLIDSHADCGSRAARVSLACEVMLRTPALLSEGLSGWRAYPVRIDAQRVAGRCQLQLQIEVLYASTCPCSAALSRQLLSEAFVQHHHGRTAMPLDEIAQWLQAHGSYATPHSQRSVAQVRVDLDDSASQLDIRALVMLCERALATPVQAAVRRIDEQAFARLNGANLMYVEDAARRLRAALAERHAAFHVAVRHLESLHAHDAVAETGSDRADIHPLSS

SEQ ID NO: 16588 - protein, 200 aa, Xanthomonas cucurbitae
  REGION 1..200: note = tr|A0A2S7DS34|A0A2S7DS34_9XANT GTP cyclohydrolase 1; OS = Xanthomonas cucurbitae OX=56453 GN=folE PE=3 SV=1
MSQSDQPDSSVTQAQAEDAVRTLLRWAGEDPAREGLLDTPRRVAEAYGDWFSGYREEPREYLERTFEEVAGYDELIVLRDISYESHCEHHMAPIIGKVHVGYLPSGKVVGISKLARVVESYARRFQVQEKMTAQIAQCIQDVLQPRGVGVVVEGAHECMTTRGIHKRGVSMVTSKMLGSFREDARTRAEFLQFLEVGGKR

SEQ ID NO: 16589 - protein, 306 aa, Xanthomonas cucurbitae
  REGION 1..306: note = tr|A0A2S7DKC4|A0A2S7DKC4_9XANT GTP cyclohydrolase FolE2 OS=Xanthomonas cucurbitae OX=56453 GN=folE2 PE=3 SV=1
MSATLPDVAVTEPALLGAPLRWVGMHDIAIPVRLGQDGSSASLAARASVQVDLPRPECKGIHMSRLYRLLDRHLEHPVSPAMVSQLLQALIDSHEDCGSRAARLTLTFEVMLRVPALLSEGLAGWRAYPVRLEAQCSAGHSRIQLQVEVLYASTCPCSAALSRQLLSEAFLQQHAGRAAVPPEAVAQWLQVHGSYATPHSQRSIAQVRVDLEASTPQLDVGALVALCERALATPVQAAVRRIDEQAFARLNGANLMYVEDAARRLRQVLVAHYTTFDVAVRHLESLHAHDAVAETGSEVEGAFTAL

SEQ ID NO: 16590 - protein, 200 aa, Xanthomonas cynarae
  REGION 1..200: note = tr|A0A2S7AUM8|A0A2S7AUM8_9XANT GTP cyclohydrolase 1; OS = Xanthomonas cynarae OX=109214 GN=folE PE=3 SV=1
MSQSDQPDSSVTQAQAEEAVRTLLRWAGEDPAREGLLDTPRRVAEAYGDWFSGYREEPRAYLERTFEEVAGYDELIVLRDISYESHCEHHMAPIIGKVHVGYLPRGKVVGISKLARVVESYARRFQVQEKMTAQIAQCIQDVLQPRGVGVVVEGSHECMTTRGIHKRGVSMVTSKMLGSFREDARTRAEFLQFIEVGGKR

SEQ ID NO: 16591 - protein, 307 aa, Xanthomonas cynarae
  REGION 1..307: note = tr|A0A2S7ARI7|A0A2S7ARI7_9XANT GTP cyclohydrolase FolE2 OS=Xanthomonas cynarae OX=109214 GN=folE2 PE=3 SV=1
MSATLPDVAVTELSTLSAPLRWVGMQDIAMPVRLDEAEPGGTVAARATVQVDLPQPERKGIHMSRLYRLLDQHLEQPLSPAMLSHLLQSMIDSHADCGSRAARASLAFELMLRMPALLSEGLAGWRAYPVRIDAQCRAGRSHVRLQIDVLYASTCPCSAALSRQLLSEAFLQQHAGREALPPEDVAHWLQHHGSYATPHSQRSVAQVRVDLIACTQRFDIRELVALCEQALATPVQAAVRRIDEQAFARLNGANLMYVEDAARRLRKMLAERYANFHVAVRHFESLHAHDAVAETDSAAEGFHPFAD

SEQ ID NO: 16592 - protein, 307 aa, Xanthomonas dyei
  REGION 1..307: note = tr|A0A2S7BYT0|A0A2S7BYT0_9XANT GTP cyclohydrolase FolE2 OS=Xanthomonas dyei OX=743699 GN=folE2 PE=3 SV=1
MSATLPDVAVTEPPALSAPLRWVGMHDIAIPVRLDEAEPSGTVAARASVQVDLPRPEIKGIHMSRLYRLLDRYLEQPVSPAMLSQLLQALIDSHADCGSRAARVTLSFEVMLRTPALLSEGLAGWRAYPVRIDAQCRAGRSQVQLQIDVLYASTCPCSAALSRQLLSEAFVQQHAGRAAVPLDDIAQWLQVHGSYATPHSQRSLARVRVDLLACLQRLDIRALIGVCEQALATPVQAAVRRIDEQAFARLNGANLMYVEDAARRLRMALAERYTSFDVAVRHLESLHAHDAVAETGSDGDRIHPFAS

SEQ ID NO: 16593 - protein, 200 aa, Xanthomonas dyei
  REGION 1..200: note = tr|A0A2S7BY22|A0A2S7BY22_9XANT GTP cyclohydrolase 1; OS = Xanthomonas dyei OX=743699 GN=folE PE=3 SV=1
MSQSDQPDSSVTQAQAEDAVRTLLRWAGEDPSREGLLDTPRRVAEAYGDWFSGYREEPRDYLERTFEEVAGYDELIVLRDISYESHCEHHMAPIIGKVHVGYLPSVKVVGISKLARVVESYARRFQVQEKMTAQIAQCIQDVLQPRGVGVVVEGSHECMTTRGIHKRGVSMVTSKMLGSFREDARTRAEFLQFLEVGGKR

SEQ ID NO: 16594 - protein, 200 aa, Xanthomonas euvesicatoria; identical to SEQ ID NO: 16572
  REGION 1..200: note = tr|A0A2S7E8J1|A0A2S7E8J1_XANEU GTP cyclohydrolase 1; OS = Xanthomonas euvesicatoria pv. citrumelonis OX=189396; GN = folE PE=3 SV=1

SEQ ID NO: 16595 - protein, 305 aa, Xanthomonas euvesicatoria
  REGION 1..305: note = tr|A0A2S7E947|A0A2S7E947_XANEU GTP cyclohydrolase FolE2 OS=Xanthomonas euvesicatoria pv. citrumelonis; OX = 189396 GN=folE2 PE=3 SV=1
MSATLPDVAVTEPSTLSAPLRWVGMQDIAIPVQLEAGGGQLAARASVQVDLPRAELKGIHMSRLYRLLDTQLQQPVSPAMLSGLLQALIDSHADCASRAARLTLSGELMLRTPALRSEGLSGWRAYPVHIAAQCSAGRTTIQLQVEVLYASTCPCSAALSRQLLSDAFVQQHAGRDALALDEVAQWLQDHGSYATPHSQRSVAQVRVELPADAQRLAIRQLVGLCEQALATPVQAAVRRPDEQAFARLNGANLMYVEDAARRLRQQLAEHYAAFHVAVRHLESLHAHDAVAETDSDDAVLGPTTM

SEQ ID NO: 16596 - protein, 200 aa, unidentified
  source 1..200: note = Xanthomonas floridensis
  REGION 1..200: note = tr|A0A1A9MGX4|A0A1A9MGX4_9XANT GTP cyclohydrolase 1; OS = Xanthomonas floridensis OX=1843580 GN=folE PE=3 SV=1
MSQSDQPDSTVTQAQAEDAVRTLLRWAGEDPAREGLLDTPRRVAEAYGDWFSGYREEPREYLERTFEEVAGYDELIVLRDISYESHCEHHMAPIIGKVHVGYLPRGKVVGISKLARVVESYARRFQVQEKMTAQIAQCIQDVLQPRGVGVVVEGAHECMTTRGIHKRGVSMVTSKMLGSFREDARTRAEFLQFIEVGGKR

SEQ ID NO: 16597 - protein, 307 aa, unidentified
  source 1..307: note = Xanthomonas floridensis
  REGION 1..307: note = tr|A0A1A9M8M7|A0A1A9M8M7_9XANT GTP cyclohydrolase FolE2 OS=Xanthomonas floridensis OX=1843580 GN=folE2 PE=3; SV = 1
MSVTLPDVAVTELPTLSAPLRWVGMHDIAIPVRLDEAEPGATVGARASVQVDLPRPELKGIHMSRLYRLLDRHLEQPISPAMVSQLLQALIDSHADCGSRAARVSLAFEVMLRTPALLSEGLAGWRAYPVRLEAQCRAGQCHLQLQIDVLYASTCPCSAALSRQLLSDAFLQQHAGRQTLEREDVAQWLRVNGSHATPHSQRSIAQVRVDLLARQQRLEIRELIGVCERALATPVQAAVRRIDEQAFARLNGANLMYVEDAARRLRQALAERYTAFHVAVRHLESLHAHDAIAETDSDVSGVHSFAR

SEQ ID NO: 16598 - protein, 199 aa, Xanthomonas fragariae
  REGION 1..199: note = tr|A0A1Y6H138|A0A1Y6H138_9XANT GTP cyclohydrolase 1; OS = Xanthomonas fragariae OX=48664 GN=folE PE=3 SV=1
MSHDQPDSSVTQAQAEDAVRTLLRWAGEDPAREGLLDTPRRVAEAYGDWFSGYREEPRAYLERTFEEVAAYDELIVLRDISYESHCEHHMAPIIGKVHVGYLPRGKVVGISKLARVVESYARRFQVQEKMTAQIAQCIQEVLQPRGVGVVVVGAHECMTTRGIHKRGVSMVTSKMLGSFREDARTRAEFLQFIEVGGKR

SEQ ID NO: 16599 - protein, 200 aa, Xanthomonas gardneri
  REGION 1..200: note = tr|F0CB70|F0CB70_9XANT GTP cyclohydrolase 1; OS = Xanthomonas gardneri ATCC 19865 OX=925777 GN=folE PE=3; SV = 1
MSQSDQPDSSVTQAQAEEAVRTLLRWAGEDPAREGLLDTPRRVAEAYGDWFSGYREEPRAYLERTFEEVAGYDELIVLRDISYESHCEHHMAPIIGKVHVGYLPSGKVVGISKLARVVESYARRFQVQEKMTAQIAQCIQDVLQPRGVGVVVEGSHECMTTRGIHKRGVSMVTSKMLGSFREDARTRAEFLQFIEVGGKR

SEQ ID NO: 16600 - protein, 307 aa, Xanthomonas gardneri
  REGION 1..307: note = tr|A0A1L5Y3Q0|A0A1L5Y3Q0_9XANT GTP cyclohydrolase FolE2 OS=Xanthomonas gardneri OX=90270 GN=folE2 PE=3 SV=1
MSATLPDVAVTELSTLSAPLRWVGMQDIAMPVRLDEAEPGGTVAARATVQVDLPQPERKGIHMSRLYRLLDQHLEQPLSPAMLSHLLQAMIDSHADCGSRAARASLAFELMLRMPALLSEGLAGWRAYPVRIDAQCRAGRSHVRLQIDVLYASTCPCSAALSRQLLSEAFLQQHAGREALPPEDVAHWLQHHGSYATPHSQRSVAQVRVDLIACTQRFDIRELVGLCEQALATPVQAAVRRIDEQAFARLNGANLMYVEDAARRLRKVLAERYANFHVAVRHFESLHAHDAVAETDSAAEGFHPFAD

SEQ ID NO: 16601 - protein, 200 aa, Xanthomonas hortorum; identical to SEQ ID NO: 16590
  REGION 1..200: note = tr|A0A2S7E138|A0A2S7E138_9XANT GTP cyclohydrolase 1; OS = Xanthomonas hortorum pv. hederae OX=453603 GN=folE PE=3; SV = 1

SEQ ID NO: 16602 - protein, 307 aa, Xanthomonas hortorum; identical to SEQ ID NO: 16600
  REGION 1..307: note = tr|A0A248Y619|A0A248Y619_9XANT GTP cyclohydrolase FolE2 OS=Xanthomonas hortorum OX=56454 GN=folE2 PE=3 SV=1

SEQ ID NO: 16603 - protein, 200 aa, unidentified
  source 1..200: note = Xanthomonas hyacinthi
  REGION 1..200: note = tr|A0A2S7EXV0|A0A2S7EXV0_9XANT GTP cyclohydrolase 1; OS = Xanthomonas hyacinthi OX=56455 GN=folE PE=3 SV=1
MADSKKTPDAPVTQDQAEAAVRTLLRWAGEDPEREGLLDTPRRVAEAYGDWFSGYRADPREYLLRTFEEVAGYDELIVLRDIEYESHCEHHMAPIIGKVHVGYLPRGKVVGISKLARVVEAYARRFQVQEKMTAQIAQCIQDVLQPLGVGVVVEGAHECMTTRGIHKRGVSMVTSKMLGTFREDARTRAEFLRFIDGGKR

SEQ ID NO: 16604 - protein, 305 aa, unidentified
  source 1..305: note = Xanthomonas manihotis
  REGION 1..305: note = tr|A0A0W7XCA3|A0A0W7XCA3_XANMN GTP cyclohydrolase FolE2 OS=Xanthomonas manihotis OX=43353 GN=folE2 PE=3 SV=1
MSATLPDVAVTEPSALSAPLRWVGMQDIAIPVQLETGGSQLAARASVQVDLPRAELKGIHMSRLYRLLDTHLQQPLSPAMLSQLLQALIDSHADCASRAARLTLRFELMLRTPALRSEGLSGWRAYPVHIAAQCRAGRTTVQLQVEVLYASTCPCSAALSRQLLGDAFAQQHAGRDALALHDVVQWLQAHGSYATPHSQRSVAQVRVELPADTQRLAIQKLVGVCEQALATPVQAAVRRPDEQAFARLNGANLMYVEDAARRLRKVLAEHYAVFHVAVRHLESLHAHDAVAETGSEAADTHPFAE

SEQ ID NO: 16605 - protein, 200 aa, unidentified
  source 1..200: note = Xanthomonas manihotis
  REGION 1..200: note = tr|A0A0W7XLQ6|A0A0W7XLQ6_XANMN GTP cyclohydrolase 1; OS = Xanthomonas manihotis OX=43353 GN=folE PE=3 SV=1
MSQSNQPDSSVTQTQAEEAVRTLLRWAGEDPTREGLLDTPRRVAEAYGDWFSGYREEPREYLERTFEEVAGYDELIVLRDISYESHCEHHMAPIIGKVHVGYLPRGKVVGISKLARVVESYARRFQVQEKMTAQIAQCIQDVLQPLGVGVVVEGAHECMTTRGIHKRGVSMVTSKMLGSFREDARTRAEFLQFIAVGGKR

SEQ ID NO: 16606 - protein, 209 aa, Xanthomonas melonis
  REGION 1..209: note = tr|A0A2S7DCI4|A0A2S7DCI4_9XANT GTP cyclohydrolase 1; OS = Xanthomonas melonis OX=56456 GN=folE PE=3 SV=1
MLAPFGCTCMSQSDQPDSPVTQAQAEDAVRTLLRWAGEDPAREGLLDTPRRVAEAYGDWFSGYREEPREYLERTFEEVAGYDELIVLRDISYESHCEHHMAPIIGKVHVGYLPRGKVVGISKLARVVESYARRFQVQEKMTAQIAQCIQDVLQPRGVGVVVEGAHECMTTRGIHKRGVSMVTSKMLGSFREDARTRAEFLQFIEVGGKR

SEQ ID NO: 16607 - protein, 307 aa, Xanthomonas melonis
  REGION 1..307: note = tr|A0A2S7DJZ6|A0A2S7DJZ6_9XANT GTP cyclohydrolase FolE2 OS=Xanthomonas melonis OX=56456 GN=folE2 PE=3 SV=1
MSATLPDVAVSEPSTLSAPLRWVGMHDIAIPVRLDDAEPGATVGARASVQVDLPRADLKGIHMSRLYRLLDRHLEQPLSPAMLSQLLQALIDSHDDCGSRAARVSLAFEVMLRVPALLSEGLAGWRAYPVRLEAQCVEGRSRVQLQVDVLYASTCPCSAALSRQLLSEAFVRQHAGRDVLSAEAVAAWLQVNGSYATPHSQRSIAQVRVDLMGRMQRLEIRDLVGVCEQALATPVQAAVRRIDEQAFARLNGANLMYVEDAARRLRQALAERYTAFHVAVRHLESLHAHDAVAETGCDVGQSPVAIV

SEQ ID NO: 16608 - protein, 305 aa, unidentified
  source 1..305: note = Xanthomonas nasturtii
  REGION 1..305: note = tr|A0A3E1KHB2|A0A3E1KHB2_9XANT GTP cyclohydrolase FolE2 OS=Xanthomonas nasturtii OX=1843581 GN=folE2 PE=3; SV = 1
MSATLPDVAVTELSALSAPLRWVGMQDIAIPVHLQAGGAGLAARASVQVDLPRPELKGIHMSRLYRLLDLHLQQPVSPAMLSQLLQALVASHADCGSRAARLTLCFDMLLRMPALRSEGLSGWRAYPVHIVAHRRAGHTTIQLQVDVLYASTCPCSAALSRQLLSDAFVQQHAGREALPLQEVAQWLQEHGSYATPHSQRSVAQVRIELGAETQRFAIRELLDLCEQALATPVQAAVRRTDEQEFARLNGANLMYVEDAARRLRKALAEHHATFDVAVRHLESLHAHDAVAETGSDAELPSLAAV

SEQ ID NO: 16609 - protein, 200 aa, unidentified
  source 1..200: note = Xanthomonas nasturtii
  REGION 1..200: note = tr|A0A3E1KEM8|A0A3E1KEM8_9XANT GTP cyclohydrolase 1; OS = Xanthomonas nasturtii OX=1843581 GN=folE PE=3 SV=1
MSQSDQPDSSVTQTQAEEAVRTLLRWAGEDPTREGLLDTPRRVAEAYGDWFSGYREEPREYLERTFEEVAGYDELIVLRDISYESHCEHHMAPIIGKVHVGYLPRGKVVGISKLARVVESYARRFQVQEKMTAQIAQCIQDVLQPRGVGVVVEGAHECMTTRGIHKRGVSMVTSKMLGSFREDARTRAEFLQFLEVGGKR

SEQ ID NO: 16610 - protein, 306 aa, Xanthomonas oryzae
  REGION 1..306: note = sp|Q5H0A0|GCH4_XANOR GTP cyclohydrolase FolE2; OS = Xanthomonas oryzae pv. oryzae (strain KACC10331 / KXO85) OX=291331 GN=folE2 PE=3 SV=2
MSATLPDVAVTEAFTLSAPLRWVGMQDIAIPVHLDAASGSGLAARASVQVDLPRAELKGIHMSRLYRLLDLHLQRPLSPAMLPQLLQALIESHADCASRAARLTLSFALMLRMPALRSEGLSGWRAYPVRIAAQCRAGRTTIQLQVEVLYASTCPCSAALSRQLLSDAFVQQHAWCDALPLQDVAQWLQDHGSYATPHSQRSVAQVCVDLPADTQGFAIQELIGLCEQALATPVQAAVRRPDEQAFARLNGANLMYVEDAARRLRKQLAEHYATFHVAVRHLESLHAHDAVAETGSDDETFFPAAL

SEQ ID NO: 16611 - protein, 200 aa, Xanthomonas oryzae
  REGION 1..200: note = tr|A0A0C5UQW6|A0A0C5UQW6_9XANT GTP cyclohydrolase 1; OS = Xanthomonas oryzae pv. oryzicola OX=129394 GN=folE PE=3; SV = 1
MSQSDQPDSSVTQTQAEDAVRILLRWAGEDPTREGLLDTPRRVAEAYGDWFSGYREEPREYLERTFEEVAGYDELIVLRDISYASHCEHHMAPIIGKVHVGYLPRCKVVGISKLARVVESYARRFQVQEKMTAQIAQCIQDVLQPRGVGVVVEGAHECMTTRGIHKRGVSMVTSKMLGSFREDARTRAEFLQFIEVGGKR

SEQ ID NO: 16612 - protein, 305 aa, Xanthomonas perforans; identical to SEQ ID NO: 16573
  REGION 1..305: note = tr|A0A0G9B5B5|A0A0G9B5B5_9XANT GTP cyclohydrolase FolE2 OS=Xanthomonas perforans OX=442694 GN=folE2 PE=3 SV=1

SEQ ID NO: 16613 - protein, 200 aa, Xanthomonas perforans; identical to SEQ ID NO: 16572
  REGION 1..200: note = tr|A0A0G8Y0Q9|A0A0G8Y0Q9_9XANT GTP cyclohydrolase 1; OS = Xanthomonas perforans OX=442694 GN=folE PE=3 SV=1

SEQ ID NO: 16614 - protein, 200 aa, Xanthomonas phaseoli; identical to SEQ ID NO: 16605
  REGION 1..200: note = tr|A0A1V9H086|A0A1V9H086_9XANT GTP cyclohydrolase 1; OS = Xanthomonas phaseoli pv. syngonii LMG 9055 OX=1437878; GN = folE PE=3 SV=1

SEQ ID NO: 16615 - protein, 200 aa, Xanthomonas phaseoli; identical to SEQ ID NO: 16605
  REGION 1..200: note = tr|A0A1V9HI46|A0A1V9HI46_9XANT GTP cyclohydrolase 1; OS = Xanthomonas phaseoli pv. dieffenbachiae OX=92828; GN = folE PE=3 SV=1

SEQ ID NO: 16616 - protein, 326 aa, Xanthomonas pisi
  REGION 1..326: note = tr|A0A2S7D7F2|A0A2S7D7F2_9XANT GTP cyclohydrolase FolE2 OS=Xanthomonas pisi OX=56457 GN=folE2 PE=3 SV=1
MSATLPDVAVTELPTLSAPLRWVGMHDIAIPVRLEEAEPSGTVAARASVQVDLPRAEIKGIHMSRLYRLLDRHLEQPVSPAMLSQLLQALIDSHADCGSRAARVTLSLEVMLRTPALLSDGLAGWRAYPVRIDAQCREGRSQVRLQIDVLYASTCPCSAALSRQLLSEAFVQQHAGRAMLQVDDIAQWLQVHGSYATPHSQRSVAQVRVDLLACLQRLDIRALIGICEQALATPVQAAVRRIDEQAFARLNGANLMYVEDAARRLRMALAERYTGFDVAVRHLESLHAHDAVAETGSDEDGAHPFASESADHALQISKAAVAGVAR

SEQ ID NO: 16617 - protein, 200 aa, Xanthomonas pisi
  REGION 1..200: note = tr|A0A2S7CXF7|A0A2S7CXF7_9XANT GTP cyclohydrolase 1; OS = Xanthomonas pisi OX=56457 GN=folE PE=3 SV=1
MSQSDQPDSSVTQAQAEDAVRTLLRWAGEDPAREGLLDTPRRVAEAYGDWFSGYREEPREYLERTFEEVAGYDELIVLRDISYESHCEHHMAPIIGKVHVGYLPRGKVVGISKLARVVESYARRFQVQEKMTAQIAQCIQDVLQPRGVGVVVEGSHECMTTRGIHKRGVSMVTSKMLGSFREDARTRAEFLQFIEVGGKR

SEQ ID NO: 16618 - protein, 200 aa, Xanthomonas populi
  REGION 1..200: note = tr|A0A2S7EQZ1|A0A2S7EQZ1_9XANT GTP cyclohydrolase 1; OS = Xanthomonas populi OX=53414 GN=folE PE=3 SV=1
MSQSDHPDSSVTQAQAEEALRTLLRWAGEDPARDGLLDTPRRVAEAYGDWFSGYREEPREYLERTFEEVAGYDELIVLRDISYESHCEHHMAPIIGKVHVGYLPRDKVVGISKLARVVESYARRFQVQEKMTAQIAQCIQDVLQPRGVGVVVEGAHECMTTRGIHKRGVSMVTSKMLGSFREDARTRAEFLQFIEVGGKR

SEQ ID NO: 16619 - protein, 305 aa, unidentified
  source 1..305: note = Xanthomonas prunicola
  REGION 1..305: note = tr|A0A2N3RE38|A0A2N3RE38_9XANT GTP cyclohydrolase FolE2 OS=Xanthomonas prunicola OX=2053930 GN=folE2 PE=3; SV = 1
MSATLPDVAVTEPSTLSAPLRWVGMQDIAIPVHLDAGAGDLAARASVQVDLPRAELKGIHMSRLYRLLDLHLQRPLSPAMLSQLLQALIESHADCASRAARLTLSFERLLRMPALRSEGLSGWRAYPVHIAAQCRAGHTTIQLQVEVLYASTCPCSAALSRQLLSDAFVQQHAGRGALPLQDVAQWLQDHGSYATPHSQRSVAQVCVDLPVDAQGFAIQQLIGLCEQALATPVQAAVRRPDEQAFARLNGANLMYVEDAARRLRKVLGEHYAAFHVAVRHLESLHAHDAVAETGSDDETPFPVAV

SEQ ID NO: 16620 - protein, 209 aa, unidentified
  source 1..209: note = Xanthomonas prunicola
  REGION 1..209: note = tr|A0A2N3RDQ8|A0A2N3RDQ8_9XANT GTP cyclohydrolase 1; OS = Xanthomonas prunicola OX=2053930 GN=folE PE=3 SV=1
MLAPFGCTCMSQSDQPDSSVTQTQAEEAVRTLLRWAGEDPTREGLLDTPRRVAEAYGDWFSGYREEPREYLERTFEEVAGYDELIVLRDISYESHCEHHMAPIIGKVHVGYLPRGKVVGISKLARVVESYARRFQVQEKMTAQIAQCIQDVLQPLGVGVVVEGAHECMTTRGIHKRGVSMVTSKMLGSFRDDARTRAEFLQFIEVGGKR

SEQ ID NO: 16621 - protein, 320 aa, Xanthomonas sacchari
  REGION 1..320: note = tr|A0A0A8DS69|A0A0A8DS69_9XANT GTP cyclohydrolase FolE2 OS=Xanthomonas sacchari OX=56458 GN=folE2 PE=3 SV=1
MNLQISPPLPDVAADEPSQIAAPLNWVGMDGIALPICLEAGQGAMPAHVPAQAALAVDLPSAQVKGIHMSRLYRLLDECAQQPLSPSRLSQLLRAMVHSHADCASTAARVSLRLELLRRSPALRSPGLAGWRAYPLRIDAELRGGVVRLGLGVDLLYSSTCPCSAALARQLLSEAFVQQHPEQASLSREAVADWLLRHGSHATPHSQRSVASVRVGVSARAVRFDAEGVIALAEQALATPVQAAVRRADEQAFARRNGENLMYVEDAARRLQQALGARYAEVQVQVRHLESLHAHDAVAETASAPVAVMAGEAAPDLAQA

SEQ ID NO: 16622 - protein, 320 aa, Xanthomonas sacchari
  REGION 1..320: note = tr|A0A5D1A352|A0A5D1A352_9XANT GTP cyclohydrolase FolE2 OS=Xanthomonas sacchari OX=56458 GN=folE2 PE=3 SV=1
MTLQIPPPLPDVAADEPSQIAAPLNWVGMDGIALPICLEAGQGAMPAHVPAQAALAVDLPSAQVKGIHMSRLYRLLDECAQQPLSPSRLSQLLRAMVHSHADCASTAARVSLRLELLRRSPALRSPGLAGWRAYPLRIDAELRGGVVRLGLGVDLLYSSTCPCSAALARQLLSEAFVQQHPEQASLSREAVADWLLRHGSHATPHSQRSVASVRVGVSARAVRFDAEGVIALAEQALATPVQAAVRRADEQAFARRNGENLMYVEDAARRLQQALGARYAEVQVQVRHLESLHAHDAVAETASAPVAVMAGEAAPDLAQA

SEQ ID NO: 16623 - protein, 200 aa, Xanthomonas sp.
  REGION 1..200: note = tr|A0A3A5ED65|A0A3A5ED65_9XANT GTP cyclohydrolase 1; OS = Xanthomonas sp. CFBP 7698 OX=2082399 GN=folE PE=3 SV=1
MSQSDQPDSSVTQAQAEEAVRTLLRWAGEDPSREGLLDTPRRVAEAYGDWFSGYREEPRAYLERTFEEVAGYDELIVLRDISYESHCEHHMAPIIGKVHVGYLPRGKVVGISKLARVVESYARRFQVQEKMTAQIAQCIQDVLQPRGVGVVVEGAHECMTTRGIHKRGVSMVTSKMLGSFREDARTRAEFLQFIEVGGKR

SEQ ID NO: 16624 - protein, 304 aa, Xanthomonas sp.
  REGION 1..304: note = tr|A0A0P7GP62|A0A0P7GP62_9XANT GTP cyclohydrolase FolE2 OS=Xanthomonas sp. Mitacek01 OX=1732019 GN=folE2; PE = 3 SV=1
MSTASNTDRLPDVAGDQAQSARLLDWVGMGNIALPLRIEDAKGGAVTVPASADIGVNLIDPDARGIHMSRLYLHLQDALSSRTLDRDALQTVLRDCIESQRGLADRVQLTLRYGQLLRRPALASAHSGWKTYPVEIDAVLGPDGLALTLSLSVEYSSTCPASAALSRQLNAARFAGDFNADTSGYDAVRDWLESPRGLAATPHAQRSRADVRLQLADDVDTFPILAIVDALEHALGTPVQTAVKREDEQAFASLNAENLMFCEDAARRVAAALSADPRIARFDAKVSHFESLHAHDAVARVSGP

SEQ ID NO: 16625 - protein, 200 aa, Xanthomonas theicola
  REGION 1..200: note = tr|A0A2S6ZCA7|A0A2S6ZCA7_9XANT GTP cyclohydrolase 1; OS = Xanthomonas theicola OX=56464 GN=folE PE=3 SV=1
MADSKKTPESPVTQAQAEAAVRTLLRWAGEDPDREGLLDTPRRVAEAYGDWFSGYRADPREYLLRTFEEVAGYDELIVLRDIEYESHCEHHMAPIIGKVHVGYLPRGKVVGISKLARVVEAYARRFQVQEKMTAQIAQCIQDVLQPLGVGVVVEGAHECMTTRGIHKRGVSMVTSKMLGTFREDARTRAEFLRFIDGGVR

SEQ ID NO: 16626 - protein, 200 aa, Xanthomonas translucens
  REGION 1..200: note = tr|A0A1M4L7S8|A0A1M4L7S8_XANCT GTP cyclohydrolase 1; OS = Xanthomonas translucens pv. graminis OX=134874 GN=folE; PE = 3 SV=1
MADSKKTPDTPVTQDQAEAAVRTLLRWAGEDPDREGLLDTPRRVAEAYGDWFSGYQADPRQYLLRTFEEVADYDEMIVLRDIEYESHCEHHMAPIIGKVHVGYLPRGKVVGISKLARVVDVYARRFQVQEKMTAQIAQCIQDVLQPLGVAVVVEGAHECMTTRGIHKRGVSMVTSKMLGTFREDARTRAEFLRFIDGGVR

SEQ ID NO: 16627 - protein, 319 aa, Xanthomonas translucens
  REGION 1..319: note = tr|A0A514EAR9|A0A514EAR9_XANCT GTP cyclohydrolase FolE2 OS=Xanthomonas translucens pv. cerealis OX=152263; GN = folE2 PE=3 SV=1
MHLPMQSPLPDVASSEPSTIAAPLQWVGMDGIALPIRLCDAAATDALPAQAALHVDLPAVQVKGIHMSRLYRLLDDYAQQPLSPSLLAQLLRAMVHSHADCASSAARVSLRLSLLRRSPALRSEGLAGWKAYPLRIDAVLRGASVRVEVAVDVLYSSTCPCSAALARQLLSAAFLQQHAAQPSLQREAVAAWLLQHGSHATAHSQRSIATLQVAVSPRALRFDLSALIELAEQALATPVQAAVRRADEQAFARLNGANLMYVEDAARRLQQALGARYQGVRVQVRHLESLHPHDAVAEAGAPESGSGAPDPFAAGEGAR

SEQ ID NO: 16628 - protein, 209 aa, Xanthomonas vasicola
  REGION 1..209: note = tr|A0A2P5ZLG8|A0A2P5ZLG8_XANVA GTP cyclohydrolase 1; OS = Xanthomonas vasicola OX=56459 GN=folE PE=3 SV=1
MLAPFGCTCMSQSDQPDSSVTQAQAEEAVRTLLRWAGEDPTREGLLDTPRRVAEAYGDWFSGYRIEPREYLERTFEEVAGYDELIVLRDISYESHCEHHMAPIIGKVHVGYLPRGKVVGISKLARVVESYARRFQVQEKMTAQIAQCIQDVLQPLGVGVVVEGAHECMTTRGIHKRDVSMVTSKMLGSFREDARTRAEFLQFIDVGGKR

SEQ ID NO: 16629 - protein, 302 aa, Xanthomonas vasicola
  REGION 1..302: note = tr|A0A2P5ZS98|A0A2P5ZS98_XANVA GTP cyclohydrolase FolE2 OS=Xanthomonas vasicola OX=56459 GN=folE2 PE=3 SV=1
MSATLPDVAVTEPSTLSAPLRWVGMQDIAIPVHLDTDGGDLAARASVQVDLPRVELKGIHMSRLYRLLDLHLQQPLSPAMLSQLLQALVESHSDCASRAARLTLSFEVMLRVPALRSEGLSGWRAYPVHIAAQCRAGRATIQLQVEVLYASTCPCSAALSRQLLRDAFVQQYAGRDALPLQEVAQWLQDRGSFATPHSQRSVAQVRVDLPVDAQGFAIQQLIGLCEQALATPVQAAVRRPDEQAFARLNGANLMYVEDAARRLRQVLVEHYARFHVAVRHLESLHAHDAVAESGSDDETPSQ

SEQ ID NO: 16630 - protein, 200 aa, Xanthomonas vesicatoria
  REGION 1..200: note = tr|F0BJ23|F0BJ23_9XANT GTP cyclohydrolase 1; OS = Xanthomonas vesicatoria ATCC 35937 OX=925775 GN=folE; PE = 3 SV=1
MSQSDQPDSTVTQAQAEDAVRTLLRWAGEDPSREGLLDTPRRVAEAYGDWFSGYREEPREYLERTFEEVAGYDELIVLRDISYESHCEHHMAPIIGKVHVGYLPRGKVVGISKLARVVESYARRFQVQEKMTAQIAQCIQDVLQPRGVGVVVEGSHECMTTRGIHKRGVSMVTSKMLGSFREDARTRAEFLQFLEVGGKR

SEQ ID NO: 16631 - protein, 307 aa, Xanthomonas vesicatoria
  REGION 1..307: note = tr|F0BEQ0|F0BEQ0_9XANT GTP cyclohydrolase FolE2; OS = Xanthomonas vesicatoria ATCC 35937 OX=925775 GN=folE2; PE = 3 SV=1
MSATLPDVAVTELPTLSAPLRWVGMHDIAIPVRLDEAEPSGTVGARASMQVDLPRPEIKGIHMSRLYRLLDRHLEQPVSPAMVSQLLQALIDSHADCGSRAARVTLSFEVMLRTPALLSEGLAGWRAYPVRIDAQCREGRSQVQLQIDVLYASTCPCSAALSRQLLSDAFVQHHAGRAMVPVDEIAQWLQLHGSHATPHSQRSVAQVRVDLLACLQRLEIRTLIGVCEQALATPVQAAVRRIDEQAFARLNGANLMYVEDAARRLRMALAERYTAFDVAVRHLESLHAHDAVAETGSDGDRLHPFAS

SEQ ID NO: 16632 - protein, 249 aa, Xenococcus sp.
  REGION 1..249: note = tr|L8M3R3|L8M3R3_9CYAN GTP cyclohydrolase 1; OS = Xenococcus sp. PCC 7305 OX=102125 GN=folE PE=3 SV=1
MTTAFSNGSNSSTNGFKSKNGADASLDSLKASLIEQVVTRPDRNTSDGKEAVIQTSSPEKSQERLQDAVRVMLESLGEDPNREGLLKTPKRVAEAMQFLTQGYNQSLETIINGAIFDEGHNEMVLVRDINFFSLCEHHMLPFMGRAHVAYIPNQKVVGLSKLARIVEMYARRLQVQERLTRQVAEALQEALEPQGVAVVMEATHMCMSMRGVQKPGSWTVTSAMLGVFQEEQKTREEFLNLIRHQPSFM

SEQ ID NO: 16633 - protein, 218 aa, Xenococcus sp.
  REGION 1..218: note = tr|L8M850|L8M850_9CYAN GTP cyclohydrolase 1; OS = Xenococcus sp. PCC 7305 OX=102125 GN=folE PE=3 SV=1
MTLAKSKPDRVEKIDNKLPLLTTTQKPPVSEEEMRQAVRTLLLGLGEDPDREGLRDTPKRVVKALKFLTSGYHQSLDELLNGAVFHEDANEMVLVRDIDLFSSCEHHILPILGRAHVAYIPDGKVIGLSKIARICEMYGRRLQVQERLTAQIADALQGLLQPKGVAVVVEASHMCMVMRGVQKPGSWTSTSAVRGVFADDAKTRQEFMSLVRHNPALL

SEQ ID NO: 16634 - protein, 222 aa, Xenorhabdus beddingii
  REGION 1..222: note = tr|A0A1Y2SRV1|A0A1Y2SRV1_9GAMM GTP cyclohydrolase 1; OS = Xenorhabdus beddingii OX=40578 GN=folE PE=3 SV=1
MSSLSTEAALVHSTLVARGLETPLREQTLEPEVRKIRIEAHMTEIMKLLNLDLSDDSLADTPSRIAKMYVDEIFSGLDYNNFPKITLIENKMKVDEMVTVRDITLTSTCEHHFVTIDGKATVAYIPKDKVIGLSKINRIVQFFAQRPQVQERLTQQILIALQALLGTNNVAVSIDAVHYCVKARGIRDATSTTTTTSLGGLFKTSQNTRQEFLRAVRHLHLS

SEQ ID NO: 16635 - protein, 222 aa, Xenorhabdus bovienii
  REGION 1..222: note = tr|A0A077P9P4|A0A077P9P4_XENBV GTP cyclohydrolase 1; OS = Xenorhabdus bovienii str. oregonense OX=1398202 GN=folE; PE = 3 SV=1
MSSLSTEAALVHSALVSRGLETPLHEQTLEPEVRKVLIQEHMTEIMKLLNLDLSDDSLADTPSRIAKMYVDEIFSGLDYNNFPKITLIENKMKVDEMVTVRDITLTSTCEHHFVTIDGKATVAYIPKDKVIGLSKINRIVQFFAQRPQVQERLTQQILIALQTLLGTNNVAISIDAVHYCVKARGIRDATSTTTTTSLGGLFKSSQNTRQEFLRAVRHLHLS

SEQ ID NO: 16636 - protein, 222 aa, Xenorhabdus bovienii
  REGION 1..222: note = tr|D3UX40|D3UX40_XENBS GTP cyclohydrolase 1; OS = Xenorhabdus bovienii (strain SS-2004) OX=406818 GN=folE; PE = 3 SV=1
MSSLSTEAALVHSALVSRGLETPLREQTLKPEVRKVLIQEHMTEIMKLLNLDLSDDSLADTPSRIAKMYVDEIFSGLDYNNFPKITLIENKMKVDEMVTVRDITLTSTCEHHFVTIDGKATVAYIPKDKVIGLSKINRIVQFFAQRPQVQERLTQQILIALQTLLGTNNVAISIDAVHYCVKARGIRDATSTTTTTSLGGLFKSSQNTRQEFLRAVRHLHLS

SEQ ID NO: 16637 - protein, 222 aa, Xenorhabdus budapestensis
  REGION 1..222: note = tr|A0A2D0J6H7|A0A2D0J6H7_XENBU GTP cyclohydrolase 1; OS = Xenorhabdus budapestensis OX=290110 GN=folE PE=3 SV=1
MSSLSTEAALVHSALVAHGLETPLREQILEPEVRKARIEEHMTEIMKLLNLDLSDDSLADTPGRIAKMYVDEIFSGLDYRNFPKITLIENKMKVDEMVTVRDITLTSTCEHHFVTIDGKATVAYIPKDKVIGLSKINRIVQFFAQRPQVQERLTQQILIALQTLLGTNNVAISIDAVHYCVKARGIRDATSTTTTTSLGGLFKSSQNTRQEFLRAVRHLHLS

SEQ ID NO: 16638 - protein, 222 aa, Xenorhabdus cabanillasii; identical to SEQ ID NO: 16637
  REGION 1..222: note = tr|A0A3D9UQ81|A0A3D9UQ81_9GAMM GTP cyclohydrolase 1; OS = Xenorhabdus cabanillasii OX=351673 GN=folE PE=3 SV=1

SEQ ID NO: 16639 - protein, 222 aa, Xenorhabdus cabanillasii; identical to SEQ ID NO: 16637
  REGION 1..222: note = tr|W1J519|W1J519_9GAMM GTP cyclohydrolase 1; OS = Xenorhabdus cabanillasii JM26 OX=1427517 GN=folE PE=3; SV = 1

SEQ ID NO: 16640 - protein, 222 aa, Xenorhabdus doucetiae
  REGION 1..222: note = tr|A0A068QQ18|A0A068QQ18_9GAMM GTP cyclohydrolase 1; OS = Xenorhabdus doucetiae OX=351671 GN=folE PE=3 SV=1
MSSLSTEAELVHSALVARGLETPLREQTLEPEVRKVRIEEHMTEIMKLLNLDLSDDSLADTPSRIAKMYVDEIFSGLNYKNFPKITLIENKMKVDEMVTVRDITMTSTCEHHFVTIDGKATVAYIPKDKVIGLSKINRIVQFFAQRPQVQERLTQQILIALQTLLGTNNVAVSIDAVHYCVKARGIRDATSTTTTTSLGGLFKTSQNTRQEFLRAVRPLHLP

SEQ ID NO: 16641 - protein, 222 aa, unidentified
  source 1..222: note = Xenorhabdus eapokensis
  REGION 1..222: note = tr|A0A1Q5TYG6|A0A1Q5TYG6_9GAMM GTP cyclohydrolase 1; OS = Xenorhabdus eapokensis OX=1873482 GN=folE PE=3 SV=1
MSSLSTEAALVHSALVERGLETPLRGPTLAPEVRKARIEEHMTEIMKLLNLDLSDDSLADTPGRIAKMYVDEIFSGLDYNNFPKITLIENKMKVDEMVTVRDITMTSTCEHHFVTIDGKATVAYIPKDKVIGLSKINRIVQFFAQRPQVQERLTQQILIALQTLLGTNNVAVSIDAVHYCVKARGIRDATSTTTTTSLGGLFKTSQNTRQEFLRAVRHLHLS

SEQ ID NO: 16642 - protein, 222 aa, Xenorhabdus ehlersii
  REGION 1..222: note = tr|A0A2D0ITV6|A0A2D0ITV6_9GAMM GTP cyclohydrolase 1; OS = Xenorhabdus ehlersii OX=290111 GN=folE PE=3 SV=1
MSSLSTEAALVHSALVDRGLETPLRGPTLAPEVRKARIEEHMTEIMKLLNLDLSDDSLADTPGRIAKMYVDEIFSGLDYNNFPKITLIENKMKVDEMVTVRDITMTSTCEHHFVTIDGKATVAYIPKDKVIGLSKINRIVQFFAQRPQVQERLTQQILIALQILLGTNNVAVSIDAVHYCVKARGIRDATSTTTTTSLGGLFKTSQNTRQEFLRAVRHLHLS

SEQ ID NO: 16643 - protein, 221 aa, Xenorhabdus hominickii
  REGION 1..221: note = tr|A0A2G0QAP2|A0A2G0QAP2_9GAMM GTP cyclohydrolase 1; OS = Xenorhabdus hominickii OX=351679 GN=folE PE=3 SV=1
MSPLSTEAALVHSALVARGLETPLREQTLEPEVRKVRIEEHMTEIMKLLNLDLSDDSLADTPGRIAKMYVDEIFSGLNYHNFPKITLIENKMKVDEMVTVRDITMTSTCEHHFVIIDGKATVSYIPKDKVIGLSKINRIVQFFAQRPQVQERLTQQILIALQTLLGTNNVAVSIDAVHYCVKARGIRDATSTTTTTSLGGLFKSSQNTRQEFLRAVRHLEL

SEQ ID NO: 16644 - protein, 222 aa, Xenorhabdus innexi
  REGION 1..222: note = tr|A0A1N6MZU9|A0A1N6MZU9_9GAMM GTP cyclohydrolase 1; OS = Xenorhabdus innexi OX=290109 GN=folE PE=3 SV=1
MSSLSTEAALVHSALVERGLETPLREQTLEPEVRKVRIEEHMTEIMKLLNLDLSDDSLADTPCRIAKMYVDEIFSGLDYRNFPKITLIENKMKVDEMVTVRDITLTSTCEHHFVTIDGKATVAYIPKDKVIGLSKINRIVQFFAQRPQVQERLTQQILIALQALLGTNNVAVSIDAVHYCVKARGIRDATSTTTTTSLGGLFKSSQNTRQEFLRAVRHLHLS

SEQ ID NO: 16645 - protein, 222 aa, unidentified
  source 1..222: note = Xenorhabdus ishibashii
  REGION 1..222: note = tr|A0A2D0KD61|A0A2D0KD61_9GAMM GTP cyclohydrolase 1; OS = Xenorhabdus ishibashii OX=1034471 GN=folE PE=3 SV=1
MSSLSTEAALVHSALVDRGLETPLRGATLAPEVRKARIEEHMTEIMKLLNLDLRDDSLADTPGRIAKMYVDEIFSGLDYNNFPKITLIENKMKVDEMVTVRDITMTSTCEHHFVTIDGKATVAYIPKDKVIGLSKINRIVQFFAQRPQVQERLTQQILIALQTLLGTNNVAVSIDAVHYCVKARGIRDATSTTTTTSLGGLFKTSQNTRQEFLRAVRHLHLS

SEQ ID NO: 16646 - protein, 222 aa, Xenorhabdus japonica
  REGION 1..222: note = tr|A0A1I5D6G7|A0A1I5D6G7_9GAMM GTP cyclohydrolase 1; OS = Xenorhabdus japonica OX=53341 GN=folE PE=3 SV=1
MSSLSTEAALVHSALIARGLETPLREQTLEPEVRKVRIEEHMTEIMKLLNLDLSDDSLADTPGRIAKMYVDEIFSGLDYSNFPKITLIENKMKVDEMVTVRDITMTSTCEHHFVIIDGKATVAYIPKDKVIGLSKINRIVQFFAQRPQVQERLTQQILIALQTLLGTNNVAVSIDAVHYCVKARGIRDATSTTTTTSLGGLFKTSQNTRQEFLRAVRHLHLS

SEQ ID NO: 16647 - protein, 222 aa, unidentified
  source 1..222: note = Xenorhabdus khoisanae
  REGION 1..222: note = tr|A0A0J5ITR8|A0A0J5ITR8_9GAMM GTP cyclohydrolase 1; OS = Xenorhabdus khoisanae OX=880157 GN=folE PE=3 SV=1
MSSLSTEAALVHSALAARGLETPLREQTLEPEVRKARIEEHMTEIMKLLNLDLSDDSLADTPGRIAKMYVDEIFSGLDYNNFPKITLIENKMKVDEMVTVRDITLTSTCEHHFVIIDGKATVAYIPKDKVIGLSKINRIVQFFAQRPQVQERLTQQILIALQALLGTNNVAVSIDAVHYCVKARGIRDATSTTTTTSLGGLFKTSQNTRQEFLRAVRHLQLS

SEQ ID NO: 16648 - protein, 222 aa, Xenorhabdus koppenhoeferi
  REGION 1..222: note = tr|A0A1I7HAG0|A0A1I7HAG0_9GAMM GTP cyclohydrolase 1; OS = Xenorhabdus koppenhoeferi OX=351659 GN=folE PE=3 SV=1
MSSLSTEAALVHSALVARGLETPLREQTLEPEARKVRIEEHMAEIMKLLNLDLSDDSLADTPGRIAKMYVDEIFSGLDYHNFPKITLIENKMKVDEMVTVRDITLTSTCEHHFVTIDGKATVAYIPKDKVIGLSKINRIVQFFAQRPQVQERLTQQILIALQTLLGTCNVAISIDAVHYCVKARGIRDATSTTTTTSLGGLFKSSQNTRQEFLRAVRHLHLS

SEQ ID NO: 16649 - protein, 222 aa, Xenorhabdus kozodoii
  REGION 1..222: note = tr|A0A2D0LG35|A0A2D0LG35_9GAMM GTP cyclohydrolase 1; OS = Xenorhabdus kozodoii OX=351676 GN=folE PE=3 SV=1
MSSLSTEAALVHSALVDRGLETPLREQTLEPAVRKVRIEEHMTEIMKLLNLDLSDDSLADTPGRIAKMYVDEIFSGLDYHNFPKITLIENKMKVDEMVTVRDITMTSTCEHHFVTIDGKATVAYIPKDKVIGLSKINRIVQFFAQRPQVQERLTQQILIALQTLLGTNNVAVSIDAVHYCVKARGIRDATSTTTTTSLGGLFKTSQNTRQEFLRAVRNLYLS

SEQ ID NO: 16650 - protein, 222 aa, Xenorhabdus mauleonii
  REGION 1..222: note = tr|A0A1I3I825|A0A1I3I825_9GAMM GTP cyclohydrolase 1; OS = Xenorhabdus mauleonii OX=351675 GN=folE PE=3 SV=1
MSSLSTEAALVHSALVARGLETPLREQTLEPEVRKARIEEHMTEIMKLLSLDLSDDSLADTPSRIAKMYVDEIFSGLDYRNFPKITLIENKMKVDEMVTVRDITLTSTCEHHFVTIDGKATVAYIPKDKVIGLSKINRIVQFFAQRPQVQERLTQQILLALQTLLGTSNVAVSIDAVHYCVKARGIRDATSTTTTTSLGGLFKSSQNTRQEFLRAVRHLQLS

SEQ ID NO: 16651 - protein, 222 aa, Xenorhabdus miraniensis
  REGION 1..222: note = tr|A0A2D0JQG6|A0A2D0JQG6_9GAMM GTP cyclohydrolase 1; OS = Xenorhabdus miraniensis OX=351674 GN=folE PE=3 SV=1
MSSLSTEAALVHSALIARGLETPLREQTLEPEVRKARIEEHMTEIMKLLNLDLSDDSLADTPGRIAKMYVDEIFSGLDYNNFPKITLIENKMKVDEMVTVRDITLTSTCEHHFVIIDGKATVAYIPKDKVIGLSKINRIVQFFAQRPQVQERLTQQILIALQALLGTNNVAVSIDAVHYCVKARGIRDATSTTTTTSLGGLFKTSQNTRQEFLRAVRHLQLS

SEQ ID NO: 16652 - protein, 222 aa, Xenorhabdus nematophila
  REGION 1..222: note = tr|D3VBB3|D3VBB3_XENNA GTP cyclohydrolase 1; OS = Xenorhabdus nematophila (strain ATCC 19061 / DSM 3370 / LMG 1036 / NCIB 9965 / AN6) OX=406817 GN=folE PE=3 SV=1
MSSLSTEAVLVHSALVARGLETPLHEQTLAPEVRKVRIEEHMTEIMKLLNLDLSDDSLADTPGRIAKMYVDEIFSGLDYHNFPKITLIENKMKVDEMVTVRDITLTSTCEHHFVIIDGKATVAYIPKDKVIGLSKINRIVQFFAQRPQVQERLTQQILIALQTLLGTNNVAVSIDAVHYCVKARGIRDATSTTTTTSLGGLFKSSQNTRQEFLRAVRHLQLS

SEQ ID NO: 16653 - protein, 222 aa, Xenorhabdus nematophila; identical to SEQ ID NO: 16652
  REGION 1..222: note = tr|A0A0A8NNF6|A0A0A8NNF6_XENNE GTP cyclohydrolase 1; OS = Xenorhabdus nematophila str. Websteri OX=1437826; GN = folE PE=3 SV=1

SEQ ID NO: 16654 - protein, 222 aa, Xenorhabdus poinarii
  REGION 1..222: note = tr|A0A068R3S3|A0A068R3S3_9GAMM GTP cyclohydrolase 1; OS = Xenorhabdus poinarii G6 OX=1354304 GN=folE PE=3 SV=1
MSSLSTEAELVHSALIARGLETPLREQTLEPEIRKVRIEEHMTEIMKLLNLDLSDDSLADTPNRIAKMYVDEIFSGLDYNNFPKITLIENKMKVDEMVTVRDITMTSTCEHHFVTIDGKATVAYIPKDKVIGLSKINRIVQFFAQRPQVQERLTQQILIALQTLLGTNNVAVSIDAIHYCVKARGIRDATSTTTTTSLGGLFKTSQNTRQEFLRAVRHLHLS

SEQ ID NO: 16655 - protein, 222 aa, Xenorhabdus sp.
  REGION 1..222: note = tr|A0A2D0L782|A0A2D0L782_9GAMM GTP cyclohydrolase 1; OS = Xenorhabdus sp. KJ12.1 OX=1851571 GN=folE PE=3 SV=1
MSSLSTEAALVHSALVERGLETPLREQTLEPEVRKVRIEEHMTEIMKLLNLDLSDDSLADTPSRIAKMYVDEIFSGLDYRNFPKITLIENKMKVDEMVTVRDITLTSTCEHHFVTIDGKATVAYIPKDKVIGLSKINRIVQFFAQRPQVQERLTQQILIALQALLGTNNVAVSIDAVHYCVKARGIRDATSTTTTTSLGGLFKSSQNTRQEFLRAVRHLHLS

SEQ ID NO: 16656 - protein, 222 aa, Xenorhabdus sp.
  REGION 1..222: note = tr|A0A0M0T8E3|A0A0M0T8E3_9GAMM GTP cyclohydrolase 1; OS = Xenorhabdus sp. GDc328 OX=742178 GN=folE PE=3 SV=1
MSSLSTEAALVHSALAERGLETPLREQTLEPEVRKVRIKAHMTEIMKLLNLDLSDDSLADTPGRIAKMYVDEIFSGLDYNNFPKITLIENKMKVDEMVTVRDITMTSTCEHHFVTIDGKATVAYIPKDKVIGLSKINRIVQFFAQRPQVQERLTQQILIALQTLLGTNNVAVSIDAVHYCVKARGIRDATSTTTTTSLGGLFKTSQNTRQEFLRAVRHLHLS

SEQ ID NO: 16657 - protein, 222 aa, Xenorhabdus stockiae; identical to SEQ ID NO: 16655
  REGION 1..222: note = tr|A0A2D0KRI7|A0A2D0KRI7_9GAMM GTP cyclohydrolase 1; OS = Xenorhabdus stockiae OX=351614 GN=folE PE=3 SV=1

SEQ ID NO: 16658 - protein, 222 aa, Xenorhabdus szentirmaii
  REGION 1..222: note = tr|W1IXA5|W1IXA5_9GAMM GTP cyclohydrolase 1; OS = Xenorhabdus szentirmaii DSM 16338 OX=1427518 GN=folE; PE = 3 SV=1
MSSLSTEAALVHSALVARGLETPLREQTLEPEVRKVRIEEHMTEIMKLLNLDLSDDSLVDTPSRIAKMYVDEIFSGLDYKNFPKITLIENKMEVDEMVTVRDITMTSTCEHHFVIIDGKATVAYIPKDKVIGLSKINRIVQFFAQRPQVQERLTQQILIALQTLLGTSNVAVSIDAVHYCVKARGIRDATSTTTTTSLGGLFKTSQNTRQEFLRAVRHLHLS

SEQ ID NO: 16659 - protein, 222 aa, unidentified
  source 1..222: note = Xenorhabdus thuongxuanensis
  REGION 1..222: note = tr|A0A1Q5U9A0|A0A1Q5U9A0_9GAMM GTP cyclohydrolase 1; OS = Xenorhabdus thuongxuanensis OX=1873484 GN=folE PE=3 SV=1
MSSLSTEAALVHSALVDRGLETPLRGSTLAPEERKARIEEHMTEIMKLLNLDLRDDSLADTPGRIAKMYVDEIFSGLDYNNFPKITLIENKMKVDEMVTVRDITMTSTCEHHFVTIDGKATVAYIPKDKVIGLSKINRIVQFFAQRPQVQERLTQQILIALQTLLGTNNVAVSIDAVHYCVKARGIRDATSTTTTTSLGGLFKTSQNTRQEFLRAVRHLHLS

SEQ ID NO: 16660 - protein, 222 aa, Xenorhabdus vietnamensis
  REGION 1..222: note = tr|A0A1Y2SEN2|A0A1Y2SEN2_9GAMM GTP cyclohydrolase 1; OS = Xenorhabdus vietnamensis OX=351656 GN=folE PE=3 SV=1
MSSLSTEAALVHSALVARGLETPLREQTLEPEVRKVRIEEHMTEIMKLLNLDLRDDSLADTPGRIAKMYVDEIFSGLDYNNFPKITLIENKMKVDEMVTVRDITMTSTCEHHFVTIDGKATVAYIPKDKVIGLSKINRIVQFFAQRPQVQERLTQQILIALQTLLGTNNVAVSIDAVHYCVKARGIRDATSTTTTTSLGGLFKTSQNTRQEFLRAVRHLHLS

SEQ ID NO: 16661 - protein, 211 aa, unidentified
  source 1..211: note = Xiangella phaseoli
  REGION 1..211: note = tr|A0A1H7DF36|A0A1H7DF36_9ACTN GTP cyclohydrolase 1; OS = Xiangella phaseoli OX=1144548 GN=folE PE=3 SV=1
MDSLDYIAARLVNGRLTGRPVEDTMDLGRIEKAVREILVAVGEDPDRDGLQQTPARVARAYAELFAGLRVDPATVLTTTFEANHEELVLVRDIDVMSLCEHHLLPFRGSAHIGYIPGPDGRITGLSKLARLVEVFARRPQVQERLTSQIADLLMERLAPRGVIVVLECEHMCMAMRGIQKSGAKTITSAVRGTLQRDAKSRAEAMALILHR

SEQ ID NO: 16662 - protein, 371 aa, unidentified
  source 1..371: note = Xinfangfangia sp.
  REGION 1..371: note = tr|A0A3P5XV29|A0A3P5XV29_9RHOB GTP cyclohydrolase FolE2 OS=Xinfangfangia sp. CIP 111625 OX=2483812 GN=folE2; PE = 3 SV=1
MTLHDPELHEQPSRAPGPVPSRDEAAAALAILRRWADAAGEAEIAALDPSVGNLLPDLSYPALHRAYPEEFEADAAYRETLPDLQNGPSSLIVGAKAVIQHVGISNFRLPIRFHSREGAEVVLETSVTGTVSLEAEKKGINMSRIMRSFYAHAERDFSFEVIEGALEDYKRDLGSFDARIQMRFSFPVKVGSLRSGLSGWQYYDIALELVDQGGSRVRIMHLDYVYSSTCPCSLELSEHARRTRGQLATPHSQRSVARLSVVVKDGGILWFEDLIELARRAVVTETQVMVKREDEQAFAELNGANPIFVEDAARSFCEALRGDPRIGDFRVVASHQESLHSHDAVSVLTEGPTFAQTSFDPKLFASLYHVG

SEQ ID NO: 16663 - protein, 206 aa, Xylanibacterium sp.
  REGION 1..206: note = tr|A0A4P6ELJ6|A0A4P6ELJ6_9MICO GTP cyclohydrolase 1; OS = Xylanibacterium sp. 2JSPR-7 OX=2509459 GN=folE PE=3 SV=1
MTQTDRATDGAARPAADVPPVDLARAEAAVRELLFAVGEDPDREGLRETPARVARAYQEIFAGLRQEPEDVLTTTFDLGHEEMVLVRDIEVYSTCEHHLVPFHGVAHVGYIPSADGVITGLSKLARLVDVYARRPQVQERLTTQIADALVRILRPRGVLVVVECEHLCMAMRGVRKPGSRTITSAVRGQMRDPATRAEAMSLVSAR

SEQ ID NO: 16664 - protein, 204 aa, Xylanibacterium ulmi
  REGION 1..204: note = tr|A0A4Q7M530|A0A4Q7M530_9MICO GTP cyclohydrolase 1; OS = Xylanibacterium ulmi OX=228973 GN=folE PE=3 SV=1
MTQTDREAAVRRAADVPPVDIARAEAAVRELLLAVGEDPDREGLRETPARVARSYQEIFAGLRQEPEDVLTTTFDLGHEEMVLVKDIEVYSTCEHHLVPFHGVAHVGYIPSADGVITGLSKLARLVEVYARRPQVQERLTSQIADALVRILRPRGVLVVVECEHLCMAMRGVRKPGSRTVTSAVRGQMRDPATRAEAMSLVLGK

SEQ ID NO: 16665 - protein, 202 aa, Xylanimicrobium sp.
  REGION 1..202: note = tr|A0A4V0YFX1|A0A4V0YFX1_9MICO GTP cyclohydrolase 1; OS = Xylanimicrobium sp. FW10M-9 OX=2509457 GN=folE PE=3 SV=1
MTTAESVNRRAADVPPVDIPRAEAAVRELLLAVGEDPDREGLRETPARVARAYAEVFAGLRQEPEDVLTTTFDIGHEEMVLVKDIEVYSTCEHHLVPFHGVAHVGYIPSNDGVITGLSKLARLVDVYARRPQVQERLTTQVADALVKILRPRGVIVVIECEHLCMSMRGVHKPGSRTVTSAVRGQMRDPATRAEAMSLVIGK

SEQ ID NO: 16666 - protein, 202 aa, Xylanimonas cellulosilytica
  REGION 1..202: note = tr|D1BZ95|D1BZ95_XYLCX GTP cyclohydrolase 1; OS = Xylanimonas cellulosilytica (strain DSM 15894 / CECT 5975 / LMG 20990 / XIL07) OX=446471 GN=folE PE=3 SV=1
MTATDGVTRPATEVPPVDLARAEAAVRELLLAVGENPDREGLRETPARVARAYQEVFAGLRQEPEDVLTTTFDIGHEEMVLVKDIEVYSTCEHHLVPFHGVAHVGYIPSTDGVITGLSKIARLVDVYARRPQVQERLTSQVADALVKILRPRGVIVVIECEHLCMSMRGVHKPGSRTVTSAVRGQMRDPATRAEAMSLVIGK

SEQ ID NO: 16667 - protein, 298 aa, Xylella fastidiosa
  REGION 1..298: note = sp|B0U741|GCH4_XYLFM GTP cyclohydrolase FolE2; OS = Xylella fastidiosa (strain M12) OX=405440 GN=folE2 PE=3; SV = 2
MSTSIPDVAVHDSPAIAAPLRWVGMDGIVVPVQLTIADGGQHVIGRARAQIDLPAMEVKGIHMSRLYRLLDTHAVEPLTPVGICGLLSAMVNSHADCASTAARVDWYFDWLRRVPALVSNDLSGWRGYPVWLRAEYSAGHVQFWLCVEVGYSSTCPCSAALARQMLADAFLQEHVEVSALSPETVADWLRSNGSYATPHSQRSLARIEVALTEQAVELGLPALVDCAERILSTPVQAAVRRVDEQAFARLNGANLMYVEDATRRLQHGLAIHYSAFRVHVRHLESLHPHDAVASTADE

SEQ ID NO: 16668 - protein, 203 aa, Xylella fastidiosa
  REGION 1..203: note = tr|A0A060H9Y9|A0A060H9Y9_XYLFS GTP cyclohydrolase 1; OS = Xylella fastidiosa MUL0034 OX=1401256 GN=folE PE=3 SV=1
MDHSKQQNASITQAQAEEAVRTLLRWAGEDPTREGLLDTPRRVVEAYGDWFSGYREDPHDYLQRTFEEISGYDEMIVLRNITYESHCEHHMAPIIGKVHVGYLPNGKVVGISKLARVVESYARRFQIQEKMTAQIAACIQDTLTPRGVGVVIEGAHACMTTRGIHKRGVSMVTSKMLGTFREDARTRAEFLQFIEVGTNVMDL

SEQ ID NO: 16669 - protein, 200 aa, unidentified
  source 1..200: note = Xylella taiwanensis
  REGION 1..200: note = tr|Z9JH29|Z9JH29_9GAMM GTP cyclohydrolase 1; OS = Xylella taiwanensis OX=1444770 GN=folE PE=3 SV=1
MDHSNQHTASITQAQAEEAVRTLLRWAGEDPTREGLLDTPRRVVEAYGDWFSGYREDPHAYLQRTFEETSGYDELIVLRNITYESHCEHHMAPIIGKVHVGYLPNGKVVGISKLARVVDAYARRFQVQEKMTAQIAACIQDTLTPRGVGVVIEGAHECMTTRGVHKRGVSMVTSKMLGAFRQDARTRAEFLNFIEVGGES

SEQ ID NO: 16670 - protein, 301 aa, unidentified
  source 1..301: note = Xylella taiwanensis
  REGION 1..301: note = tr|Z9JL57|Z9JL57_9GAMM GTP cyclohydrolase FolE2; OS = Xylella taiwanensis OX=1444770 GN=folE2 PE=3 SV=1
MSTSIPDVVVHELPAVAAPLRWVGMDGIVVPVQLTTTDGGQRLVGRAKAQIDLPAIEVKGIHMSRLYRLLDTYAAEPLTPVGICGLLTAMVNSHVDCASTAARVDWRFDWLKRVPALVSGDLAGWRGYPVRLRAECCSERVRFWLCVEVAYSSTCPCSAALARQMLADAFLQEHADVSALSPVTIADWLRRHGSYATPHSQRSVACIEVALAEQASELGLAALVDCAERILSTPVQAAVRRVDEQAFARLNGANLMYVEDAARRLQHGLAIHYSAFRVHVRHLESLHPHDVVASTEDALST

SEQ ID NO: 16671 - protein, 366 aa, Yangia pacifica
  REGION 1..366: note = tr|A0A1I6WAV2|A0A1I6WAV2_9RHOB GTP cyclohydrolase FolE2 OS=Yangia pacifica OX=311180 GN=folE2 PE=3 SV=1
MNVYSPVVDRNPSRDDAEAALAVLRQWTEAADDSEITDLDPALLKLLGAAQDYPVFSRQYPEGFAVDDAYKTSLPDLQNGPASLIRGENVRIQHVGISNFRLPISYKLKDGQSLSVETSVTGTVSLEADKKGINMSRIMRSFYTHAEKSFSFGVIEAALDDYKSDLESFDARIQMRFRFPMKVESLRSGLSGYQYYDIALELVEQDGVRQRIAHLDYVYSSTCPCSLELSEHARQFRGQLATPHSQRSVARVSVVLNDDSDDCLWFEDLVGLCRTAVPTETQVMVKREDEQAFAELNAANPIFVEDAARLFAEAMAGEERIGDFRVLCSHQESLHSHDAVALLTQGATFAQTSLDPTLFPSLIHQG

SEQ ID NO: 16672 - protein, 365 aa, Yangia sp.
  REGION 1..365: note = tr|A0A2E1D5W5|A0A2E1D5W5_9RHOB GTP cyclohydrolase FolE2 OS=Yangia sp. OX=2024862 GN=folE2 PE=3 SV=1
MNVFTPEIDRKPSKEEAAKALEVLRSFAEKALDYEIDALDPGIAALRDGGVPYPDLSRVYPTAFRADEAYRETLPDLQNGPSSLIKGENRLIQHVGISNFRLPIHYRTRDHGELTLETSVTGTVSLEADKKGINMSRIMRSFYAHAEKTFSFEVIEAALDDYKSDLESFDARIMMRLSFPVRRDSLRSGLSGYQYYDIALELVELDGVRRKILHLDYVYSSTCPCSLELSEHARRTRGQLATPHSQRSVARVSAVLANEGDCLWFEDLIGLCRKAVPTETQVMVKREDEQAFAELNAANPIFVEDAARLFAEQLQADPRIGDFRVLASHQESLHSHDAVSVLTEGTTFANDSLDPKLFSTLFHVG

SEQ ID NO: 16673 - protein, 365 aa, Yangia sp.
  REGION 1..365: note = tr|A0A1B1PRD8|A0A1B1PRD8_9RHOB GTP cyclohydrolase FolE2 OS=Yangia sp. CCB-MM3 OX=1792508 GN=folE2 PE=3 SV=1
MNVYSPVVDRDPNRDEAEAALAVLRKWTETAADNEITDLDPALLKLLGAAQDYPTFSRQYPEGFTVEPSYKDSLPDLQNGPSSLIRGENRRIQHVGISNFRLPISYRTKEGAPLTVETSVTGTVSLEADKKGINMSRIMRSFYTHAEKTFSFGVIEAALDDYKSDLESFDARIQMRFRFPMRVDSLRSGLSGYQYYDIALELIENDGVRQRVVHLDYVYSSTCPCSLELSEHARQFRGQLATPHSQRSVARVSAVLTDDEDWMWFEDLVGLCRSAVPTETQVMVKREDEQAFAELNAANPIFVEDAARLFAEALQADPRIGDYRVLASHQESLHSHDAVALLTEGPTFAQASLDPTLFPSLIHQG

SEQ ID NO: 16674 - protein, 220 aa, Yersinia aldovae
  REGION 1..220: note = tr|A0A0T9TG94|A0A0T9TG94_YERAL GTP cyclohydrolase 1; OS = Yersinia aldovae OX=29483 GN=folE PE=3 SV=1
MSSLSKEAELVHEALLARGLETPLRKQELDAQTRKTRIQEHMTQVMQLLNLDLSDDSLADTPRRIAKMYVDEIFSGLDYENFPKITLIQNKMKVDEMVTVRDITLTSTCEHHFVTIDGKATVAYIPKDSVIGLSKINRIVQFFAQRPQVQERLTQQILLALQTLLGTNNVAVSIDAVHYCVKARGIRDATSATTTTSLGGLFKSSQNTRQEFLRAVRHNS

SEQ ID NO: 16675 - protein, 220 aa, Yersinia bercovieri
  REGION 1..220: note = tr|A0A2G4U1S6|A0A2G4U1S6_YERBE GTP cyclohydrolase 1; OS = Yersinia bercovieri OX=634 GN=folE PE=3 SV=1
MSSLSKEAELVHEALLARGLETPLRKQELDAETRKTLIQEHMTQVMQLLNLDLTDDSLADTPRRIAKMYVDEIFSGLDYENFPKITLIENKMKVDEMVTVRDITLTSTCEHHFVTIDGKATVAYIPKDSVIGLSKINRIVQFFAQRPQVQERLTQQILLALQTLLGTNNVAVSIDAVHYCVKARGIRDATSATTTTSLGGLFKSSQNTRQEFLRAVRHNS

SEQ ID NO: 16676 - protein, 220 aa, Yersinia enterocolitica
  REGION 1..220: note = sp|A1JU09|GCH1_YERE8 GTP cyclohydrolase 1; OS = Yersinia enterocolitica serotype O:8 / biotype 1B (strain NCTC 13174 / 8081) OX=393305 GN=folE PE=3 SV=1
MSSLSKEAELVHEALLARGLETPLRKQELDAETRKTRIQEHMTQVMQLLNLDLSDDSLADTPRRIAKMYVDEIFSGLDYENFPKITLIENKMKVDEMVTVRDITLTSTCEHHFVTIDGKATVAYIPKDSVIGLSKINRIVQFFAQRPQVQERLTQQILLALQTLLGTNNVAVSIDAVHYCVKARGIRDATSATTTTSLGGLFKSSQNTRQEFLRAVRHNG

SEQ ID NO: 16677 - protein, 220 aa, Yersinia enterocolitica; identical to SEQ ID NO: 16676
  REGION 1..220: note = tr|A0A3S4IUH4|A0A3S4IUH4_YEREN GTP cyclohydrolase 1; OS = Yersinia enterocolitica subsp. enterocolitica OX=150052; GN = folE PE=3 SV=1

SEQ ID NO: 16678 - protein, 220 aa, Yersinia entomophaga
  REGION 1..220: note = tr|A0A3S6EVW8|A0A3S6EVW8_YERET GTP cyclohydrolase 1; OS = Yersinia entomophaga OX=935293 GN=folE PE=3 SV=1
MSSLSKEAILVHAALEARGLETPLRGQVLDSETRKQRIQEHMTEIMQLLNLDLSDDSLADTPRRIAKMYVDEIFSGLDYANFPKITVIENKMKVDEMVTVRDITLTSTCEHHFVTIDGKATVAYIPKDSVIGLSKINRIVQFFAQRPQVQERLTQQILLALQTLLGTNNVAVSIDAVHYCVKARGIRDATSATTTTSLGGLFKSSQNTRQEFLRAVRHSS

SEQ ID NO: 16679 - protein, 309 aa, Yersinia entomophaga
  REGION 1..309: note = tr|A0A3S6EY10|A0A3S6EY10_YERET GTP cyclohydrolase FolE2 OS=Yersinia entomophaga OX=935293 GN=folE2 PE=3 SV=1
MKIAANQSLTALPDVQSSYIDFGNTELDWVGMEGIALPLDIVGRPLSAKVNAGIGVKAKGQSKGIHMSRIYLALDELTQGELTPQRIHTTLAAFLASQPDLAASASLHIASDIFISRPAMLSPQRGWKAYPLTIDAQLEQQLQLRLRLSLSVPYSSTCPSSVALSIQSAQQQFQLDFEQQENLTQQQVLDWLGTQGMPATPHSQRSWARVTVSLKSTEMNFPVLELINQIENTLGTPVQTLVKRQDEQAFALANGQNLMFCEDAARRLYAMLRKQCRYSAFSVRVEHQESLHAHNAVAVISSEGINHAA

SEQ ID NO: 16680 - protein, 220 aa, Yersinia frederiksenii
  REGION 1..220: note = tr|A0A0B6FTZ4|A0A0B6FTZ4_YERFR GTP cyclohydrolase 1; OS = Yersinia frederiksenii Y225 OX=1454377 GN=folE PE=3 SV=1
MSSLSKEAELVHEALLARGLETPLRKQELDAETRKTRIQEHMTQVMQLLNLDLSDDSLADTPRRIAKMYVDEIFSGLDYENFPKITLIENKMKVDEMVTVRDITLTSTCEHHFVTIDGKAIVAYIPKDSVIGLSKINRIVQFFAQRPQVQERLTQQILLALQTLLGTNNVAVSIDAVHYCVKARGIRDATSATTTTSLGGLFKSSQNTRQEFLRAVRHNS

SEQ ID NO: 16681 - protein, 238 aa, Yersinia frederiksenii
  REGION 1..238: note = tr|A0A0T9PSW6|A0A0T9PSW6_YERFR GTP cyclohydrolase 1; OS = Yersinia frederiksenii OX=29484 GN=folE PE=3 SV=1
MIYIMFMLFGGVRLLEKRMSSLSKEAELVHEALLARGLETPLRKQELDAQTRKTKIQAHMTEVMQLLNLDLSDDSLADTPRRIAKMYVDEIFSGLDYENFPKITLIQNKMKVDEMVTVRDITLTSTCEHHFVTIDGKATVAYIPKDSVIGLSKINRIVQFFAQRPQVQERLTQQILLALQTLLGTNNVAVSIDAVHYCVKARGIRDATSATTTTSLGGLFKSSQNTRQEFLRAVRHNS

SEQ ID NO: 16682 - protein, 220 aa, unidentified
  source 1..220: note = Yersinia hibernica
  REGION 1..220: note = tr|A0A481QEU7|A0A481QEU7_9GAMM GTP cyclohydrolase 1; OS = Yersinia hibernica OX=2339259 GN=folE PE=3 SV=1
MSSLSKEAELVHEALLARGLETPLRKQELDAETRKIRIQEHMTQVMQLLNLDLSDDSLADTPRRIAKMYVDEIFSGLDYENFPKITLIENKMKVDEMVTVRDITLTSTCEHHFVTIDGKATVAYIPKDSVIGLSKINRIVQFFAQRPQVQERLTQQILLALQTLLGTNNVAVSIDAVHYCVKARGIRDATSATTTTSLGGLFKSSQNTRQEFLRAVRHNS

SEQ ID NO: 16683 - protein, 220 aa, Yersinia intermedia; identical to SEQ ID NO: 16682
  REGION 1..220: note = tr|A0A0T9T4K0|A0A0T9T4K0_YERIN GTP cyclohydrolase 1; OS = Yersinia intermedia OX=631 GN=folE PE=3 SV=1

SEQ ID NO: 16684 - protein, 220 aa, Yersinia intermedia
  REGION 1..220: note = tr|A0A0T9LVN1|A0A0T9LVN1_YERIN GTP cyclohydrolase 1; OS = Yersinia intermedia OX=631 GN=folE PE=3 SV=1
MSSLSKEAELVHEALLARGLETPLRKQELDAQTRKTKIQAHMTEVMQLLNLDLSDDSLADTPRRIAKMYVDEIFSGLDYENFPKITLIQNKMKVDEMVTVRDITLTSTCEHHFVTIDGKATVAYIPKDSVIGLSKINRIVQFFAQRPQVQERLTQQILLALQTLLGTNNVAVSIDAVHYCVKARGIRDATSATTTTSLGGLFKSSQNTRQEFLRAVRHNS

SEQ ID NO: 16685 - protein, 220 aa, Yersinia kristensenii
  REGION 1..220: note = tr|A0A2A7TCZ4|A0A2A7TCZ4_YERKR GTP cyclohydrolase 1; OS = Yersinia kristensenii OX=28152 GN=folE PE=3 SV=1
MSSLSKEAELVHEALLARGLETPLRKQELDAETRKARIQEHMAQVMQLLNLDLSDDSLADTPRRIAKMYVDEIFSGLDYENFPKITLIENKMKVDEMVTVRDITLTSTCEHHFVTIDGKAIVAYIPKDSVIGLSKINRIVQFFAQRPQVQERLTQQILLALQTLLGTNNVAVSIDAVHYCVKARGIRDATSATTTTSLGGLFKSSQNTRQEFLRAVRHNS

SEQ ID NO: 16686 - protein, 220 aa, Yersinia kristensenii; identical to SEQ ID NO: 16675
  REGION 1..220: note = tr|A0A0T9UZM6|A0A0T9UZM6_YERKR GTP cyclohydrolase 1; OS = Yersinia kristensenii OX=28152 GN=folE PE=3 SV=1

SEQ ID NO: 16687 - protein, 220 aa, Yersinia massiliensis
  REGION 1..220: note = tr|A0A0T9PVN6|A0A0T9PVN6_9GAMM GTP cyclohydrolase 1; OS = Yersinia massiliensis OX=419257 GN=folE PE=3 SV=1
MSSLSKEAELVHEALLARGLETPLRKQELDAKTRKTQIEAHMTQVMQLLNLDLTDDSLADTPRRIAKMYVDEIFSGLDYENFPKITLIENKMKVDEMVTVRDITLTSTCEHHFVTIDGKATVAYIPKESVIGLSKINRIVQFFAQRPQVQERLTQQILLALQTLLGTNNVAVSIDAVHYCVKARGIRDATSATTTTSLGGLFKSSQNTRQEFLRAVRHHG

SEQ ID NO: 16688 - protein, 220 aa, Yersinia massiliensis
  REGION 1..220: note = tr|A0A2R4NN86|A0A2R4NN86_9GAMM GTP cyclohydrolase 1; OS = Yersinia massiliensis OX=419257 GN=folE PE=3 SV=1
MSSLSKEAELVHEALLARGLETPLRKQELDAKTRKTQIEAHMTQVMQLLNLDLTDDSLADTPRRIAKMYVDEIFSGLDYENFPKITLIENKMKVDEMVTVRDITLTSTCEHHFVTIDGKATVAYIPKDSVIGLSKINRIVQFFAQRPQVQERLTQQILLALQTLLGTNNVAVSIDAVHYCVKARGIRDATSATTTTSLGGLFKSSQNTRQEFLRAVRHHG

SEQ ID NO: 16689 - protein, 220 aa, Yersinia mollaretii
  REGION 1..220: note = tr|A0A0U1I7U0|A0A0U1I7U0_YERMO GTP cyclohydrolase 1; OS = Yersinia mollaretii OX=33060 GN=folE_1 PE=3 SV=1
MSSLSKEAELVHEALLARGLETPLRKQELDAETRKTQIQAHMTQVMQLLNLDLTDDSLADTPRRIAKMYVDEIFSGLDYENFPKITLIQNKMKVDEMVTVRDITLTSTCEHHFVTIDGKATVAYIPKDSVIGLSKINRIVQFFAQRPQVQERLTQQILLALQTLLGTNNVAVSIDAVHYCVKARGIRDATSATTTTSLGGLFKSSQNTRQEFLRAVRHNG

SEQ ID NO: 16690 - protein, 239 aa, Yersinia mollaretii
  REGION 1..239: note = tr|A0A0U1K913|A0A0U1K913_YERMO GTP cyclohydrolase 1; OS = Yersinia mollaretii OX=33060 GN=folE PE=3 SV=1
MCDLHHVYLIRTRSLLEKRMSSLSKEAELVHEALLARGLETPLRKQELDAETRKTQIQAHMTQVMQLLNLDLTDDSLADTPRRIAKMYVDEIFSGLDYENFPKITLIQNKMKVDEMVTVRDITLTSTCEHHFVTIDGKATVAYIPKDSVIGLSKINRIVQFFAQRPQVQERLTQQILLALQTLLGTNNVAVSIDAVHYCVKARGIRDATSATTTTSLGGLFKSSQNTRQEFLRAVRHNG

SEQ ID NO: 16691 - protein, 220 aa, Yersinia nurmii; identical to SEQ ID NO: 16678
  REGION 1..220: note = tr|A0A0T9KEQ9|A0A0T9KEQ9_9GAMM GTP cyclohydrolase 1; OS = Yersinia nurmii OX=685706 GN=folE PE=3 SV=1

SEQ ID NO: 16692 - protein, 307 aa, Yersinia nurmii
  REGION 1..307: note = tr|A0A0T9LGC0|A0A0T9LGC0_9GAMM GTP cyclohydrolase FolE2 OS=Yersinia nurmii OX=685706 GN=folE2 PE=3 SV=1
MKIAANQSLTALPDVQSLSIDVSNMGMDWVGMEGIALPLDIAGKPLSAKVNAGIRVKAKSQSKGIHMSRLYLALDELTQGELTPQRIHTTLAAFLASQPDLAASASLHIASEIFISRPAMLSPQRGWKAYPLTIDAQLEQQLQLRLSLSVPYSSTCPSSAALSLQSAWQQFQLDFDQQENLTQQQVLDWLGTQGMPATPHSQRSWAIVTVSLKSTEMNFPVLELINQIENALGTPVQTVVKRQDEQAFALANGQNLMFCEDAARRLYVMLSKQCRYTAFSVRVEHQESLHAHNAVAVISREGTKHTA

SEQ ID NO: 16693 - protein, 220 aa, Yersinia pekkanenii
  REGION 1..220: note = tr|A0A0T9QNL6|A0A0T9QNL6_9GAMM GTP cyclohydrolase 1; OS = Yersinia pekkanenii OX=1288385 GN=folE PE=3 SV=1
MSSLSKEAELVHDALLARGLETPLRKQVLDAETRKSRIQEHMTEVMQLLNLDLSDDSLADTPRRIAKMYVDEIFSGLDYENFPKITLIQNKMKVDEMVTVRDITLTSTCEHHFVTIDGKATVAYIPKDSVIGLSKINRIVQFFAQRPQVQERLTQQILLALQTLLGTNNVAVSIDAVHYCVKARGIRDATSATTTTSLGGLFKSSQNTRQEFLRAVRHNS

SEQ ID NO: 16694 - protein, 220 aa, Yersinia pestis
  REGION 1..220: note = sp|Q8ZG15|GCH1_YERPE GTP cyclohydrolase 1; OS = Yersinia pestis OX=632 GN=folE PE=1 SV=1
MSSLSKEAELVHQALLARGLETPLRKPELDAETRKTRIQAHMTEVMHLLNLDLTDDSLADTPRRIAKMYVDEIFSGLDYENFPKITLIQNKMKVDEMVTVRDITLTSTCEHHFVTIDGKATVAYIPKDSVIGLSKINRIVQFFAQRPQVQERLTQQILLALQTLLGTNNVAVSIDAVHYCVKARGIRDATSATTTTSLGGLFKSSQNTRQEFLRAVRHHG

SEQ ID NO: 16695 - protein, 220 aa, Yersinia pestis; identical to SEQ ID NO: 16694
  REGION 1..220: note = tr|A0A3N4BRX1|A0A3N4BRX1_YERPE GTP cyclohydrolase 1; OS = Yersinia pestis OX=632 GN=folE PE=3 SV=1

SEQ ID NO: 16696 - protein, 220 aa, Yersinia pseudotuberculosis; identical to SEQ ID NO: 16694
  REGION 1..220: note = sp|B1JQJ4|GCH1_YERPY GTP cyclohydrolase 1; OS = Yersinia pseudotuberculosis serotype O:3 (strain YPIII); OX = 502800 GN=folE PE=3 SV=1

SEQ ID NO: 16697 - protein, 220 aa, Yersinia pseudotuberculosis; identical to SEQ ID NO: 16694
  REGION 1..220: note = tr|A0A3G5KJU9|A0A3G5KJU9_YERPU GTP cyclohydrolase 1; OS = Yersinia pseudotuberculosis OX=633 GN=folE PE=3 SV=1

SEQ ID NO: 16698 - protein, 220 aa, Yersinia rohdei
  REGION 1..220: note = tr|A0A0U1HTQ8|A0A0U1HTQ8_YERRO GTP cyclohydrolase 1; OS = Yersinia rohdei OX=29485 GN=folE PE=3 SV=1
MSSLSKEAELVHEALLARGLETPLRKQELDAETRKTRIQEHMTQVMQLLNLDLSDDSLADTPRRIAKMYVDEIFSGLDYENFPKITLIENKMKVDEMVTVRDITLTSTCEHHFVTIDGKATVAYIPKDSVIGLSKVNRIVQFFAQRPQVQERLTQQILLALQTLLGTNNVAVSIDAVHYCVKARGIRDATSATTTTSLGGLFKSSQNTRQEFLRAVRHNS

SEQ ID NO: 16699 - protein, 220 aa, Yersinia ruckeri
  REGION 1..220: note = tr|A0A0A5FMF7|A0A0A5FMF7_YERRU GTP cyclohydrolase 1; OS = Yersinia ruckeri OX=29486 GN=folE PE=3 SV=1
MSSLSKEAILVHAALEARGLETPLRGQVLDSETRKQRIQAHMTEIMQLLNLDLSDDSLADTPRRIAKMYVDEIFSGLDYANFPKITVIENKMKVDEMVTVRDITLTSTCEHHFVTIDGKATVAYIPKDSVIGLSKINRIVQFFAQRPQVQERLTQQILLALQTLLGTSNVAVSIDAVHYCVKARGIRDATSATTTTSLGGLFKSSQNTRQEFLRAVRHSS

SEQ ID NO: 16700 - protein, 220 aa, Yersinia similis
  REGION 1..220: note = tr|A0A0T9NYT0|A0A0T9NYT0_9GAMM GTP cyclohydrolase 1; OS = Yersinia similis OX=367190 GN=folE PE=3 SV=1
MSSLSKEAELVHQALLARGLETPLRKQELDAETRKTRIQAHMTEVMHLLNLDLTDDSLADTPRRIAKMYVDEIFSGLDYENFPKITLIQNKMKVDEMVTVRDITLTSTCEHHFVTIDGKATVAYIPKDSVIGLSKINRIVQFFAQRPQVQERLTQQVLLALQTLLGTNNVAVSIDAVHYCVKARGIRDATSATTTTSLGGLFKSSQNTRQEFLRAVRHHG

SEQ ID NO: 16701 - protein, 220 aa, unidentified; identical to SEQ ID NO: 16694
  source 1..220: note = Yersinia wautersii
  REGION 1..220: note = tr|A0A0E8XD10|A0A0E8XD10_9GAMM GTP cyclohydrolase 1; OS = Yersinia wautersii OX=1341643 GN=folE PE=3 SV=1

SEQ ID NO: 16702 - protein, 220 aa, unidentified
  source 1..220: note = Yersiniaceae bacterium
  REGION 1..220: note = tr|A0A2N5ETR9|A0A2N5ETR9_9GAMM GTP cyclohydrolase 1; OS = Yersiniaceae bacterium 2016Iso3 OX=2060066 GN=folE PE=3; SV = 1
MATLSKEAALVHEALMARGLETPLRPEPMLDRETRTRHIQEHMTSIMQLLNLDLTDDSLAETPLRIAKMYVEEIFSGLDYNNFPKITIIENKMKVDEMVTVRDITLTSTCEHHFVTIDGKATVAYIPKDGVIGLSKINRIVQFFAQRPQVQERLTQQILVALQTLLGTNNVAVSIDAVHYCVKARGIRDATSATTTTSLGGLFKSSQNTRQEFLRAVRHV

SEQ ID NO: 16703 - protein, 220 aa, unidentified
  source 1..220: note = Yersiniaceae bacterium
  REGION 1..220: note = tr|A0A2N5ECG7|A0A2N5ECG7_9GAMM GTP cyclohydrolase 1; OS = Yersiniaceae bacterium 2016Iso4 OX=2060068 GN=folE PE=3; SV = 1
MATLSKEAALVHEALVARGLETPLRPEPMLDKETRTRHIQDHMTSIMQLLNLDLTDDSLAETPLRIAKMYVDEIFSGLDYNNFPKITIIENKMKVDEMVTVRDITLTSTCEHHFVTIDGKATVAYIPKDGVIGLSKINRIVQFFAQRPQVQERLTQQILVALQTLLGTNNVAVSIDAVHYCVKARGIRDATSATTTTSLGGLFKSSQNTRQEFLRAVRHV

SEQ ID NO: 16704 - protein, 197 aa, Yimella lutea
  REGION 1..197: note = tr|A0A542EDI3|A0A542EDI3_9MICO GTP cyclohydrolase 1; OS = Yimella lutea OX=587872 GN=folE PE=3 SV=1
MDALTRRAFDRDRAAAAVRELLIAVGEDPDRDGLVDTPMRVAKSFEEVFSGLDQDPAEVLSRTFEIDHDELIIVKDIELYSTCEHHLVPFHGVAHVGYIPAKDGRVTGLSKIARLVDVFAKRPQVQERLTTQIADAIITHLDAQGVLVVLECEHLCMSMRGVRKPGATTITSAVRGVLRDPATRSEAMSLMKASSHR

SEQ ID NO: 16705 - protein, 197 aa, Yimella sp.; identical to SEQ ID NO: 16704
  REGION 1..197: note = tr|A0A4Q3XIX3|A0A4Q3XIX3_9MICO GTP cyclohydrolase 1; OS = Yimella sp. RIT 621 OX=2510323 GN=folE PE=3 SV=1

SEQ ID NO: 16706 - protein, 222 aa, Yokenella regensburgei
  REGION 1..222: note = tr|G9ZA45|G9ZA45_9ENTR GTP cyclohydrolase 1; OS = Yokenella regensburgei ATCC 43003 OX=1002368 GN=folE; PE = 3 SV=1
MSSLSKEAALVHEALVARGLETPLRPPVHEMDNETRKRLISGHMTEIMQLLNLDLSDDSLMETPHRIAKMYVDEIFSGLDYANFPKITVIENKMKVDEMVTVRDITLTSTCEHHFVTIDGKATVAYIPKDTVIGLSKINRIVQFFAQRPQVQERLTQQILTALQTLLGTNNVAVSIDAVHYCVKARGVRDATSATTTTSLGGLFKSSQNTRQEFLRAVRHHN

SEQ ID NO: 16707 - protein, 222 aa, Yokenella regensburgei; identical to SEQ ID NO: 16706
  REGION 1..222: note = tr|A0A2X2Q6Z3|A0A2X2Q6Z3_9ENTR GTP cyclohydrolase 1; OS = Yokenella regensburgei OX=158877 GN=folE PE=3 SV=1

SEQ ID NO: 16708 - protein, 194 aa, Yonghaparkia sp.
  REGION 1..194: note = tr|A0A0Q6RCS6|A0A0Q6RCS6_9MICO GTP cyclohydrolase 1; OS = Yonghaparkia sp. Root332 OX=1736516 GN=folE PE=3 SV=1
MAPIDIPRIEAAVAEILAAIGEDVERSGLATTPQRIAKAYGDFFAGVGVDPVPELQDGAEMATEPGERGELVLLRDIALRSMCEHHLLPFTGVAHVAYVPAERIIGLGRIPRLVEIVSARPQLQERLGEDVADALDRAIAPAGVLVVIEARHGCVAARGVRYAESTTVTVASRGSLADPVQRAEVMALIGRSGA

SEQ ID NO: 16709 - protein, 404 aa, unidentified
  source 1..404: note = Yoonia litorea
  REGION 1..404: note = tr|A0A1I6LMC5|A0A1I6LMC5_9RHOB GTP cyclohydrolase FolE2 OS=Yoonia litorea OX=1123755 GN=folE2 PE=3 SV=1
MTDPRSDLKRIYQEIVGKSDDDPHVMGVPDGKKGGAALNIHSPDMNREPTRAEAEAALALLRRWAHDVTPEEVATLDPLVSRLIPGQEISNYPALARAYPEDFEVDEIYKASMPDLQNGPSSLIRGAQQQIQHVGISNFRLPIRFHTRDNGDLTLETSVTGTVSLEAEKKGINMSRIMRTFYKHAEETFSFDVIERALDAYKSDLESFDARIQMRFSFPMKVESLRSGLSGYQYYDIALELVERDGVRKKIIHLDYVYSSTCPCSLELSEHARQFRGQLATPHSQRSVARISVLLEDGADLLWFEDLIDRARAAVPTETQVMVKREDEQAFAELNAANPIFVEDAARLFTEQLQLDERISDFRVIASHQESLHSHDAVSVLTEGETFASESLDPRLFQSLFHVG

SEQ ID NO: 16710 - protein, 403 aa, unidentified
  source 1..403: note = Yoonia maricola
  REGION 1..403: note = tr|A0A2M8WNA0|A0A2M8WNA0_9RHOB GTP cyclohydrolase FolE2 OS=Yoonia maricola OX=420999 GN=folE2 PE=3 SV=1
MNDPRAELQRIYKEIIGNSDARPHVAVSNALMGGPDMNIHSPDMDREPSREEAEAALALLRRWAGDVTAEEVATLDPLVSRLIPGQEVSNYPALARAYPEEFEVDDAYKASMPDLQNGPASLIRGAKQQIQHVGISNFRLPIRFHTRDNGDLTLETSVTGTVSLEAEKKGINMSRIMRTFYKHAEETFSFEVIEQALDAYKTDLESFDARIQMRFSFPMKVDSLRSGLAGYQYYDIALELVESAGVRKKIVHLDYVYSSTCPCSLELSEHARQFRGQLATPHSQRSVARISVLLEEGAEVLWFEDLIDRARAAVPTETQVMVKREDEQAFAELNAANPIFVEDAARLFTEQLQMDTRISDFRVIASHQESLHSHDAVSVLTEGETFAAESIDPRLFQSLFHIG

SEQ ID NO: 16711 - protein, 429 aa, unidentified
  source 1..429: note = Yoonia maritima
  REGION 1..429: note = tr|A0A2T0W213|A0A2T0W213_9RHOB GTP cyclohydrolase FolE2 OS=Yoonia maritima OX=1435347 GN=folE2 PE=3 SV=1
MIIALLSSYHRVMVIYVLATKVEASKMTDPTQDVLRIYQDMVKNAHANPHVVKGKHDAGGQEMNVHVADLDKAPTREDADAALAVLRRWATDVTAEEVATLDPLVSRLIPGQEVSNYPALARAYPDAFEVDDEYKASMPDLQNGPSSLIKGAKQQIQHVGISNFRLPIRFRTRDGDDIRLETSVTGSVSLDAEKKGINMSRIMRTFYKHAEETFSFDVIERALDAYKNDLESFDARIQMRFSFPMKVESLRSGLSGYQYYDIALELVESAGVRKKIMHLDYVYSSTCPCSLELSEHARQFRGQLATPHSQRSVARISVLLDEAGDCLWFEDLIDRARAAVSTETQVMVKREDEQAFAELNAANPIFVEDAVRLFTEQLQQDDRVSDFRVIASHQESLHSHDAVSVLTEGDTFASESLDPKLFSTLFHVG

SEQ ID NO: 16712 - protein, 403 aa, unidentified
  source 1..403: note = Yoonia rosea
  REGION 1..403: note = tr|A0A1R3WWM7|A0A1R3WWM7_9RHOB GTP cyclohydrolase FolE2 OS=Yoonia rosea OX=287098 GN=folE2 PE=3 SV=1
MTDPRADLQRIYKDIIGKSDAQPHVGVSIAPTGSTDMNIHSRDMDREPTRAEAEAALALLRRWAVDVTAEEVATLDPLVSRLIPGQEVSNYPALARAYPEDFEVDEAYKASMPDLQNGPSSLIRGAQQQIQHVGISNFRLPIRFHTRDNGDLTLETSVTGTVSLEAEKKGINMSRIMRTFYKHAGETFSFEVIEKALDAYKTDLESFDARIQMRFSFPMKVESLRSGLSGYQYYDIALELVESAGVRKKIVHLDYVYSSTCPCSLELSEHARQFRGQLATPHSQRSVARISVLLENGADVLWFEDLIDRARAAVPTETQVMVKREDEQAFAELNAANPIFVEDAARLFTEQLQLDTRISDFRVIASHQESLHSHDAVSVLTEGDTFAAESLDPRLFASLFHVG

SEQ ID NO: 16713 - protein, 367 aa, unidentified
  source 1..367: note = Yoonia sediminilitoris
  REGION 1..367: note = tr|A0A2T6KEL8|A0A2T6KEL8_9RHOB GTP cyclohydrolase FolE2 OS=Yoonia sediminilitoris OX=1286148 GN=folE2 PE=3; SV = 1
MNIHSPDMDREPTREEAEAALALLRRWADDVTAEEVATLDPLVSRLIPGQEVSNYPALARAYPDAFEVDDAYKATMPDLQNGPSSLIRGAQQQIQHVGISNFRLPIRFHTRDNGDLTLETSVTGTVSLEAEKKGINMSRIMRTFYKHAEETFSFDVIERALDAYKSDLESFDARIQMRFSFPMKVQSLRSGLEGYQYYDIALELVESAGVRKKIIHLDYVYSSTCPCSLELSEHARQFRGQLATPHSQRSVARISVLLDNEAGVLWFEDLIDRARAAVPTETQVMVKREDEQAFAELNAANPIFVEDAARLFTEQLQLDPRIADFRVIASHQESLHSHDAVSVLTEGETFATESIDPKLFASLFHVG

SEQ ID NO: 16714 - protein, 394 aa, unidentified
  source 1..394: note = Yoonia tamlensis
  REGION 1..394: note = tr|A0A1I6G1J3|A0A1I6G1J3_9RHOB GTP cyclohydrolase FolE2 OS=Yoonia tamlensis OX=390270 GN=folE2 PE=3 SV=1
MLGQTHMTKARKMTDVTKDVVLRYQAAIDAGQAGDADAPTRAQAEAALAVLRAWAGDVSAEEVATLDPLVARLIPGQEVSNYPALARAYPDAFEVDETYRATMPDLQNGPSSLIKGAMRQIQHVGISNFRLPIRFHTRDGDDLTLETSVTGTVSLDAEKKGINMSRIMRTFYKHAQETFSFEVIERAIDAYKADLDSFDARIQMRFSFPMQVESLRSGLSGYQYYDIALELVETGGVRKKIMHLDYVYSSTCPCSLELSEHARQFRGQLATPHSQRSVARISVLLAPHSNCLWFEDLIEAARAAVPTETQVMVKREDEQAFAELNAANPIFVEDAVRLFTENLQAEARITDFRVIASHQESLHSHDAVSVLTEGETFASESLDPKLFGTLFHVG

SEQ ID NO: 16715 - protein, 366 aa, unidentified
  source 1..366: note = Yoonia vestfoldensis
  REGION 1..366: note = tr|A0A1Y0ECL4|A0A1Y0ECL4_9RHOB GTP cyclohydrolase FolE2 OS=Yoonia vestfoldensis OX=245188 GN=folE2 PE=3 SV=1
MNIHARDMDRQPTRSDAEAALALLRRWAGDVTPEEVATLDPLVSRLIPGQEVSHYPALARAYPEDFAVDEAYKASMPDLQNGPSSLIRGAKQQIQHVGISNFRLPIRFRTRDNGDLTLETSVTGTVSLEAEKKGINMSRIMRTFYQHAEETFSFEVIERALDAYKSDLDSFDARIQMRFSFPMKVQSLRSGLAGYQYYDIALELVESAGVRKKIVHLDYVYSSTCPCSLELSEHARQFRGQLATPHSQRSVARISVLVEDGPILWFEDLIDRARAAVPTETQVMVKREDEQAFAELNAANPIFVEDAARLFTEQLQLEPLVSDFRVIASHQESLHSHDAVSVMTEGPTFAAESLDPRLFASLFHVG

SEQ ID NO: 16716 - protein, 414 aa, unidentified
  source 1..414: note = Yoonia vestfoldensis
  REGION 1..414: note = tr|A3V3U6|A3V3U6_9RHOB GTP cyclohydrolase FolE2; OS = Yoonia vestfoldensis SKA53 OX=314232 GN=folE2 PE=3 SV=1
MGVAFCGKGDVGMSDLRADLLQFCRIMSGHAPQLRHLRKADAPQEGFDMNIHARDMDRQPTRSDAEAALALLRRWAGDVSPEEVATLDPLVSRLIPGQEVSNYPALARAYPEDFAVDEAYKASMPDLQNGPSSLIRGAKQQIQHVGISNFRLPIRFRTRDNGDLTLETSVTGTVSLEAEKKGINMSRIMRTFYKHAEETFSFEVIERALDAYKSDLDSFDARIQMRFSFPMKVQSLRSGLQGYQYYDIALELVESAGVRKKIVHLDYVYSSTCPCSLELSEHARQFRGQLATPHSQRSVARISVLVEDGPILWFEDLIERARAAVPTETQVMVKREDEQAFAELNAANPIFVEDAARLFTEQLQLEPRVSDFRVIASHQESLHSHDAVSVLTEGATFATESLDPRLFASLFHVG

SEQ ID NO: 16717 - protein, 207 aa, unidentified
  source 1..207: note = Youhaiella tibetensis
  REGION 1..207: note = tr|A0A5B9DQ35|A0A5B9DQ35_9RHIZ GTP cyclohydrolase 1; OS = Youhaiella tibetensis OX=1447062 GN=folE PE=3 SV=1
MDATFNASNVSALPGHENRRPTQQEAEDAVRTLIAWAGDDPTREGLLETPGRVARAYGEFFSGYGQNAADVLSKTFKDVGGYDDIVLLKDIPFHSHCEHHMVPFFGKAHIAYLPHDGVVGLSKLARLVDVFAKRLQTQENLTAQIIDAVNENLNPRGAAVMLEAEHMCMTMRGVHSHGVTTVTHRFTGVFAEEREERDRFFAFIGKR

SEQ ID NO: 16718 - protein, 188 aa, unidentified
  source 1..188: note = Youngiibacter fragilis
  REGION 1..188: note = tr|V7I3L4|V7I3L4_9CLOT GTP cyclohydrolase 1; OS = Youngiibacter fragilis 232.1 OX=994573 GN=folE PE=3 SV=1
MDKDRIENAVREILIGVGEDPDREGLQDTPRRIARMYEEIFSGIGENAEDHLQVYFQDEKYEELVLVKDIPFYSMCEHHLVPFFGVAHVAYIPKSGRLTGLSKLARVVETVSKRPQLQERLTAEVADIIMKKLEPYGAIVVIEAEHMCMTMRGVKKPGSKTVTSAIRGIFNKDSKSRAEVLSMINKGN

SEQ ID NO: 16719 - protein, 365 aa, unidentified
  source 1..365: note = Youngimonas vesicularis
  REGION 1..365: note = tr|A0A4S3MAP6|A0A4S3MAP6_9RHOB GTP cyclohydrolase FolE2 OS=Youngimonas vesicularis OX=1294297 GN=folE2 PE=3; SV = 1
MNFHSSDMNRELTREEAAEALARLRAWARGASEAEIADLDPAVARLLPGEASDYPVLSRQYPADFTVDAAYKAGLPDLQNGPTSLIRGAKRQIQHVGISNFRLPIRFHTRDNGDLTLETSVTGTVSLEAEKKGINMSRIMRSFYKHAEKTFSFEVIEAALDDYKSDLESFDARIQMRFSYPVKVESLRSGLMGYQYYDIALELVETDGVRKKLMHLDYVYSSTCPCSLELSEHARMTRGQLATPHSQRSVARISLEVAAGDCLWFEDVIEMARAAVPTETQVMVKREDEQAFAELNAANPIFVEDAARLFCEQLHKDPRVGDFRIVASHQESLHSHDAVSVLVEGETFAGQSIDPRLFSTLFHVG

SEQ ID NO: 16720 - protein, 198 aa, Yuhushiella deserti
  REGION 1..198: note = tr|A0A1I5R6F7|A0A1I5R6F7_9PSEU GTP cyclohydrolase 1; OS = Yuhushiella deserti OX=587909 GN=folE PE=3 SV=1
MISARATGRIFDQARAEKAVRELLLACGEDPDRDGLRDTPGRVARAYREMFAGLYEEPDSVLDRTFDECHEELVLVTDIPMFSVCEHHLLSFHGVAHIGYIPNDEGKVTGLSKLARLVDLYARRPQVQERLTSQVADALMRKLRPRGVIVVVEAEHLCMAMRGIRKPGARTTTSAVRGLLQTSASSRAEALDLIKGRR

SEQ ID NO: 16721 - protein, 212 aa, Yuhushiella deserti
  REGION 1..212: note = tr|A0A1I5SPC9|A0A1I5SPC9_9PSEU GTP cyclohydrolase 1; OS = Yuhushiella deserti OX=587909 GN=folE PE=3 SV=1
MTSLAESGPGSAPGPVEAARLRVVHERDGVDLAAAERAVADLLVALGRDPDSEHLAETPRRVAASYAELLTPPEFDLTTFPNDEGYDELVLAKDIPVRSVCEHHMLPFHGVAHVGYLPGERILGLSKLARVVELFARDLQVQERLTTQVARWLRERLSPKGVGVVVEAEHLCMSLRGVRAGGSRTVTSALHGVLREDGRSRQEFFALAGVGR

SEQ ID NO: 16722 - protein, 227 aa, Zavarzinia compransoris
  REGION 1..227: note = tr|A0A317EA92|A0A317EA92_9PROT GTP cyclohydrolase 1; OS = Zavarzinia compransoris OX=1264899 GN=folE PE=3 SV=1
MTITPTLKLGDDKAGAKARGRESNLVLGKARTDRPSREEAESAIRTLLLWAGDDPDREGLVDTPARVARAYEEFFAGYDADPVEMLNRTFEEVEGYDEMIVLKDIRLESHCEHHMVPIIGKAHVAYLPKNRVVGISKLARVVDAYAKRFQVQEKLTAQIANSIDEVLQPRGVAVVIEAQHQCMTTRGVHKPGVSMVTSRMLGAFRHDPLTRREFLTIIGNPASSVGA

SEQ ID NO: 16723 - protein, 227 aa, Zavarzinia sp.
  REGION 1..227: note = tr|A0A317E719|A0A317E719_9PROT GTP cyclohydrolase 1; OS = Zavarzinia sp. HR-AS OX=2211142 GN=folE PE=3 SV=1
MKLPGAAKDAKPGNTKAGGGRESNLILGKARTDRPTREEAESAIRTLLLWAGDDPDREGLVDTPARVARAYEEFFAGYDADPVEMLNRTFEEVEGYDEMIVLKDIRLESHCEHHMVPIIGKAHIAYLPKNRVVGISKLARVVDAYAKRFQVQEKMTAQIANSIEDVLQPRGVAVVIEAQHQCMTTRGVHKPGVSMVTSRMLGAFRHDPLTRREFLTIIGNPASSVGA

SEQ ID NO: 16724 - protein, 207 aa, Zeaxanthinibacter enoshimensis
  REGION 1..207: note = tr|A0A4R6TPF8|A0A4R6TPF8_9FLAO GTP cyclohydrolase 1; OS = Zeaxanthinibacter enoshimensis OX=392009 GN=folE PE=3; SV = 1
MTETEILTMGPYRSLEEYNIELTNEVRSHFQQIITDLGEDVDREGLIKTPERAAKAMMFLTQGYKQDAEEILRSAMFAEDYDDMVIIKDIELYSLCEHHMLPFFGKAHIAYIPNGHIVGLSKVPRIVDVFARRLQVQERLTHDILECINNTLQPKGVAVVIEASHMCMMMRGVQKQNSVTTTSGFRGQFQKIETRNEFLKLISSDLS

SEQ ID NO: 16725 - protein, 226 aa, Zeaxanthinibacter enoshimensis
  REGION 1..226: note = tr|A0A4R6TFL9|A0A4R6TFL9_9FLAO GTP cyclohydrolase 1; OS = Zeaxanthinibacter enoshimensis OX=392009 GN=folE PE=3; SV = 1
MKIESQLEEQLESMGDDHESSTGETPLRKDAFDLSDEEKISKIQENVRQIMETLGLDLTDDSLRGTPLRVAKMYVQEVFGGLHPKRKPKASTFENKYKYGEMLVEKNITVYSTCEHHLLPIVGKAHIAYISNGTVVGLSKMNRIVDYFAKRPQVQERMNKQVVKALQEVLGTEDVACVIDAKHLCVNSRGIRDVECSTVTAEYGGKFKEDATRREFLDYINLDTNF

SEQ ID NO: 16726 - protein, 198 aa, unidentified
  source 1..198: note = Zetaproteobacteria bacterium
  REGION 1..198: note = tr|A0A2A5EMB9|A0A2A5EMB9_9PROT GTP cyclohydrolase 1; OS = Zetaproteobacteria bacterium OX=2026807 GN=folE PE=3; SV = 1
MLRDIDLTDPKNVEAMKHVRGLLTYMGENPEREGLLETPARVLSAMHEHFKGYQEDPKEHLLKTFEEVEGYDEVVLVSDIDLHSHCEHHLVPFVGKAHVAYIPDGRVVGLSKLARVVDGYSKRLQVQEKLTMQIAQAIEEVLQPSGVAVIIQCQHFCMCHRGVHKPNTWTTTSKLTGAFLNNPSSRSELFQLIDMNKR

SEQ ID NO: 16727 - protein, 204 aa, unidentified
  source 1..204: note = Zetaproteobacteria bacterium
  REGION 1..204: note = tr|A0A2A5GZT2|A0A2A5GZT2_9PROT GTP cyclohydrolase 1; OS = Zetaproteobacteria bacterium OX=2026807 GN=folE PE=3; SV = 1
MVSKMSVQDMVTQDNRPSREEAMKAVETLLRWAGEDPSREGLLETPKRVVKSYEEFFSGYGKDAPAELQKIFEDIEGFDDMVLVKDIDFVSHCEHHLVPILGKAHVAYWPDRKVVGISKLARIVDIYGRRLVSQENMTRNILRCIDDTLKPKGVAVYIDANHQCMSTRGVNKSASSTVTSMFCGIFKEDRDVQRRFLDMIQYSR

SEQ ID NO: 16728 - protein, 213 aa, unidentified
  source 1..213: note = Zhengella mangrovi
  REGION 1..213: note = tr|A0A2G1QR31|A0A2G1QR31_9RHIZ GTP cyclohydrolase 1; OS = Zhengella mangrovi OX=1982044 GN=folE PE=3 SV=1
MDAIVTNISSLTDTIKTDTMEDRPSREEAEAAVRTLLRWVGDNPDREGLLDTPARVVKAYEEMFSGYGANAAEELGRTFEEVAGYDDMVIVRDIQFHSHCEHHMVPIIGRAHVGYLPDGKVLGLSKIARVVHIFARRLQTQEAMTAQIAATIQDVLNPRGVAVLIEAEHMCMAMRGIRQQGSTTTTSTFTGAFRDNPEEQVRFFTLARDMGRR

SEQ ID NO: 16729 - protein, 197 aa, Zhihengliuella halotolerans
  REGION 1..197: note = tr|A0A4Q8AG15|A0A4Q8AG15_9MICC GTP cyclohydrolase 1; OS = Zhihengliuella halotolerans OX=370736 GN=folE PE=3 SV=1
MNQTPPAEGFQVDQSRIRAAVREILEAVGEDPDRDGLQDTPARVAKAYAEFFSGLHGEPGEILGTTFDIDHSELVLVKDIPFYSTCEHHLVPFHGAAHVGYIPGDDGHVTGLSKLARLVDLYARRPQVQERLTTQIAEALCEHLDPRGVIVVVECEHMCMSMRGVQKPGARTVTSAVRGQLRETATRAEAMSLILGK

SEQ ID NO: 16730 - protein, 182 aa, unidentified
  source 1..182: note = Zhongshania aliphaticivorans
  REGION 1..182: note = tr|A0A127M5V1|A0A127M5V1_9GAMM GTP cyclohydrolase 1; OS = Zhongshania aliphaticivorans OX=1470434 GN=folE PE=3; SV = 1
MEKAFADIIKKIGEDPTRDGLLDTPARAAKAFEFLTEGYRRSVKDVVNDALFDSDCNEMVVVSDIELYSLCEHHLLPFIGKCHVAYIPSGKVLGLSKVARIVDLYARRLQIQEGLTTQIAKTIMDVTGSEGVGVIIEARHMCMMMRGVEKQNSIMRTSAMLGVFKDNNATRTEFLSLINRPA

SEQ ID NO: 16731 - protein, 180 aa, Zhongshania sp.
  REGION 1..180: note = tr|A0A3N0CVW4|A0A3N0CVW4_9GAMM GTP cyclohydrolase 1; OS = Zhongshania sp. DSW25-10 OX=2304603 GN=folE PE=3 SV=1
MEKAFADIIKKIGEDPTRDGLLDTPARAAKAFEFLTEGYRRNVKDVVNDALFESDCNEMVVVSDIELYSLCEHHLLPFIGKCHVAYIPQGKVLGLSKVARIVDLYARRLQIQEGLTTQIANTMMEVTGAEGVGVIIEARHMCMMMRGVEKQNSVMRTSAMLGAFKDNQATRTEFLSLINM

SEQ ID NO: 16732 - protein, 180 aa, Zhongshania sp.; identical to SEQ ID NO: 16731
  REGION 1..180: note = tr|A0A2S4HEN7|A0A2S4HEN7_9GAMM GTP cyclohydrolase 1; OS = Zhongshania sp. ZX-21 OX=2067667 GN=folE PE=3 SV=1

SEQ ID NO: 16733 - protein, 226 aa, Zhouia amylolytica
  REGION 1..226: note = tr|A0A1I6RKM2|A0A1I6RKM2_9FLAO GTP cyclohydrolase 1; OS = Zhouia amylolytica OX=376730 GN=folE PE=3 SV=1
MKIDKALEEQYEEFGNEHAMSSAETPLRDDAFDLSDSEKIERIEQDVYSIMETLGLDLTDDSLRGTPRRVAKMFVQEIFGGLHPQKKPNASTFENKYKYGEMLVEKNITVYSTCEHHLLPIVGRAHVGYISNGKVVGLSKMNRIVDYFAKRPQVQERMTMQIVQELQKVLNTKDVACVVDAKHLCVNSRGIRDIESSTVTAEFGGKFKDPAVRREFLDYIKLDTEF

SEQ ID NO: 16734 - protein, 198 aa, Zhouia amylolytica
  REGION 1..198: note = tr|W2UN80|W2UN80_9FLAO GTP cyclohydrolase 1; OS = Zhouia amylolytica AD3 OX=1286632 GN=folE PE=3 SV=1
MPYKNIEEYNIKITDEVRERYKHIIEELGEDTAREGLVKTPERAAKAMMFLTQGYHQDAKAILESAMFSENYNEMIIIKDIEVYSLCEHHMLPFFGKAHIAYIPNGKIVGLSKIPKVVDVFARRLQVQERLTKEILESIDDALRPQGVAVVIEAAHLCMMMRGVQKQNSVTTTSGFKGQFEKNETRNEFLKLISSDLR

SEQ ID NO: 16735 - protein, 218 aa, Zobellella denitrificans
  REGION 1..218: note = tr|A0A231MVE6|A0A231MVE6_9GAMM GTP cyclohydrolase 1; OS = Zobellella denitrificans OX=347534 GN=folE PE=3 SV=1
MTALSDAAIRVRSALEARGLETPMRGNNLTLEEKQSRITGLMTEMMDVLGLDLEDDSLAETPERIAKMYVREIFSGLDYAHFPKITLIDNKMKVDEMVQVRDITLTSTCEHHFVTIDGTATVAYIPRGKVIGLSKINRIVQFFARRPQVQERLNQQILVALQTLLESDDVAVSITATHYCVKARGVMDATSTTTTTSLGGIFKSRPDTRQEFLSGVVR

SEQ ID NO: 16736 - protein, 218 aa, unidentified
  source 1..218: note = Zobellella endophytica
  REGION 1..218: note = tr|A0A2P7RD52|A0A2P7RD52_9GAMM GTP cyclohydrolase 1; OS = Zobellella endophytica OX=2116700 GN=folE PE=3 SV=1
MTTLSDAAIRVRSALEARGLETPMRSNDLTPDEKQTRIAGLMTEMMDVLGLDLEDDSLAETPERIAKMYVREIFSGLDYAHFPKITLIDNKMKVDEMVQVRDITLTSTCEHHFVTIDGTATVAYIPRGKVIGLSKINRIVQFFARRPQVQERLNQQVLVALQTLLESEDVAVSITATHYCVKARGVMDATSSTTTTSLGGIFKSRPATRQEFLSGAVR

SEQ ID NO: 16737 - protein, 218 aa, Zobellella taiwanensis
  REGION 1..218: note = tr|A0A2P7QHT9|A0A2P7QHT9_9GAMM GTP cyclohydrolase 1; OS = Zobellella taiwanensis OX=347535 GN=folE PE=3 SV=1
MTALSDAAIRVRSALEARGLETPMRGNTLTLDQKQARITGLMTEMMDVLGLDLDDDSLAETPQRIAKMYVREIFSGLDYAHFPKITLIDNKMKVDEMVQVRDITLTSTCEHHFVTIDGSATVAYIPRGKVIGLSKINRIVQFFARRPQVQERLTQQVLVALQTLLESDDVAVSITATHYCVKARGVMDATSTTTTTSLGGIFKSRPDTRQEFLGGVVR

SEQ ID NO: 16738 - protein, 221 aa, Zobellia galactanivorans
  REGION 1..221: note = tr|G0L3M0|G0L3M0_ZOBGA GTP cyclohydrolase 1; OS = Zobellia galactanivorans (strain DSM 12802 / CCUG 47099 / CIP 106680 / NCIMB 13871 / Dsij) OX=63186 GN=folE PE=3; SV = 1
MKDKEQIEIVGDNHFSANIETPLRADAFEKSDIEKIKNIQHHFKMIMQEMGLDLTDDSLSGTPFRFAKMYVKELFYGLNPVNKPKLSTFENKYGYKKMLVEHNITIDSTCEHHFLPIVGHAHIGYVPTKKVIGLSKINRLVDYYSHRPQVQERLALQILNDLQNVLETKDVIVVINAKHLCVSSRGIKDKNSFTTTLEYGGCFLSKSTRKEFLNIINQQAL

SEQ ID NO: 16739 - protein, 226 aa, Zobellia galactanivorans
  REGION 1..226: note = tr|G0L6G3|G0L6G3_ZOBGA GTP cyclohydrolase 1; OS = Zobellia galactanivorans (strain DSM 12802 / CCUG 47099 / CIP 106680 / NCIMB 13871 / Dsij) OX=63186 GN=folE PE=3; SV = 1
MKIDSTLEKQFEDMGNDHVSASEDTPLREDAFVLSDDEKIKRIQGSIREVMLTLGLDLDDDSLKGTPNRVAKMFVKEIFGGLHPDRKPKSSTFSNKYKYGEMLVEKNITLYSTCEHHLLPIVGRAHIAYISNGTVVGLSKMNRVVDYFAKRPQVQERLTIQVVRELQNVLGTEDVACVIDAKHLCVNSRGIRDIESSTVTAEYGGKFKNEAVRREFLDYLNLDTTF

SEQ ID NO: 16740 - protein, 199 aa, Zobellia uliginosa
  REGION 1..199: note = tr|A0A1N7LMH7|A0A1N7LMH7_9FLAO GTP cyclohydrolase 1; OS = Zobellia uliginosa OX=143224 GN=folE PE=3 SV=1
MAPYRNLEEYDLEITSEVKDRFSKIIDGIGEDVTREGLVKTPERAAKAMLFLTQGYQQDAVEILEGAMFKEDYDDMVIIKDIELYSLCEHHMLPFFGKAHVAYIPNGHIVGLSKIPRVVDVFARRLQVQERLTHDILECINNTLKPKGVAVVIEASHMCMMMRGVQKQNSVTTTSGFRGQFEKIETRNEFLKLISSDLS

SEQ ID NO: 16741 - protein, 217 aa, Zobellia uliginosa
  REGION 1..217: note = tr|A0A1N7JCB1|A0A1N7JCB1_9FLAO GTP cyclohydrolase 1; OS = Zobellia uliginosa OX=143224 GN=folE PE=3 SV=1
MDKYKIETLGDNHISTSVQTPLRPDAFEKSDKEKIKNIQSYFSKIMEELGLDLTDDSLSGTPYRFAKMYVEELFYGLDPKNKPKISVFDNKYGYDKMLVEQNITINSSCEHHFLPITGKAHIGYIPKNKVVGLSKINRLVDYYAHRPQVQERLSLQILRDLQNTLETDDVIVVISAEHLCVSSRGIKDSNSFTTTIEYGGRFENERIKSDFLKLIGS

SEQ ID NO: 16742 - protein, 269 aa, Zoogloea ramigera
  REGION 1..269: note = tr|A0A4Y4CTB6|A0A4Y4CTB6_ZOORA GTP cyclohydrolase FolE2 OS=Zoogloea ramigera OX=350 GN=folE2 PE=3 SV=1
MTTCAATTVIPDVQNSEDSRQIAINKVGIKSIRHPIKVRDKQAGVQHTIALFNMYVGLPHNFKGTHMSRFVEILNSHDREISVESFEPMLREMVRKLEAETGHIEMSFPYFINKAAPVSGVQSLLDYEVTFIGTISAGGKYEFTMKVVVPVTSLCPCSKKISAYGAHNQRSHVTVTTVTNSYLWIEELVQMIEEQGSCELYGLLKRPDEKYVTERAYDNPKFVEDMVRDVAGVMNREARIDAYVVESENFESIHNHSAYALIEHDKRSA

SEQ ID NO: 16743 - protein, 266 aa, Zoogloea sp.
  REGION 1..266: note = tr|A0A5C7KB97|A0A5C7KB97_9RHOO GTP cyclohydrolase FolE2 OS=Zoogloea sp. OX=49181 GN=folE2 PE=3 SV=1
MNAPEKLHLPDVQASEDLRQLAIQRVGVRGLRYPLRFLDRDGQIQHTVATLEMTVFLPPEVKGTHMSRFVEVLEADRAALDLEGLRGMICETLIHLGATAGRMEMCFPFFMRKRAPVSGVESLLDLDATVTVEKAFGRDAELSIKVVVPVTSLCPCSKKISDYGAHNQRSHLTLSVLLREDMSLEELVRIAEEEASCEIFGLLKRPDEKWVTERAYDNPKFVEDLVRDVALRLRAEPRIAAWTVESENFESIHNHSAYALMEGRNN

SEQ ID NO: 16744 - protein, 269 aa, Zoogloea sp.
  REGION 1..269: note = tr|A0A5C7KC29|A0A5C7KC29_9RHOO GTP cyclohydrolase FolE2 OS=Zoogloea sp. OX=49181 GN=folE2 PE=3 SV=1
MTTCEAPTPIPDVQNSADSRQLAINKVGIKAIRHPIRVQDKNGGVQHTIAVFNMYVGLPHNFKGTHMSRFVEILNSHEREISVESFEPMLREMVRKLEAETGHVEMTFPYFINKAAPVSGVQSLMDYEVTFIGEISEGGAYEFTMRIVVPVTSLCPCSKKISEYGAHNQRSHVTVTTTTNDHLWIEELVQLVEGQASCELYGLLKRPDEKYVTERAYDNPKFVEDMVRDVAGCLNKEVRIDAYTVESENFESIHNHSAYALIEHDKRAS

SEQ ID NO: 16745 - protein, 266 aa, unidentified
  source 1..266: note = Zoogloeaceae bacteirum
  REGION 1..266: note = tr|A0A2S0QY37|A0A2S0QY37_9RHOO GTP cyclohydrolase FolE2 OS=Zoogloeaceae bacteirum Par-f-2 OX=2080469; GN = folE2 PE=3 SV=1
MNAPESIFLPDIQSIRDHRALAIEQVGICGLRYPLTWRGADGTVVATVATLALSVGLPAEQKGTHMSRFVELVEAKRDALDLSGLRTLFADMLARLGATSGRLEAAFPWFIRKRAPVSGVESLLDIDAALRVEQPPGGRPQTTMRVVVPVTSLCPCSKEISAYGAHNQRSQITLEVVLREDMSFEELVRIAEEEASCELFGLLKRPDEKWVTERAYDNPKFVEDLVRDIALRLRAEPRIAAWQVASENFESIHNHSAWATISGANG

SEQ ID NO: 16746 - protein, 269 aa, unidentified
  source 1..269: note = Zoogloeaceae bacteirum
  REGION 1..269: note = tr|A0A2U3TLD2|A0A2U3TLD2_9RHOO GTP cyclohydrolase FolE2 OS=Zoogloeaceae bacteirum Par-f-2 OX=2080469; GN = folE2 PE=3 SV=1
MKPVEAHAIPDVQNSADTRRIAINKVGIKSIRHPVRVSDKNGGVQHTVALFNMYVGLPHNFKGTHMSRFIEILNGNEREISVESFEPMLREMVKRLEAETGHIEMTFPYFINKSAPVSGVQSLMDYEVTFTGEIREGGQYEFTMRVVVPVTSLCPCSKKISDYGAHNQRSHVTVTATTNAHLWIEELVQLVESQASCELYGLLKRPDEKFVTERAYDNPKFVEDMVRDVAGLLNAEPRIDAYIVESENFESIHNHSAYALIERDKRQHC

SEQ ID NO: 16747 - protein, 191 aa, Zooshikella ganghwensis
  REGION 1..191: note = tr|A0A4P9VLL7|A0A4P9VLL7_9GAMM GTP cyclohydrolase 1; OS = Zooshikella ganghwensis OX=202772 GN=folE PE=3 SV=1
MSNENVQTVLAENFRTIISSLGENPDREGLLDTPKRAAKAMQFLTQGYHQDLESIVNGAIFESDNEEMVLVKNIELYSLCEHHLLPFIGKCHVAYLPAGKVIGLSKIARVVDMFARRLQIQENLTSQIAKAVESVTGARGVGVIIEAKHMCMMMRGVEKQNSVMSTSVMLGDMRKSQATRQEFLMLAKQQN

SEQ ID NO: 16748 - protein, 225 aa, unidentified
  source 1..225: note = Zunongwangia atlantica
  REGION 1..225: note = tr|A0A1Y1T5F7|A0A1Y1T5F7_9FLAO GTP cyclohydrolase 1; OS = Zunongwangia atlantica 22II14-10F7 OX=1185767 GN=folE; PE = 3 SV=1
MKIDKVLNEIDEMGDAHAGSSAETPIRKDAFEVSDTDKIALIRENVEHIMQTLGLDLSDDSLKGTPQRVAKMFVNEIFSGLDPKRKPKASVFDNKYKYGEMLVEKNITVYSTCEHHLLPIVGKAHVAYISKGTVVGLSKMNRIVDYYAKRPQVQERMTMQIVQELQKVLGTDDVACVVDAKHLCVNSRGIRDIESSTVTSEFGGAFKQKEVRREFLDYIKLDTTF

SEQ ID NO: 16749 - protein, 198 aa, unidentified
  source 1..198: note = Zunongwangia atlantica
  REGION 1..198: note = tr|A0A1Y1T1V0|A0A1Y1T1V0_9FLAO GTP cyclohydrolase 1; OS = Zunongwangia atlantica 22II14-10F7 OX=1185767 GN=folE; PE = 3 SV=1
MAYQSFEEYSIEVTNSLKDNYKSIITELGEDPDREGVLKTPERAAKAMQFLTQGYELDAEKILKKAMFKEDYDEMVVVKNIELYSLCEHHMLPFFGKAHIAYIPNGQIVGLSKLPRIVDVFARRLQVQERLTHDILECLNNVLKPQGVAVVIEAQHMCMMMRGVQKQNSTTTTSGFRGQFEKIETRNEFLKLISSDLS

SEQ ID NO: 16750 - protein, 225 aa, unidentified
  source 1..225: note = Zunongwangia mangrovi
  REGION 1..225: note = tr|A0A1I1K0U6|A0A1I1K0U6_9FLAO GTP cyclohydrolase 1; OS = Zunongwangia mangrovi OX=1334022 GN=folE PE=3 SV=1
MKIDKVLNEIDEMGDAHAGSSAETPIRKDAFEVSDTDKIALIREDVEHIMQTLGLDLSDDSLKGTPQRVAKMFVNEIFSGLDPKRKPKASVFDNKYKYGEMLVEKNITVYSTCEHHLLPIVGKAHVAYISNGTVVGLSKMNRIVDYYAKRPQVQERMTMQIVQELQKVLGTDDVACVVDAKHLCVNSRGIRDIESSTVTSEFGGAFKKKEVRREFLDYIKLDTTF

SEQ ID NO: 16751 - protein, 198 aa, unidentified
  source 1..198: note = Zunongwangia mangrovi
  REGION 1..198: note = tr|A0A1I1LEI5|A0A1I1LEI5_9FLAO GTP cyclohydrolase 1; OS = Zunongwangia mangrovi OX=1334022 GN=folE PE=3 SV=1
MAYQSFEEYSIEVTSSLKDNYKSIITELGEDPDREGVLKTPERAAKAMQFLTQGYELDAEKILKKAMFKEDYDEMVVVKNIELYSLCEHHMLPFFGKAHIAYIPNGHIVGLSKLPRIVDVFARRLQVQERLTHDILECLNNTLKPQGVAVVIEAQHMCMMMRGVQKQNSTTTTSGFRGQFEKIETRNEFLKLISSDLS

SEQ ID NO: 16752 - protein, 225 aa, Zunongwangia profunda
  REGION 1..225: note = tr|A0A3D5IYF2|A0A3D5IYF2_9FLAO GTP cyclohydrolase 1; OS = Zunongwangia profunda OX=398743 GN=folE PE=3 SV=1
MKIDKVLNEIDEMGDAHAGSSAETPIRKDAFEVSDTDKIALIREDVERIMQTLGLDLTDDSLKGTPQRVAKMFVNEIFSGLDPKRKPKASVFDNKYKYGEMLVEKNITVYSTCEHHLLPIVGKAHVAYISNGTVVGLSKMNRIVDYYAKRPQVQERMTMQIVQELQQVLGTEDVACVVDAKHLCVNSRGIRDIESSTVTSEFGGAFKQKEVRREFLDYIKLDTTF

SEQ ID NO: 16753 - protein, 198 aa, Zunongwangia profunda
  REGION 1..198: note = tr|A0A3D5J2W9|A0A3D5J2W9_9FLAO GTP cyclohydrolase 1; OS = Zunongwangia profunda OX=398743 GN=folE PE=3 SV=1
MAYQSFEEYSIEVTDSLKDNYKKIITELGENPDREGVLKTPERAAKAMQFLTQGYELDAEKILKKAMFKEDYDEMVVVKNIELYSLCEHHMLPFFGKAHIAYIPNGHIVGLSKLPRVVDVFARRLQVQERLTHDILECLNKTLQPQGVAVVIEAQHMCMMMRGVQKQNSTTTTSGFRGQFEKIETRNEFLKLISSDLS

SEQ ID NO: 16754 - protein, 225 aa, Zunongwangia sp.; identical to SEQ ID NO: 16752
  REGION 1..225: note = tr|A0A2E0P304|A0A2E0P304_9FLAO GTP cyclohydrolase 1; OS = Zunongwangia sp. OX=1965325 GN=folE PE=3 SV=1

SEQ ID NO: 16755 - protein, 198 aa, Zunongwangia sp.; identical to SEQ ID NO: 16753
  REGION 1..198: note = tr|A0A2E0P431|A0A2E0P431_9FLAO GTP cyclohydrolase 1; OS = Zunongwangia sp. OX=1965325 GN=folE PE=3 SV=1

SEQ ID NO: 16756 - protein, 191 aa, Zymobacter palmae
  REGION 1..191: note = tr|A0A348HES9|A0A348HES9_9GAMM GTP cyclohydrolase 1; OS = Zymobacter palmae OX=33074 GN=folE PE=3 SV=1
MSDTDNKTTTDALTDYYRDVITLLGEDVEREGLVDTPSRAAKAMQFLTHGYGLSLEEVVNGAVFTSESDEMVLVKDIELYSLCEHHILPFIGRCHIAYLPNGKVLGLSKFARIVDMYARRLQIQEQLTLQIAQAVEEVTGAKGVAVVIEARHMCMMMRGVQKQNSSMTTSVMRGGFRENHRTRQEFLSLIK

SEQ ID NO: 16757 - protein, 201 aa, Zymomonas mobilis
  REGION 1..201: note = tr|A0A2R9NT41|A0A2R9NT41_ZYMMB GTP cyclohydrolase 1; OS = Zymomonas mobilis subsp. mobilis NRRL B-12526; OX = 1194424 GN=folE PE=3 SV=1
MEEIQDLAVMRPDQVNVPEEIQEAIRSLIRWAGDDPDREGLIDTPKRVAKAWKYYCRGYREDPENHLKTVFEEVGGYDDIVLLKDIPFYSHCEHHMAPIMGHAHIAYLPDKKVVGLSKLARVLKGYAHRLQIQERLTAQVADCIWNNLRPRGVAVVISAVHSCMAARGVETPNVQTVTKTLRGIYSEDPEQAKMILNLMGV

SEQ ID NO: 16758 - protein, 201 aa, Zymomonas mobilis
  REGION 1..201: note = tr|F8ET93|F8ET93_ZYMMT GTP cyclohydrolase 1; OS = Zymomonas mobilis subsp. pomaceae (strain ATCC 29192 / JCM 10191 / NBRC 13757 / NCIMB 11200 / NRRL B-4491); OX = 579138 G N=folE PE=3 SV=1
MKDKQDLATLHPDQNVPEEIQEAIRSLIRWVGDDPEREGLLDTPKRVAKAWKAYCRGYQENPVDHLGTVFEEVGGYDDLVLLKDIPFYSHCEHHMAPIIGHAHIAYLPDKRVVGISKLARVLKGYAQRLQIQERLTTEVADCIWNGLHPHGVAVVIAATHSCMSARGVETPGVLTVTKTMRGVFKTDIERQKIVLGLMGVS

SEQ ID NO: 16759 - protein, 368 aa, unidentified; identical to SEQ ID NO: 6476
  source 1..368: note = Celeribacter marinus
  REGION 1..368: note = tr|A0A0P0A6T5|A0A0P0A6T5_9RHOB GTP cyclohydrolase FolE2 OS=Celeribacter marinus OX=1397108 GN=folE2 PE=3 SV=1

SEQ ID NO: 16760 - protein, 222 aa, Escherichia coli; identical to SEQ ID NO: 7955
  REGION 1..222: note = sp|P0A6T7|GCH1_ECO57 GTP cyclohydrolase 1; OS = Escherichia coli O157:H7 OX=83334 GN=folE PE=3 SV=2

SEQ ID NO: 16761 - protein, 311 aa, Escherichia coli; identical to SEQ ID NO: 9382
  REGION 1..311: note = tr|C0J1H8|C0J1H8_ECOLX GTP cyclohydrolase FolE2; OS = Escherichia coli OX=562 GN=folE2 PE=3 SV=1

SEQ ID NO: 16762 - protein, 179 aa, Escherichia coli
  REGION 1..179: note = tr|A0A376SHM3|A0A376SHM3_ECOLX GTP cyclohydrolase 1; OS = Escherichia coli OX=562 GN=folE_2 PE=3 SV=1
MTEIMQLLNLDLADDSLMETPHRIAKMYVDEIFSGLDYANFPKITLIENKMKVDEMVTVRDITLTSTCEHHFVTIDGKATVAYIPKDSVIGLSKINRIVQFFAQRPQVQERLTQQILIALQTLLGTNNVAVSIDAVHYCVKARGIRDATSATTTTSLGGLFKSSQNTRHEFLRAVRHHN

SEQ ID NO: 16763 - protein, 290 aa, unidentified
  source 1..290: note = Abditibacterium utsteinense
  REGION 1..290: note = tr|A0A2S8SXA5|A0A2S8SXA5_9BACT 6-pyruvoyltetrahydropterin/6-carboxytetrahydropterin synthase OS=Abditibacterium utsteinense OX=1960156; GN = B1R32_101138 PE=4 SV=1
MSSAKNQELERAPRVLLSRRSFFSCGRRLRHPDWNPARNREIFGRDVGPHGHEYTLDCAFSGPISTSDGMIVNITDLKPILESAIAPLNGAFLPENSVSELQFFAHNRPTAENIALWLWQTLPHNVAQGTLFRLQLRESRRTLVEITAAFPSQKMKISRSYEFAAAHRLAAPQLSDDENFARFDKCSNLAGHGHNFGLDVFVEGNPDAETGFIINPILLDKIVDEEIFERFDHKHLNVDCPEFRDLIPTTENLSQTIFEILRVRLESEGFKLAKIGLHETQKNYFEVEAQ

SEQ ID NO: 16764 - protein, 278 aa, unidentified
  source 1..278: note = Abyssibacter profundi
  REGION 1..278: note = tr|A0A363UM05|A0A363UM05_9GAMM 6-pyruvoyl tetrahydropterin reductase OS=Abyssibacter profundi; OX = 2182787 GN=DEH80_06340 PE=4 SV=1
MATLFVEQLANLDFALLDPERGLVGETYLMDLELSGELDAQGMVLDFGRVKREVRAAAEALVDHKLLIPAAHPALDIQPGQVVLGLVGGGEIEVCSPDIAFCRLPAMAVTVETVADAVSAAVRAVVPDNVDAVRVRLQPEAIDGAYYHYCHGLRKHDGDCQRIAHGHRSRLAITRAGERDAALEAQWAERWNNRFLATVDDELPAQRPGHRRFGYDAPQGRFEIELPEARIDVIPGDTTVECLAAYMARTLAAQQGQTMTVRAYEGLRKGALASAEPA

SEQ ID NO: 16765 - protein, 137 aa, unidentified
  source 1..137: note = Abyssicoccus albus
  REGION 1..137: note = tr|A0A3N5BLG0|A0A3N5BLG0_9STAP 6-carboxy-5,6,7,8-tetrahydropterin synthase; OS = Abyssicoccus albus OX=1817405 GN=EDD62_0067 PE=3 SV=1
MMYIPIDHNYSFELNKQFTVSSAHYIDHKEAGKCARIHGHNYNIQLTIGGDSLDELGFLVNFSLLKKEIHDWLDHQLINELPEFNTVEPSTEQVAYQIYLKGQHYLTRQQNNPKLLQVFVQETDSSYAIYRPKEHQS

SEQ ID NO: 16766 - protein, 291 aa, unidentified
  source 1..291: note = Acaryochloris marina
  REGION 1..291: note = tr|B0C2K5|B0C2K5_ACAM1 6-pyruvoyl-tetrahydropterin synthase OS=Acaryochloris marina (strain MBIC 11017); OX = 329726 GN=AM1_4824 PE=4 SV=1
MKCLIHRRAEFSASHRYWLPELSKSENQEKFGQCTRSPGHGHNYELFVSMWGELDQYGMVLNLSNVKQVIKREVTAPLNFSYLNEVWPEFKETLPTTEHLARVIWQRLEPHLPIVNIQLFEHPKLWADYKGAGMEAYLTVGSHFSAAHRLALPELSFEENCEIYGKCARPHGHGHNYHLEVTVKGEVDARTGMIVDLVALQSLVDDVVLDPLDHTFLNKDIPYFEKVVPTAENIAFYIAKLLREPILKIGAELHRIKLIESPNNSCEVLCSDLFDTAPMLSGRMGEPALVG

SEQ ID NO: 16767 - protein, 288 aa, unidentified
  source 1..288: note = Acaryochloris sp.
  REGION 1..288: note = tr|A0A2W1JWZ1|A0A2W1JWZ1_9CYAN 6-carboxy-5,6,7,8-tetrahydropterin synthase; OS = Acaryochloris sp. RCC1774 OX=1764569 GN=queD_1 PE=4 SV=1
MQCIINRRAEFSASHRYWLPELSELGNVQQFGKGSQFPGHGHNYVLYVSMLGDLDQYGMVLNLSDVKKVIAQEVTDHLNYAFLNEVWPEFKQTLPATEHIAKVIWQRLAPHLPLLKIQLFEHPKLWATYEGSGMEATLTVGTHFSAAHRLALPDLSYEENCEIYGKCARPNGHGHNYHLEVTVTGDIDPKTGMIVDLVALEKAVDEAVIEPFDHTFLNKDIPFFATVVPTAENIAVHISHLLQEPIRQLGAQLHRIKLIESPNNSCEILCSSVAEPVVTAANEAVLAS

SEQ ID NO: 16768 - protein, 147 aa, unidentified
  source 1..147: note = Accumulibacter phosphatis
  REGION 1..147: note = tr|C7RQK6|C7RQK6_ACCPU 6-carboxy-5,6,7,8-tetrahydropterin synthase; OS = Accumulibacter phosphatis (strain UW-1) OX=522306; GN = CAP2UW1_1018 PE=3 SV=1
MLITRRLEFDAGHRIPDHQSQCRHLHGHRYAIEITLAGDIIRRTGDPANGMVMDFSEVKALAMQHLVEAWDHAFLVWAGDRPIVDFLQSLPDHKTVLLDCVPTAENLAQQAFAILDAVYRDTYGNQLRLERLRLYETPNCWAEALRG

SEQ ID NO: 16769 - protein, 193 aa, unidentified
  source 1..193: note = Accumulibacter phosphatis
  REGION 1..193: note = tr|C7RQ95|C7RQ95_ACCPU 6-pyruvoyl-tetrahydropterin synthase-like protein OS=Accumulibacter phosphatis (strain UW-1) OX=522306 GN=CAP2UW1_4261 PE=4 SV=1
MLIRKLFKFENAHIVRGCSTRRCSHSMHGHSYKVELLLEALALDHGQMVYDFGLLKDGPRALIDAFDHAVALWSGDDPDYIAACQRFSERWILIPVSPSAEQLSRLFFVMIDRLLDLTEMRNGEADVRLHSVIVHETETGYAQCFREDACSPRLGLIDLEDVEFSEAIRNDWPNHDLFDKLKRGERTFHPNGV

SEQ ID NO: 16770 - protein, 139 aa, Acetitomaculum ruminis
  REGION 1..139: note = tr|A0A1I0YW75|A0A1I0YW75_9FIRM 6-carboxy-5,6,7,8-tetrahydropterin synthase; OS = Acetitomaculum ruminis DSM 5522 OX=1120918; GN = SAMN05216249_11157 PE=3 SV=1
MYYLKTEVGFDAAHFLKNYNGKCHNLHGHRWRVIATAKSKELLCDKQKEGMVMDFSDLKKALKEVTDRFDHSLIYEKDSLKNETVKALLSEDFKLVEVDFRTTAENFSKYFFDELKKYGFDMHQIEVYETPNNCAMYSE

SEQ ID NO: 16771 - protein, 177 aa, Acetobacter aceti
  REGION 1..177: note = tr|A0A0D6MZK8|A0A0D6MZK8_ACEAC Uncharacterized protein OS=Acetobacter aceti NBRC 14818 OX=887700; GN = Abac_107_009 PE=4 SV=1
MTVMVDLIFTRRFSMGHRLIHGASESCALPHGHNEFVTVRLEPTSLRPLDGVANMPVSFQRAKSGWHRFVDEKLDHALQLAEDDPLLGWFRANEPARAERIIVTPGDPTTEMMACLLKAKLDAMLVADGAVLRCTTITLQETPTNTVEFSGDPLPMLPEPRPAEQCWWRRADMSIAD

SEQ ID NO: 16772 - protein, 174 aa, Acetobacter aceti
  REGION 1..174: note = tr|A0A1U9KJR7|A0A1U9KJR7_ACEAC 6-pyruvoyl tetrahydropterin synthase OS=Acetobacter aceti OX=435; GN = A0U92_15930 PE=4 SV=1
MVDLIFTRRFSMGHRLIHGASESCALPHGHNEFVTVRLEPISLKPLDGVANMPVSFQHAKSGWHRFVDEKLDHALQLAEDDPLLTWFRTHEPARAERIIVTPGDPTTEMMACLLKAKLDAMLIADGAVLRCTTITLQETPTNTVEFSGDPLPMLPTPRPAEQCWWRRADMSVAD

SEQ ID NO: 16773 - protein, 182 aa, unidentified
  source 1..182: note = Acetobacter ascendens
  REGION 1..182: note = tr|A0A1Y0UYP2|A0A1Y0UYP2_9PROT 6-pyruvoyltetrahydropterin synthase OS=Acetobacter ascendens OX=481146 GN=queD PE=4 SV=1
MPDLVFTRRFSMGHRLIHGASESCALPHGHNEFVTVRLKPTAFAPLDGKGNMPVSFQKAKSTWHRFVDEKLDHALQLAEDDPLLAWFQTNEPARAARIVITPGDPTTELMVCLLMAKINAFLAAEGGVLWCSELSIQETPTNTVSFSGNPAEFIPAPRPPENCWWNRADMSISDTNTPVTFI

SEQ ID NO: 16774 - protein, 182 aa, unidentified
  source 1..182: note = Acetobacter ascendens
  REGION 1..182: note = tr|A0A1D8QUM6|A0A1D8QUM6_9PROT 6-pyruvoyl tetrahydropterin synthase OS=Acetobacter ascendens; OX = 481146 GN=A4S02_03735 PE=4 SV=1
MPDLVFTRRFSMGHRLIHGASESCALPHGHNEFVTVRLKPTAFAPLDGKGNMPVSFQKAKSTWHRFVDEKLDHALQLAEDDPLLAWFQTNEPARAARIVITPGDPTTELMVCLLMAKINAFLAAEGGVLWCSELSIQETPTNTVSFSGNPAEFIPAPRPPENCWWNRADMSISDTNSPVTFI

SEQ ID NO: 16775 - protein, 174 aa, Acetobacter cerevisiae
  REGION 1..174: note = tr|A0A149VBM8|A0A149VBM8_9PROT 6-pyruvoyl tetrahydropterin synthase OS=Acetobacter cerevisiae; OX = 178900 GN=AD954_07800 PE=4 SV=1
MPDLVFTRRFSMGHRLIHGASESCALPHGHNEFVTVRLSPTIRARLDGKGNMPVSFQRAKSTWHRFVDEKLDHALQLAEDDPLLAWFQTNEPARAQRIVITPGDPTTELMVCLMMAKLSAFLRADGDVLRCTEVSLQETPTNTVTFSGNPDDMIPAVRPREACWWHRADMSISD

SEQ ID NO: 16776 - protein, 174 aa, Acetobacter cerevisiae
  REGION 1..174: note = tr|A0A149UZM2|A0A149UZM2_9PROT 6-pyruvoyl tetrahydropterin synthase OS=Acetobacter cerevisiae; OX = 178900 GN=AD952_00640 PE=4 SV=1
MPDLVFTRRFSMGHRLIHGASESCALPHGHNEFVTVRLSPTTRTRLDGKGNMPVSFQRAKSTWHRFVDEKLDHALQLAEDDPLLAWFQSNEPARAQRIVITPGDPTTELMVCLMMAKLSAFLRADGDVLRCTEVSLQETPTNTVTFSGNPDDMIPAVRPPEACWWHRADMSISD

SEQ ID NO: 16777 - protein, 177 aa, Acetobacter cibinongensis
  REGION 1..177: note = tr|A0A0D6N6E0|A0A0D6N6E0_9PROT Uncharacterized protein OS=Acetobacter cibinongensis 4H-1 OX=1231339; GN = Abci_018_110 PE=4 SV=1
MPDLVFTRRFSMGHRLIHGASETCALPHGHNEFVTVKLSATNPVRLDGHGNMPVSFQRAKSTWHRFVDEKLDHALQLAEDDPLLEWFRQHEPERARRIVVTPGDPTTELMVCLLMAKINAFLLADENLLKCVEVSLQETPTNTVTFSGNPQDFLPSPRPSALCWWYRPDMSISDFTQ

SEQ ID NO: 16778 - protein, 177 aa, Acetobacter cibinongensis
  REGION 1..177: note = tr|A0A1Z5YS52|A0A1Z5YS52_9PROT 6-pyruvoyl tetrahydropterin synthase OS=Acetobacter cibinongensis; OX = 146475 GN=HK14_11200 PE=4 SV=1
MPDLVFTRRFSMGHRLIHGASETCALPHGHNEFVTVKLSATNPVRLDGHGNMPVSFQRAKSTWHRFVDEKLDHALQLAEDDSLLEWFRQHEPERARRIVVTPGDPTTELMVCLLMAKINAFLLADENLLKCVEISLQETPTNTVTFSGNPQDFLPSPRPPELCWWYRPDMSISDFTQ

SEQ ID NO: 16779 - protein, 173 aa, Acetobacter fabarum
  REGION 1..173: note = tr|A0A269Y146|A0A269Y146_9PROT 6-pyruvoyl tetrahydropterin synthase OS=Acetobacter fabarum OX=483199; GN = B8X00_00520 PE=4 SV=1
MPDLVFTRRFSMGHRLIHGASESCALPHGHNEFVTVRLEPTSPARLDGRGNMPVSFQKAKQTWHRFVDERLDHALQLAGDDPLLAWFKAHEPARAARIVVTPGDPTTELMVCLLMAKISAFLLAEGGVLRCSELSIEETPTNTVSFAGNPADFIPHTSLQQNWWNRADMSIAD

SEQ ID NO: 16780 - protein, 196 aa, Acetobacter ghanensis
  REGION 1..196: note = tr|A0A0U5F4H0|A0A0U5F4H0_9PROT 6-pyruvoyl tetrahydrobiopterin synthase OS=Acetobacter ghanensis; OX = 431306 GN=AGA_1629 PE=4 SV=1
MVPAQPANSAVPDGKPTKQKTKMPDLVFTRRFSMGHRLIHGASESCALPHGHNEFVTVRLTPTKATRLDGRGNMPVSFQNAKQTWHRFVDERLDHALQLAEDDPLLAWFQTHEPARAARIVVTPGDPTTELMTCLLMAKVNAFLLAEGGVLRCSELSIEETPTNTVSFDGDPADFIPQRSTEQTCWWNRADMSIAD

SEQ ID NO: 16781 - protein, 176 aa, Acetobacter indonesiensis
  REGION 1..176: note = tr|A0A252AVB8|A0A252AVB8_9PROT 6-pyruvoyl tetrahydropterin synthase OS=Acetobacter indonesiensis; OX = 104101 GN=HK17_04520 PE=4 SV=1
MPDLVFTRRFSMGHRLIHGASESCALPHGHNEFVTVKLSPTQPARLDGHGNMPVSFQKAKSTWHRFVDEKLDHALQLAEDDPLLDWFKTHEPARARRIVVTPGDPTTELMVCLMMAKIGAFLQAEGNLLRCTELSLQETPTNTVTFSGDPNDFIPKRDTISECWWHRSDMSVSNIP

SEQ ID NO: 16782 - protein, 176 aa, Acetobacter indonesiensis; identical to SEQ ID NO: 16781
  REGION 1..176: note = tr|A0A0D6NCR7|A0A0D6NCR7_9PROT Uncharacterized protein OS=Acetobacter indonesiensis 5H-1 OX=1231340; GN = Abin_047_101 PE=4 SV=1

SEQ ID NO: 16783 - protein, 174 aa, Acetobacter malorum
  REGION 1..174: note = tr|A0A149UHI0|A0A149UHI0_9PROT 6-pyruvoyl tetrahydropterin synthase OS=Acetobacter malorum OX=178901; GN = AD951_16480 PE=4 SV=1
MPDLVFTRRFSMGHRLIHGASESCALPHGHNEFITVRLSPTTHTRLDGKGNMPVSFQRAKSTWHRFVDEKLDHALQLAEDDPLLGWFQANEPARAQRIVITPGDPTTELMVCLMMAKLSAFLRADGDVLRCTEVSLQETPTNTVTFSGNPDDMIPAVRPPEACWWHRADMSISD

SEQ ID NO: 16784 - protein, 174 aa, Acetobacter malorum
  REGION 1..174: note = tr|A0A177G953|A0A177G953_9PROT Queuosine biosynthesis QueD, PTPS-I OS=Acetobacter malorum OX=178901; GN = Amal_02579 PE=4 SV=1
MPDLVFTRRFSMGHRLIHGASESCALPHGHNEFVTVRLSPNARTRLDGKGNMPVSFQRAKSTWHRFVDEKLDHALQLAEDDPLLAWFQANEPARAQRIVITPGDPTTELMVCLMMAKLSAFLRADGDVLRCTEVSLQETPTNTVTFSGNPEDMIPAVRPPETCWWHRADMSISD

SEQ ID NO: 16785 - protein, 179 aa, Acetobacter nitrogenifigens
  REGION 1..179: note = tr|A0A511X7M6|A0A511X7M6_9PROT 6-carboxy-5,6,7,8-tetrahydropterin synthase OS=Acetobacter nitrogenifigens DSM 23921 = LMG 23498 OX=1120919; GN = ANI02nite_08340 PE=4 SV =1
MFDMLFTRRFSMGHRLIHGASESCALPHGHNEFVTVRLQPTNDGPLDGKGNMPVSFQRAKGAWHKFIDERLDHALQLAEDDPLLEWFRAHEPARAARIVVTPGDPTTELMACLMMAKLNAMLVADGGVLRCTAITLQETPTNTVEFSGDPLAMLPASRPAGQCWWRRADMSISDIATAV

SEQ ID NO: 16786 - protein, 177 aa, Acetobacter oeni
  REGION 1..177: note = tr|A0A511XLT1|A0A511XLT1_9PROT Uncharacterized protein OS=Acetobacter oeni OX=304077 GN=AOE01nite_21230; PE = 4 SV=1
MADLIFTRRFSMGHRLIHGASESCALPHGHNEFVTIRLEPASASRLDGHGNMPVSFQRAKSGWHRFVDERLDHALQLAEDDPLLAWFRTQEPARAARIIVTPGDPTTELMAGLMKAKLDAMLLADGDVLRCKTITLQETPTNTVEFTGNPLDFLPAPRPPEQCWWRRADMTIADQTL

SEQ ID NO: 16787 - protein, 174 aa, unidentified
  source 1..174: note = Acetobacter okinawensis
  REGION 1..174: note = tr|A0A252BWU7|A0A252BWU7_9PROT 6-pyruvoyl tetrahydropterin synthase OS=Acetobacter okinawensis; OX = 1076594 GN=HK26_11030 PE=4 SV=1
MPDLVFTRRFSMGHRLIHGASESCALPHGHNEFITVRLKPTRPSRLDGSANMPVSFQKAKQTWHRFVDERLDHALQLAGDDPLLAWFKAHEPTRAARIVVTPGDPTTELMTCLLMAKINAFLLAEGGVLYCSELSIEETPTNTVSFAGDPADFIPNTDIGQACWWNRADMSIAD

SEQ ID NO: 16788 - protein, 174 aa, Acetobacter orientalis
  REGION 1..174: note = tr|A0A2Z5ZE70|A0A2Z5ZE70_9PROT 6-pyruvoyltetrahydropterin synthase OS=Acetobacter orientalis OX=146474 GN=AcetOrient_orf00348 PE=4 SV=1
MPELIFTRRFSMGHRLIHGASETCALPHGHNEFVSVKLTPTRPAPLDGMGNMPVSFQKAKSTWHKFVDEKLDHALQLAQDDPLLIWFQHNEPERAKRIVVTPGDPTTELMVCLMMAKLSAFLRAEGDALRCIEVSLQETPTNTVSFTGNPKDFLPSPRAPEQCWWHRADMSIAD

SEQ ID NO: 16789 - protein, 174 aa, Acetobacter orientalis; identical to SEQ ID NO: 16788
  REGION 1..174: note = tr|A0A0D6NKV9|A0A0D6NKV9_9PROT Uncharacterized protein OS=Acetobacter orientalis 21F-2 OX=1231341; GN = Abor_024_148 PE=4 SV=1

SEQ ID NO: 16790 - protein, 174 aa, Acetobacter orleanensis
  REGION 1..174: note = tr|A0A4Y3TL32|A0A4Y3TL32_9PROT Uncharacterized protein OS=Acetobacter orleanensis OX=104099; GN = AOR01nite_01370 PE=4 SV=1
MPDLVFTRRFSMGHRLIHGASEACALPHGHNEFVTVRLSPTHAARLDGKGNMPVSFQRAKSTWHRFVDEKLDHALQLAEDDPLLAWFQANEPARAQRIVITPGDPTTELMVCLMMAKLSAFLKADGDMLRCTEVSLQETPTNTVTFSGDPADMIPSGRAPESCWWHRADMSISD

SEQ ID NO: 16791 - protein, 182 aa, Acetobacter pasteurianus
  REGION 1..182: note = tr|A0A1Y0XU69|A0A1Y0XU69_ACEPA 6-pyruvoyltetrahydropterin synthase OS=Acetobacter pasteurianus subsp. pasteurianus OX=481145 GN=queD PE=4; SV = 1
MPDLVFTRRFSMGHRLIHGASESCALPHGHNEFVTVRLKPTSFAPLDGKGNMPVSFQKAKSTWHRFVDEKLDHALQLAEDDPLLAWFQTNEPARAARIVITPGDPTTELMVCLLMAKINAFLAAEGGLLWCSELSIQETPTNTVSFSGNPAEFIPTPRPPENCWWNRADMSISDTNSPVTFI

SEQ ID NO: 16792 - protein, 182 aa, Acetobacter pasteurianus
  REGION 1..182: note = tr|A0A1A0DD45|A0A1A0DD45_ACEPA 6-pyruvoyl tetrahydropterin synthase OS=Acetobacter pasteurianus; OX = 438 GN=queD PE=4 SV=1
MPDLVFTRRFSMGHRLIHGASESCALPHGHNEFVTVRLKPTSFAPLDGKGNMPVSFQKAKSTWHRFVDEKLDHALQLAEDDPLLAWFQTNEPARAARIVITPGDPTTELMVCLLMAKINAFLAAEGGVLQCSELSIQETPTNTVSFSGNPAEFIPTPRPPENCWWNRADMSISDTEIPVTFI

SEQ ID NO: 16793 - protein, 176 aa, unidentified
  source 1..176: note = Acetobacter peroxydans
  REGION 1..176: note = tr|A0A4Y3TUA0|A0A4Y3TUA0_9PROT Uncharacterized protein OS=Acetobacter peroxydans OX=104098; GN = APE01nite_03470 PE=4 SV=1
MPELVFTRRFSMGHRLIHGASESCAVPHGHNELVTVRLTATTPARLDGQGNMAISFQQAKGTWHRFVDEKLDHALQLADDDPLLDWFLTHEPARARRIVVTPGDPTTELMACLLMAKINAFLKNEGGILHCTELSLQETPTNTVCFSGDPEDFIPRTASTHTPWWKRADMSISDLP

SEQ ID NO: 16794 - protein, 174 aa, unidentified
  source 1..174: note = Acetobacter persici
  REGION 1..174: note = tr|A0A1U9LC66|A0A1U9LC66_9PROT 6-pyruvoyl tetrahydropterin synthase OS=Acetobacter persici; OX = 1076596 GN=A0U91_02370 PE=4 SV=1
MPDLVFTRRFSMGHRLIHGASESCALPHGHNEFVTVRLTPTHAARLDGRGNMPVSFQRAKSTWHRFVDEKLDHALQLAEDDPLLAWFQAHEPARAQRIVITPGDPTTELMVCLMMAKLNAFLKADGDVLRCTEVSLQETPTNTVSFSGNPEEMIPASRAPEACWWNRADMSISD

SEQ ID NO: 16795 - protein, 174 aa, unidentified
  source 1..174: note = Acetobacter persici
  REGION 1..174: note = tr|A0A252APN9|A0A252APN9_9PROT 6-pyruvoyl tetrahydropterin synthase OS=Acetobacter persici; OX = 1076596 GN=HK19_03685 PE=4 SV=1
MPDLVFTRRFSMGHRLIHGASESCALPHGHNEFVTIRLTPTHPARLDGRGNMPVSFQRAKSTWHRFVDEKLDHALQLAEDDPLLAWFQANEPARAQRIVITPGDPTTELMVCLMMAKLNAFLKADGDVLRCTEVSLQETPTNTVSFSGNPEEMIPAGRSPESCWWNRADMSISD

SEQ ID NO: 16796 - protein, 182 aa, Acetobacter pomorum
  REGION 1..182: note = tr|A0A346DUT4|A0A346DUT4_9PROT 6-pyruvoyl tetrahydropterin synthase OS=Acetobacter pomorum OX=65959; GN = CJF59_08045 PE=4 SV=1
MPDLVFTRRFSMGHRLIHGASESCALPHGHNEFVTVRLKPTSFAPLDGKSNMPVSFQKAKSTWHRFVDEKLDHALQLAEDDPLLAWFQTNEPARAARIVTTPGDPTTELMVCLLMAKINAFLAAEGGVLWCSELSIQETPTNTVSFSGNPAEFIPTPRPPENCWWNRADMSISDTDSPVTFI

SEQ ID NO: 16797 - protein, 182 aa, Acetobacter pomorum
  REGION 1..182: note = tr|A0A2G4RAM8|A0A2G4RAM8_9PROT 6-pyruvoyl tetrahydropterin synthase OS=Acetobacter pomorum OX=65959; GN = CSR02_11650 PE=4 SV=1
MPDLVFTRRFSMGHRLIHGASESCALPHGHNEFVTVRLKPTAFAPLDGKGNMPVSFQKAKSTWHRFVDEKLDHALQLAEDDPLLAWFQTNEPARAARIVITPGDPTTELMTCLLMAKINAFLAAEGGALWCSELSIQETPTNTVSFSGNPAEFIPTPRAPENCWWNRADMSISDLNSPVTFI

SEQ ID NO: 16798 - protein, 182 aa, Acetobacter senegalensis
  REGION 1..182: note = tr|A0A0U5EYU3|A0A0U5EYU3_9PROT 6-pyruvoyl tetrahydrobiopterin synthase OS=Acetobacter senegalensis; OX = 446692 GN=ASN_3702 PE=4 SV=1
MKRRRLMPNLVFTRRFSMGHRLIHGASESCALPHGHNEFVTVKLSPTHQTRLDGKGNMPVSFQKAKSTWHRFVDEKLDHALQLAEDDPLLGWFQAHEPERARRIVVTPGDPTTELMVCLMMAKINAFLRAEGDMLRCTELSLQETPTNTVTFSGNPDEIIPMIRPPAECWWQRADMSISDAT

SEQ ID NO: 16799 - protein, 176 aa, Acetobacter senegalensis
  REGION 1..176: note = tr|A0A149U142|A0A149U142_9PROT 6-pyruvoyl tetrahydropterin synthase OS=Acetobacter senegalensis; OX = 446692 GN=AD948_09850 PE=4 SV=1
MPDLVFTRRFSMGHRLIHGASESCALPHGHNEFVTVKLSPTHQTRLDGKGNMPVSFQKAKSTWHRFVDEKLDHALQLAEDDPLLGWFQAHEPERARRIVVTPGDPTTELMVCLMMAKINAFLRAEGDMLRCTELSLQETPTNTVTFSGNPDEIIPMIRPPAECWWQRADMSISDAT

SEQ ID NO: 16800 - protein, 182 aa, Acetobacter sp.
  REGION 1..182: note = tr|A0A368AGP7|A0A368AGP7_9PROT 6-pyruvoyl tetrahydropterin synthase OS=Acetobacter sp. BCRC 14118; OX = 1868878 GN=BBA71_02920 PE=4 SV=1
MPDLVFTRRFSMGHRLIHGASESCALPHGHNEFVTVRLKPTAFAPLDGKGNMPVSFQKAKSTWHRFVDEKLDHALQLAEDDPLLAWFQTNEPARAARIVITPGDPTTELMVCLLMAKINAFLAAEGGVLWCSELSIQETPTNTVSFSGNPAEFIPAPRPPENCWWNRADMSISDTESPVTFI

SEQ ID NO: 16801 - protein, 176 aa, Acetobacter sp.
  REGION 1..176: note = tr|A0A5C1YQS1|A0A5C1YQS1_9PROT 6-carboxytetrahydropterin synthase OS=Acetobacter sp. KACC 21233 OX=2592655 GN=FLP30_12080 PE=4 SV=1
MPDLIFTRRFSMGHRLIHGASESCALPHGHNEFITVRLKPSALTRLDGAGNMPVSFQKAKSTWHRFVDERLDHALQLAADDPLLGWFQTHEPARAARIVVTPGDPTTELMVCLLMSKLNAFLSAEGGVLYCSELSIEETPTNTVSFQGDPTMIIPVQAEPGSRWWTRPDMSISDPA

SEQ ID NO: 16802 - protein, 174 aa, Acetobacter syzygii
  REGION 1..174: note = tr|A0A270BTP4|A0A270BTP4_9PROT 6-pyruvoyl tetrahydropterin synthase OS=Acetobacter syzygii OX=146476; GN = B9K05_03615 PE=4 SV=1
MPDLVFTRRFSMGHRLIHGASESCTLPHGHNEFVTVRLKPTHPTRLDGRGNMPVSFQAAKQTWHRFVDERLDHALQLAADDPLLTWFKTHEPARAARIVVTPGDPTTELMTCLLMAKLNAFLLAEGGVLHCTELSIQETPTNTVSFDGNPADFIPHSTTGQTSWWNRADMSIAD

SEQ ID NO: 16803 - protein, 176 aa, Acetobacter tropicalis; identical to SEQ ID NO: 16799
  REGION 1..176: note = tr|A0A291PJ39|A0A291PJ39_9PROT 6-pyruvoyl tetrahydropterin synthase OS=Acetobacter tropicalis; OX = 104102 GN=CIW82_12655 PE=4 SV=1

SEQ ID NO: 16804 - protein, 176 aa, Acetobacter tropicalis
  REGION 1..176: note = tr|A0A094ZFH1|A0A094ZFH1_9PROT 6-pyruvoyl tetrahydropterin synthase OS=Acetobacter tropicalis; OX = 104102 GN=AD947_15650 PE=4 SV=1
MPDLVFTRRFSMGHRLIHGASESCALPHGHNEFVTVKLSPTQQVRLDGKGNMPVSFQKAKSTWHRFVDEKLDHALQLAEDDPLLAWFQTHEPERARRIVVTPGDPTTELMVCLMMAKISAFLRAEGDMLRCTELSLQETPTNTVTFSGNPDELIPTGRPVAECWWHRADMSISDVS

SEQ ID NO: 16805 - protein, 133 aa, unidentified
  source 1..133: note = Acetobacteraceae bacterium
  REGION 1..133: note = tr|A0A327M6G2|A0A327M6G2_9PROT 6-carboxytetrahydropterin synthase OS=Acetobacteraceae bacterium DB1506 OX=2230885 GN=DOO78_16685 PE=4 SV=1
MFSLTVCDHIMVAHSFRGAEFGPAQRLHGATFAVEAEFRAPQLDHLHLLVDIGLAKTELRRALDTLDYRNLDDEGQFAGQNTTTEYLCRHIHQLLCAALREGRLGPQGGQVTALKVLLRESPNAWAAYEGAVA

SEQ ID NO: 16806 - protein, 175 aa, unidentified
  source 1..175: note = Acetobacteraceae bacterium
  REGION 1..175: note = tr|A0A327M6Z0|A0A327M6Z0_9PROT 6-carboxytetrahydropterin synthase OS=Acetobacteraceae bacterium DB1506 OX=2230885 GN=DOO78_11085 PE=4 SV=1
MFELVFRRRFAMAHRLLTDGTAQCAVPHGHTETVTVRLRAVRPERLDGAANMVEPFARAKARWHHWIDGHVDHALQLGEADPLLGWFRAAEPERLPRLLVTPGDPTTELLCGLFAAKLGAFLAADGGRLACVGVEIEETPTNTVRFEGDPYDILPRRHGWWSRADLSINAWDAAR

SEQ ID NO: 16807 - protein, 146 aa, unidentified
  source 1..146: note = Acetobacteroides hydrogenigenes
  REGION 1..146: note = tr|A0A4R2EUY9|A0A4R2EUY9_9BACT 6-pyruvoyltetrahydropterin/6-carboxytetrahydropterin synthase OS=Acetobacteroides hydrogenigenes OX=979970; GN = CLV25_103134 PE=4 SV=1
MSHTITKTYKNLKAAHRQWRHAGRCAYVHGENWRIDISFTARELDEQHFVFDFGALRPLRQQIEDLFDHTLLIDSDDPQRSFFEEMHAKGMADVRFMPSAGAEGISEMVFSMANDFIREATNQRVWCSKVTVYEDSKNCATYEPSI

SEQ ID NO: 16808 - protein, 129 aa, unidentified
  source 1..129: note = Acetobacteroides hydrogenigenes
  REGION 1..129: note = tr|A0A4R2EMG2|A0A4R2EMG2_9BACT 6-carboxy-5,6,7,8-tetrahydropterin synthase; OS = Acetobacteroides hydrogenigenes OX=979970 GN=CLV25_1062; PE = 3 SV=1
MVRAKSIRITKIFTFDSAHQLEDYEGKCRQLHGHTYKLEVTVKGEMGENGMVFDFSILKKVVTERVINLLDHKYLNDVFDFNPTSENMVVWIFEQIDECFVGQSCILECIKLWETATSYAELRRSDIEN

SEQ ID NO: 16809 - protein, 165 aa, Acetohalobium arabaticum
  REGION 1..165: note = tr|D9QQX9|D9QQX9_ACEAZ PreQ(0) biosynthesis protein QueD OS=Acetohalobium arabaticum (strain ATCC 49924 / DSM 5501 / Z-7288) OX=574087 GN=Acear_1410 PE=4 SV=1
MIQLNINSEVQVMSQVSVTKSFSWDMAHMLAGHEDQCKNLHGHTYKLEVEVTSKSGKLQAAGASQGMIIDFKDLKQVVTEEIVAPLDHAFLYWAKSPDEVEHQLAATLQDADRKVVSVDFRPTAENMANYFWEILQNNFTKLDIEVVSVKVWETPTSYAEVKGVR

SEQ ID NO: 16810 - protein, 132 aa, unidentified
  source 1..132: note = Acetomicrobium hydrogeniformans
  REGION 1..132: note = tr|A0A0T5XBR1|A0A0T5XBR1_9BACT 6-carboxy-5,6,7,8-tetrahydropterin synthase; OS = Acetomicrobium hydrogeniformans ATCC BAA-1850 OX=592015; GN = HMPREF1705_02961 PE=3 SV=1
MVILKREFSFDAAHYLPDYHGKCERLHGHTYKAAIFVEGSPDEEGMVMDFVELKGLVEERILSKLDHSCLNDVIKRPSAEYIALWIWGEMEPHINAGKRRLKYVQVWESPGSSVIIDENDFENFRGMLEVVS

SEQ ID NO: 16811 - protein, 132 aa, unidentified
  source 1..132: note = Acetomicrobium mobile
  REGION 1..132: note = tr|I4BUS7|I4BUS7_ACEMN 6-carboxy-5,6,7,8-tetrahydropterin synthase; OS = Acetomicrobium mobile (strain ATCC BAA-54 / DSM 13181 / JCM 12221 / NGA) OX=891968 GN=Anamo_037 7 PE=3 SV=1
MILKREFSFDAAHYLPDYHGKCERLHGHTYRAAIFVEGVPDEEGMVMDFVELKELIRDKLLSKLDHSCLNDIIKRPSAEYIALWIWNEMMSVIDDGRRSLKYVQVWESPDSSILIDRGDFEKFSDRLEVARG

SEQ ID NO: 16812 - protein, 132 aa, unidentified
  source 1..132: note = Acetomicrobium thermoterrenum
  REGION 1..132: note = tr|A0A1H3GWF9|A0A1H3GWF9_9BACT 6-carboxy-5,6,7,8-tetrahydropterin synthase; OS = Acetomicrobium thermoterrenum DSM 13490 OX=1120987; GN = SAMN03080603_01692 PE=3 SV=1
MVILKREFSFDAAHYLPDYHGKCERLHGHTYKAAIFVEGPPDEEGMVMDFVELKGLVEERILSKLDHSCLNDVIKRPSAEYIALWIWGEMGPHINAGKRRLKYVQVWESPGSSVIIDENDFENFRGMLEVVS

SEQ ID NO: 16813 - protein, 133 aa, Acetonema longum
  REGION 1..133: note = tr|F7NNG8|F7NNG8_9FIRM 6-carboxy-5,6,7,8-tetrahydropterin synthase OS=Acetonema longum DSM 6540 OX=1009370 GN=ALO_18295 PE=3 SV=1
MKKISIRATKIFTFDAAHCLPGHKGKCANMHGHTYRLEVTVARNDDGVLTDDSGNGMVIDFGDLKQIVQEEIIDKVDHKLLNEVFSFRTTSENMARHFYDLLARRLLAQGVSVEKITLWESPTSCVEVGRWNS

SEQ ID NO: 16814 - protein, 134 aa, Achromatium sp.
  REGION 1..134: note = tr|A0A0M1J7K6|A0A0M1J7K6_9GAMM 6-pyruvoyl tetrahydrobiopterin synthase OS=Achromatium sp. WMS3; OX = 1604836 GN=TI05_16185 PE=4 SV=1
MKYSISKEIHFCYGHRLLEHKGACKYLHGHSAKVLVRLGTETLDEHGMVCDFADLNQFVKNWLQQTLDHTLLLYQEDPLIPILQAANEQYRALDCHPTAENIARLIFEAVAQAGFPVLEVTLYETASAYATYSV

SEQ ID NO: 16815 - protein, 141 aa, Achromatium sp.
  REGION 1..141: note = tr|A0A0M1J2X3|A0A0M1J2X3_9GAMM 6-pyruvoyl tetrahydrobiopterin synthase OS=Achromatium sp. WMS2; OX = 1604835 GN=TI04_13020 PE=4 SV=1
MYNIRKEIHFCYGHRLLNHTGPCRYLHGHNAIALICLNSEELDKLGMVCDFSELGHFAKAWVDRELDHQLLLHQDDPLIPWLQQAGERHRVLACNPTAENIAKLIFEALAAAKFSVSEVTVYETPTASASYSHATAYGQTR

SEQ ID NO: 16816 - protein, 147 aa, unidentified
  source 1..147: note = Achromobacter agilis
  REGION 1..147: note = tr|A0A446CGV4|A0A446CGV4_9BURK 6-carboxy-5,6,7,8-tetrahydropterin synthase; OS = Achromobacter agilis OX=1353888 GN=AGI3411_02874 PE=3; SV = 1
MISVTRRLEFDAGHRIPDHRSQCRNLHGHRYVLEITLTGDIVQAPGESDNGMLMDFSEIKQIAKAHVVDVWDHAFLVYEGDAAVRAFLDTLPGHKTVVLDRIPTAENLAAIVFGILAPHYHGHYGAELRLTRVRLYETPNCWADCNG

SEQ ID NO: 16817 - protein, 147 aa, unidentified
  source 1..147: note = Achromobacter aloeverae
  REGION 1..147: note = tr|A0A4Q1HMC4|A0A4Q1HMC4_9BURK 6-carboxy-5,6,7,8-tetrahydropterin synthase; OS = Achromobacter aloeverae OX=1750518 GN=queD PE=3 SV=1
MISVTRKLEFDAGHRIPDHRSQCRNMHGHRYVLEVTLQGDVVDTPGSSDNGMLMDFSEIKAIAKRELVDRWDHAFLVHAGDQAVLAFLHSLPGHKTVVLDRIPTVENLARIAFDTLAPHYHGHYGLDLRLTRVRLYETPNCWADCDG

SEQ ID NO: 16818 - protein, 147 aa, unidentified
  source 1..147: note = Achromobacter arsenitoxydans
  REGION 1..147: note = tr|H0F6C6|H0F6C6_9BURK 6-carboxy-5,6,7,8-tetrahydropterin synthase; OS = Achromobacter arsenitoxydans SY8 OX=477184 GN=KYC_11598; PE = 3 SV=1
MISVTRRLEFDAGHRIPDHRSQCRNLHGHRYVLEITLTGDIVQAAGESDNGMLMDFSEIKHIAKTHIVDVWDHAFLVFEGDAAVRGFLDSLPGHKTVVLDRIPTAENLAAIVFETLAPHYHGHYGADLRLTRVRLYETPNCWADCNG

SEQ ID NO: 16819 - protein, 147 aa, Achromobacter denitrificans
  REGION 1..147: note = tr|A0A427WHW9|A0A427WHW9_ACHDE 6-carboxy-5,6,7,8-tetrahydropterin synthase; OS = Achromobacter denitrificans OX=32002 GN=queD PE=3 SV=1
MISVTRRLEFDAGHRIPDHRSQCRNLHGHRYVLEITLTGDVVQAPGESDNGMLMDFSEIKQIAKTHIVDVWDHAFLVYEGDAAVRAFLDTLPDHKTVVLDRIPTAENLAAIVFDTLAPHYHGHYGAELRLTRVRLYETPNCWADCNG

SEQ ID NO: 16820 - protein, 147 aa, Achromobacter insolitus
  REGION 1..147: note = tr|A0A162NE13|A0A162NE13_9BURK 6-carboxy-5,6,7,8-tetrahydropterin synthase; OS = Achromobacter insolitus OX=217204 GN=NCTC13520_02714; PE = 3 SV=1
MISVTRRLEFDAGHRIPDHRSQCRNLHGHRYVLEITLTGDVVQAPGESDNGMLMDFSEIKHIAKTHIVDVWDHAFLVYEGDAAVRGFLDSLPDHKTVVLDRIPTAENLAAIVFETLAPHYHGHYGAELRLTRVRLYETPNCWADCNG

SEQ ID NO: 16821 - protein, 147 aa, unidentified
  source 1..147: note = Achromobacter insuavis
  REGION 1..147: note = tr|F7T6R5|F7T6R5_9BURK 6-carboxy-5,6,7,8-tetrahydropterin synthase; OS = Achromobacter insuavis AXX-A OX=1003200 GN=AXXA_23245; PE = 3 SV=1
MISVTRRLEFDAGHRIPDHRSQCRNMHGHRYVLEITLTGDIVQAPGESDNGMLMDFADIKRIAKAHIVDVWDHAFLVFEGDTAVRGFLDSMPGHKTVVLDRIPTAENLAAIIFEILAPHYHGHYGADLRLTRVRLYETPNCWADCNG

SEQ ID NO: 16822 - protein, 147 aa, Achromobacter marplatensis
  REGION 1..147: note = tr|J4PCU1|J4PCU1_9BURK 6-carboxy-5,6,7,8-tetrahydropterin synthase; OS = Achromobacter marplatensis OX=470868 GN=DFP87_1011080; PE = 3 SV=1
MISVTRRLEFDAGHRIPDHRSQCRNLHGHRYVLEITLTGDVVQAPGESDNGMLMDFSEIKHIAKTHIVDVWDHAFLVYEGDAAVRGFLDSLPGHKTVVLDRIPTAENLAQIVFDTLAPQYHGHYGADLRLTRVRLYETPNCWADCNG

SEQ ID NO: 16823 - protein, 147 aa, Achromobacter piechaudii
  REGION 1..147: note = tr|D4XE26|D4XE26_9BURK 6-carboxy-5,6,7,8-tetrahydropterin synthase; OS = Achromobacter piechaudii ATCC 43553 OX=742159 GN=queD; PE = 3 SV=1
MISVTRRLEFDAGHRIPDHRSQCRNLHGHRYVLEITLTGDVVQAPGESDNGMLMDFSEIKHIAKSHIVDVWDHAFLVFEGDAAVRDFLATLPDHKTVVLDRIPTAENLAKIVFDTLAPHYHGHYGADLRLTRVRLYETPNCWADCAA

SEQ ID NO: 16824 - protein, 147 aa, Achromobacter piechaudii
  REGION 1..147: note = tr|A0A0L6I4T5|A0A0L6I4T5_9BURK 6-carboxy-5,6,7,8-tetrahydropterin synthase; OS = Achromobacter piechaudii OX=72556 GN=AKG08_21085 PE=3; SV = 1
MISVTRRLEFDAGHRIPDHRSQCRNLHGHRYVLEITLTGDVVQAPGESDNGMLMDFSEIKHIAKTHIVDVWDHAFLVFEGDAAVRDFLATLPDHKTVVLDRIPTAENLAKIVFDTLAPHYHGHYGADLRLTRVRLYETPNCWADCAA

SEQ ID NO: 16825 - protein, 147 aa, unidentified
  source 1..147: note = Achromobacter pulmonis
  REGION 1..147: note = tr|A0A2N8KA41|A0A2N8KA41_9BURK 6-carboxy-5,6,7,8-tetrahydropterin synthase; OS = Achromobacter pulmonis OX=1389932 GN=queD PE=3 SV=1
MISVTRRLEFDAGHRIPDHRSQCRNLHGHRYVLEITLSGDVVQAPGESDNGMLMDFSEIKQIAKTHIVDVWDHAFLVYEGDAAVRAFLDSLPGHKTVVLDRIPTAENLAAIVFATLAPHYHGHYGAELRLTRVRLYETPNCWADCNG

SEQ ID NO: 16826 - protein, 147 aa, Achromobacter ruhlandii
  REGION 1..147: note = tr|A0A1D8IAC7|A0A1D8IAC7_9BURK 6-carboxy-5,6,7,8-tetrahydropterin synthase; OS = Achromobacter ruhlandii OX=72557 GN=queD PE=3 SV=1
MISVTRRLEFDAGHRIPDHRSQCRNLHGHRYVLEITLTGDVVQAPGESDNGMLMDFADIKRIAKTHIVDVWDHAFLVYEGDTAVRGFLDSMPDHKTVVLDRIPTAENLAAIIFEILAPHYHGHYGADLRLTRVRLYETPNCWADCNG

SEQ ID NO: 16827 - protein, 121 aa, Achromobacter sp.
  REGION 1..121: note = tr|A0A0M7NCN5|A0A0M7NCN5_9BURK 6-carboxy-5,6,7,8-tetrahydropterin synthase; OS = Achromobacter sp. ATCC35328 OX=1806490 GN=queD PE=3 SV=1
MMSTTLFKDFTFEAAHRLPHVPEGHKCGRLHGHSFMVRLEITGEVDPHTGWIIDFAELKAAFKPTYERLDHHYLNDIPGLENPTSEVLAKWIWDQVKPVVPLLSAVMVKETCTAGCIYRGE

SEQ ID NO: 16828 - protein, 147 aa, Achromobacter sp.
  REGION 1..147: note = tr|A0A226XZS7|A0A226XZS7_9BURK 6-carboxy-5,6,7,8-tetrahydropterin synthase; OS = Achromobacter sp. KAs 3-5 OX=1915388 GN=queD PE=3 SV=1
MISVTRRLEFDAGHRIPDHRSQCRNLHGHRYVLEITLTGDVVQAPGESDNGMVMDFSEIKHIAKTHIVDVWDHAFLVYEGDAAVRGFLDTLPGHKTVVLDRIPTAENLATIVFETLAPHYHGHYGAELRLTRVRLYETPNCWADCNG

SEQ ID NO: 16829 - protein, 147 aa, Achromobacter spanius
  REGION 1..147: note = tr|A0A2S0I754|A0A2S0I754_9BURK 6-carboxy-5,6,7,8-tetrahydropterin synthase; OS = Achromobacter spanius OX=217203 GN=queD PE=3 SV=1
MISVTRRLEFDAGHRIPDHRSQCRNLHGHRYVLEITLTGDIVQAPGESDNGMVMDFSEIKHIAKTHIVDVWDHAFLVYEGDDAVRGFLDSLPGHKTVVLDRIPTAENLATIVFETLAPQYHGHYGAELRLTRVRLYETPNCWADCNG

SEQ ID NO: 16830 - protein, 147 aa, Achromobacter spanius
  REGION 1..147: note = tr|A0A0L0R9R6|A0A0L0R9R6_9BURK 6-carboxy-5,6,7,8-tetrahydropterin synthase; OS = Achromobacter spanius OX=217203 GN=queD PE=3 SV=1
MISVTRRLEFDAGHRIPDHRSQCRNLHGHRYVLEITLTGDVVQAPGESDNGMLMDFSEIKHIAKTHIVDVWDHAFLVYEGDAAVRGFLDTLPDHKTVVLDRIPTAENLAKIVFDTLAPHYHGHYGADLRLSRVRLYETPNCWADCNG

SEQ ID NO: 16831 - protein, 147 aa, Achromobacter xylosoxidans
  REGION 1..147: note = tr|E3HK35|E3HK35_ACHXA 6-carboxy-5,6,7,8-tetrahydropterin synthase; OS = Achromobacter xylosoxidans (strain A8) OX=762376; GN = queD PE=3 SV=1
MISVTRRLEFDAGHRIPDHRSQCRNLHGHRYVLEITLTGDVVQAPGESDNGMLMDFSEIKHIAKTHIVDVWDHAFLVYEGDAAVRGFLDSLPGHKTVVLDRIPTAENLAAIVFQTLAPHYHGHYGAELRLTRVRLYETPNCWADCNG

SEQ ID NO: 16832 - protein, 164 aa, Acidaminobacter hydrogenoformans
  REGION 1..164: note = tr|A0A1G5RZM0|A0A1G5RZM0_9FIRM PreQ(0) biosynthesis protein QueD OS=Acidaminobacter hydrogenoformans DSM 2784; OX = 1120920 GN=SAMN03080599_01767 PE=4 SV=1
MLQSFLFSKLNIIERMKYAVYYLKSEHSFDSAHFLANYEGKCRHIHGHRWRVIVEIMSPTLNTDEALDGMIVDFSKLKKDIKAEVDFFDHALIIEKGSLKPSTLTALIDEAFHVVEVDFRPTAERFSKYFYDRMTLKGYQVKSATVYETPANAASYEEDPHGTV

SEQ ID NO: 16833 - protein, 125 aa, unidentified
  source 1..125: note = Acidaminococcaceae bacterium
  REGION 1..125: note = tr|A0A359EU52|A0A359EU52_9FIRM 6-carboxy-5,6,7,8-tetrahydropterin synthase; OS = Acidaminococcaceae bacterium OX=2049052 GN=queD PE=3; SV = 1
MIVLKKFEFDAAHYLPSYNGKCERLHGHTYKLVVKVDGVPDMEGMVLDFSLLKKIVQTKVLRKLDHRLLNDVIPNPSAENIAIWVWDQLAKPLYAENRRLFEVEVWETRTSGCIYRGEFYEGELC

SEQ ID NO: 16834 - protein, 125 aa, unidentified
  source 1..125: note = Acidaminococcaceae bacterium
  REGION 1..125: note = tr|A0A351E835|A0A351E835_9FIRM 6-carboxy-5,6,7,8-tetrahydropterin synthase; OS = Acidaminococcaceae bacterium OX=2049052 GN=queD PE=3; SV = 1
MKVLKEFEFDAAHYLPSYNGKCEHLHGHTYRLVVLVEGRPDAEGMVMDFTKLKHTVQDLVLSRLDHHLLNDLLPNPSAENIAIWVWNKLAGPLSGPDRRLCEVQVWETRTSGCIYNGEFYEGELC

SEQ ID NO: 16835 - protein, 108 aa, Acidaminococcus fermentans
  REGION 1..108: note = tr|A0A1I5GR29|A0A1I5GR29_ACIFE 6-pyruvoyltetrahydropterin/6-carboxytetrahydropterin synthase OS=Acidaminococcus fermentans OX=905; GN = SAMN02910455_00201 PE=4 SV=1
MYTVTKRIEVSGAHCLRLPYESKCTRLHGHNWIIDVTCRREELDENGMVVDFTHIKDVVMKLDHAFINDIVKTNPTAENIAKWIHDQIPFCTRVSVQESEGNVAIYED

SEQ ID NO: 16836 - protein, 108 aa, Acidaminococcus fermentans
  REGION 1..108: note = tr|D2RLP7|D2RLP7_ACIFV Uncharacterized protein; OS = Acidaminococcus fermentans (strain ATCC 25085 / DSM 20731 / VR4) OX=591001 GN=Acfer_1642 PE=4 SV=1
MYTVTKRIEVSGAHCLRLPYESKCTRLHGHNWIIDVTCRREELDANGMVVDFTHIKDVVMKLDHAFINDIVKTNPTAENIAKWIHDQIPFCTRVSVQESEGNVAIYED

SEQ ID NO: 16837 - protein, 109 aa, Acidaminococcus intestini
  REGION 1..109: note = tr|C0WAE6|C0WAE6_9FIRM Putative queuosine biosynthesis protein QueD OS=Acidaminococcus intestini; OX = 187327 GN=ACDG_00437 PE=4 SV=1
MMYTVTKRMEVSGAHALRLPYESKCTRLHGHNWIIEVTCRREELDENGMVVDFHHIKDVVKKLDHQNLNAILSMNPTAENIAKWIHDQVPYCTKVMVQESEGNVAVYED

SEQ ID NO: 16838 - protein, 120 aa, Acidaminococcus intestini
  REGION 1..120: note = tr|G4Q2M3|G4Q2M3_ACIIR 6-carboxy-5,6,7,8-tetrahydropterin synthase; OS = Acidaminococcus intestini (strain RyC-MR95) OX=568816; GN = ptpS PE=3 SV=1
MICLKEFDFDAAHFLPNYNGKCEHLHGHTYKLVVKVEGTPDHEGMVLDFVRFKNLVKELVVSKLDHAFINDILPQPSAENIAVWVWQQLETPLHGPNYHLFEVEVWETKTSGIIYRGETC

SEQ ID NO: 16839 - protein, 108 aa, Acidaminococcus sp.
  REGION 1..108: note = tr|R7LY49|R7LY49_9FIRM Uncharacterized protein; OS = Acidaminococcus sp. CAG:542 OX=1262687 GN=BN701_00714; PE = 4 SV=1
MYTVTKRMEVSGAHCLQLPYKSKCTHLHGHNWIIDVTCQRETLDENGMVVDFTHIKEVVMQLDHAFINDIVKTNPTAENIAKWIHDQIPFCTRVSVQESEGNVAIYED

SEQ ID NO: 16840 - protein, 108 aa, Acidaminococcus sp.
  REGION 1..108: note = tr|A0A415EHI9|A0A415EHI9_9FIRM 6-carboxytetrahydropterin synthase QueD OS=Acidaminococcus sp. AM05-11 OX=2291997 GN=queD PE=4 SV=1
MYTVTKRIEVSGAHRLDLNYTSKCTHLHGHNWIIDVTCQREELDENGMVVDFGKIKEVVMALDHAFINDVVKINPTAENIAKWIHDRVPYCTRVSVQESEGNVAIYED

SEQ ID NO: 16841 - protein, 158 aa, unidentified
  source 1..158: note = Acidibacillus ferrooxidans
  REGION 1..158: note = tr|A0A124IW12|A0A124IW12_9BACL 6-pyruvoyl tetrahydrobiopterin synthase OS=Acidibacillus ferrooxidans; OX = 1765683 GN=ATW55_02540 PE=4 SV=1
MSERNLRDSVEPLLYKPSQEIALSSLRYHDRRVTITKEFTFDAAHHLYAYKGKCANLHGHTYRLVVSVSDVLDEIGLSIDFGDVKALVKTHVVDRLDHTYLNEVLPPMNTTAENMIVWMFEEIERALHAFRETARVERLTLYETPTSSVEITRQEMGL

SEQ ID NO: 16842 - protein, 158 aa, unidentified
  source 1..158: note = Acidibacillus ferrooxidans
  REGION 1..158: note = tr|A0A162TX08|A0A162TX08_9BACL 6-carboxytetrahydropterin synthase QueD OS=Acidibacillus ferrooxidans OX=1765683 GN=AYJ22_08190 PE=4 SV=1
MSEKVSQDFAAPFVFKQAQESAPSSLRYHLRRVTITKEFTFDAAHHLYAYQGKCANLHGHTYRLIVSVSDVLDEIGLAIDFGDVKTLVKTHVVDRLDHTYLNEVLPPMNTTAENMIVWMFEEIEQALHAFRDTARVERLTLYETPTSSVEITRQEMGL

SEQ ID NO: 16843 - protein, 152 aa, unidentified
  source 1..152: note = Acidibacillus sulfuroxidans
  REGION 1..152: note = tr|A0A2U3D6Q1|A0A2U3D6Q1_9BACL 6-carboxytetrahydropterin synthase QueD OS=Acidibacillus sulfuroxidans OX=1765684 GN=BM613_11140 PE=4 SV=1
MEFVVPQKLLQLDIDIAREQLRYHQKRVLVTKEFTFDAAHHLYAYEGKCVGLHGHTYRLLVSASAVPNDIGISIDFADLKRIVKQSVVDRLDHQYLNAVLPPMNTTAENMVVWMYEQIAQALQQEGSSARVERVVLWETPTSCAEVSREEME

SEQ ID NO: 16844 - protein, 107 aa, unidentified
  source 1..107: note = Acidibacillus sulfuroxidans
  REGION 1..107: note = tr|A0A2U3CNT8|A0A2U3CNT8_9BACL Uncharacterized protein OS=Acidibacillus sulfuroxidans OX=1765684; GN = BM613_14475 PE=4 SV=1
MIDFSVVKTTLCQWLEDNWDHKFLHWSRDNLIDALKIAASRPSCPLEHEDHEHFLGSLVALPFNPTAENLAAYMVDVIGPQLLDQYGVELVECTIEETSKCHVNYCK

SEQ ID NO: 16845 - protein, 131 aa, Acidiferrobacter sp.
  REGION 1..131: note = tr|A0A2Z3R5N7|A0A2Z3R5N7_9GAMM 6-carboxy-5,6,7,8-tetrahydropterin synthase; OS = Acidiferrobacter sp. SPIII_3 OX=1281578 GN=queD PE=3; SV = 1
MEIFKSFRIEAAHRLPGLPEGHKCWRLHGHSFRIDVHVRGLVDARCGWVMDFADVGAAFRPIFDDLDHHYLNDIPGLENPTSECLAQYVWGRLADVLPGLARVVIHETCTSGCAYEGPGSVKEGQKLGGGD

SEQ ID NO: 16846 - protein, 131 aa, Acidiferrobacter thiooxydans
  REGION 1..131: note = tr|A0A1C2FY07|A0A1C2FY07_9GAMM 6-carboxy-5,6,7,8-tetrahydropterin synthase; OS = Acidiferrobacter thiooxydans OX=163359 GN=queD PE=3 SV=1
MEIFKSFRIEAAHRLPGLPEGHKCWRLHGHSFRIDVHVRGVVDAQRGWVMDFADVGAAFRPIFDDLDHRYLNDIVGLENPTSERLAQYVWGRLAGALPGLARVVIHETCTSGCAYEGPGSVKEGQKVGGGD

SEQ ID NO: 16847 - protein, 127 aa, unidentified
  source 1..127: note = Acidihalobacter ferrooxidans
  REGION 1..127: note = tr|A0A1P8UJC5|A0A1P8UJC5_9GAMM 6-carboxy-5,6,7,8-tetrahydropterin synthase; OS = Acidihalobacter ferrooxidans OX=1765967 GN=BW247_13045; PE = 3 SV=1
MPATYLLTVHTDFAAAHTLRDYPGDCSRLHGHNWKLEAQVRATALNDVGMAIDFKAIKSVAREVAGELDHRYLNELPPFTTVNPTAENIAAYIYRQMSARLDTDTARVSAVTLWETDRACVRYSEDT

SEQ ID NO: 16848 - protein, 127 aa, unidentified
  source 1..127: note = Acidihalobacter prosperus
  REGION 1..127: note = tr|A0A1D8IQ47|A0A1D8IQ47_9GAMM 6-carboxy-5,6,7,8-tetrahydropterin synthase; OS = Acidihalobacter prosperus OX=160660 GN=BI364_12000 PE=3; SV = 1
MPAKYTLTVLTDFAAAHTLRDYPGDCSRLHGHNWKLEAEVQATALDKVGMAVDFKVIKRAAREIAGELDHRYLNELEPFVQINPTAEHIAAYLFSRLAERINTDCVRVSAITLWETERACVRYSEEA

SEQ ID NO: 16849 - protein, 127 aa, unidentified
  source 1..127: note = Acidihalobacter prosperus
  REGION 1..127: note = tr|A0A1D8K968|A0A1D8K968_9GAMM 6-carboxy-5,6,7,8-tetrahydropterin synthase; OS = Acidihalobacter prosperus OX=160660 GN=BJI67_10960 PE=3; SV = 1
MPAKYTLTVLTDFAAAHTLRGYPGDCSRMHGHNWKLEAEVQATALDDVGMAVDFKVIKQAAREIAGELDHHYLNDLPAFARVNPTAEQIAAYIYQRLGERLNTGQVRVSAVTLWETERACVRYSEEA

SEQ ID NO: 16850 - protein, 150 aa, unidentified
  source 1..150: note = Acidimicrobiaceae bacterium
  REGION 1..150: note = tr|A0A2D7S0Q5|A0A2D7S0Q5_9ACTN 6-carboxytetrahydropterin synthase QueD; OS = Acidimicrobiaceae bacterium OX=2024894 GN=CL416_08035; PE = 4 SV=1
MTKIRVTKSFGFETGHALYGHDGLCKNIHGHSYKLFVTVIGTPINEANHAKNGMVIDFKDLKTIVKSEIVDVFDHAMVLNNNSPHSELATVLSSQEHKVIRVDYQPTSENMVIDFANRIASKLPSHIKLFKVRLNETATAYAEWYASDQE

SEQ ID NO: 16851 - protein, 125 aa, unidentified
  source 1..125: note = Acidimicrobiaceae bacterium
  REGION 1..125: note = tr|A0A2E0E065|A0A2E0E065_9ACTN Uncharacterized protein OS=Acidimicrobiaceae bacterium OX=2024894; GN = CL425_06575 PE=4 SV=1
MKLTITASIHARWGHRVDNLIHTHAWTVEATLEGPLDSKKVFPADDLEKILTNAVEPWSGHYLTKKDVGIWKGYKPLIWMKEPTVEEITRNLWGHLSKKVPTLTGVSLIESSEFDRCRKVSLTKN

SEQ ID NO: 16852 - protein, 115 aa, unidentified
  source 1..115: note = Acidimicrobiales bacterium
  REGION 1..115: note = tr|A0A2W6DEP5|A0A2W6DEP5_9ACTN 6-carboxy-5,6,7,8-tetrahydropterin synthase; OS = Acidimicrobiales bacterium OX=2201156 GN=queD PE=3 SV=1
MRARVTRSFSFEAAHHLPWHPGRCRRMHGHHYRLEVTVEGAIGDQGVVIDFDRLAEVVEAAVISRYDHHLINDFLDNPTAELIAADAWKSVEAAGLAVAAIRLWETPDSMVELLA

SEQ ID NO: 16853 - protein, 118 aa, Acidiphilium cryptum
  REGION 1..118: note = tr|A5G265|A5G265_ACICJ 6-carboxy-5,6,7,8-tetrahydropterin synthase; OS = Acidiphilium cryptum (strain JF-5) OX=349163; GN = Acry_2756 PE=3 SV=1
MHEITKEFRFEAAHTLQRQIAAEASRRIHGHSYRATVTLRGAPDASGMLMDFGRLGQHLAAIREALDHRFLDEVEGLGPATLENLARFIWTRLATSCPGLARVAVFRDSEGESCAYSE

SEQ ID NO: 16854 - protein, 118 aa, Acidiphilium multivorum
  REGION 1..118: note = tr|F0J5N9|F0J5N9_ACIMA 6-carboxy-5,6,7,8-tetrahydropterin synthase; OS = Acidiphilium multivorum (strain DSM 11245 / JCM 8867 / NBRC 100883 / AIU301) OX=926570 GN=ACMV_ 30860 PE=3 SV=1
MHEITKEFRFEAAHTLQRQIAAEASRRIHGHSYRATVTLRGAPDASGMLMDFGRLGQHLAAIREALDHRFLDEVEGLGPATLENLARFIWTRLAPSCPGLARVAVFRDSEGESCAYSE

SEQ ID NO: 16855 - protein, 118 aa, Acidiphilium rubrum
  REGION 1..118: note = tr|A0A1N6VYR7|A0A1N6VYR7_ACIRU 6-carboxy-5,6,7,8-tetrahydropterin synthase; OS = Acidiphilium rubrum OX=526 GN=SAMN05421828_11044 PE=3; SV = 1
MFEITKDFRFEAAHTLNRTIETESSRRIHGHSYRATITLRGTPGASGMIMDFGILNTHIATLRDILDHRFLDEVPNLGPATLENLAAFIWRTLHPACPGLARVAVFRDSEGESCTYEG

SEQ ID NO: 16856 - protein, 118 aa, Acidiphilium sp.
  REGION 1..118: note = tr|F7S5Z2|F7S5Z2_9PROT 6-carboxy-5,6,7,8-tetrahydropterin synthase; OS = Acidiphilium sp. PM OX=1043206 GN=APM_1743 PE=3 SV=1
MHEITKEFRFEAAHTLQRQIAAEASRRIHGHSYRTTVTLRGAPDASGMLMDFGRLGQHLAAIREALDHRFLDEVEGLGPATLENLARFIWTRLAPSCPGLARVAVFRDSEGESCAYSE

SEQ ID NO: 16857 - protein, 122 aa, Acidiphilium sp.
  REGION 1..122: note = tr|A0A257SBV5|A0A257SBV5_9PROT 6-carboxy-5,6,7,8-tetrahydropterin synthase; OS = Acidiphilium sp. 21-60-14 OX=1970292 GN=B7Z67_07800; PE = 3 SV=1
MFELSKQFRFEAAHTLHRVGLAAASEAASRRIHGHSYRADVTLRGERDAQGMVLDLERVAAALAHVRALLDHQFLDDVAGLGPATLENLAAFIWAKLTDELPGLTRVAVYRDSEGDACVYTG

SEQ ID NO: 16858 - protein, 125 aa, unidentified
  source 1..125: note = Acidipila dinghuensis
  REGION 1..125: note = tr|A0A4Q1SHN3|A0A4Q1SHN3_9BACT 6-carboxy-5,6,7,8-tetrahydropterin synthase OS=Acidipila dinghuensis OX=1560006 GN=queD PE=3 SV=1
MYEVRVEREFSSGHYLRNYRGKCENPHGHNYKVQITLRGETLDVSGLLLDFKDLKHVMRPVIDRLDHQMLNDLEPFTEINPSAENLAKYFYDETKSQLHELTKGRVTVKDCTIYETDTTTATYYE

SEQ ID NO: 16859 - protein, 135 aa, unidentified
  source 1..135: note = Acidipila dinghuensis
  REGION 1..135: note = tr|A0A4Q1SDU2|A0A4Q1SDU2_9BACT 6-carboxytetrahydropterin synthase OS=Acidipila dinghuensis OX=1560006 GN=ESZ00_11630 PE=4 SV=1
MILLTRKAEFSAAHYYWNPAWSEEENLRRFGKCANRNGHGHNYTLEVTVAGEIDPATGFVVDLKQLKEVLEREVVSVYDHRHLNLEVPEFATAVPTTENIAIAVWKRLEGKIPGARLYRVRVYELPELFADYYGE

SEQ ID NO: 16860 - protein, 136 aa, unidentified
  source 1..136: note = Acidipila rosea
  REGION 1..136: note = tr|A0A4R1LBY7|A0A4R1LBY7_9BACT 6-pyruvoyltetrahydropterin/6-carboxytetrahydropterin synthase OS=Acidipila rosea OX=768535 GN=C7378_0674 PE=4; SV = 1
MRAYFSRRYRLSASHRLHSDALTDEQNRATYGKCNNPFGHGHNYIVEVTAGGQVDAETGMVCNLVDLDGCVHKLVIERFDHTNLNLDPMFQKLVPTTENLTIEIFQILKEAFRPAEIVRVRVEETSNNFFEYSGEA

SEQ ID NO: 16861 - protein, 125 aa, unidentified
  source 1..125: note = Acidipila rosea
  REGION 1..125: note = tr|A0A4V2PUX1|A0A4V2PUX1_9BACT 6-carboxy-5,6,7,8-tetrahydropterin synthase OS=Acidipila rosea OX=768535 GN=C7378_2784 PE=3 SV=1
MYEVTVEAGFSSGHYLRNYKGKCENPHGHNYKVKVTLRGNTLDKAGLLLDFKDLKQVMRPVVDRLDHQMINDLEPFTEINPSAENLARYFFDETNKQLSEMTAGRVHVKDCTIYETDTTTATYYE

SEQ ID NO: 16862 - protein, 145 aa, unidentified
  source 1..145: note = Acidipila sp.
  REGION 1..145: note = tr|A0A372IS76|A0A372IS76_9BACT 6-pyruvoyl tetrahydrobiopterin synthase OS=Acidipila sp. 4G-K13; OX = 2303751 GN=D0Y96_06340 PE=4 SV=1
MRAWLGRRYRLSASHRLHTDALSEAENRAIYGKCNNPHGHGHNYVIEVTVGGEVDPKTGMVCDLAALDACVQRKVVEPFDHMNLNTLPCFQDRVPTTENLCMEVHRRLKDALTGVELARVRVEETSNNFFEYRDGAIPSGKGNRA

SEQ ID NO: 16863 - protein, 137 aa, unidentified
  source 1..137: note = Acidipila sp.
  REGION 1..137: note = tr|A0A3P0X3X3|A0A3P0X3X3_9BACT 6-carboxytetrahydropterin synthase OS=Acidipila sp. EB88; OX = 2305226 GN=D1Y84_01470 PE=4 SV=1
MILLTRRAEWSASHYYWVDSWSEAQNRERFGKCANRNGHGHNYVLDVTVRGNVDPQTGFVVDLKWLKDVLEREVIAVFDHRHLNLEVPEFRTLMPTTENIAIAIWRRLADKVSPAATLHQVRVYETPDLFADYYGEA

SEQ ID NO: 16864 - protein, 125 aa, unidentified
  source 1..125: note = Acidisarcina polymorpha
  REGION 1..125: note = tr|A0A2Z5G8R2|A0A2Z5G8R2_9BACT 6-carboxy-5,6,7,8-tetrahydropterin synthase; OS = Acidisarcina polymorpha OX=2211140 GN=ACPOL_6106 PE=3; SV = 1
MYEVTVEAGFSSGHYLRNYKGKCENPHGHNYKVLVTLQGATLDHAGLLLDFKDLKHVMRPVVDRLDHQMINDLEPFTEINPSAENLARYFFEETNRQLAEMTKGRVRVKDCTVYETDTSFAKYYE

SEQ ID NO: 16865 - protein, 95 aa, unidentified
  source 1..95: note = Acidisarcina polymorpha
  REGION 1..95: note = tr|A0A2Z5G7B0|A0A2Z5G7B0_9BACT 6-pyruvoyl tetrahydrobiopterin synthase OS=Acidisarcina polymorpha; OX = 2211140 GN=ACPOL_5621 PE=4 SV=1
MEVTTGGQVDAQTGMVCDLVKLDDAVRKNVVERFDLTNLNLDECFRKLVPTTENLCIAIHERLMPVFQSGVLGQVDLVRVRVEETANNFFEFTGK

SEQ ID NO: 16866 - protein, 125 aa, Acidisphaera rubrifaciens
  REGION 1..125: note = tr|A0A0D6P3S6|A0A0D6P3S6_9PROT 6-carboxy-5,6,7,8-tetrahydropterin synthase; OS = Acidisphaera rubrifaciens HS-AP3 OX=1231350; GN = Asru_0009_36 PE=3 SV=1
MFELSKEFRFDAAHTLERVIDTEPSRRIHGHSYRAEVVIRGRPDPQTGMIMDLGLFERALESAREGLDHRFLDELHDLGPSTMENLSAWIWRKVEPVCPDLWRVTVRRDSDQGACSYFGREGQGV

SEQ ID NO: 16867 - protein, 119 aa, unidentified
  source 1..119: note = Acidithiobacillales bacterium
  REGION 1..119: note = tr|A0A0S8L2R8|A0A0S8L2R8_9PROT 6-carboxy-5,6,7,8-tetrahydropterin synthase; OS = Acidithiobacillales bacterium SM1_46 OX=1703384; GN = AMJ72_07790 PE=3 SV=1
MEIFKLFTVEAAHRLPNLPPAHKCSRLHGHSFRIEVHVTGPVVEPEGWVQDFGDIGAAFRPIFEQLDHCYLNEIGGLENPTSEILARWIWQRLKPALPGLSSIVIRETCTSGCIYRGEA

SEQ ID NO: 16868 - protein, 120 aa, unidentified
  source 1..120: note = Acidithiobacillales bacterium
  REGION 1..120: note = tr|A0A0S8BL60|A0A0S8BL60_9PROT 6-carboxy-5,6,7,8-tetrahydropterin synthase; OS = Acidithiobacillales bacterium SG8_45 OX=1703383; GN = AMJ68_02365 PE=3 SV=1
MDIFKIFTIEAAHRLPNLPESHKCSRLHGHSIGIEVHVSGEVSAEQGWVQDFGDISQAFKPIYEQLDHYYLNEIEGLENPTSENLARWIWVRLKPKLPLLSKLVIRETCTAGCIYTGDDN

SEQ ID NO: 16869 - protein, 118 aa, unidentified
  source 1..118: note = Acidithrix ferrooxidans
  REGION 1..118: note = tr|A0A0D8HCV8|A0A0D8HCV8_9ACTN 6-carboxy-5,6,7,8-tetrahydropterin synthase OS=Acidithrix ferrooxidans OX=1280514 GN=queD PE=3 SV=1
MEIYKEFSFDSAHRLPNLPDSHKCSRLHGHTFKVTVYVQGDVDPQLGWVLDFGDIKECVKPIIDELDHRYLNDIDGLENPTSENISRWIFEKLILVMPVSKIMVNETCTSGCIYTGHP

SEQ ID NO: 16870 - protein, 134 aa, unidentified
  source 1..134: note = Acidobacteria bacterium
  REGION 1..134: note = tr|A0A522Q512|A0A522Q512_9BACT 6-carboxy-5,6,7,8-tetrahydropterin synthase; OS = Acidobacteria bacterium OX=1978231 GN=queD PE=3 SV=1
MFEISVEYSFAAGHALRGYKGKCENVHGHNYKVRVTVGGEKLNSIGLLMDFSDLRAALKGLVERFDHHFLNDVEPFTEANPSAENLACYLGNELQRKIKDQGLSVSNVTVWETDSTSASYRPPSGSRVENGERS

SEQ ID NO: 16871 - protein, 126 aa, unidentified
  source 1..126: note = Acidobacteria bacterium
  REGION 1..126: note = tr|A0A1Q7LD02|A0A1Q7LD02_9BACT 6-carboxy-5,6,7,8-tetrahydropterin synthase; OS = Acidobacteria bacterium 13_1_40CM_4_58_4 OX=1803453; GN = AUH86_05460 PE=3 SV=1
MFEVTVEDSFAAGHYLRNYKGKCEKPHGHNYKVRVTLAGKELDKAGLLLDFKDLREVMKHVIDRLDHQMINELEPFTVMNPSAENLAQYFYEETNGRLRSATNGRAWVKTVTVFETDTTTATYSES

SEQ ID NO: 16872 - protein, 136 aa, unidentified
  source 1..136: note = Acidobacteriales bacterium
  REGION 1..136: note = tr|A0A1Q6X9U9|A0A1Q6X9U9_9BACT 6-pyruvoyl tetrahydrobiopterin synthase OS=Acidobacteriales bacterium 13_2_20CM_55_8 OX=1803470 GN=AUH15_08535 PE=4 SV=1
MIYLTRKAEFAASHYYHNPEFTPEENQRIFGKCNNPNGHGHNYTLEVTVKGEVDPRSGFVVDLKQLKEVLNREVLDAMDHRFLNKEVPEFFTRIPTTENLAISIWQRLAPKLKTAQLHRVRVYETSDLFVDFYGEA

SEQ ID NO: 16873 - protein, 138 aa, unidentified
  source 1..138: note = Acidobacteriales bacterium
  REGION 1..138: note = tr|A0A3N5KCW4|A0A3N5KCW4_9BACT 6-carboxytetrahydropterin synthase OS=Acidobacteriales bacterium OX=2282142 GN=EHM65_08095 PE=4 SV=1
MLITRRAEFSASHVCRHPARTNEENAAIYGAEANPRGHGHNFVLEVTLEGEPDPVTGMVYDLKKLKEVLQREVVDLFDHRFLNLEVAPFDRVIPTPENMAVDIWGRLDATFRDPGVRLHAVRLFETEDLWVEYNGGAG

SEQ ID NO: 16874 - protein, 123 aa, unidentified
  source 1..123: note = Acidobacteriia bacterium
  REGION 1..123: note = tr|A0A317IXR0|A0A317IXR0_9BACT 6-carboxy-5,6,7,8-tetrahydropterin synthase; OS = Acidobacteriia bacterium OX=2081523 GN=queD PE=3 SV=1
MFEVTIEQTFAAGHALRNYRGKCENVHGHNYRCEVTLQGPRLDETGLLMDFVALKKSLQTVVDRLDHQWLNDFPPFDVLNPSAENIAKYIYDEVSKQIGAGSEVRLGAVRLWETDTSSATYRP

SEQ ID NO: 16875 - protein, 179 aa, unidentified
  source 1..179: note = Acidobacteriia bacterium
  REGION 1..179: note = tr|A0A317J844|A0A317J844_9BACT Uncharacterized protein OS=Acidobacteriia bacterium OX=2081523; GN = C5B51_02315 PE=4 SV=1
METTGASSGGRSAQVAAGPRLRNARSLCGLLPGGRVFRVTRRYHFASSHRLHSPELSEEENQKIYGKCNNPYGHGHDYVLDVSACGPLDSAAGRVLDTRLMDDLVERLVLHPFDHRNLNTEVQWFMPVVPTSENLGREICRRLKHNWNSTFPDEWPRLEKVRIEETPRNIFEVRADEIE

SEQ ID NO: 16876 - protein, 125 aa, Acidobacterium capsulatum
  REGION 1..125: note = tr|C1F2N7|C1F2N7_ACIC5 6-carboxy-5,6,7,8-tetrahydropterin synthase; OS = Acidobacterium capsulatum (strain ATCC 51196 / DSM 11244 / JCM 7670 / NBRC 15755 / NCIMB 13165/ 161); OX = 240015 GN=ACP_2697 PE=3 SV=1
MYEVTVERGFSSGHYLRNYKGKCENPHGHNYKVKITLQGKELDAAGLLLDFKDLKHVMRPVIDRLDHQMINDLEPFTQINPSAENLARYFYDETNKQLAEMTGSRVRVKDCTIYETDTTTATYYE

SEQ ID NO: 16877 - protein, 136 aa, Acidobacterium sp.
  REGION 1..136: note = tr|A0A2G4JEZ1|A0A2G4JEZ1_9BACT Uncharacterized protein OS=Acidobacterium sp. OX=1872119 GN=CK533_12330; PE = 4 SV=1
MYCVTVRDHIMIAHSFKGDVFGPAQRLHGATYVVDAEFRRAEVDADGIVVDIGRAGDVLKQVLAGLNFRNLDEVPEFKGKNTTTEFIARTVFDRMVAAIRRGELGPGAGAVESLRVTLQESHVASAWYEGRVGGAA

SEQ ID NO: 16878 - protein, 125 aa, Acidobacterium sp.; identical to SEQ ID NO: 16876
  REGION 1..125: note = tr|A0A3D4VK39|A0A3D4VK39_9BACT 6-carboxy-5,6,7,8-tetrahydropterin synthase; OS = Acidobacterium sp. OX=1872119 GN=queD PE=3 SV=1

SEQ ID NO: 16879 - protein, 123 aa, Acidocella aminolytica
  REGION 1..123: note = tr|A0A0D6PF98|A0A0D6PF98_9PROT 6-carboxy-5,6,7,8-tetrahydropterin synthase OS=Acidocella aminolytica 101 = DSM 11237 OX=1120923 GN=Aam_047_006 PE=3; SV = 1
MYELSKQFIFDAAHTLDRKIETESSRRIHGHTYLAEVTIRGTADPATGMVMDVGLLGRLLESTRDALDHHFLDDVPDLGHATMENLCAWIWRRLIPACPALYRVTISRASNQDRCAYFGPEGD

SEQ ID NO: 16880 - protein, 123 aa, Acidocella sp.
  REGION 1..123: note = tr|A0A257NR40|A0A257NR40_9PROT 6-carboxy-5,6,7,8-tetrahydropterin synthase OS=Acidocella sp. 20-63-7 OX=1970304 GN=B7X08_01105 PE=3 SV=1
MYELSKQFRFEAAHTLQRTIDEEPSKRIHGHSYRAEVFLRGEPDPKSGMLMDLGHLAQRIALVREALDHRFLDDISDLGPATMENLAAWIWRHLVEACPALVRVCVYRDSEGDACSYFGEANS

SEQ ID NO: 16881 - protein, 123 aa, Acidocella sp.
  REGION 1..123: note = tr|K5YIE1|K5YIE1_9PROT 6-carboxy-5,6,7,8-tetrahydropterin synthase OS=Acidocella sp. MX-AZ02 OX=1214225 GN=MXAZACID_14408 PE=3 SV=1
MYELSKQFIFDAAHTLERKIETDPSRRIHGHTYLAEVTLRGKADPASGMVMDVGLLARLLEEVRDGLDHRFLDEVPDLGPATMENLCAWIWTRLAAACPALYRVTISRASNQDRCAYYGPEAA

SEQ ID NO: 16882 - protein, 176 aa, Acidomonas methanolica
  REGION 1..176: note = tr|A0A023D1E4|A0A023D1E4_ACIMT Uncharacterized protein OS=Acidomonas methanolica NBRC 104435 OX=1231351; GN = Amme_011_057 PE=4 SV=1
MSKAELVFTRRFSMGHRLIDGASESCALPHGHNEFVTVALRPVRERALDGRGNMIVSFREAKQRWHEFVDTALDHALQLSERDPLLEWFRANEPGRAARIVVTPGDPTTELMAALMLAKLNAFLREAGETLVCEEISLQETPTNTVRLTGDAMDYLPPAGRAAQACWWHRPDFSIQ

SEQ ID NO: 16883 - protein, 125 aa, Acidovorax anthurii
  REGION 1..125: note = tr|A0A328YTY0|A0A328YTY0_9BURK 6-carboxy-5,6,7,8-tetrahydropterin synthase OS=Acidovorax anthurii OX=78229 GN=AX018_105123 PE=3 SV=1
MLFTVHQRFFFDAAHTLQREIEAEGSRRIHGHTYHAEICVTGPRHPTTGMVIDLGHLRARCAQLRERLDHHLLDEVPGLGPATLENLCVFIADALADMEPPPSRVRVWREAVGDGCVLDLAPARG

SEQ ID NO: 16884 - protein, 125 aa, Acidovorax avenae
  REGION 1..125: note = tr|F0Q0X7|F0Q0X7_ACIAP 6-carboxy-5,6,7,8-tetrahydropterin synthase OS=Acidovorax avenae (strain ATCC 19860 / DSM 7227 / JCM 20985 / NCPPB 1011) OX=643561 GN=Acav_375 3 PE=3 SV=1
MLFTVHQRFFFDAAHTLQREIEAEGSRRIHGHTYHAEISVTGPRHPATGMVIDLGHLRARCAQLRERLDHHLLDEVPGLGPATLENLCVFIADALGDLDPPPSRVRVWRDAVGDGCVLDLALPRG

SEQ ID NO: 16885 - protein, 125 aa, Acidovorax avenae
  REGION 1..125: note = tr|A0A2R4DRN2|A0A2R4DRN2_9BURK 6-carboxy-5,6,7,8-tetrahydropterin synthase OS=Acidovorax avenae subsp. avenae OX=80870 GN=C8239_14545 PE=3 SV=1
MLFTVHQRFFFDAAHTLQREIEAEGSRRIHGHTYHAEIYVTGPRHPATGMVIDLGHLRARCAQLRERLDHHLLDEVPGLGPATLENLCVFIADALGDLDPPPSRVRVWREAVGDGCVLDLARPRG

SEQ ID NO: 16886 - protein, 125 aa, unidentified
  source 1..125: note = Acidovorax carolinensis
  REGION 1..125: note = tr|A0A240TQL3|A0A240TQL3_9BURK 6-carboxy-5,6,7,8-tetrahydropterin synthase OS=Acidovorax carolinensis OX=553814 GN=CBP33_04190 PE=3 SV=1
MQFTVSQRFFFDAAHTLQREIEAEGSRRVHGHTYHAEVWVQGPRNTANGMVIDLGFLRQHLAVVREQLDHHLLDEVPGLGTPTLENLCAFIAQQLSGLQPPPSRVRVWREALGDGCTLDLTPPQA

SEQ ID NO: 16887 - protein, 125 aa, unidentified
  source 1..125: note = Acidovorax carolinensis
  REGION 1..125: note = tr|A0A240U9Q9|A0A240U9Q9_9BURK 6-carboxy-5,6,7,8-tetrahydropterin synthase OS=Acidovorax carolinensis OX=553814 GN=CBP34_04135 PE=3 SV=1
MQFTVSQRFFFDAAHTLQREIEAEGSRRVHGHTYHAEVWVQGPRNPANGMVIDLGFLRQRLAVVREQLDHHLLDEVPGLGTPTLENLCAFIAQQLSGMQPPPSRVRVWREALGDGCTLDLTPPQA

SEQ ID NO: 16888 - protein, 125 aa, Acidovorax cattleyae
  REGION 1..125: note = tr|A0A1H0T552|A0A1H0T552_9BURK 6-carboxy-5,6,7,8-tetrahydropterin synthase OS=Acidovorax cattleyae OX=80868 GN=SAMN04489708_11426 PE=3 SV=1
MLLTVHQRFFFDAAHTLQREIESEGSRRIHGHTYHAEISVTGPRHPATGMVIDLGHLRARCAQLRERLDHHLLDEVPGLGPATLENLCVFIADVLGDLDPPPSRVRVWREAVGDGCVLDLARPRG

SEQ ID NO: 16889 - protein, 120 aa, unidentified
  source 1..120: note = Acidovorax cavernicola
  REGION 1..120: note = tr|A0A3A1W4I0|A0A3A1W4I0_9BURK 6-carboxy-5,6,7,8-tetrahydropterin synthase OS=Acidovorax cavernicola OX=1675792 GN=D3H34_21670 PE=3 SV=1
MRFTISQRFFFDAAHTLKREIEVEGSRRIHGHTYHAEVWLTGERDPVTGMVIDLGLLRRRLEDVREQLDHHLLDDVPGLHPPTLENLCVFIAEALPDLRESLARVRVWREALGDSCTVDF

SEQ ID NO: 16890 - protein, 125 aa, Acidovorax citrulli
  REGION 1..125: note = tr|A1TTV2|A1TTV2_ACIAC 6-carboxy-5,6,7,8-tetrahydropterin synthase OS=Acidovorax citrulli (strain AAC00-1) OX=397945 GN=Aave_3845 PE=3 SV=1
MLFTVHQRFFFDAAHTLQREIEAEGSRRIHGHTYHAEISVTGPRHPATGMVIDLGHLRARCAQLRERLDHHLLDEVPGLGPATLENLCVFIADALGDLDPAPSRVRVWREAIGDGCVLDLARPRG

SEQ ID NO: 16891 - protein, 124 aa, Acidovorax delafieldii
  REGION 1..124: note = tr|A0A561XIL2|A0A561XIL2_ACIDE 6-carboxy-5,6,7,8-tetrahydropterin synthase OS=Acidovorax delafieldii OX=47920 GN=ATF69_3516 PE=3 SV=1
MLFTISQRFFFDAAHTLRREIEAEGSRRVHGHTYHAEVFLSGPRDPATGMVLDLGLLRQGLAVVREQLDHHMLDEVPGLGTPTLENLCLFIAQALPADLRASLSRVRVWREALGDSCALDFPQP

SEQ ID NO: 16892 - protein, 124 aa, Acidovorax delafieldii
  REGION 1..124: note = tr|C5T9G5|C5T9G5_ACIDE 6-carboxy-5,6,7,8-tetrahydropterin synthase OS=Acidovorax delafieldii 2AN OX=573060 GN=AcdelDRAFT_3545 PE=3 SV=1
MLFTISQRFFFDAAHTLRREIEAEGSRRVHGHTYHAEVFLTGPRDPATGMVLDLGLLRQGLAVVREQLDHHMLDEVPGLGTPTLENLCVFIAQALPADLRPRVSRVRVWREALGDSCVLDFSTH

SEQ ID NO: 16893 - protein, 124 aa, unidentified
  source 1..124: note = Acidovorax kalamii
  REGION 1..124: note = tr|A0A235EGY7|A0A235EGY7_9BURK 6-carboxy-5,6,7,8-tetrahydropterin synthase OS=Acidovorax kalamii OX=2004485 GN=CBY09_19820 PE=3 SV=1
MLFTISQRFFFDAAHTLRREIEAEGSRRVHGHTYHAEVFLSGPRDPATGMVLDLGLLRRGLEVVREQLDHHMLDDVPGLGTPTLENLCVFIAQALPADLRPSVSRVRVWREALGDSCVLDFPQP

SEQ ID NO: 16894 - protein, 125 aa, Acidovorax konjaci
  REGION 1..125: note = tr|A0A1I1SK39|A0A1I1SK39_9BURK 6-carboxy-5,6,7,8-tetrahydropterin synthase OS=Acidovorax konjaci OX=32040 GN=SAMN04489710_102273 PE=3 SV=1
MLFTVHQRFFFDAAHTLQREIEAEGSRRIHGHTYHAEISVTGPRHPATGMVIDLGHLRARCTQLRERLDHHLLDEVPGLGPATLENLCVFIADALSDLDPPPSRVRVWREAVGDGCVLDLARPRG

SEQ ID NO: 16895 - protein, 124 aa, Acidovorax radicis
  REGION 1..124: note = tr|A0A561CPH7|A0A561CPH7_9BURK 6-carboxy-5,6,7,8-tetrahydropterin synthase OS=Acidovorax radicis OX=758826 GN=FB546_104153 PE=3 SV=1
MQFTISQRFFFDAAHTLRREIEAEGSRRIHGHTYHAEVSLSGPRDPSTGMVLDLGLLRRGLDVVREQLDHHMLDEVPGLGIPTLENLCLFIAQALPAELRPRVSRVRVWREALGDSCALDFTPP

SEQ ID NO: 16896 - protein, 124 aa, Acidovorax soli
  REGION 1..124: note = tr|A0A1H3W7Q5|A0A1H3W7Q5_9BURK 6-carboxy-5,6,7,8-tetrahydropterin synthase OS=Acidovorax soli OX=592050 GN=SAMN05421875_102118 PE=3 SV=1
MLFTISQRFFFDAAHTLRREIEAEGSRRVHGHTYHAEVFLTGARDPATGMVLDLGLLRQGLAVVREQLDHHMLDDVPGLGTPTLENLCVFIAQALPAVLRASVSRVRVWREALGDSCVLDFSTH

SEQ ID NO: 16897 - protein, 124 aa, Acidovorax sp.
  REGION 1..124: note = tr|A0A495HZN9|A0A495HZN9_9BURK 6-carboxy-5,6,7,8-tetrahydropterin synthase OS=Acidovorax sp. 94 OX=2135633 GN=C8C94_2684 PE=3 SV=1
MLFTISQRFFFDAAHTLRREIEAEGSRRVHGHTYHAEVFLSGPRDPATGMVLDLGLLRRGLEVVREQLDHHMLDDVPGLGTPTLENLCVFIAQALPADLRASVSRVRVWREALGDSCMLDFPQP

SEQ ID NO: 16898 - protein, 124 aa, Acidovorax sp.
  REGION 1..124: note = tr|A0A1Q3J5H0|A0A1Q3J5H0_9BURK 6-carboxy-5,6,7,8-tetrahydropterin synthase OS=Acidovorax sp. 65-7 OX=1895692 GN=BGN90_18245 PE=3 SV=1
MLFTISQRFFFDAAHTLRREIEAEGSRRVHGHTYHAEVFLTGPRDPATGMVLDLGLLRQGLAVVREQLDHHMLDEVPGLGTPTLENLCLFIAQALPADLRASVSRVRVWREALGDSCALDFSQP

SEQ ID NO: 16899 - protein, 124 aa, Acidovorax temperans
  REGION 1..124: note = tr|A0A543LAB9|A0A543LAB9_9BURK 6-carboxy-5,6,7,8-tetrahydropterin synthase OS=Acidovorax temperans OX=80878 GN=BDD18_2914 PE=3 SV=1
MQLTIRQRFFFDAAHTLRREIEAEGSRRIHGHTYHAEVALTGPLDPATGMVQDLGHLRARLAEVREQLDHHFLDEVPGLGVPTLEHLCLFIARAVADLHPSQVRVWRDAVGDACTLDLPQAPSA

SEQ ID NO: 16900 - protein, 127 aa, Acidovorax valerianellae
  REGION 1..127: note = tr|A0A1G6PHC9|A0A1G6PHC9_9BURK 6-carboxy-5,6,7,8-tetrahydropterin synthase OS=Acidovorax valerianellae OX=187868 GN=SAMN05192589_103226 PE=3 SV=1
MQFTVHQRFFFDAAHTLQREIEAEGSRRIHGHTYHAEVAVTGPRDAATGMVIDLGHLRERLAAVREQLDHHWLDEVPGLGTPTLENLCQFIAQALHGMQPPASRVRVWREALGDGCVLDLPAPGPVR

SEQ ID NO: 16901 - protein, 120 aa, unidentified
  source 1..120: note = Acidovorax wautersii
  REGION 1..120: note = tr|A0A1I2BQB1|A0A1I2BQB1_9BURK 6-carboxy-5,6,7,8-tetrahydropterin synthase OS=Acidovorax wautersii OX=1177982 GN=SAMN04489711_103138 PE=3 SV=1
MQFTVHQRFFFDAAHTLQREIEAEGSRRIHGHTYHAEISVTGPRHPDSGMVIDLGHLRARCDRLREQLDHHLLDEVPGLGPATLENLCVFIARDLADMQPAPSRVRVWRDALGDGCVLDL

SEQ ID NO: 16902 - protein, 198 aa, unidentified
  source 1..198: note = Acinetobacter albensis
  REGION 1..198: note = tr|A0A1C4GV27|A0A1C4GV27_9GAMM 6-pyruvoyltetrahydropterin/6-carboxytetrahydropterin synthase OS=Acinetobacter albensis OX=1673609; GN = GA0116959_10540 PE=4 SV=1
MLIRKLFKFENAHIVRNCTSDRCKRSIHGHSYKVELLLKASKLDHGQMVYDFGLLKGLIKDIFDSFDHAICFWQQDDADYIEACKKFSARWVSLPVSPSAEQFSRIFFYLAQQILVSTITQNGEGDVEVYSVIVHETDTGYAQSFIEDIENEQMGLLKLEQIIFSEQVQAEWLDPAMYEKLKQGIKFQNPSVDLQVPV

SEQ ID NO: 16903 - protein, 198 aa, unidentified
  source 1..198: note = Acinetobacter apis
  REGION 1..198: note = tr|A0A217EDI9|A0A217EDI9_9GAMM 6-pyruvoyltetrahydropterin/6-carboxytetrahydropterin synthase OS=Acinetobacter apis OX=1229165; GN = SAMN05444584_0513 PE=4 SV=1
MLIRKLFKFENAHIVRNCTSDRCKRSIHGHSYKLELLLKANKLDHGQMVYDFGLLKGVIKDLFDSFDHAICFWNKDDPQYIQACQQFSARWVSLPVSPSAEQFSRIFFFLAQQVLKATQTQNGEGDVEVYSVIVHETDTGYAQSFAEDIDNVQMGRLNLEDILFSEQIQSEWTDPETYQKLKQGHTFNNPTVELQVQL

SEQ ID NO: 16904 - protein, 198 aa, Acinetobacter baumannii
  REGION 1..198: note = tr|A0A013S226|A0A013S226_ACIBA 6-pyruvoyl tetrahydropterin synthase family protein OS=Acinetobacter baumannii 573719 OX=1310759 GN=J658_0912 PE=4 SV=1
MLIRKLFKFENAHVVRNCTSDRCKRSIHGHSYKVELLLKASKLDHGQMVYDFGLLKGVIKDLFDSFDHAICFWEKDDPQYIDACQTFSARWISLPVSPSAEQFSRIFFYLAQQVLQSTVTQNGEGDVEVYSVIVHETDTGYAQSFIEDIQNEQMGILSLDGIVFSEQIQIEWANPHMYEDLKKGIKFNNPQVDLQVEV

SEQ ID NO: 16905 - protein, 198 aa, Acinetobacter baumannii
  REGION 1..198: note = tr|A0A062DMC6|A0A062DMC6_ACIBA 6-pyruvoyl tetrahydropterin synthase family protein OS=Acinetobacter baumannii 496487 OX=1310625 GN=J524_1136 PE=4 SV=1
MLIRKLFKFENAHVVRNCTSDRCKRSIHGHSYKVELLLKASKLDHGQMVYDFGLLKGVIKDLFDSFDHAICFWEKDDPQYIDACKTFSARWISLPVSPSAEQFSRIFFYLAQQVLQSTVTQNGEGDVEVYSVIVHETDTGYAQSFLEDIQNEQMGLLNLEGIIFSEQVQSEWADPNMYENLKQGIKFHNPHVNLQVEV

SEQ ID NO: 16906 - protein, 198 aa, Acinetobacter baylyi
  REGION 1..198: note = tr|Q6F9Y1|Q6F9Y1_ACIAD Uncharacterized protein; OS = Acinetobacter baylyi (strain ATCC 33305 / BD413 / ADP1); OX = 62977 GN=ACIAD2353 PE=4 SV=1
MLIRKLFKFENAHIVRNCTSDRCKRSIHGHSYKVELLLKANRLDHGQMVYDFGLLKGVIKELFDSFDHAICFWQDDNPEYIQACKTFSARWISLPVSPSAEQFSRIFFFLAQQVLHSTITQNGEGDVEVYSVIVHETDTGYAQSFLEDIQNVQMGTLDLKDIIFSDQVQLEWTDSQMYEKLRQGDKFSNPQVELQVHI

SEQ ID NO: 16907 - protein, 198 aa, Acinetobacter beijerinckii
  REGION 1..198: note = tr|N9EB58|N9EB58_9GAMM Uncharacterized protein; OS = Acinetobacter beijerinckii CIP 110307 OX=1217648; GN = F933_00869 PE=4 SV=1
MLIRKLFKFENAHIVRNCTSDRCKRSIHGHSYKVELLLKASKLDHGQMVYDFGLLKGVIKELFDSFDHAICFWQKDDAAYIDACKTFSARWISLPVSPSAEQFSRIFFYLAQQVLNSTTTQNGEGDVEVYSVIVHETDTGYAQSFQEDIANEQMGLLTLDQIEFSEQVQLEWSDSKMYENLKNGIKFQNPNVELQVDI

SEQ ID NO: 16908 - protein, 198 aa, Acinetobacter beijerinckii
  REGION 1..198: note = tr|N9FIZ7|N9FIZ7_9GAMM Uncharacterized protein; OS = Acinetobacter beijerinckii ANC 3835 OX=1217649; GN = F934_01623 PE=4 SV=1
MLIRKLFKFENAHIVRNCTSDRCKRSIHGHSYKVELLLKASKLDHGQMVYDFGLLKGVIKELFDSFDHAICFWQKDDAAYIDACKTFSARWISLPVSPSAEQFSRIFFYLAQQVLNSTTTQNGEGDVEVYSVIVHETDTGYAQSFQEDIVNEQMGLLTLDQIEFSEQVQLEWSDSKMYENLKNGIKFQNPNVELQVDI

SEQ ID NO: 16909 - protein, 198 aa, Acinetobacter bereziniae
  REGION 1..198: note = tr|N8YQY6|N8YQY6_ACIBZ Uncharacterized protein; OS = Acinetobacter bereziniae NIPH 3 OX=1217651; GN = F963_02461 PE=4 SV=1
MLIRKLFKFENAHIVRNCTSDRCKRSIHGHSYKVELLLKASKLDHGQMVYDFGLLKGIIKEIFDSFDHAICFWQEDSPEYIQACKTFSARWVALPVSPSAEQFSRVFFFLAQQVLKSTITQNGEGDVEVYSVIVHETDTGYAQSFQEDIENTQMGLLSLDKIVFSEQVQVEWTDPEMYEKLKQGVQFQNPEVDLQVKI

SEQ ID NO: 16910 - protein, 198 aa, Acinetobacter bereziniae
  REGION 1..198: note = tr|A0A3R9YXF0|A0A3R9YXF0_ACIBZ 6-carboxytetrahydropterin synthase OS=Acinetobacter bereziniae OX=106648 GN=NDM229_009660 PE=4 SV=1
MLIRKLFKFENAHIVRNCTSDRCKRSIHGHSYKVELLLKASKLDHGQMVYDFGLLKGIIKEIFDSFDHAICFWQEDSPEYIQACKTFSARWVALPVSPSAEQFSRVFFFLAQQVLKSTITQNGEGDVEVYSVIVHETDTGYAQSFQEDIENTQMGLLSLDKIIFSKQVQVEWTDPEMYEKLKQGVQFQNPEVDLQVKI

SEQ ID NO: 16911 - protein, 198 aa, unidentified
  source 1..198: note = Acinetobacter bohemicus
  REGION 1..198: note = tr|A0A1I6T0U7|A0A1I6T0U7_9GAMM 6-pyruvoyltetrahydropterin/6-carboxytetrahydropterin synthase OS=Acinetobacter bohemicus OX=1435036; GN = SAMN05444586_100943 PE=4 SV=1
MLIRKLFKFENAHIVRNCTSDRCKRSIHGHSYKVELLLKASKLDHGQMVYDFGLLKGVIKDIFDSFDHAICFWQHDDAEYIDACKKFSARWVSLPVSPSAEQFSRIFFYLAQQILASTITQNGEGDVEVYSVIVHETDTGYAQSFVEDIENEQMGMLSLEQIVFSEQVQAEWADSMMYEKLQQGIKFQNPSVDLQVKI

SEQ ID NO: 16912 - protein, 198 aa, unidentified
  source 1..198: note = Acinetobacter bohemicus
  REGION 1..198: note = tr|N8NYZ8|N8NYZ8_9GAMM Uncharacterized protein; OS = Acinetobacter bohemicus ANC 3994 OX=1217715; GN = F994_02259 PE=4 SV=1
MLIRKLFKFENAHIVRNCTSDRCKRSIHGHSYKVELLLKASKLDHGQMVYDFGLLKGVIKDIFDSFDHAICFWQHDDAEYIDACKKFSARWVSLPVSPSAEQFSRIFFYLAQQILASTITQNGEGDVEVYSVIVHETDTGYAQSFVEDIENEQMGVLSLEQIVFSEQVQAEWADSTMYEKLQQGIKFQNPSVDLQVKI

SEQ ID NO: 16913 - protein, 198 aa, unidentified
  source 1..198: note = Acinetobacter boissieri
  REGION 1..198: note = tr|A0A1G6J102|A0A1G6J102_9GAMM 6-pyruvoyltetrahydropterin/6-carboxytetrahydropterin synthase OS=Acinetobacter boissieri OX=1219383; GN = SAMN05421733_10999 PE=4 SV=1
MLIRKLFKFENAHIVRNCSSDRCKRSLHGHSYKVELFLKANALDHGQMVYDFGLLKGVIKDLFDSFDHAICFWNKDDAAYIQACQTFSARWVSLPVSPSAEQFSRVFFFLAQQVLANTKMQNGEGDVEVYSVIVHETDTGYAQSFVEDINNPQMGILTLDQIEFSEQIQIEWADPQSYQKLKHGEAFENPVVEPQVKI

SEQ ID NO: 16914 - protein, 198 aa, Acinetobacter bouvetii
  REGION 1..198: note = tr|A0A4Q7AX99|A0A4Q7AX99_9GAMM 6-carboxytetrahydropterin synthase OS=Acinetobacter bouvetii OX=202951 GN=EXE25_09960 PE=4 SV=1
MLIRKLFKFENAHIVRNCTSDRCKRSIHGHSYKVELLLKASKLDHGQMVYDFGLLKGVIKDLYDSFDHAICFWKQDNADYIEACKNFSARWVSLPVSPSAEQFSRIFFYLAQQVLASTETQNGEGDVEVYSVIVHETDTGYAQSFAEDIENEQMGLLSLDQIEFSEQVKAEWADPEMFDKLIRGIKFQNPSVDLQVKL

SEQ ID NO: 16915 - protein, 198 aa, Acinetobacter bouvetii
  REGION 1..198: note = tr|N9DKG9|N9DKG9_9GAMM Uncharacterized protein; OS = Acinetobacter bouvetii DSM 14964 = CIP 107468; OX = 1120925 GN=F941_01240 PE=4 SV=1
MLIRKLFKFENAHIVRNCTSDRCKRSIHGHSYKVELLLKASKLDHGQMVYDFGLLKGVIKDLYDSFDHAICFWQQDNAGYIEACKNFSARWVSLPVSPSAEQFSRIFFYLAQQVLASTETQNGEGDVEVYSVIVHETDTGYAQSFAEDITNKQMGLLNLDQIEFSEQVKAEWADPEMFDKLIRGIKFQNPSVDLQVKL

SEQ ID NO: 16916 - protein, 199 aa, Acinetobacter brisouii
  REGION 1..199: note = tr|V2VW86|V2VW86_9GAMM Uncharacterized protein; OS = Acinetobacter brisouii CIP 110357 OX=1341683; GN = P255_01110 PE=4 SV=1
MLIRKLFKFENAHIVRNCTSDRCKRSIHGHSYKVELLLKASKLDHGQMVYDFGLLKGVIKELFDSFDHAICFWNQDSAEYIQACQTFSARWISLPVSPSAEQFSRIFFYLAQQVLKSTQTQNGEGDVEVYSVIVHETDTGYAQSFLEDIENTQMGVLTLEEIEFSEQVQAEWSDPEMYRKLKQGEPFLNPKVELQVQIS

SEQ ID NO: 16917 - protein, 198 aa, Acinetobacter calcoaceticus
  REGION 1..198: note = tr|A0A1A0GN71|A0A1A0GN71_ACICA 6-carboxytetrahydropterin synthase QueD OS=Acinetobacter calcoaceticus OX=471 GN=A9988_00585 PE=4 SV=1
MLIRKLFKFENAHVVRNCTSDRCKRSIHGHSYKVELLLKASKLDHGQMVYDFGLLKGVIKDLFDSFDHAICFWEKDDSQYIDACQTFSARWISLPVSPSAEQFSRIFFYLAQQVLQSTVTQNGEGDVEVYSVIVHETDTGYAQSFIEDIQNEQMGILSLDGIVFSEQIQIEWTNPQMYEDLKKGIKFNNPQVDLQVEV

SEQ ID NO: 16918 - protein, 198 aa, Acinetobacter calcoaceticus
  REGION 1..198: note = tr|N9D6B5|N9D6B5_ACICA Uncharacterized protein; OS = Acinetobacter calcoaceticus ANC 3680 OX=1217653; GN = F937_02770 PE=4 SV=1
MLIRKLFKFENAHVVRNCTSDRCKRSIHGHSYKVELLLKASKLDHGQMVYDFGLLKGVIKDLIDSFDHAICFWEKDDSQYIDACQTFSARWISLPVSPSAEQFSRIFFYLAQQVLQSTITQNGEGDVEVYSVIVHETDTGYAQSFIEDIQNEQMGILSLDGIVFSEQIQIEWANPQMYEDLKKGMKFNNPQVDLQVEV

SEQ ID NO: 16919 - protein, 198 aa, Acinetobacter calcoaceticus
  REGION 1..198: note = tr|A0A2S4TCW6|A0A2S4TCW6_9GAMM 6-carboxytetrahydropterin synthase OS=Acinetobacter calcoaceticus/baumannii complex sp. ABNIH27 OX=2080673; GN = C3422_00745 PE=4 SV=1
MLIRKLFKFENAHVVRNCTSDRCKRSIHGHSYKVELLLKASKLDHGQMVYDFGLLKGVIKDLFDSFDHAVCFWEKDDPQYIDACKTFSARWISLPVSPSAEQFSRIFFYLAQQVLQSTVTQNGEGDVEVYSVIVHETDTGYAQSFLEDIQNEQMGLLNLEGIIFSEQVQSEWADPNMYENLKQGIKFHNPHVNLQVEV

SEQ ID NO: 16920 - protein, 198 aa, unidentified
  source 1..198: note = Acinetobacter celticus
  REGION 1..198: note = tr|A0A1C3CW06|A0A1C3CW06_9GAMM 6-carboxytetrahydropterin synthase QueD OS=Acinetobacter celticus OX=1891224 GN=BBP83_10010 PE=4 SV=1
MLIRKLFKFENAHIVRNCTSDRCKRSIHGHSYKVELLLKASKLDHGQMVYDFGLLKGVIKDLFDSFDHAICFWQQDNAEYIQACKTFSARWVSLPVSPSAEQFSRIFFYLAQQVLTSTETQNGEGDVEVYSVIVHETDTGYAQSFAEDIENVQMGLLDLTQIEFSEQVVSEWTDPEMFEKLKQGLKFQNPSVDLQVKL

SEQ ID NO: 16921 - protein, 198 aa, unidentified
  source 1..198: note = Acinetobacter colistiniresistens
  REGION 1..198: note = tr|N9QVH8|N9QVH8_9GAMM 6-carboxytetrahydropterin synthase OS=Acinetobacter colistiniresistens OX=280145; GN = F889_02690 PE=4 SV=1
MLIRKLFKFENAHIVRNCTSDRCKRSIHGHSYKVELLLKASKLDHGQMVYDFGLLKGVIKELFDSFDHAICFWQKDDAAYIDACKTFSARWIALPVSPSAEQFSRIFFYLAQQVLNSTTTQNGEGDVEVYSVIVHETDTGYAQSFQEDIDNAQMGVLSLDQIVFSEQVQAEWSDIQMYENLKNGIKFQNPNVELQVNI

SEQ ID NO: 16922 - protein, 198 aa, unidentified
  source 1..198: note = Acinetobacter cumulans
  REGION 1..198: note = tr|A0A3A8FW28|A0A3A8FW28_9GAMM 6-carboxytetrahydropterin synthase OS=Acinetobacter cumulans OX=2136182 GN=C9E88_013670 PE=4 SV=1
MIIRKLFKFENAHIVRNCTSDRCKRSIHGHSYKVELLLKASKLDHGQMVYDFGLLKGVIKDLYDSFDHAICYWNQDSQEYIQACETFSARWVSLPVSPSAEQFSRIFFYLAQQVLASTETQNGEGDVEVYSVIVHETDTGYAQSFLEDIQNEQMGVLDLEQIVFSEQIQAEWSNPQMFEQLKKGLKFQNPQVELQVKL

SEQ ID NO: 16923 - protein, 198 aa, unidentified
  source 1..198: note = Acinetobacter defluvii
  REGION 1..198: note = tr|A0A2S2FFP5|A0A2S2FFP5_9GAMM 6-carboxytetrahydropterin synthase OS=Acinetobacter defluvii OX=1871111 GN=DJ533_11485 PE=4 SV=1
MLIRKLFKFENAHIVRNCTSDRCKRSIHGHSYKVELLLKASKLDHGQMVYDFGLLKGVIKDIFDSFDHAICFWQEDSLDYTQACKTFSARWVSLPVSPSAEQFSRIFFFLAQQVLQSTITQNGEGDVEVYSVIVHETDTGYAQSFLEDIENEQMGILNLDQIVFSEQVQAEWHDPEMYEKLKKGVKFQNPEVDLQVKL

SEQ ID NO: 16924 - protein, 198 aa, unidentified
  source 1..198: note = Acinetobacter equi
  REGION 1..198: note = tr|A0A0N9V9M3|A0A0N9V9M3_9GAMM 6-carboxy-5,6,7,8-tetrahydropterin synthase; OS = Acinetobacter equi OX=1324350 GN=AOY20_10885 PE=4 SV=1
MIIRKLFKFENAHIVRNCTSDRCKRSIHGHSYKVELLLKASKLDHGQMVYDFGLLKGVIKDLFDAFDHAICFWQNDSQDYIEACQKFSARWVSLPVSPSAEQFSRIFFYLAQQVLASTETQNGEGDVEVYSVIVHETDTGYAQSFLEDIQNEQMGILALDQIVFSEQIQSEWADPQLYEKLKNGIKFQNPTVTLQVNV

SEQ ID NO: 16925 - protein, 198 aa, unidentified
  source 1..198: note = Acinetobacter gandensis
  REGION 1..198: note = tr|A0A1A7R5Q9|A0A1A7R5Q9_9GAMM 6-carboxy-5,6,7,8-tetrahydropterin synthase; OS = Acinetobacter gandensis OX=1443941 GN=A9J31_10235 PE=4; SV = 1
MLIRKLFKFENAHIVRNCTSDRCKRSIHGHSYKVELLLKASRLDHGQMVYDFGLLKGVIKDLFDSFDHAICFWQHDDAEYIKACKQFSARWVALPVSPSAEQFSRIFFYLAQQVLKSTETQNGEGDVEVYSVIVHETDTGYAQSFLEDIENSQMGLLSLEQIVFSEQVQAEWNDTQMYEKLKQGQTFLNPTVDLQVKL

SEQ ID NO: 16926 - protein, 198 aa, unidentified
  source 1..198: note = Acinetobacter genomosp.
  REGION 1..198: note = tr|A0A1V2V3A5|A0A1V2V3A5_9GAMM 6-carboxy-5,6,7,8-tetrahydropterin synthase; OS = Acinetobacter genomosp. 33YU OX=1675530 GN=AC058_02920; PE = 4 SV=1
MLIRKLFKFENAHVVRNCTSDRCKRSIHGHSYKVELLLKASKLDHGQMVYDFGLLKGVIKDLFDSFDHAICFWEKDDPQYIDACKTFSARWISLPVSPSAEQFSRIFFFLAQQVLQSTVTQNGEGDVEVYSVIVHETDTGYAQSFLEDIQNEQMGLLNLEGIVFSEQVQSEWNDPQMYESLKQGIKFHNPHVNLQVEV

SEQ ID NO: 16927 - protein, 198 aa, unidentified
  source 1..198: note = Acinetobacter genomosp.
  REGION 1..198: note = tr|A0A1V2V489|A0A1V2V489_9GAMM 6-carboxy-5,6,7,8-tetrahydropterin synthase; OS = Acinetobacter genomosp. 33YU OX=1675530 GN=AC057_10610; PE = 4 SV=1
MLIRKLFKFENAHVVRNCTSDRCKRSIHGHSYKVELLLKASKLDHGQMVYDFGLLKGVIKDLFDSFDHAICFWEKDDPQYIDACKTFSARWISLPVSPSAEQFSRIFYFLAQQVLQSTVTQNGEGDVEVYSVIVHETDTGYAQSFLEDIQNEQMGLLNLEGIVFSEQVQSEWTDPQMYENLKQGIKFHNPHVNLQVEV

SEQ ID NO: 16928 - protein, 198 aa, Acinetobacter gerneri
  REGION 1..198: note = tr|N8ZRR9|N8ZRR9_9GAMM Uncharacterized protein; OS = Acinetobacter gerneri DSM 14967 = CIP 107464 OX=1120926; GN = F960_01493 PE=4 SV=1
MLIRKLFKFENAHIVRNCTSDRCKRSIHGHSYKVELLLKASKLDHGQMVYDFGLLKGVIKDIYDSFDHAICFWQNDDPEYIRACKTFSARWVALPVSPSAEQFSRVFFYLADQVLKSTITQNGEGDVEVYSVIVHETDTGYAQSFREDIENEQMGVLSLQDIIFSDQIQAEWADHEMYAKLLQGMKFQNPEVTLQVKL

SEQ ID NO: 16929 - protein, 198 aa, Acinetobacter guillouiae
  REGION 1..198: note = tr|N8Y3W1|N8Y3W1_ACIGI Uncharacterized protein; OS = Acinetobacter guillouiae NIPH 991 OX=1217656; GN = F964_02924 PE=4 SV=1
MLIRKLFKFENAHIVRNCTSDRCKRSIHGHSYKVELLLKASKLDHGQMVYDFGLLKGVIKEIFDSFDHAICFWQEDNPEYIQACKTFSARWVALPVSPSAEQFSRIFFFLAQQILKSTITQNGEGDVEVYSVIVHETDTGYAQSFQEDIENAQMGLLSLDKIIFSEQVTSEWSDPEMYEKLKQGIPFQNPEVDLQVKI

SEQ ID NO: 16930 - protein, 198 aa, Acinetobacter guillouiae
  REGION 1..198: note = tr|A0A077L428|A0A077L428_ACIGI Putative 6-pyruvoyl tetrahydrobiopterin synthase OS=Acinetobacter guillouiae; OX = 106649 GN=AS4_19690 PE=4 SV=1
MLIRKLFKFENAHIVRNCTSDRCKRSIHGHSYKVELLLKASKLDHGQMVYDFGLLKGVIKEVFDSFDHAICFWQEDNPEYIQACKTFSARWVALPVSPSAEQFSRIFFFLAQQILKSTITQNGEGDVEVYSVIVHETDTGYAQSFQEDIENAQMGLLSLDKIIFSEQVTSEWSDPEMYEKLKQGIPFQNPEVDLQVKI

SEQ ID NO: 16931 - protein, 198 aa, Acinetobacter gyllenbergii
  REGION 1..198: note = tr|V2V9T8|V2V9T8_9GAMM Uncharacterized protein; OS = Acinetobacter gyllenbergii NIPH 230 OX=1217658; GN = F987_00167 PE=4 SV=1
MLIRKLFKFENAHIVRNCTSDRCKRSIHGHSYKVELLLKASKLDHGQMVYDFGLLKGVIKELYDSFDHAICFWQKDDPAYIEACKTFSARWIALPVSPSAEQFSRIFFYLAQQVLNSTTTQNGEGDVEVYSVIVHETDTGYAQSFQEDIDNAQMGALSLDQIVFSEQVQAEWSDVQMYENLKKGMKFQNPNVELQVNI

SEQ ID NO: 16932 - protein, 198 aa, Acinetobacter gyllenbergii; identical to SEQ ID NO: 16931
  REGION 1..198: note = tr|A0A1B8UGC9|A0A1B8UGC9_9GAMM 6-carboxy-5,6,7,8-tetrahydropterin synthase; OS = Acinetobacter gyllenbergii OX=134534 GN=NG55_01680 PE=4; SV = 1

SEQ ID NO: 16933 - protein, 217 aa, Acinetobacter haemolyticus
  REGION 1..217: note = tr|D4XQW4|D4XQW4_ACIHA Uncharacterized protein; OS = Acinetobacter haemolyticus ATCC 19194 OX=707232; GN = HMP0015_2106 PE=4 SV=1
MLVFLFYNKLRLQKRFAWCMLIRKLFKFENAHIVRNCTSDRCKRSIHGHSYKVELLLKASKLDHGQMVYDFGLLKGVIKELFDSFDHAICYWQKDDPAYIDACKTFSARWIALPVSPSAEQFSRIFFYLAQQVLNSTITQNGEGDVEVYSVIVHETDTGYAQSFQEDIDNEQMGALSLEQIIFSEQVQAEWSDPNLYKNLKQGLKFQNPNVELQVNI

SEQ ID NO: 16934 - protein, 217 aa, Acinetobacter haemolyticus; identical to SEQ ID NO: 16933
  REGION 1..217: note = tr|N9FEX5|N9FEX5_ACIHA Uncharacterized protein; OS = Acinetobacter haemolyticus NIPH 261 OX=1217986; GN = F926_01847 PE=4 SV=1

SEQ ID NO: 16935 - protein, 198 aa, unidentified
  source 1..198: note = Acinetobacter halotolerans
  REGION 1..198: note = tr|A0A4Q6XCI1|A0A4Q6XCI1_9GAMM 6-carboxytetrahydropterin synthase OS=Acinetobacter halotolerans OX=1752076 GN=EXE30_05940 PE=4 SV=1
MLIRKLFKFENAHIVRNCTSDRCKRSIHGHSYKVELLLKASKLDHGQMVYDFGLLKGVIKELFDSFDHAICYWQKDDAAYIDACKTFSARWVALPVSPSAEQFSRIFFFLAQQVLNSTVTQNGEGDVEVYSVIVHETDTGYAQSFQEDIDNEQMGILSLDQIVFSEQVQSEWSDPQMYERLKNGMRFQNPNVELQVNI

SEQ ID NO: 16936 - protein, 198 aa, unidentified
  source 1..198: note = Acinetobacter idrijaensis
  REGION 1..198: note = tr|A0A098YK41|A0A098YK41_9GAMM 6-carboxy-5,6,7,8-tetrahydropterin synthase; OS = Acinetobacter idrijaensis OX=1507807 GN=GS19_05845 PE=4; SV = 1
MLIRKLFKFENAHIVRNCTSDRCKRSIHGHSYKVELLLKASKLDHGQMVYDFGLLKGVIKDFFDSFDHAICFWKNDDPEYIQACKNFSARWVSLPVSPSAEQFSRIFFFLAQQVLASTVTQNGEGDVEVYSVIVHETDTGYAQSFLEDIQNEQMGILSLEQLEFSEQVQAEWTDPDMFAKLKQGTPFHNPTVDLQVQI

SEQ ID NO: 16937 - protein, 198 aa, unidentified
  source 1..198: note = Acinetobacter indicus
  REGION 1..198: note = tr|V2UML2|V2UML2_9GAMM Uncharacterized protein; OS = Acinetobacter indicus CIP 110367 OX=1341679; GN = P253_00683 PE=4 SV=1
MLIRKLFKFENAHIVRNCTSDRCKRSIHGHSYKVELLLKATKLDHGQMVYDFGLLKGVIKEIFDSFDHAICFWQQDNPDYIQACQNFSARWVSLPVSPSAEQFSRIFFFLAQQVLASTITQNGEGDVEVYSVIVHETDTGYAQSFLEDIENEQMGRLALDQIEFSAQVRAEWSDPEMYEKLKQGIKFQNPSVDLQVKL

SEQ ID NO: 16938 - protein, 198 aa, unidentified; identical to SEQ ID NO: 16937
  source 1..198: note = Acinetobacter indicus
  REGION 1..198: note = tr|A0A437IWT3|A0A437IWT3_9GAMM 6-carboxytetrahydropterin synthase OS=Acinetobacter indicus OX=756892 GN=ENC20_10920 PE=4 SV=1

SEQ ID NO: 16939 - protein, 198 aa, Acinetobacter johnsonii
  REGION 1..198: note = tr|A0A0U3TRP6|A0A0U3TRP6_ACIJO 6-carboxy-5,6,7,8-tetrahydropterin synthase; OS = Acinetobacter johnsonii XBB1 OX=1242245 GN=RZ95_07590; PE = 4 SV=1
MLIRKLFKFENAHIVRNCTSDRCKRSIHGHSYKVELLLKASKLDHGQMVYDFGLLKGVIKDLYDSFDHAICFWQNDDPEYIQACKTFSARWVSLPVSPSAEQFSRIFFYLAQQVLASTVTQNGEGDVEVYSVIVHETDTGYAQSFIEDIENTQMGLLDLSQIEFSEQIQAEWADTEMYTKLKEGIQFHNPNVELQVKL

SEQ ID NO: 16940 - protein, 198 aa, Acinetobacter johnsonii; identical to SEQ ID NO: 16939
  REGION 1..198: note = tr|A0A0W8H0M3|A0A0W8H0M3_ACIJO 6-carboxy-5,6,7,8-tetrahydropterin synthase; OS = Acinetobacter johnsonii OX=40214 GN=queD PE=4 SV=1

SEQ ID NO: 16941 - protein, 198 aa, Acinetobacter junii
  REGION 1..198: note = tr|D0SIB2|D0SIB2_ACIJU Uncharacterized protein; OS = Acinetobacter junii SH205 OX=575587 GN=HMPREF0026_00860; PE = 4 SV=1
MLIRKLFKFENAHIVRNCTSDRCKRSIHGHSYKVELLLKASKLDHGQMVYDFGLLKGVIKELFDSFDHAICFWQKDDAAYIDACKTFSARWISLPVSPSAEQFSRIFFYLAQQVLRSTTTQNGEGDVQVYSVIVHETDTGYAQSFQEDIENEQMGILSLDQIVFSEQVVSEWSDPQIYENLKKGIKFENPEVELQVTL

SEQ ID NO: 16942 - protein, 198 aa, Acinetobacter junii; identical to SEQ ID NO: 16941
  REGION 1..198: note = tr|A0A2R4UP81|A0A2R4UP81_ACIJU 6-carboxytetrahydropterin synthase OS=Acinetobacter junii; OX = 40215 GN=DC346_07170 PE=4 SV=1

SEQ ID NO: 16943 - protein, 198 aa, unidentified
  source 1..198: note = Acinetobacter kookii
  REGION 1..198: note = tr|A0A1G6GUD4|A0A1G6GUD4_9GAMM 6-pyruvoyltetrahydropterin/6-carboxytetrahydropterin synthase OS=Acinetobacter kookii OX=1226327; GN = SAMN05421732_101267 PE=4 SV=1
MLIRKLFKFENAHIVRNCTSDRCKRSIHGHSYKVELLLKASRLDHGQMVYDFGLLKGVIKDIFDSFDHAICFWQHDDAEYIEACKKFSARWVSLPVSPSAEQFSRIFFYLAQQVLASTITQNGEGDVEVYSVIVHETDTGYAQSFIEDIENTQMGVLSLDQIVFSEQVQVEWADPKMYEKLQQGMKFQNPTVDLQVHI

SEQ ID NO: 16944 - protein, 198 aa, unidentified
  source 1..198: note = Acinetobacter kyonggiensis
  REGION 1..198: note = tr|A0A1H3IAD7|A0A1H3IAD7_9GAMM 6-pyruvoyltetrahydropterin/6-carboxytetrahydropterin synthase OS=Acinetobacter kyonggiensis OX=595670; GN = SAMN05421643_10642 PE=4 SV=1
MLIRKLFKFENAHIVRNCTSDRCKRSIHGHSYKVELLLKASKLDHGQMVYDFGLLKGVIKDIFDSFDHAICFWQHDDAEYIDACKKFSARWVSLPVSPSAEQFSRIFFYLAQQVLASTITQNGEGDVEVYSVIVHETDTGYAQSFVEDIENEQMGVLSLEQIVFSEQVQAEWADSTMYKKLQQGIKFQNPSVDLQVKI

SEQ ID NO: 16945 - protein, 198 aa, unidentified
  source 1..198: note = Acinetobacter lactucae
  REGION 1..198: note = tr|A0A3R9RIF4|A0A3R9RIF4_9GAMM 6-carboxytetrahydropterin synthase OS=Acinetobacter lactucae OX=1785128 GN=EA763_07255 PE=4 SV=1
MLIRKLFKFENAHVVRNCTSDRCKRSIHGHSYKVELLLKASKLDHGQMVYDFGLLKGVIKDLFDSFDHAICFWEKDDPQYIDACQTFSARWISLPVSPSAEQFSRIFFYLAQQVLQSTVTQNGEGDVEVYSVIVHETDTGYAQSFIEDIQNEQMGILSLDRIVFSEQIQIEWANPRMYEDLKTGIKFNNPQVDLQVEV

SEQ ID NO: 16946 - protein, 198 aa, unidentified
  source 1..198: note = Acinetobacter lactucae
  REGION 1..198: note = tr|A0A151YU94|A0A151YU94_9GAMM 6-carboxy-5,6,7,8-tetrahydropterin synthase; OS = Acinetobacter lactucae OX=1785128 GN=AWW73_10895 PE=4; SV = 1
MLIRKLFKFENAHVVRNCTSDRCKRSIHGHSYKVELLLKASKLDHGQMVYDFGLLKGVIKDLFDSFDHAICFWEKDDSQYIDACQTFSARWISLPVSPSAEQFSRIFFYLAQQVLQSTVTQNGEGDVEVYSVIVHETDTGYAQSFIEDIQNEQMGILSLDGIVFSEQIQIEWANPQMYEDLKKGVKFNNPQVDLQVEV

SEQ ID NO: 16947 - protein, 198 aa, unidentified
  source 1..198: note = Acinetobacter larvae
  REGION 1..198: note = tr|A0A1B2LYG2|A0A1B2LYG2_9GAMM 6-carboxytetrahydropterin synthase QueD OS=Acinetobacter larvae OX=1789224 GN=BFG52_06125 PE=4 SV=1
MLIRKLFKFENAHIVRNCTSDRCKRSIHGHSYKVELLLKANKLDHGQMVYDFGLLKGVIKDLIDSFDHAICFWQNDDPAYIDACKTFSARWVSLPVSPSAEQFSRIFFFLVQQILQATVTQNGEGDVDVYSVIVHETDTGYAQSFLEDIENQQMGVLALDQIIFSEQIKAEWADSQMYHKLQQGIKFENPTVDLQVDI

SEQ ID NO: 16948 - protein, 198 aa, Acinetobacter lwoffii
  REGION 1..198: note = tr|N9G4N5|N9G4N5_ACILW Uncharacterized protein; OS = Acinetobacter lwoffii ATCC 9957 = CIP 70.31 OX=1311804; GN = F924_00696 PE=4 SV=1
MLIRKLFKFENAHIVRNCTSDRCKRSIHGHSYKVELLLKASKLDHGQMVYDFGLLKGVIKDFFDSFDHAICFWQNDDPEYIQACKNFSARWVSLPVSPSAEQFSRIFFFLAQQVLASTVTQNGEGDVEVYSVIVHETDTGYAQSFLEDIQNEQMGILSLEQLEFSEQVQAEWTDPDMFAKLKQGTPFHNPTVDLQVQI

SEQ ID NO: 16949 - protein, 198 aa, Acinetobacter lwoffii; identical to SEQ ID NO: 16948
  REGION 1..198: note = tr|D0ST92|D0ST92_ACILW Uncharacterized protein; OS = Acinetobacter lwoffii SH145 OX=575588; GN = HMPREF0017_00516 PE=4 SV=1

SEQ ID NO: 16950 - protein, 198 aa, unidentified
  source 1..198: note = Acinetobacter marinus
  REGION 1..198: note = tr|A0A1G6GII2|A0A1G6GII2_9GAMM 6-pyruvoyltetrahydropterin/6-carboxytetrahydropterin synthase OS=Acinetobacter marinus OX=281375; GN = SAMN05421749_10125 PE=4 SV=1
MLIRKLFKFENAHIVRNCSSDRCKRSIHGHSYKVEVLLQANRLDHGQMVYDFGLMKGIIKDLIDSFDHAITFWDKDDADYVTACKNFSARWIALPVSPSAEQFSRVFFFLVDAVLKHTNMQNGEGDVTLHSVIVHETDTGYAQCFREDIENVQMGELSLAEIVFSEQVKNEWAMPDMYDRLKNGELFDNPLVDLQVKV

SEQ ID NO: 16951 - protein, 199 aa, unidentified
  source 1..199: note = Acinetobacter nectaris
  REGION 1..199: note = tr|V2TR41|V2TR41_9GAMM Uncharacterized protein; OS = Acinetobacter nectaris CIP 110549 OX=1392540; GN = P256_00486 PE=4 SV=1
MLIRKLFKFENAHIVRNCTSDRCKRSIHGHSYKVELLLKANKLDHGQMVYDFGLLKGIIKDLFDSFDHAICFWDKDSKDYIQACQQFSARWVSLPVSPSAEQFSRIFFYLAQQVLNATKTQNGEGDVEVYSVIVHETDTGYAQSFIEDIENAQMGILSLNEIQFSEQIKIEWNDSEMYEKLKTGQIFNNPEVELQVQTS

SEQ ID NO: 16952 - protein, 198 aa, Acinetobacter nosocomialis
  REGION 1..198: note = tr|A0A1Y5NZV9|A0A1Y5NZV9_ACINO 6-pyruvoyl tetrahydrobiopterin synthase OS=Acinetobacter nosocomialis P020 OX=1285584 GN=H125_00490 PE=4 SV=1
MLIRKLFKFENAHVVRNCTSDRCKRSIHGHSYKVELLLKASKLDHGQMVYDFGLLKGVIKDLFDSFDHAICFWEKDDPQYIDACKTFSARWISLPVSPSAEQFSRIFFYLAQQVLKSTITQNGEGDVEVYSVIVHETDTGYAQSFLEDIQNEQMGLLNLEGIVFSEQVQSEWTDPQMYENLKQGIKFQNPHVNLQVEV

SEQ ID NO: 16953 - protein, 198 aa, Acinetobacter nosocomialis
  REGION 1..198: note = tr|A0A0E2G878|A0A0E2G878_ACINO Uncharacterized protein OS=Acinetobacter nosocomialis NIPH 386 OX=1217985; GN = F958_02789 PE=4 SV=1
MLIRKLFKFENAHVVRNCTSDRCKRSIHGHSYKVELLLKASKLDHGQMVYDFGLLKGVIKDLFDSFDHAICFWEKDDPQYIDACKTFSARWISLPVSPSAEQFSRIFFYLAQQVLKSTITQNGEGDVEVYSVIVHETDTGYAQSFLEDIQNEQMGLLNLEGIVFSEQVQSEWTDPQMYENLKQGIKFQNPYVNLQVEV

SEQ ID NO: 16954 - protein, 198 aa, unidentified
  source 1..198: note = Acinetobacter oleivorans
  REGION 1..198: note = tr|A0A2T5QLD3|A0A2T5QLD3_9GAMM 6-carboxytetrahydropterin synthase QueD OS=Acinetobacter oleivorans OX=1148157 GN=DBL02_01700 PE=4 SV=1
MLIRKLFKFENAHVVRNCTSDRCKRSIHGHSYKVELLLKASKLDHGQMVYDFGLLKGVIKDLIDSFDHAICFWEKDDSQYIDACQTFSARWISLPVSPSAEQFSRIFFYLAQQVLQSTITQNGEGDVEVYSVIVHETDTGYAQSFIEDIQNEQMGVLSLDGIVFSEQIQIEWANPQMYEDLKNGIKFNNPQVDLQVEV

SEQ ID NO: 16955 - protein, 198 aa, unidentified
  source 1..198: note = Acinetobacter oleivorans
  REGION 1..198: note = tr|D8JL11|D8JL11_ACISD Putative 6-pyruvoyl tetrahydrobiopterin synthase OS=Acinetobacter oleivorans (strain JCM 16667 / KCTC 23045 / DR1) OX=436717; GN = AOLE_10810 PE= 4 SV=1
MLIRKLFKFENAHVVRNCTSDRCKRSIHGHSYKVELLLKASKLDHGQMVYDFGLLKGVIKDLIDSFDHAICFWEKDDSQYIDACQTFSARWISLPVSPSAEQFSRIFFYLAQQVLQSTITQNGEGDVEVYSVIVHETDTGYAQSFIEDIQNEQMGILSLDGIIFSEQIQIEWANPQMYEDLKNGIKFNNPQVDLQVEV

SEQ ID NO: 16956 - protein, 198 aa, Acinetobacter parvus
  REGION 1..198: note = tr|N8Q2Y2|N8Q2Y2_9GAMM Uncharacterized protein; OS = Acinetobacter parvus NIPH 1103 OX=1217671 GN=F989_01868; PE = 4 SV=1
MLIRKLFKFENAHIVRNCTSDRCKRSIHGHSYKVELLLKASKLDHGQMVYDFGLLKGVIKELFDSFDHAICYWQKDDPEYIAACQTFSARWIALPVSPSAEQFSRIFFYLAQQVLHSTTTQNGEGDVEVYSVIVHETDTGYAQSFIEDIENEQMGILNLDQIIFSEQVQAEWSDPQMYENLKKGIRFQNPNVELQVNI

SEQ ID NO: 16957 - protein, 198 aa, Acinetobacter parvus
  REGION 1..198: note = tr|N8RQ50|N8RQ50_9GAMM Uncharacterized protein; OS = Acinetobacter parvus DSM 16617 = CIP 108168 OX=981333; GN = F988_01491 PE=4 SV=1
MLIRKLFKFENAHIVRNCTSDRCKRSIHGHSYKVELLLKASKLDHGQMVYDFGLLKGVIKELFDSFDHAICYWQKDDPEYIAACQTFSARWIALPVSPSAEQFSRIFFYLAQQVLHSTTTQNGEGDVEVYSVIVHETDTGYAQSFIEDIENEQMGILNLDQIIFSEQVQAEWSDPQMYENLKNGIKFQNPNVELQVNI

SEQ ID NO: 16958 - protein, 198 aa, unidentified
  source 1..198: note = Acinetobacter piscicola
  REGION 1..198: note = tr|A0A4Q4H2U5|A0A4Q4H2U5_9GAMM 6-carboxytetrahydropterin synthase OS=Acinetobacter piscicola OX=2006115 GN=EWP19_02810 PE=4 SV=1
MLIRKLFKFENAHIVRNCTSDRCKRSIHGHSYKVELLLKASKLDHGQMVYDFGLLKGVIKDIFDSFDHAICFWQDDSAEYIQACKTFSARWVALPVSPSAEQFSRIFFFLAQQVLQSTITQNGEGDVEVYSVIVHETDTGYAQSFIEDIENEQMGILSLEDIVFSEQVQAEWHDPEMYENLKKGLKFQNPTVDLQVKL

SEQ ID NO: 16959 - protein, 198 aa, Acinetobacter pittii; identical to SEQ ID NO: 16945
  REGION 1..198: note = tr|R8YJ92|R8YJ92_ACIPI Uncharacterized protein; OS = Acinetobacter pittii ANC 4050 OX=1217691 GN=F931_01148; PE = 4 SV=1

SEQ ID NO: 16960 - protein, 198 aa, Acinetobacter pittii; identical to SEQ ID NO: 16917
  REGION 1..198: note = tr|A0A143IZ12|A0A143IZ12_ACIPI 6-carboxytetrahydropterin synthase OS=Acinetobacter pittii; OX = 48296 GN=BFR81_18425 PE=4 SV=1

SEQ ID NO: 16961 - protein, 198 aa, unidentified
  source 1..198: note = Acinetobacter populi
  REGION 1..198: note = tr|A0A1Z9YZ46|A0A1Z9YZ46_9GAMM 6-carboxytetrahydropterin synthase QueD OS=Acinetobacter populi OX=1582270 GN=CAP51_07005 PE=4 SV=1
MIIRKLFKFENAHIVRNCTSDRCKRSIHGHSYKVEILLEAHRLDHGQMVYDFGLLKGVIKDLIDSFDHAITFWNKDDASYIEACKTFSARWISLPVSPSAEQFSRIFFFLASEVLKHTQTQNGEGDVKINSVIVHETDTGYAQCFLEDIENPQMGILSLDQIEFSEQVQAEWSSVDLYDRLKNGQIFENPMVELQVKL

SEQ ID NO: 16962 - protein, 198 aa, unidentified
  source 1..198: note = Acinetobacter pragensis
  REGION 1..198: note = tr|A0A151Y373|A0A151Y373_9GAMM 6-carboxy-5,6,7,8-tetrahydropterin synthase; OS = Acinetobacter pragensis OX=1806892 GN=AZH43_09915 PE=4; SV = 1
MLIRKLFKFENAHIVRNCTSDRCKRSIHGHSYKVELLLKASKLDHGQMVYDFGLLKGVIKDLYDSFDHAICFWQQDNADYIHACKNFSARWVSLPVSPSAEQFSRIFFYLAQQVLASTETQNGEGDVEVYSVIVHETDTGYAQSFAEDIENAQMGLLNLEQIEFSEQVKEEWADPEMFDKLIRGIKFQNPSVDLQVKL

SEQ ID NO: 16963 - protein, 198 aa, unidentified
  source 1..198: note = Acinetobacter proteolyticus
  REGION 1..198: note = tr|A0A1E7R8C7|A0A1E7R8C7_9GAMM 6-carboxytetrahydropterin synthase OS=Acinetobacter proteolyticus OX=1776741 GN=BJD20_13925 PE=4 SV=1
MLIRKLFKFENAHIVRNCTSDRCKRSIHGHSYKVELLLKASKLDHGQMVYDFGLLKGVIKELYDSFDHAICFWQKDDPAYIDACKTFSARWIALPVSPSAEQFSRIFFYLAQQVLNSTTTQNGEGDVEVYSVIVHETDTGYAQSFQEDIDNAQMGALSLDQIVFSEQVQAEWSDVQMYENLKKGIKFQNPNVELQVNI

SEQ ID NO: 16964 - protein, 198 aa, unidentified
  source 1..198: note = Acinetobacter puyangensis
  REGION 1..198: note = tr|A0A240E883|A0A240E883_9GAMM 6-pyruvoyltetrahydropterin/6-carboxytetrahydropterin synthase OS=Acinetobacter puyangensis OX=1096779; GN = SAMN05421731_102274 PE=4 SV=1
MIIRKLFKFENAHIVRNCTSDRCKRSIHGHSYKVEILLEAHRLDHGQMVYDFGLLKGVIKDLIDSFDHAITFWNKDDAAYIDACKAFSARWISLPVSPSAEQFSRIFFFLASEVLKHTQTQNGEGDVKINSVIVHETDTGYAQCFLEDIENPQMGILSLDEIEFSEQVQTEWSSVDLYDRLKNGQIFENPMVELQVKL

SEQ ID NO: 16965 - protein, 198 aa, unidentified
  source 1..198: note = Acinetobacter qingfengensis
  REGION 1..198: note = tr|A0A1E7R5S5|A0A1E7R5S5_9GAMM 6-carboxytetrahydropterin synthase QueD OS=Acinetobacter qingfengensis OX=1262585 GN=BJI46_13390 PE=4 SV=1
MIIRKLFKFENAHIVRNCTSDRCKRSIHGHSYKVEILLQANRLDHGQMVYDFGLLKGVIKDFIDSFDHAITFWNKDSAEYIAACKKFSARWIALPVSPSAEQFSRVFFFLVAEVLKQTQTQNGEGDVTVHSVIVHETDTGYAQCFLEDIENEQMGILTLQEIEFSEQVKAEWSRADLYDRLKSGQSFINPVVELQVQL

SEQ ID NO: 16966 - protein, 198 aa, Acinetobacter radioresistens
  REGION 1..198: note = tr|A0A3F3H476|A0A3F3H476_ACIRA Uncharacterized protein OS=Acinetobacter radioresistens NIPH 2130; OX = 1217674 GN=F940_00392 PE=4 SV=1
MLIRKLFKFENAHIVRNCTSDRCKRSIHGHSYKVELLLKANRLDHGQMVYDFGLLKGVIKDLFDSFDHAICFWQNDDQEYIAACKKFSARWIALPVSPSAEQFSRIFFFLAQQVLNSTVTQNGEGDVEVYSVIVHETDTGYAQSFQEDIENKQMGLLQLEQIEFSEQVQQEWADPTMYERLKQGLKFENPGVELQVKL

SEQ ID NO: 16967 - protein, 198 aa, Acinetobacter radioresistens
  REGION 1..198: note = tr|A0A2T1IZV0|A0A2T1IZV0_ACIRA 6-carboxytetrahydropterin synthase OS=Acinetobacter radioresistens OX=40216 GN=C7E16_07995 PE=4 SV=1
MLIRKLFKFENAHIVRNCTSDRCKRSIHGHSYKVELLLKANRLDHGQMVYDFGLLKGVIKDLFDSFDHAICFWQNDDQEYIAACKKFSARWIALPVSPSAEQFSRIFFFLAQQVLNSTVTQNGEGDVEVYSVIVHETDTGYAQSFQEDIENRQMGLLQLEQIEFSEQVQQEWADPTMYERLKQGLKFENPGVELQVKL

SEQ ID NO: 16968 - protein, 198 aa, Acinetobacter rudis
  REGION 1..198: note = tr|S3P645|S3P645_9GAMM 6-pyruvoyl tetrahydrobiopterin synthase OS=Acinetobacter rudis CIP 110305 OX=421052 GN=F945_01673 PE=4 SV=1
MLIRKLFKFENAHIVRNCTSDRCKYSIHGHSYKVELLLKASKLDHGQMVYDFGLLKGMIKELIDSFDHAICFWQQDDMTYIEACKTFSARWIALPVSPSAEQLSRVLFFLVQQLLQATVTKNGEGDVEVYSVIVHETDTGYAQSFIEDIENIQMGILSLDQIHFSDQVMAEWTDSNMYQKLQNGLQFINPEVELQVKL

SEQ ID NO: 16969 - protein, 158 aa, Acinetobacter rudis
  REGION 1..158: note = tr|S3MU29|S3MU29_9GAMM 6-pyruvoyl tetrahydrobiopterin synthase OS=Acinetobacter rudis CIP 110305 OX=421052 GN=F945_02820 PE=4 SV=1
MDKHIKHKYLSTKTFGHDLGISCAFRQWRAVHSHCSKIHGYALSFHFVFEAEQLDERNWVMDFGGFKALKDKVLELFDHKLVVAEDDPMLSEFKKLDGLGMADVVVLPAVGCEMFAHYVFEMAQDVLQVELERGRVKLKSVEVREHGANSASYLGNEL

SEQ ID NO: 16970 - protein, 198 aa, Acinetobacter schindleri
  REGION 1..198: note = tr|N9AF71|N9AF71_9GAMM Uncharacterized protein; OS = Acinetobacter schindleri CIP 107287 OX=1217988; GN = F955_01547 PE=4 SV=1
MLIRKLFKFENAHIVRNCTSDRCKRSIHGHSYKVELLLKASKLDHGQMVYDFGLLKGVIKDFFDSFDHAICFWQDDNPEYIQACKNFSARWVSLPVSPSAEQFSRIFFFLAQQVLASTITQNGEGDVEVYSVIVHETDTGYAQSFLEDIENEQMGLLNLDQIEFSEQVQAEWTDPDMFSKLKQGIPFHNPTVDLQVKV

SEQ ID NO: 16971 - protein, 198 aa, Acinetobacter schindleri
  REGION 1..198: note = tr|A0A2S1FA97|A0A2S1FA97_9GAMM 6-carboxytetrahydropterin synthase OS=Acinetobacter schindleri OX=108981 GN=C0119_00945 PE=4 SV=1
MLIRKLFKFENAHIVRNCTSDRCKRSIHGHSYKVELLLKASKLDHGQMVYDFGLLKGVIKDFFDSFDHAICFWQDDNPEYIQACKNFSARWVSLPVSPSAEQFSRIFFFLAQQVLASTITQNGEGDVEVYSVIVHETDTGYAQSFLEDIENEQMGLLNLDQIEFSEQVQAEWTDPDMFSKLKQGVPFHNPTVDLQVKV

SEQ ID NO: 16972 - protein, 198 aa, unidentified
  source 1..198: note = Acinetobacter seifertii
  REGION 1..198: note = tr|N8S358|N8S358_9GAMM 6-carboxy-5,6,7,8-tetrahydropterin synthase; OS = Acinetobacter seifertii OX=1530123 GN=CVD06_05260 PE=4; SV = 1
MLIRKLFKFENAHVVRNCTSDRCKRSIHGHSYKVELLLKASKLDHGQMVYDFGLLKGVIKDLFDSFDHAICFWEKDDPQYIDACKTFSARWISLPVSPSAEQFSRIFFFLAQQVLQSTVTQNGEGDVEVYSVIVHETDTGYAQSFLEDIQNEQMGLLNLEGIVFSEQVQSEWTDPQMYENLKQGIKFHNPHVNLQVEV

SEQ ID NO: 16973 - protein, 198 aa, unidentified
  source 1..198: note = Acinetobacter seifertii
  REGION 1..198: note = tr|A0A5E9PNR7|A0A5E9PNR7_9GAMM 6-carboxytetrahydropterin synthase OS=Acinetobacter seifertii OX=1530123 GN=E2R16_01805 PE=4 SV=1
MLIRKLFKFENAHVVRNCTSDRCKRSIHGHSYKVELLLKASKLDHGQMVYDFGLLKGVIKDLFDSFDHAICFWEKDDPQYIDACKTFSARWISLPVSPSAEQFSRIFFFLAQQVLQSTVTQNGEGDVEVYSVIVHETDTGYAQSFLEDIQNEQMGLLNLEGIVFSEQVQSEWNDPQMYENLKQGVKFHNPHVNLQVEV

SEQ ID NO: 16974 - protein, 228 aa, Acinetobacter soli
  REGION 1..228: note = tr|N9BVP9|N9BVP9_9GAMM Uncharacterized protein; OS = Acinetobacter soli NIPH 2899 OX=1217677 GN=F950_02832; PE = 4 SV=1
MLIVSNVKRNVMPDELIYNVRSSCRSLIGRMLIRKLFKFENAHIVRNCTSDRCKRSIHGHSYKVELLLKANKLDHGQMVYDFGLLKGVIKELYDSFDHAICFWQDDSPEYIQACKQFSARWVSLPVSPSAEQFSRIFFYLAQQVLNSTITQNGEGDVEVYSVIVHETDTGYAQSFIEDIENPQMGQLHLQDIIFSEQVQTEWTDALMYEKLKQGNRFKNPQVELQVQV

SEQ ID NO: 16975 - protein, 198 aa, Acinetobacter soli
  REGION 1..198: note = tr|A0A1P8EFN3|A0A1P8EFN3_9GAMM 6-carboxytetrahydropterin synthase OS=Acinetobacter soli; OX = 487316 GN=BEN76_02815 PE=4 SV=1
MLIRKLFKFENAHIVRNCTSDRCKRSIHGHSYKVELLLKANKLDHGQMVYDFGLLKGVIKELYDSFDHAICFWQDDSPEYIQACKQFSARWVSLPVSPSAEQFSRIFFYLAQQVLNSTITQNGEGDVEVYSVIVHETDTGYAQSFIEDIENPQMGQLHLQDIIFSEQVQTEWTDALMYEKLKQGNRFKNPQVELQVQV

SEQ ID NO: 16976 - protein, 198 aa, Acinetobacter sp.
  REGION 1..198: note = tr|A0A241UWF6|A0A241UWF6_9GAMM 6-carboxytetrahydropterin synthase QueD OS=Acinetobacter sp. ANC 4204 OX=1977884 GN=B9T36_14270 PE=4 SV=1
MLIRKLFKFENAHIVRNCTSDRCKRSIHGHSYKVELLLKASKLDHGQMVYDFGLLKGVIKDLYDSFDHAICFWQNDDPEYIQACKTFSARWVSLPVSPSAEQFSRIFFYLAQQVLASTVTQNGEGDVEVYSVIVHETDTGYAQSFIEDIENEQMGLLALNEIEFSEQIQAEWNDTEMYSRLKEGIKFHNPNVELQVKL

SEQ ID NO: 16977 - protein, 198 aa, Acinetobacter sp.; identical to SEQ ID NO: 16935
  REGION 1..198: note = tr|A0A3L9M483|A0A3L9M483_9GAMM 6-carboxytetrahydropterin synthase OS=Acinetobacter sp. 2JN-4 OX=2479844 GN=EAH57_12105 PE=4 SV=1

SEQ ID NO: 16978 - protein, 198 aa, Acinetobacter tandoii
  REGION 1..198: note = tr|A0A515BG73|A0A515BG73_9GAMM 6-carboxytetrahydropterin synthase OS=Acinetobacter tandoii OX=202954 GN=FM020_09265 PE=4 SV=1
MLIRKLFKFENAHIVRNCTSDRCKRSIHGHSYKVELLLKASKLDHGQMVYDFGLLKGLIKDIFDSFDHAICFWQHDDPEYIQACQKFSARWVALPVSPSAEQFSRIFFFLAQQILALTETQNGEGDVEVYSVIVHETDTGYAQSFLEDIENAQMGVLSLDEIVFSEQVQSEWTDPQMYQKLKQGFKFQNPSVDLQVKI

SEQ ID NO: 16979 - protein, 198 aa, Acinetobacter tandoii
  REGION 1..198: note = tr|R9AUH9|R9AUH9_9GAMM 6-pyruvoyl tetrahydrobiopterin synthase OS=Acinetobacter tandoii DSM 14970 = CIP 107469 OX=1120927 GN=I593_02656 PE=4 SV=1
MLIRKLFKFENAHIVRNCTSDRCKRSIHGHSYKVELLLKASKLDHGQMVYDFGLLKGLIKDIFDSFDHAICFWQHDDLEYIQACQKFSARWVSLPVSPSAEQFSRIFFFLAQQILASTETQNGEGDVEVYSVIVHETDTGYAQSFIEDIENEQMGILRLDEIIFSEQVQSEWTDPFMYDKLKQGFKFQNPSVDLQVKI

SEQ ID NO: 16980 - protein, 198 aa, Acinetobacter tjernbergiae
  REGION 1..198: note = tr|V2V534|V2V534_9GAMM Uncharacterized protein; OS = Acinetobacter tjernbergiae DSM 14971 = CIP 107465; OX = 1120928 GN=F990_01403 PE=4 SV=1
MLIRKLFKFENAHIVRNCTSDRCKRSIHGHSYKVELLLKASRLDHGQMVYDFGLLKGVIKELFDSFDHAICYWQKDDPEYIQACETFSARWVALPVSPSAEQFSRIFFYLAQQVLASTMTQNGEGDVEVYSVIVHETDTGYAQSFLEDIENEQMGLLSLEQIIFSEQVQAEWSDPQMYENLKSGIKFQNPNVELQVNI

SEQ ID NO: 16981 - protein, 198 aa, Acinetobacter towneri
  REGION 1..198: note = tr|N9CCU1|N9CCU1_9GAMM Uncharacterized protein; OS = Acinetobacter towneri DSM 14962 = CIP 107472 OX=1120929; GN = F947_02742 PE=4 SV=1
MLIRKLFKFENAHIVRNCTSDRCKRSIHGHSYKVELLLKASKLDHGQMVYDFGLLKGVIKELFDAFDHAICFWEQDDPAYIQACKTFSARWVSLPVSPSAEQFSRIFFYLAQQVLASTITQNGEGDVEVYSVIVHETDTGYAQSFLEDIENAQMGLLNLDQIHFSEQVQTEWSDPQMYEKLKQGMTFQNPNVELQVKL

SEQ ID NO: 16982 - protein, 198 aa, Acinetobacter towneri
  REGION 1..198: note = tr|A0A1E8E1J8|A0A1E8E1J8_9GAMM 6-carboxytetrahydropterin synthase QueD OS=Acinetobacter towneri OX=202956 GN=BJN41_06915 PE=4 SV=1
MLIRKLFKFENAHIVRNCTSDRCKRSIHGHSYKVELLLKASKLDHGQMVYDFGLLKGVIKELFDAFDHAICFWDQDDPAYIQACKTFSARWVSLPVSPSAEQFSRIFFYLAQQVLASTITQNGEGDVEVYSVIVHETDTGYAQSFLEDIENAQMGLLSLDQIHFSEQVQTEWSDPQMYEKLKQGMTFQNPNVELQVKL

SEQ ID NO: 16983 - protein, 198 aa, Acinetobacter ursingii
  REGION 1..198: note = tr|N9C164|N9C164_9GAMM Uncharacterized protein; OS = Acinetobacter ursingii ANC 3649 OX=1257043; GN = F942_02038 PE=4 SV=1
MLIRKLFKFENAHIVRNCTSDRCKRSIHGHSYKVELILKASKLDHGQMVYDFGLLKGVIKELFDSFDHAICFWQNDSAEYIQACKTFSARWVALPVSPSAEQFSRIFFYLAQQVLKSTETQNGEGDVEVYSVIVHETDTGYAQSFLEDIQNTQMGELGLESIEFSEQVRLEWSDPEMYEQLKQGAKFQNPKVELQVTI

SEQ ID NO: 16984 - protein, 198 aa, Acinetobacter ursingii
  REGION 1..198: note = tr|N9SBW1|N9SBW1_9GAMM Uncharacterized protein; OS = Acinetobacter ursingii NIPH 706 OX=1217716; GN = F943_02112 PE=4 SV=1
MLIRKLFKFENAHIVRNCTSDRCKRSIHGHSYKVELILKASKLDHGQMVYDFGLLKGVIKELFDSFDHAICFWQDDSAEYIQACKTFSARWVALPVSPSAEQFSRIFFYLAQQVLKSTETQNGEGDVEVYSVIVHETDTGYAQSFLEDIQNTQMGELDLESIEFSEQVRLEWSDPEMYEQLKQGAKFQNPKVELQVTI

SEQ ID NO: 16985 - protein, 198 aa, unidentified
  source 1..198: note = Acinetobacter variabilis
  REGION 1..198: note = tr|N9MHE8|N9MHE8_9GAMM Uncharacterized protein; OS = Acinetobacter variabilis OX=70346 GN=F897_02416 PE=4; SV = 1
MLIRKLFKFENAHIVRNCTSDRCKRSIHGHSYKVELLLKASKLDHGQMVYDFGLLKGVIKDFFDSFDHAICFWQKDDPEYIQACKNFSARWVSLPVSPSAEQFSRIFFFLAQQVLTSTITQNGEGDVEVYSVIVHETDTGYAQSFLEDIQNEQMGPLSLEQIEFSEQVRAEWTDSEMFAKLKQGLPFHNPAVDLQVQP

SEQ ID NO: 16986 - protein, 198 aa, unidentified
  source 1..198: note = Acinetobacter variabilis
  REGION 1..198: note = tr|A0A427M775|A0A427M775_9GAMM 6-carboxytetrahydropterin synthase OS=Acinetobacter variabilis OX=70346 GN=EGK58_07130 PE=4 SV=1
MLIRKLFKFENAHIVRNCTSDRCKRSIHGHSYKVELLLKASKLDHGQMVYDFGLLKGVIKDFFDSFDHAICFWQKDDPEYIQACKNFSARWVSLPVSPSAEQFSRIFFFLAQQVLASTITQNGEGDVEVYSVIVHETDTGYAQSFLEDIQNEQMGPLSLEQIEFSEQVRAEWTDSEMFTKLKQGLPFHNPAVDLQVQP

SEQ ID NO: 16987 - protein, 198 aa, Acinetobacter venetianus
  REGION 1..198: note = tr|N8YKQ8|N8YKQ8_ACIVR Uncharacterized protein; OS = Acinetobacter venetianus (strain ATCC 31012 / CIP 110063 / RAG-1) OX=1191460 GN=F959_02089 PE=4 SV=1
MLIRKLFKFENAHIVRNCTSDRCKRSIHGHSYKVELLLKASKLDHGQMVYDFGLLKGVIKELFDSFDHAICFWQKDDAAYIDACKTFSARWISLPVSPSAEQFSRIFFFIAQQVLNSTSTQNGEGDVEVYSVIVHETDTGYAQSFQEDIDNEQMGLLDLEQIIFSEQVQSEWSDTQMYEKLKNGMKFQNPNVELQVNI

SEQ ID NO: 16988 - protein, 198 aa, Acinetobacter venetianus
  REGION 1..198: note = tr|A0A150HZD4|A0A150HZD4_9GAMM 6-pyruvoyl tetrahydropterin synthase OS=Acinetobacter venetianus; OX = 52133 GN=AVENLUH5627_01032 PE=4 SV=1
MLIRKLFKFENAHIVRNCTSDRCKRSIHGHSYKVELLLKASKLDHGQMVYDFGLLKGVIKELFDSFDHAICFWQKDDAAYIDACKTFSARWISLPVSPSAEQFSRIFFYLAQQVLNSTSTQNGEGDVEVYSVIVHETDTGYAQSFQEDIDNEQMGSLNLEQIIFSEQVQSEWSDTQMYEKLKKGVKFQNPNVELQVNI

SEQ ID NO: 16989 - protein, 198 aa, unidentified
  source 1..198: note = Acinetobacter wuhouensis
  REGION 1..198: note = tr|A0A385C6Y0|A0A385C6Y0_9GAMM 6-carboxytetrahydropterin synthase OS=Acinetobacter wuhouensis OX=1879050 GN=BEN71_11515 PE=4 SV=1
MLIRKLFKFENAHIVRNCTSDRCKRSIHGHSYKVELLLKASKLDHGQMVYDFGLLKGVIKEIFDSFDHAICFWQDDNPEYIQACKTFSARWVALPVSPSAEQFSRVFFYLAQQVLKSTITQNGEGDVEVYSVIVHETDTGYAQSFIEDIENEQMGLLSLDQIIFSEQVQAEWSDSEMYEKLKQGIQFQNPEVDLQVKI

SEQ ID NO: 16990 - protein, 198 aa, unidentified
  source 1..198: note = Acinetobacter wuhouensis
  REGION 1..198: note = tr|A0A3G2T1K0|A0A3G2T1K0_9GAMM 6-carboxytetrahydropterin synthase OS=Acinetobacter wuhouensis OX=1879050 GN=CDG68_10905 PE=4 SV=1
MLIRKLFKFENAHIVRNCTSDRCKRSIHGHSYKVELLLKASKLDHGQMVYDFGLLKGVIKEIFDSFDHAICFWQDDNPEYIQACKTFSARWVALPVSPSAEQFSRVFFYLAQQVLKSTITQNGEGDVEVYSVIVHETDTGYAQSFIEDIENEQMGVLSLDQIIFSEQVQAEWSDSEMYEKLKQGIQFQNPEVDLQVKI

SEQ ID NO: 16991 - protein, 132 aa, unidentified
  source 1..132: note = Actinoallomurus bryophytorum
  REGION 1..132: note = tr|A0A543CPK0|A0A543CPK0_9ACTN 6-pyruvoyl-tetrahydropterin synthase OS=Actinoallomurus bryophytorum OX=1490222 GN=FB559_4667 PE=4 SV=1
MFSVTVRDHVMVAHSFRGEVFGPAQRLHGATFVVDATFRRAELDADNIVVDIGRASEELGALLGELNYRNLDDEPDFKGVNTSTEFLAKVVADRLAERIHAGALGEGARGVAEIAVTLHESHVASAGFERPL

SEQ ID NO: 16992 - protein, 132 aa, unidentified
  source 1..132: note = Actinoalloteichus hoggarensis
  REGION 1..132: note = tr|A0A221W6L0|A0A221W6L0_9PSEU 6-carboxy-5,6,7,8-tetrahydropterin synthase; OS = Actinoalloteichus hoggarensis OX=1470176 GN=queD PE=3; SV = 1
MPAGTYRISRRFRFAAAHRLSGLPDGHKCRRVHGHTWTVRVTVVARDLVDPGWVVDFAALTPLGRYLDDNVDHRDLTEVLPVSPTAEHLAAWVADWCHRHLEPGRGWWLESVVVDEGGDSTVEFRPDREPAR

SEQ ID NO: 16993 - protein, 142 aa, Actinobacillus delphinicola
  REGION 1..142: note = tr|A0A448TSG1|A0A448TSG1_9PAST 6-carboxy-5,6,7,8-tetrahydropterin synthase; OS = Actinobacillus delphinicola OX=51161 GN=queD PE=3 SV=1
MFRISKEFSFDMAHLLDGHDGKCKNLHGHTYKLQVELSGNLVQDGPKSGMVADFSEVKTVVKGLLLDHMDHAFIYDENSEREQKIARLLQELNSKTFALPCRSTAENMAHFMFTQLKQHSQLPISAIRLWETPTSFCEYRED

SEQ ID NO: 16994 - protein, 54 aa, Actinobacillus equuli
  REGION 1..54: note = tr|A0A3S5EYR8|A0A3S5EYR8_ACTEU 6-pyruvoyl-tetrahydropterin synthase OS=Actinobacillus equuli OX=718 GN=NCTC9435_02475 PE=4 SV=1
MAHMLDGHDGKCQNLHGHTYKLQVEVSGDLVAEGAKRGMVMDYSDLKSVVNVKS

SEQ ID NO: 16995 - protein, 72 aa, Actinobacillus equuli
  REGION 1..72: note = tr|A0A448QTM3|A0A448QTM3_ACTEU 6-pyruvoyl-tetrahydropterin synthase OS=Actinobacillus equuli OX=718 GN=NCTC9435_02476 PE=4 SV=1
MDHAYIYDLNSDRESQVAKLLINLNSKVYGIPSRTTAEEMAKYMFEKLEKVGLPVSLIRLWETPTSYCEYTR

SEQ ID NO: 16996 - protein, 140 aa, Actinobacillus lignieresii
  REGION 1..140: note = tr|A0A380TZD1|A0A380TZD1_ACTLI 6-carboxy-5,6,7,8-tetrahydropterin synthase; OS = Actinobacillus lignieresii OX=720 GN=queD PE=3 SV=1
MFKIAKEFSFDMAHMLDGHDGKCQNLHGHTYKLQVEVSGDLVAEGAKRGMVMDYSDLKSVVKREILDPMDHAYIYDLNSDRESQVAKLLIDLNSKVYGIPSRTTAEEMAKYMFEKLEKVGLPVSLIRLWETPTSYCEYSR

SEQ ID NO: 16997 - protein, 140 aa, Actinobacillus minor
  REGION 1..140: note = tr|C5S1U2|C5S1U2_9PAST 6-carboxy-5,6,7,8-tetrahydropterin synthase; OS = Actinobacillus minor NM305 OX=637911 GN=AM305_01569; PE = 3 SV=1
MFKIAKEFSFDMAHMLDGHDGKCQNLHGHTYKLQVEVTGNLHLEGAKRGMVMDYSDLKALVKQHILDPMDHAFIYDLQSDKETKVAQLLMDLDSKVYGIPSRTTAEEMAKYIFEKLANVGLPVSLIRLWETPTSYCEYSR

SEQ ID NO: 16998 - protein, 140 aa, Actinobacillus pleuropneumoniae
  REGION 1..140: note = tr|A0A448TZL4|A0A448TZL4_ACTPL 6-carboxy-5,6,7,8-tetrahydropterin synthase; OS = Actinobacillus pleuropneumoniae OX=715 GN=queD PE=3 SV=1
MFKIAKEFSFDMAHMLDGHDGKCQNLHGHTYKLQVEVSGDLVAEGAKRSMVMDYADLKSVVKREILDPMDHAYIYDLNSERESQVAKLLVDLNSKVYGIPSRTTAEEMAKYMFEKLEKAGLPVSLIRLWETPTSYCEYSR

SEQ ID NO: 16999 - protein, 140 aa, Actinobacillus pleuropneumoniae
  REGION 1..140: note = tr|E0F4S4|E0F4S4_ACTPL 6-carboxy-5,6,7,8-tetrahydropterin synthase; OS = Actinobacillus pleuropneumoniae serovar 10 str. D13039; OX = 754259 GN=appser10_11490 PE=3 SV=1
MFKIAKEFSFDMAHMLDGHDGKCQNLHGHTYKLQVEVSGDLVAEGAKRSMVMDYADLKSVVKHEILDPMDHAYIYDLNSERESQVAKLLVDLNSKVYGIPSRTTAEEMAKYMFEKLEKVGLPVSLIRLWETPTSYCEYSR

SEQ ID NO: 17000 - protein, 139 aa, Actinobacillus porcinus
  REGION 1..139: note = tr|A0A4V0ILG3|A0A4V0ILG3_9PAST 6-carboxy-5,6,7,8-tetrahydropterin synthase; OS = Actinobacillus porcinus OX=51048 GN=queD PE=3 SV=1
MFKVSKEFSFDMAHILDGHDGKCQNLHGHTYKLQVEVSGDLVADGAKKGMVVDFTDVKRIVKAAILDPMDHAFIYDTTSERECKIAALLNELNSKTFGIPVRTTAEEMARFMFNRLKDQLPISAIRLWETPTSFCEYRE

SEQ ID NO: 17001 - protein, 140 aa, unidentified
  source 1..140: note = Actinobacillus porcitonsillarum
  REGION 1..140: note = tr|A0A2U8FJ29|A0A2U8FJ29_9PAST 6-carboxy-5,6,7,8-tetrahydropterin synthase; OS = Actinobacillus porcitonsillarum OX=189834 GN=queD PE=3; SV = 1
MFKIAKEFSFDMAHMLDGHDGKCQNLHGHTYKLQVEVTGNLHLDGAKRGMVMDYSDLKAVVKQHILDPMDHAFIYDLQSEKETKVAQLLMDLDSKVYGIPSRTTAEEMAKYMFEKLANVGLPVSLIRLWETPTSYCEYSR

SEQ ID NO: 17002 - protein, 139 aa, unidentified
  source 1..139: note = [Actinobacillus] rossii
  REGION 1..139: note = tr|A0A380TQ30|A0A380TQ30_9PAST 6-carboxy-5,6,7,8-tetrahydropterin synthase; OS = [Actinobacillus] rossii OX=123820 GN=queD PE=3 SV=1
MFKVSKEFSFDMAHILDGHDGKCQNLHGHTYKLQVEVSGNLVTEGAKKGMVVDFTDVKSIVKDAILDPMDHAFIYDTTSERECKIAALLNELNSKTFGIPVRTTAEEMARFMFNCLKDKLPISAIRLWETPTSFCEYRE

SEQ ID NO: 17003 - protein, 139 aa, Actinobacillus seminis
  REGION 1..139: note = tr|A0A263HEI1|A0A263HEI1_9PAST 6-carboxy-5,6,7,8-tetrahydropterin synthase; OS = Actinobacillus seminis OX=722 GN=queD PE=3 SV=1
MFKVSKEFSFDMAHILDGHDGKCQNLHGHTYKLQVEVSGDLVPDGAKKGMVVDFTDVKTVVKEAILDPMDHAFIYDTTSERECKIAALLNELNSKTFGIPVRTTAEEMARFMFNRLKGKLSISAIRLWETPTSFCEYRE

SEQ ID NO: 17004 - protein, 139 aa, Actinobacillus succinogenes
  REGION 1..139: note = tr|A6VQW7|A6VQW7_ACTSZ 6-carboxy-5,6,7,8-tetrahydropterin synthase; OS = Actinobacillus succinogenes (strain ATCC 55618 / DSM 22257 / 130Z) OX=339671 GN=Asuc_2018 PE=3SV=1
MFRVSKEFSFDMAHILDGHDGKCQNLHGHTYKLQVEVSGELYRQGPKKGMVMDFADLKEIVKSLILEPMDHAFIYDTNSERECKIAALLTELNSKTFGIPSRTTAEEMARFMFNRLKPELPLSAVRLWETPTSFCEYRE

SEQ ID NO: 17005 - protein, 140 aa, Actinobacillus suis; identical to SEQ ID NO: 16996
  REGION 1..140: note = tr|K0GC34|K0GC34_ACTSU 6-carboxy-5,6,7,8-tetrahydropterin synthase; OS = Actinobacillus suis H91-0380 OX=696748 GN=ASU2_05810; PE = 3 SV=1

SEQ ID NO: 17006 - protein, 152 aa, Actinobacillus ureae
  REGION 1..152: note = tr|E8KIR3|E8KIR3_9PAST Queuosine biosynthesis protein QueD OS=Actinobacillus ureae ATCC 25976 OX=887324; GN = queD PE=4 SV=1
MSTYQKKQAVKKMFKIAKEFSFDMAHMLDGHDGKCQNLHGHTYKLQVEVSGDLVAEGAKRGMVMDYSDLKSVVKREILDPMDHAYIYDLNSNRESQVAKLLIDLNSKVYGIPSRTTAEEMAKYMFEKLEKVGLPVSLIRLWETPTSYCEYSR

SEQ ID NO: 17007 - protein, 161 aa, unidentified
  source 1..161: note = Actinobacteria bacterium
  REGION 1..161: note = tr|A0A1F2UV07|A0A1F2UV07_9ACTN Uncharacterized protein OS=Actinobacteria bacterium GWC2_53_9 OX=1797195; GN = A2074_06485 PE=4 SV=1
MGKYSIHVEKDYLKFSSAHFLIFGEKCERLHGHNYAVSVDLEGELDDIGYIFDFTVLKEFAENHCNKLDHKTLIPSKNDLVAITEANGTVEVVFRDKRFIFPASDVLILPIKNCTAELLAFYLSEKIREDLLDMQADNITSITVGVEESPGQTAYYKRDML

SEQ ID NO: 17008 - protein, 136 aa, unidentified
  source 1..136: note = Actinobacteria bacterium
  REGION 1..136: note = tr|A0A1Q7CGQ9|A0A1Q7CGQ9_9ACTN Uncharacterized protein OS=Actinobacteria bacterium 13_2_20CM_2_66_6; OX = 1803492 GN=AUI15_32135 PE=4 SV=1
MTPSLRITRRATFAAAHILCRDDWSDEKNRDVFGACTTDHGHNYVIEVTVGGALDAETGMVVNLKHVDAVLRREFVDAVDHRHLNRDVDFLRGVIPTAENVALAAFQRLEPHFKPARLLKVRIVETENNAAEVAAD

SEQ ID NO: 17009 - protein, 132 aa, unidentified
  source 1..132: note = Actinocrispum wychmicini
  REGION 1..132: note = tr|A0A4R2IWN4|A0A4R2IWN4_9PSEU 6-pyruvoyl-tetrahydropterin synthase OS=Actinocrispum wychmicini OX=1213861 GN=EV192_11517 PE=4 SV=1
MFSLTVRDHVMVAHSFRGEVFGPAQRLHGATFVVDATFHRAELDADNIVVDIGLATQELRALLEYVNYRNLDEVPEFKGVNTSTEFLAKYVADQLAERVHGGKLGAGAKGIAEIEVTLRESHVAWAGYRRPL

SEQ ID NO: 17010 - protein, 150 aa, unidentified
  source 1..150: note = Actinocrispum wychmicini
  REGION 1..150: note = tr|A0A4R2IQW4|A0A4R2IQW4_9PSEU 6-pyruvoyltetrahydropterin/6-carboxytetrahydropterin synthase OS=Actinocrispum wychmicini OX=1213861; GN = EV192_11757 PE=4 SV=1
MHSITVRHNFETAHRLPHLPGKCESLHGHSWWAAVTLCASELPEDKVVVDFGTVKRLLRGWIDHHLDHGVLLGDGDPLVPVLADHGKVFVMAGWPTVEAVAELLGEVAGKLLSGILDTDEVHVAEVTVTETHLNQAMWRPPATPVPEAGP

SEQ ID NO: 17011 - protein, 221 aa, Actinokineospora auranticolor
  REGION 1..221: note = tr|A0A2S6GDP9|A0A2S6GDP9_9PSEU 6-pyruvoyl-tetrahydropterin synthase OS=Actinokineospora auranticolor OX=155976 GN=CLV40_12962 PE=4 SV=1
MQTTHDALPATGQVTITRTFGFSASHELRLLPEGHKCQRNHGHNYTVTATARMDGDGPIDWSPLADYLASTFDHRLINDQVTFHPTSELLVNHLVEWVRTNVETGSPITLVAMAVSETPSTSARWDGATNGITISKTFDYGQGEITLILGADEFDEFGFVTDFGDLKPFSTYLRKADTVSSAAALAHWFATNVEPMIQGRLVSVQIASATATERWERGDTL

SEQ ID NO: 17012 - protein, 177 aa, Actinokineospora cianjurensis
  REGION 1..177: note = tr|A0A421B212|A0A421B212_9PSEU 6-pyruvoyl tetrahydropterin synthase-like protein OS=Actinokineospora cianjurensis OX=585224 GN=CLV68_4481 PE=4 SV=1
MTDADTMIDSGRVTIGKRFEFSAGHELRTLGSGHRCFGNHAHNYVVTMTVVVADALDELGFVTDFATLAPFGRYLAGAFDHRLLNDMVPDVRGAGGVSGSVVHRADRTGDLRAVGVDAGRADPAIGGDMAPGLSAALPCTGAGRRPGSEQVLAERFVSVLELGWNLSPCLYVLTGAR

SEQ ID NO: 17013 - protein, 119 aa, Actinokineospora cianjurensis
  REGION 1..119: note = tr|A0A421BAK5|A0A421BAK5_9PSEU 6-carboxy-5,6,7,8-tetrahydropterin synthase; OS = Actinokineospora cianjurensis OX=585224 GN=CLV68_1894; PE = 3 SV=1
MEIFREFTFEAAHRLPNVPEGHKCARLHGHSYRVEVAVSGPVDPVAGWVMDFGDLKAAVRPVIAELDHYYLNDVAGLENPTSEVLAEWLWERLRATLPLSAITVRETCTSGCTYRGESH

SEQ ID NO: 17014 - protein, 118 aa, unidentified
  source 1..118: note = Actinokineospora spheciospongiae
  REGION 1..118: note = tr|W7IXJ8|W7IXJ8_9PSEU 6-carboxy-5,6,7,8-tetrahydropterin synthase; OS = Actinokineospora spheciospongiae OX=909613 GN=UO65_3542; PE = 3 SV=1
MEIFREFTFEAAHRLPNVPEGHKCARLHGHSYRVTVHVDAPVDPAPGWVMDFGDLKRAFKPLEDQLDHHYLNEVAGLENPTSENLAVWIWDRLLPALPDLSAVGVRETCTSGCIYRGR

SEQ ID NO: 17015 - protein, 119 aa, Actinokineospora terrae
  REGION 1..119: note = tr|A0A1H9NXP0|A0A1H9NXP0_9PSEU 6-carboxy-5,6,7,8-tetrahydropterin synthase; OS = Actinokineospora terrae OX=155974; GN = SAMN04487818_103188 PE=3 SV=1
MEIFREFTFEAAHRLPNVPEGHKCARLHGHSYRVEVAVSGPVDPVAGWVMDFGDLKAAVRPVIAELDHYYLNEIAGLENPTSEVLAEWLWGRLRATLPLSAITVRETCTSGCTYRGESH

SEQ ID NO: 17016 - protein, 132 aa, Actinomadura bangladeshensis
  REGION 1..132: note = tr|A0A4R4NEM5|A0A4R4NEM5_9ACTN 6-carboxytetrahydropterin synthase OS=Actinomadura bangladeshensis OX=453573 GN=E1284_34530 PE=4 SV=1
MFGITVRDHVMIAHSFRGEVFGPAQRLHGATYVVDATFRRAGLDPDGLVVDIGLATRELGEVLGGLNYRNLDDEPDFAGVNTSTEFLAKVIADRLADRVRAGALGENARGLSGLTVTLHESHVAWASYERDL

SEQ ID NO: 17017 - protein, 134 aa, Actinomadura chibensis
  REGION 1..134: note = tr|A0A5D0NET1|A0A5D0NET1_9ACTN 6-carboxytetrahydropterin synthase OS=Actinomadura chibensis OX=392828 GN=FXF69_29720 PE=4 SV=1
MFAITVRDHIMIAHSFQGEVFGPAQRLHGATFVVDATFRRAELDPDGIVVDIGLATRELGEVLGALNYRNLDDEPEFAGVNTSTEFLAKVVADRLADRVNAGALGEHARGLSGIAVTLRESHVAWATYERDLAP

SEQ ID NO: 17018 - protein, 132 aa, unidentified
  source 1..132: note = Actinomadura darangshiensis
  REGION 1..132: note = tr|A0A4R5AVP8|A0A4R5AVP8_9ACTN 6-carboxytetrahydropterin synthase OS=Actinomadura darangshiensis OX=705336 GN=E1293_27820 PE=4 SV=1
MFAITVRDHVMIAHSFRGEVFGPAQRLHGATYVVDATFRRADLDPDGLVVDIGLATGELGEVLGGLNYRNLDDEPDFAGVNTSTEFLAKVIADRLADHVHAGALGEHARGLSGIQVTLHESHVAWASYERDL

SEQ ID NO: 17019 - protein, 130 aa, Actinomadura echinospora
  REGION 1..130: note = tr|A0A1H6E821|A0A1H6E821_9ACTN 6-carboxy-5,6,7,8-tetrahydropterin synthase; OS = Actinomadura echinospora OX=1992 GN=SAMN04489712_1417; PE = 3 SV=1
MYEIAKSFGFSASHRLERLPEGHKCRRLHGHNYTVEIRLIAEELDEQDFVADFGELDRVGEWLRVAFDHRHLNDVLTVDPTCERLAEVIYEWCVRHLPSALTPMLHAVRVSESPSSWAEYRRAAETETAR

SEQ ID NO: 17020 - protein, 132 aa, Actinomadura echinospora
  REGION 1..132: note = tr|A0A1H6C343|A0A1H6C343_9ACTN 6-pyruvoyl-tetrahydropterin synthase OS=Actinomadura echinospora OX=1992 GN=SAMN04489712_108255 PE=4 SV=1
MFSVTVRDHLMIAHSFRGEVFGPAQRLHGATFVVDATFRRTELDTDNIVVDIGLAAQELKAVLAPLAYRNLDDEPDFAGTNTTTEFLAKVIADRLAERVHAGALGEQARGLDGITVTLHESHVAWAGFERRL

SEQ ID NO: 17021 - protein, 132 aa, Actinomadura hallensis
  REGION 1..132: note = tr|A0A543ICK1|A0A543ICK1_9ACTN 6-pyruvoyl-tetrahydropterin synthase OS=Actinomadura hallensis OX=337895 GN=FHX41_1930 PE=4 SV=1
MFGITVRDHVMIAHSFRGEVFGPAQRLHGATYVVDATFRRPELDPDGIVVDIGLATRELGEVLGALNYRNLDEEPDFAGVNTSTEFLAKVIADRLADRVHAGALGENARGLSGIKVTLHESHVAWASYERAL

SEQ ID NO: 17022 - protein, 132 aa, Actinomadura madurae
  REGION 1..132: note = tr|A0A1I4ZIT7|A0A1I4ZIT7_9ACTN 6-pyruvoyl-tetrahydropterin synthase OS=Actinomadura madurae OX=1993 GN=SAMN04489713_102222 PE=4 SV=1
MFALTVRDHVMIAHSFRGEVFGPAQRLHGATYVVDATFRRAELDPDGLVVDIGLATRELGGVLGGLNYRNLDDEPDFAGVNTSTEFLAKAIADRLADRIHAGELGENARGLSGLQVTLHESHVAWASYERDL

SEQ ID NO: 17023 - protein, 118 aa, Actinomadura mexicana
  REGION 1..118: note = tr|A0A238VVV1|A0A238VVV1_9ACTN 6-carboxy-5,6,7,8-tetrahydropterin synthase; OS = Actinomadura mexicana OX=134959 GN=SAMN06265355_102447; PE = 3 SV=1
MEIFREFTFEAAHRLPNVATGHKCARLHGHSYRVEVHVSGDVDPATGWLMDFAEIKVAFKPIQDQLDHYYLNEVPGLENPTSEVLARWIWDRLTHQLPLSAIVVRETCTSGCIYRGDT

SEQ ID NO: 17024 - protein, 132 aa, Actinomadura mexicana
  REGION 1..132: note = tr|A0A239A5P7|A0A239A5P7_9ACTN 6-pyruvoyl-tetrahydropterin synthase OS=Actinomadura mexicana OX=134959 GN=SAMN06265355_108183 PE=4 SV=1
MFAITVRDHVMIAHSFRGEVFGPAQHLHGATFVVDATFRRADLDPDGIVVDIGLATRELGVVLGALNYRNLDEEPDFAGINTSTEFLAKVIADRLADRVRAGALGANAAGLAGITVTLHESHVAWASYEREL

SEQ ID NO: 17025 - protein, 132 aa, Actinomadura meyerae
  REGION 1..132: note = tr|A0A239GFK7|A0A239GFK7_9ACTN 6-pyruvoyl-tetrahydropterin synthase OS=Actinomadura meyerae OX=240840 GN=SAMN05443665_1007132 PE=4 SV=1
MFGITVRDHVMIAHSFRGEVFGPAQRLHGATYVVDATFRRADLDTDGLVVDIGLATRALGEVLGGLNYRNLDDEPDFAGLNTSTEFLAKVIADRLADRVHAGALGENARGLSGITVTLHESHVAWASYERDL

SEQ ID NO: 17026 - protein, 164 aa, unidentified
  source 1..164: note = Actinomadura parvosata
  REGION 1..164: note = tr|A0A2P9IXC6|A0A2P9IXC6_9ACTN Queuosine biosynthesis QueD, PTPS-I OS=Actinomadura parvosata subsp. kistnae OX=1955414 GN=KIS93_12114 PE=4 SV=1
MTHRIRVRHNFETAHRLPHLGGKCHSLHGHSWWAEVVVEAEELSADQTIVEFGPFKKELRAFIDAHLDHGAMLGADDPLAPLLAAHGSKVYLFGQAPYVRDLPHPTVEAVAVLLARASEAILDGRERAAGARVGRVRVTETHVNAAEYVPGDGRRDPSLRRAAS

SEQ ID NO: 17027 - protein, 132 aa, Actinomadura pelletieri
  REGION 1..132: note = tr|A0A495QAY3|A0A495QAY3_9ACTN 6-pyruvoyl-tetrahydropterin synthase OS=Actinomadura pelletieri DSM 43383 OX=1120940 GN=BZB76_5976 PE=4 SV=1
MFAITVRDHVMIAHSFRGEVFGPAQRLHGATYVVDATFRRADLDPDGIVVDIGLATRELGEVLGALNYRNLDEEPDFAGINTSTEFLAKVVADRLADRVHAGALGEHARGLDGITVTLHESHVAWASYERAL

SEQ ID NO: 17028 - protein, 131 aa, Actinomadura sp.
  REGION 1..131: note = tr|A0A4R4XKE1|A0A4R4XKE1_9ACTN 6-carboxy-5,6,7,8-tetrahydropterin synthase; OS = Actinomadura sp. KC06 OX=2530369 GN=queD PE=3 SV=1
MYRIAKSFSFEASHQLTGLPDGHKCGRLHGHTYRVEVVLENANLTDCGFVVDFADLAPFKAYLDASLDHRHLNDVFDFAPTSENLAHHLYGWCRAELPCQVGELVAAVCLSETGSTWVEFRPEHAAGEGDH

SEQ ID NO: 17029 - protein, 132 aa, Actinomadura sp.
  REGION 1..132: note = tr|A0A4R4XDB8|A0A4R4XDB8_9ACTN 6-carboxytetrahydropterin synthase OS=Actinomadura sp. KC06 OX=2530369 GN=E1287_32540 PE=4 SV=1
MFAITVRDHVMIAHSFRGEVFGPAQRLHGATYVVDATFRRPGLDPDGIVVDIGLATRELGEVLAALNYRNLDDEPDFAGVNTSTEFLAKVIADRLASRVHAGALGEHARGLAGITVTLHESHVAWASYEREL

SEQ ID NO: 17030 - protein, 134 aa, unidentified
  source 1..134: note = Actinomadura syzygii
  REGION 1..134: note = tr|A0A5D0U3F8|A0A5D0U3F8_9ACTN 6-carboxytetrahydropterin synthase OS=Actinomadura syzygii; OX = 1427538 GN=FXF65_24850 PE=4 SV=1
MFAITVRDHIMIAHSFRGEVFGPAQRLHGATFVVDATFRRAELDPDGIVVDIGLATRELGDVLAALNYRNLDDEPEFAGVNTSTEFLAKVVADRLADRVRAGALGEHARGLSGIAVTLRESHVAWATYERDLTP

SEQ ID NO: 17031 - protein, 132 aa, Actinomadura viridilutea
  REGION 1..132: note = tr|A0A2P6U7E1|A0A2P6U7E1_9ACTN 6-pyruvoyl-tetrahydropterin synthase OS=Actinomadura viridilutea OX=58112 GN=CLV66_12419 PE=4 SV=1
MFSLTVRDHFMIAHSFRGEVFGPAQRLHGATYVVDATFRRAELDADNLVVDIGLATRELKQVLGALDYRNLDEEPEFAGVNTSTEFLAKVIADRLAERVHAGALGEGARGLSGIAVTLRESHIAWATYERAL

SEQ ID NO: 17032 - protein, 132 aa, Actinomycetospora cinnamomea
  REGION 1..132: note = tr|A0A2U1EVH5|A0A2U1EVH5_9PSEU 6-pyruvoyl-tetrahydropterin synthase OS=Actinomycetospora cinnamomea OX=663609 GN=C8D89_11934 PE=4 SV=1
MFAVTVRDHIMIAHSFAGEVFGPAQALHGATFVVDAAFRRAELDADGIVVDIGRATEELHTALEDLNYRNLDEHPEFAGVNTTTEFLAKVIADRLASRARDGRLGEGGRELAGITVTLHESHAASASYELAL

SEQ ID NO: 17033 - protein, 133 aa, Actinomycetospora succinea
  REGION 1..133: note = tr|A0A4R6UPH7|A0A4R6UPH7_9PSEU 6-pyruvoyl-tetrahydropterin synthase OS=Actinomycetospora succinea OX=663603 GN=EV188_11171 PE=4 SV=1
MFAVTVRDHIMIAHSFRGAVFGPAQALHGATFVVDATFRRAELDADNIVVDIGLATEQLHDALADLTYTNLDDHPEFAGVNTTTEYLAQVVARRLAERAGDGRLGPHADGLAGITVTLHESHVASASYELTLT

SEQ ID NO: 17034 - protein, 132 aa, Actinophytocola oryzae
  REGION 1..132: note = tr|A0A4R7V5Q8|A0A4R7V5Q8_9PSEU 6-pyruvoyl-tetrahydropterin synthase OS=Actinophytocola oryzae OX=502181 GN=CLV71_1137 PE=4 SV=1
MFSLTVRDHMMVAHSFTGEVFGPAQQLHGATFVVDATFSRTELDADNIVVDIGLATDQLKAVLGELNYRNLDELPEFTGVNTSTEFLAKVIADRLVDRVHNGSLGDSATGLAEISVTLKESHVAWATYRRSM

SEQ ID NO: 17035 - protein, 132 aa, unidentified
  source 1..132: note = Actinophytocola xanthii
  REGION 1..132: note = tr|A0A1Q8CS16|A0A1Q8CS16_9PSEU Uncharacterized protein OS=Actinophytocola xanthii OX=1912961; GN = BU204_12965 PE=4 SV=1
MFSLTVRDHMMVAHSFNGEVFGPAQRLHGATFVVDATFHRAELDPDNLVVDIGLASTQLAEILGELNYRNLDEVPEFAGVNTSTEFLAKVVADRLAERVRAGRLGEGARDLADIEVTLRESHVAWASYRRAL

SEQ ID NO: 17036 - protein, 132 aa, unidentified
  source 1..132: note = Actinoplanes atraurantiacus
  REGION 1..132: note = tr|A0A285J5Q1|A0A285J5Q1_9ACTN 6-pyruvoyl-tetrahydropterin synthase OS=Actinoplanes atraurantiacus OX=1036182 GN=SAMN05421748_116166 PE=4 SV=1
MFSVTVRDHIMIAHSFSGEVFGPAQKLHGATFVVDATFRRPELDDDNIVVDIGRASEELHAICGGLSYKNLDDDPAFKGVNTSTEFLAKVIADRLADKVAAGDLGPGAAGLTGISVTLHESHIAWASYERDL

SEQ ID NO: 17037 - protein, 133 aa, unidentified
  source 1..133: note = Actinoplanes awajinensis
  REGION 1..133: note = tr|A0A0X3VAA6|A0A0X3VAA6_9ACTN 6-pyruvoyl tetrahydropterin synthase OS=Actinoplanes awajinensis subsp. mycoplanecinus OX=135947 GN=ADL15_03135 PE=4 SV=1
MFSVTVRDHIMIAHSFSGEVFGPAQRLHGATFVVDATFRRPELDQDNIVVDIGLASEKLHAICGSLSYQNLDDDPEFAGVNTSTEFLAKLIADRLAVRIGAGELGPGATGLTGLEVTLHESHIAWASYERTLR

SEQ ID NO: 17038 - protein, 132 aa, Actinoplanes brasiliensis
  REGION 1..132: note = tr|A0A4R6J7S6|A0A4R6J7S6_9ACTN 6-pyruvoyl-tetrahydropterin synthase OS=Actinoplanes brasiliensis OX=52695 GN=C8E87_6609 PE=4 SV=1
MFSVTVRDHIMIAHSFTGEVYGPAQKLHGATFVVDATFRRPELDDDNIVVDIGAASQQLQAICGGLSYRNLDDEPDFLGINTSTEFLAKVIADRLAGKVAAGELGAGAAGLTGITVTLHESHIAWASYERDL

SEQ ID NO: 17039 - protein, 132 aa, Actinoplanes derwentensis
  REGION 1..132: note = tr|A0A1H2A2X4|A0A1H2A2X4_9ACTN 6-pyruvoyl-tetrahydropterin synthase OS=Actinoplanes derwentensis OX=113562 GN=SAMN04489716_3636 PE=4 SV=1
MFSVTVRDHIMIAHSFSGDVFGPAQRLHGATFVVDATFRRPELDDDNIVVDIGRASEQLHTICSGLSYRNLDDDPEFTGINTSTEFLAKVITDRLAVRAQAGELGPGATGLTGISVTLHESHIAWASYERTL

SEQ ID NO: 17040 - protein, 132 aa, Actinoplanes friuliensis
  REGION 1..132: note = tr|U5W2L4|U5W2L4_9ACTN Uncharacterized protein; OS = Actinoplanes friuliensis DSM 7358 OX=1246995; GN = AFR_19740 PE=4 SV=1
MFSVTVRDHIMIAHSFSGEVFGPAQKLHGATFVVDATFKRPELDADNIVVDIGRASEELHTICGTLSYRNLDDENEFAGQNTSTEFLAKVIADRLAGKAESGDLGVGARGLTGIAVTLHESHIAWASYERNL

SEQ ID NO: 17041 - protein, 132 aa, Actinoplanes italicus
  REGION 1..132: note = tr|A0A2T0K7C3|A0A2T0K7C3_9ACTN 6-pyruvoyl-tetrahydropterin synthase OS=Actinoplanes italicus OX=113567 GN=CLV67_11175 PE=4 SV=1
MFSVTVRDHIMIAHSFSGEVFGPAQRLHGATFVVDATFRRPELDDDNIVVDIGRASEQLHTICSGLSYRNLDDDPEFSGVNTSTEFLAKVIADRLAVRAQAGELGPGATGLTGLSVTLHESHIAWATYERDL

SEQ ID NO: 17042 - protein, 132 aa, unidentified
  source 1..132: note = Actinoplanes lutulentus
  REGION 1..132: note = tr|A0A327Z2D0|A0A327Z2D0_9ACTN 6-pyruvoyl-tetrahydropterin synthase OS=Actinoplanes lutulentus OX=1287878 GN=B0I29_11849 PE=4 SV=1
MFSVTVRDHIMIAHSFSGEVFGPAQRLHGATFVVDATFRRPELDDDNIVVDIGRASEQLHTICSGLSYRNLDDDPEFTGINTSTEFLAKVIADRLAVRAHAGELGAGASGLTGITITLHESHIAWASYEREL

SEQ ID NO: 17043 - protein, 132 aa, Actinoplanes missouriensis
  REGION 1..132: note = tr|I0HBC2|I0HBC2_ACTM4 Uncharacterized protein; OS = Actinoplanes missouriensis (strain ATCC 14538 / DSM 43046 / CBS 188.64 / JCM 3121 / NCIMB 12654 / NBRC 102363 / 431 ) OX=512565 GN=AMIS_50890 PE=4 SV=1
MFSVTVRDHIMIAHSFSGEVFGPAQRLHGATFVVDATFRRPELDDDNIVVDIGRASEQLHTICSTLSYRNLDDDPEFSGVNTSTEFLAKVIADRLAVRIQAGELGPGATGLTGLTVTLHESHIAWASYERDL

SEQ ID NO: 17044 - protein, 132 aa, Actinoplanes philippinensis
  REGION 1..132: note = tr|A0A1I2GZ09|A0A1I2GZ09_9ACTN 6-pyruvoyl-tetrahydropterin synthase OS=Actinoplanes philippinensis OX=35752 GN=SAMN05421541_107249 PE=4 SV=1
MFSVTVRDHIMIAHSFSGEVFGPAQRLHGATFVVDATFRRPELDDDNIVVDIGRASEQLHTICSGLSYRNLDDDPEFTGVNTSTEFLAKVIADRLAVRAQAGELGPGATGLTGLSVTLHESHIAWATYERDL

SEQ ID NO: 17045 - protein, 178 aa, Actinoplanes regularis
  REGION 1..178: note = tr|A0A238X6L9|A0A238X6L9_9ACTN 6-pyruvoyltetrahydropterin/6-carboxytetrahydropterin synthase OS=Actinoplanes regularis OX=52697; GN = SAMN06264365_10375 PE=4 SV=1
MAERTDELARDATWCEEEREGDCREIRQTAATTAVTVRHNFESAHRLPQLGGKCHNLHGHSWWVEATVAGEAGADGIVVEFHDLKSYLREWIDENLDHGAMLGSEDELVPALNAANSKVFVFGKADPSFGLSWPTVENVAELLSRVTAGYLQSRGWPGVRVSRVVVRETHVNAAEVSW

SEQ ID NO: 17046 - protein, 133 aa, Actinoplanes regularis
  REGION 1..133: note = tr|A0A239A3B8|A0A239A3B8_9ACTN 6-pyruvoyl-tetrahydropterin synthase OS=Actinoplanes regularis OX=52697 GN=SAMN06264365_10742 PE=4 SV=1
MFSVTVRDHIMIAHSFSGEVFGPAQRLHGATFLVDATFRRPELDDDNIVVDIGLASEQLRTICSGLSYRNLDDDPEFTGVNTSTEFLAKVIADRLAVRVTAGELGRGAAGLTGIQVTLHESHIAWASYERTLR

SEQ ID NO: 17047 - protein, 120 aa, Actinoplanes sp.
  REGION 1..120: note = tr|R4L378|R4L378_9ACTN 6-carboxy-5,6,7,8-tetrahydropterin synthase; OS = Actinoplanes sp. N902-109 OX=649831 GN=ptps PE=3 SV=1
MGFRITKKFEFSASHQLSGLAPDHQCARLHGHNYVIELELGADETELSPVGFVRDYGELSPFKVWLDATLDHRHLNDVLTENPTAENMAAWIYRTWSKEFSELTCVRVSETPKTWAEYRP

SEQ ID NO: 17048 - protein, 133 aa, Actinoplanes sp.
  REGION 1..133: note = tr|G8SBI1|G8SBI1_ACTS5 6-pyruvoyl tetrahydrobiopterin synthase OS=Actinoplanes sp. (strain ATCC 31044 / CBS 674.73 / SE50/110) OX=134676 GN=ACPL_3065; PE = 4 SV=1
MFSVTVRDHIMIAHSFSGEVFGPAQRLHGATFVVDATFRRPELDEDNIVVDIGLASEKLHTICSGLSYRNLDEDPEFTGVNTSTEFLAKVIADRLAVRISAGELGPGATGLTGLQVTLHESHIAWASYERTLR

SEQ ID NO: 17049 - protein, 120 aa, Actinoplanes teichomyceticus
  REGION 1..120: note = tr|A0A561WQZ4|A0A561WQZ4_ACTTI 6-carboxy-5,6,7,8-tetrahydropterin synthase; OS = Actinoplanes teichomyceticus OX=1867 GN=FHX34_1011273; PE = 3 SV=1
MTLRISKQFSFSASHQLDGLPANHQCGRLHGHNYLVEIELSAGREQLTAPGFVRDYGELSGFKGWVDEWLDHQHLNDVVKENPTAENLAIWIYEQWNPELPELTAVRVSETPKTWAEYRP

SEQ ID NO: 17050 - protein, 133 aa, Actinoplanes teichomyceticus
  REGION 1..133: note = tr|A0A561WLG2|A0A561WLG2_ACTTI 6-pyruvoyl-tetrahydropterin synthase OS=Actinoplanes teichomyceticus OX=1867 GN=FHX34_1021268 PE=4 SV=1
MFSVTVRDHIMIAHSFSGEVFGPAQRLHGATFVVDATFRRPELDEDNIVVDIGRASEQLRTICSGLSYRNLDDDPEFSGVNTSTEFLAKVIADRLAVRVCAGELGPGARGLTGIQVTLHESHIAWASYERTLR

SEQ ID NO: 17051 - protein, 132 aa, Actinoplanes utahensis
  REGION 1..132: note = tr|A0A0A6WX41|A0A0A6WX41_ACTUT 6-pyruvoyl tetrahydropterin synthase OS=Actinoplanes utahensis; OX = 1869 GN=MB27_41095 PE=4 SV=1
MFSVTVRDHIMIAHSFSGEVFGPAQRLHGATFVVDATFRRPELDDDNIVVDIGRASEQLHTICSGLSYRNLDDDPEFSGVNTSTEFLAKVIADRLAVRAQAGELGPGAGGLTGISVTLHESHIAWASYERTL

SEQ ID NO: 17052 - protein, 132 aa, Actinoplanes xinjiangensis; identical to SEQ ID NO: 17041
  REGION 1..132: note = tr|A0A316FAG6|A0A316FAG6_9ACTN 6-pyruvoyl-tetrahydropterin synthase OS=Actinoplanes xinjiangensis OX=512350 GN=BC793_11461 PE=4 SV=1

SEQ ID NO: 17053 - protein, 125 aa, Actinopolyspora erythraea
  REGION 1..125: note = tr|A0A099D5E0|A0A099D5E0_9ACTN 6-carboxy-5,6,7,8-tetrahydropterin synthase; OS = Actinopolyspora erythraea OX=414996 GN=CDG81_12230 PE=3; SV = 1
MLTISKEFRFSASHVLSNLPEGHQCGRMHGHNYLVVIELSAAPEDLDSAGFVRDFGELSVVKKWLDDNFDHRHLNDVMGGVNPTAENISKWIYENWKGEIPELSAVCVSETPSTWARYHPSPRPA

SEQ ID NO: 17054 - protein, 125 aa, Actinopolyspora xinjiangensis
  REGION 1..125: note = tr|A0A1H0S2H8|A0A1H0S2H8_9ACTN 6-carboxy-5,6,7,8-tetrahydropterin synthase; OS = Actinopolyspora xinjiangensis OX=405564; GN = SAMN04487905_103330 PE=3 SV=1
MLTISKEFRFSASHVLGNLPEGHQCGRMHGHNYLVVIELSAAPEDLDSAGFVRDFGELSVVKKWLDDNFDHRHLNDVMGGMNPTAENISKWIYENWKEEIPELSAVCVSETPSTWARYHPSPSPA

SEQ ID NO: 17055 - protein, 118 aa, Actinosynnema pretiosum
  REGION 1..118: note = tr|A0A290Z103|A0A290Z103_9PSEU 6-carboxy-5,6,7,8-tetrahydropterin synthase; OS = Actinosynnema pretiosum OX=42197 GN=queD PE=3 SV=1
MELFREFRFEAAHRLPNVPEGHKCARLHGHSYLVVVQLDGPVDPEAGWVVDFGDVKAAFKPLEERLDHYYLNEVEGLENPTSENLAVWIWDRLIGALPMLSAVTVRETCTSGCTYRGR

SEQ ID NO: 17056 - protein, 166 aa, Actinosynnema pretiosum
  REGION 1..166: note = tr|A0A347Q2G1|A0A347Q2G1_9PSEU Queuosine biosynthesis QueD, PTPS-I OS=Actinosynnema pretiosum subsp. pretiosum OX=103721 GN=APASM_3824 PE=4 SV=1
MENVTRMGHAVCVKHTFEAAHRLPHLGGKCVNLHGHSWAVKVTVGAPRLSEGGTVVEFGALKQAVRRWIDLHWDHATLLGQADPLVGLLRETGSRVYRFGASGDATGAELVGHDLPWPTVESVAVVLARAATAIVDELPGAQGARVTRVEVRETRSNTAVHEPEWS

SEQ ID NO: 17057 - protein, 144 aa, Actinosynnema sp.
  REGION 1..144: note = tr|A0A1V2QES6|A0A1V2QES6_9PSEU Uncharacterized protein OS=Actinosynnema sp. ALI-1.44 OX=1933779; GN = ALI144C_11110 PE=4 SV=1
MFSITVRDHVMVAHSFQGEVFGPAQRLHGATFLVDATFHRAELDDDNIVVDIGLATEQLKDVLAPLNYRNLDDEPEFKGVNTSTEFLAKVIADRLVERIGDGKLGEGARGLAEITVTLHESHVAWASYRRAVESSPESSPESSL

SEQ ID NO: 17058 - protein, 301 aa, Actinosynnema sp.
  REGION 1..301: note = tr|A0A1V2P5F9|A0A1V2P5F9_9PSEU Uncharacterized protein OS=Actinosynnema sp. ALI-1.44 OX=1933779; GN = ALI144C_52720 PE=4 SV=1
MVHKITVEHSFESGHGLSHLGGKCVSLHGHSWSTAVTMVAPKLSPEVTVVEFSALKVGLRRWIDEHLDHAMMLSARDRLIEPLIAEGSRVFCFGAERPADVAEQFAHGLPWPTVEAITVLRGRVAESVSAGLPRAGGASRADSGPRDAAQHRRLRAVDLGGPAFRRECFLLLPIDGSVPRLDASTGRASRPPDAQGSARSRTVGRAAAWSDSFATRSPPAAPDRPGQPPLLARDNHSESLDVVPDREARRGGGYGDVTGWECSCHSWERARHKVGGTTMSPEWWILMIMTRNSRRWIAMEL

SEQ ID NO: 17059 - protein, 137 aa, Adhaeribacter aerolatus
  REGION 1..137: note = tr|A0A512B378|A0A512B378_9BACT 6-carboxy-5,6,7,8-tetrahydropterin synthase; OS = Adhaeribacter aerolatus OX=670289 GN=ygcM PE=3 SV=1
MKVTVCRKEHFNAAHRLYNPAWSKSKNNDFFGKCSNENFHGHNYELIVKLTGSINPETGYVYDMKQLSELIKKEILRKFDHRNLNLDTEEFKDLNPTAENIAMVIWNRLRERISPEYALAVTLFETERNFVEYNGQI

SEQ ID NO: 17060 - protein, 138 aa, Adhaeribacter aerolatus
  REGION 1..138: note = tr|A0A512AZX0|A0A512AZX0_9BACT 6-carboxy-5,6,7,8-tetrahydropterin synthase; OS = Adhaeribacter aerolatus OX=670289 GN=AAE02nite_29260; PE = 4 SV=1
MVYLSRLEHFNAAHKLANPNWSDEKNKEVFGPCSNTNWHGHNYELIVTVKGEPDPETGFIIDLKQLSTLIRKHIIEVVDHKNLNLDVPFMQGKMASTENLVLAFWEILEPLIPQMSSARLHCLKLYETPRNFVEYYGE

SEQ ID NO: 17061 - protein, 139 aa, Adhaeribacter sp.
  REGION 1..139: note = tr|A0A2T2YDP6|A0A2T2YDP6_9BACT 6-carboxytetrahydropterin synthase QueD OS=Adhaeribacter sp. HMF7605 OX=2072846 GN=AHMF7605_08930 PE=4 SV=1
MVYISRLEHFNAAHKLFNPNWSLAKNKEVFGPCANANWHGHNYELIVTVKGNPDPDTGFVIDLKKLSVLIREHIIQKVDHKNLNLDVAFMEGKLASTENLVIEFWNILKPLISKISSSAQLHSLKLYETPRNFVEYFGE

SEQ ID NO: 17062 - protein, 135 aa, Adhaeribacter sp.
  REGION 1..135: note = tr|A0A369QHH0|A0A369QHH0_9BACT 6-carboxy-5,6,7,8-tetrahydropterin synthase; OS = Adhaeribacter sp. HMF7616 OX=2072847 GN=AHMF7616_02976; PE = 3 SV=1
MKITVCRKEHFNAAHRLNNPAWSPEMNQRVFGKCNNPNYHGHNYSLTVKLTGEVNPETGYVYDMKLLSDLIQDEILARFDHQNLNLDTEEFKNLNPTAENIAIVIWNRLREKISAAYALSVTLFETDRNFVEYHG

SEQ ID NO: 17063 - protein, 141 aa, Adlercreutzia equolifaciens
  REGION 1..141: note = tr|A0A3E2EFR9|A0A3E2EFR9_9ACTN 6-carboxy-5,6,7,8-tetrahydropterin synthase; OS = Adlercreutzia equolifaciens OX=446660 GN=DX903_07565; PE = 3 SV=1
MYGLKTESSFDASHFLTDYHGKCENLHGHRWRVVAYLEVEHLQTEGTCKDMVVDFGEFKTELRALTERLDHHFIVEEGSLAPDTLACLEREGFALFIVPFRTTAENLAKWFFDALAARGLPVAQVEVYETPNNCAYYREQR

SEQ ID NO: 17064 - protein, 150 aa, Advenella incenata
  REGION 1..150: note = tr|A0A4Q7VDQ0|A0A4Q7VDQ0_9BURK 6-pyruvoyltetrahydropterin/6-carboxytetrahydropterin synthase OS=Advenella incenata OX=267800 GN=EV681_3751; PE = 4 SV=1
MITVTRALHFDAGHRIPDHKSQCRNMHGHRYTLEITLSGPVSMVDGAPDRGMVIDFSDVKAIAKALIVDVWDHAFLVYSGDTVVRTFLESIADHKTVVLDRIPTAENLVQIAFDTLAAAYLAQYGDRLKLTHARLYETPNCWADCYAPQV

SEQ ID NO: 17065 - protein, 150 aa, Advenella kashmirensis
  REGION 1..150: note = tr|A0A356LFF8|A0A356LFF8_9BURK 6-carboxytetrahydropterin synthase QueD OS=Advenella kashmirensis OX=310575 GN=queD PE=4 SV=1
MITVTRALHFDAGHRIPDHKSQCRNMHGHRYTLEITLSGPVSMVDGAPDRGMVLDFSDVKAIAKELIVDVWDHAFLVYSGDTVVRKFLDSMADHKTVVLDRIPTAENLVQIAFDTLAAAYLAQYGDRLKLTHARLYETPNCWADCYGSEA

SEQ ID NO: 17066 - protein, 150 aa, Advenella kashmirensis
  REGION 1..150: note = tr|I3UDX5|I3UDX5_ADVKW Queuosine biosynthesis protein QueD OS=Advenella kashmirensis (strain DSM 17095 / LMG 22695 / WT001) OX=1036672 GN=TKWG_16300 PE=4 SV=1
MITVTRALHFDAGHRIPDHKSQCRNMHGHRYTLEITLSGPVSTVDGAPDRGMVIDFSDVKAIAKALIVDVWDHAFLVYSGDTAVRSFLDSLADHKTVVLDRIPTAENLVQIAFDTLAAAYQAQYGDQLKLTHARLYETPNCWADCYGSQA

SEQ ID NO: 17067 - protein, 149 aa, Advenella mimigardefordensis
  REGION 1..149: note = tr|W0P9P6|W0P9P6_9BURK 6-carboxy-5,6,7,8-tetrahydropterin synthase OS=Advenella mimigardefordensis DPN7 OX=1247726 GN=queD PE=4 SV=1
MITVTRALHFDAGHRIPDHQSQCRNMHGHRYTLEITLSGPVSTVDGAPDRGMVLDFSDVKAIAKALIVDVWDHAFLVYSGDTVVRNFLDSLGDHKTVVLDRIPTAENLVRIAFDTLAAAYQAQYGDRLKLTHARLYETPNCWADCYAAT

SEQ ID NO: 17068 - protein, 150 aa, Advenella sp.
  REGION 1..150: note = tr|A0A2M9TZ24|A0A2M9TZ24_9BURK 6-carboxytetrahydropterin synthase QueD OS=Advenella sp. S44 OX=1982755 GN=CAP48_05895 PE=4 SV=1
MITVTRALHFDAGHRIPDHRSQCRNLHGHRYTLEITLSGPVSTVAGAADHGMVLDFSDVKAIAKERIVDVWDHAFLVYYGDTAVRAFLDSLPDHKTVVLDRVPTAENLVQIAFNTLAAAYLAKYGDQLKLTHVRLYETPNCWADCYGTDA

SEQ ID NO: 17069 - protein, 149 aa, Aequorivita antarctica
  REGION 1..149: note = tr|A0A5C6Z379|A0A5C6Z379_9FLAO 6-carboxy-5,6,7,8-tetrahydropterin synthase OS=Aequorivita antarctica OX=153266 GN=ESU54_00180 PE=3 SV=1
MQTIRITKIFSFETGHALYGYDGKCRNVHGHSYKLSVTVVGSPIEDSSNVKFGMVIDFSDLKKIVKEEIVDVFDHSTVFNKNTPHVELAKELSDRGHSVLLVDYQPTSEMMVIDFSEKIKSRLPKNIQLHSLRLQETDSSYAEWFAGDN

SEQ ID NO: 17070 - protein, 136 aa, Aequorivita antarctica
  REGION 1..136: note = tr|A0A5C6YUS8|A0A5C6YUS8_9FLAO 6-carboxy-5,6,7,8-tetrahydropterin synthase OS=Aequorivita antarctica OX=153266 GN=ESU54_17380 PE=3 SV=1
MSLTVYRKAHFNAAHRLFKKEWDDVKNFEVFGKCSNPNYHGHNYELEVGITGEIDPETGFLMDLKILSRIIEEEIEDAFDHKNLNIEVSEFKNLNPTVENIAIVIWNKLRARIDSKFDISIKLYETPRNFVVYNGH

SEQ ID NO: 17071 - protein, 136 aa, Aequorivita lipolytica
  REGION 1..136: note = tr|A0A5C6YKG5|A0A5C6YKG5_9FLAO 6-carboxy-5,6,7,8-tetrahydropterin synthase OS=Aequorivita lipolytica OX=153267 GN=ESV24_14910 PE=3 SV=1
MSLTVYRKAHFNAAHRLFRKEWDDARNFQVFGKCSNPNYHGHNYELEVGISGEIDPETGFLIDLKILTDIIKQEVEDPLDHKNLNIEVPEFKNLNPTVENIAVVIWNKIRTRIDSKYGISVKLYETPRNFVVYNGN

SEQ ID NO: 17072 - protein, 149 aa, Aequorivita lipolytica
  REGION 1..149: note = tr|A0A5C6YS51|A0A5C6YS51_9FLAO 6-carboxy-5,6,7,8-tetrahydropterin synthase OS=Aequorivita lipolytica OX=153267 GN=ESV24_03015 PE=3 SV=1
MNKIRITKIFSFETGHALYGYDGKCRNVHGHSYKLSVTVIGTPISDTDNVKFGMVIDFSDLKKIVKEEIVDVFDHSTVFNKNTPHVELAKELSDRGHSVLLVDYQPTSEMMVIDFSEKIKIRLPKNIQLHSLKLQETDSSYAEWFADDN

SEQ ID NO: 17073 - protein, 149 aa, unidentified
  source 1..149: note = Aequorivita soesokkakensis
  REGION 1..149: note = tr|A0A1A9LCP7|A0A1A9LCP7_9FLAO 6-carboxy-5,6,7,8-tetrahydropterin synthase OS=Aequorivita soesokkakensis OX=1385699 GN=A7A78_05965 PE=3 SV=1
MEQIRITKIFSFETGHALYGYDGKCRNVHGHSYKLSVTVIGTPIEDIDNVKFGMVIDFGDLKKIVKEEIVDVFDHATVFNKNTPHVELAKELSDRGHSVLLVDYQPTSEMMVIDFSEKIKKRLPKNIMLHSLRLQETDSSYAEWFAGDN

SEQ ID NO: 17074 - protein, 136 aa, unidentified
  source 1..136: note = Aequorivita soesokkakensis
  REGION 1..136: note = tr|A0A1A9LHM3|A0A1A9LHM3_9FLAO 6-carboxy-5,6,7,8-tetrahydropterin synthase OS=Aequorivita soesokkakensis OX=1385699 GN=A7A78_08405 PE=3 SV=1
MSLTVYRKAHFNAAHRLFRKEWSDAKNFEVFGKCSNPNFHGHNYELEVGITGEIDPETGFLMDLKILSDIIKDEIEDCFDHKNLNVEVAEFKNLNPTVENIAVVIWNKIRTRIDSKYGVSVKLYETPRNFVIYNGQ

SEQ ID NO: 17075 - protein, 149 aa, Aequorivita sp.
  REGION 1..149: note = tr|A0A410G4Y7|A0A410G4Y7_9FLAO 6-carboxy-5,6,7,8-tetrahydropterin synthase OS=Aequorivita sp. H23M31 OX=2494375 GN=EI546_11685 PE=3 SV=1
MKQIRITKIFSFETGHALYGYDGKCRNVHGHSYKLSVTVIGSPISDSNNVKYGMVIDFSDLKKIVKEEIVDVFDHATVFNKNTPHVQLAKELSDRDHSVLLVDYQPTSEMMVIDFSEKIKKRLPEGIKLHSLKLQETDSSYAEWYSEDN

SEQ ID NO: 17076 - protein, 149 aa, Aequorivita sp.
  REGION 1..149: note = tr|A0A2E4RQJ0|A0A2E4RQJ0_9FLAO 6-carboxy-5,6,7,8-tetrahydropterin synthase OS=Aequorivita sp. OX=1872390 GN=CL529_01950 PE=3 SV=1
MKQIRITKIFSFETGHALYGYDGKCRNVHGHSYKLSVTVIGTPISDNDNVKFGMVIDFGDLKKIVKEEIVDVFDHATVFNKNTPHVELAKELSDRGHSVLLVDYQPTSEMMVIDFSEKIKKRLPKNIMLHSLRLQETDSSYAEWFAGDN

SEQ ID NO: 17077 - protein, 136 aa, Aequorivita sublithincola
  REGION 1..136: note = tr|I3YWW8|I3YWW8_AEQSU 6-carboxy-5,6,7,8-tetrahydropterin synthase OS=Aequorivita sublithincola (strain DSM 14238 / LMG 21431 / ACAM 643 / 9-3) OX=746697 GN=Aeqsu_20 20 PE=3 SV=1
MSLTVYRKAHFNAAHRLFKKEWSDAKNLEIFGKCSNPNYHGHNYELEVGITGDIDPETGFLMDLKILRQIIEEEVETPFDHKNLNIEVPEFKSLNPTVEIIAVVIWNKIRTRIDSKYKISVKLYETPRNFVVYNGH

SEQ ID NO: 17078 - protein, 186 aa, Aequorivita sublithincola
  REGION 1..186: note = tr|I3YU92|I3YU92_AEQSU 6-pyruvoyl-tetrahydropterin synthase OS=Aequorivita sublithincola (strain DSM 14238 / LMG 21431 / ACAM 643 / 9-3) OX=746697 GN=Aeqsu_1061; PE = 4SV=1
MLIGTVCFNQENGTFFSNTANQIVGEENCIFVAQLYLMNQIRITKIFSFETGHALYGYDGKCRNVHGHSYKLSVTVIGKPIEDNTNVKFGMVIDFSDLKKIVKEEIVDVFDHATVFNKNTPHVELAKELSDRGHSVLLVDYQPTSEMMVIDFSEKIKKHLPKNIQLHSLKLQETDSSYAQWFAGDN

SEQ ID NO: 17079 - protein, 149 aa, unidentified
  source 1..149: note = Aequorivita viscosa
  REGION 1..149: note = tr|A0A1M6DHB1|A0A1M6DHB1_9FLAO 6-carboxy-5,6,7,8-tetrahydropterin synthase OS=Aequorivita viscosa OX=797419 GN=SAMN04487908_10515 PE=3 SV=1
MKQIRITKIFSFETGHALFGYDGKCRNVHGHSYKLSVTVIGSPISDSNNVKFGMVIDFSDLKKIVKEEIVDVFDHATVFNKNTPHVHLAKELSDRDHSVLLVDYQPTSEMMVIDFSEKIAKRLPESIKLHSLRLQETDSSYAEWYASDN

SEQ ID NO: 17080 - protein, 136 aa, unidentified
  source 1..136: note = Aequorivita viscosa
  REGION 1..136: note = tr|A0A1M6B8M9|A0A1M6B8M9_9FLAO 6-carboxy-5,6,7,8-tetrahydropterin synthase OS=Aequorivita viscosa OX=797419 GN=SAMN04487908_102137 PE=3 SV=1
MSLTVFRKAHFNAAHRLYKKEWDDAKNLKVFGKCSNPNYHGHNYELEVGISGEIDPETGFLINLKILSQIIEEEIEDQFDHKNLNIEVPEFKYLNPTVENIAIVIWNKLRNRIEDKFEISVKLYETPRNFVVYSGK

SEQ ID NO: 17081 - protein, 145 aa, unidentified
  source 1..145: note = Aeribacillus composti
  REGION 1..145: note = tr|A0A559TXK5|A0A559TXK5_9BACI 6-carboxy-5,6,7,8-tetrahydropterin synthase; OS = Aeribacillus composti OX=1868734 GN=FB379_12322 PE=3; SV = 1
MLHQFYPQVFHSYSYELNKDMQISAAHYIPHEKAGKCARVHGHTYFVNLTICGDQLDDSGFLVNFQHLKKWVHDRFDHTLLNDHTDVFNGQNSEDFPTTEVVARKIWEIVQDHLNVLPNKPKCLQVFVRETPTSYVVYRPKREMK

SEQ ID NO: 17082 - protein, 145 aa, Aeribacillus pallidus
  REGION 1..145: note = tr|A0A164AH60|A0A164AH60_9BACI 6-carboxy-5,6,7,8-tetrahydropterin synthase; OS = Aeribacillus pallidus OX=33936 GN=AP3564_11725 PE=3 SV=1
MLHQFYPQVFHNYSYELNKDMQISAAHYIPHEKAGKCARVHGHTYFVNLTICGDQLDDSGFLVNFQHLKKWVHDRFDHTLLNDHTDVFNGQNSEDFPTTEVVARKIWEIVQDHLNVLPNKPKCLQVFVRETPTSYVVYRPKREMK

SEQ ID NO: 17083 - protein, 145 aa, Aeribacillus pallidus; identical to SEQ ID NO: 17081
  REGION 1..145: note = tr|A0A161ZPZ4|A0A161ZPZ4_9BACI 6-carboxy-5,6,7,8-tetrahydropterin synthase; OS = Aeribacillus pallidus OX=33936 GN=AZI98_16555 PE=3 SV=1

SEQ ID NO: 17084 - protein, 118 aa, Aeromicrobium flavum
  REGION 1..118: note = tr|A0A512HR28|A0A512HR28_9ACTN 6-carboxy-5,6,7,8-tetrahydropterin synthase; OS = Aeromicrobium flavum OX=416568 GN=AFL01nite_02410 PE=3; SV = 1
MFEITKRFTIEAAHFLPLVPDQHPCANMHGHSYVVEVSVAGELDEYGWVMDFAEIGSVFEPIRTLLDHRLLNDVAGLENPTSEIMSQWIFESMRPNVPRLAWVKVSETATSSSTYRPG

SEQ ID NO: 17085 - protein, 124 aa, Aeromicrobium sp.
  REGION 1..124: note = tr|A0A0S9RCE6|A0A0S9RCE6_9ACTN 6-carboxy-5,6,7,8-tetrahydropterin synthase; OS = Aeromicrobium sp. Leaf289 OX=1736324 GN=ASF37_01750; PE = 3 SV=1
MNYESEIYREFTFEAAHQLPHVPEGHKCARLHGHSYLAAVHVSGPVGEQTGWVQDFGDIKAAFKPLEDQLDHHYLNDVAGLDNPTSEVLAKWIWDRLVPKLPNLKEVRVRETCTSGCIYRGGAR

SEQ ID NO: 17086 - protein, 121 aa, Aeromicrobium sp.
  REGION 1..121: note = tr|A0A3B7D6I5|A0A3B7D6I5_9ACTN 6-carboxy-5,6,7,8-tetrahydropterin synthase; OS = Aeromicrobium sp. A1-2 OX=2107713 GN=queD PE=3 SV=1
MAVSEIFREFTFEAAHRLPNVPEGHKCSRLHGHSYRVQVHVTGPVGPETGWVRDFGEIKAAFKPLEDCLDHYYLNELDGLENPTSEVLAKWIWDRLVVELPDLSAIQVRETCTSGCVYRGE

SEQ ID NO: 17087 - protein, 291 aa, Aeromonas allosaccharophila
  REGION 1..291: note = tr|A0A0T6U0Q0|A0A0T6U0Q0_9GAMM 6-pyruvoyl tetrahydropterin synthase OS=Aeromonas allosaccharophila; OX = 656 GN=AO724_07690 PE=4 SV=1
MKLFVRDLTVIDSSYLCERRGMVGESWLVDIEMSGELNEMSMLLDFGRVKKLIKSIIDEEVDHKLLVPTECPLIHIETLDGDESTVDLLRPGRSIHLRCPTQGFAFIRAPLVDKESVTRYLLAVLAKRLPGNIKDLSLTLRHEAIDGAFYHYSHGLKKHDGNCQRIAHGHRSPIEIHVDGMRDGELELNWAERWGDIYLGTEEDKVALTELALSPRANAQLGEHHTGFKYVAPQGLFQLAIPSAEVEMIDTDTTVELLACYIAREVKKMVGDKFVKIVAYEGVGKGAIAYA

SEQ ID NO: 17088 - protein, 291 aa, Aeromonas allosaccharophila
  REGION 1..291: note = tr|A0A1Q5VXB2|A0A1Q5VXB2_9GAMM Uncharacterized protein OS=Aeromonas allosaccharophila OX=656; GN = BJP24_01125 PE=4 SV=1
MKLFVRDLTVIDSSYLCERRGMVGESWLVDIEMSGELNEMSMLLDFGRVKKLIKSIIDEEVDHKLLVPTECPLIHIETLDGDESTVDLLRPGRSIHLRCPTQGFAFIPAPLVDKESVTRYLLAVLAKRLPGNIKDLSMTLRHEAIDGAFYHYSHGLKKHDGNCQRIAHGHRSPIEIHVDGERDGELELNWAERWGDIYLGTEEDKVALTELALSPRANAQLGEHHCGFKYVAPQGLFQLAIPRAEVEMIDTDTTVELLACYIAREVKKMVGDKFVKIVAYEGVGKGAIAYA

SEQ ID NO: 17089 - protein, 291 aa, unidentified
  source 1..291: note = Aeromonas cavernicola
  REGION 1..291: note = tr|A0A2H9U0Q9|A0A2H9U0Q9_9GAMM Uncharacterized protein OS=Aeromonas cavernicola OX=1006623 GN=CUC53_16930; PE = 4 SV=1
MKLFVRDLTVIDSSYLCERRGMVGESWLVDIEMSGELNEMSMLLDFSRVKKLIKSIIDEEVDHKLLVPVDNPLIRVQLTDDNDSTVDLLRPHRSIHLRCPTQGFALIATSQIDKESVTRHLLAVLAKRLPGNIKDLSLTLRHEAIHGAFYHYSHGLKKHDGNCQRIAHGHRSPIEIHVDGERDPSLELSWAERWGDIYLGTQEDQVALSELSLSDQAKLAVSELHTGFKYVAPQGLFQLAIPTAEVEMIDSDTTVELLAGYIAQEVKKIVGDKFVKIVAYEGVGKGAIAYA

SEQ ID NO: 17090 - protein, 272 aa, Aeromonas caviae
  REGION 1..272: note = tr|A0A3S5WZX3|A0A3S5WZX3_AERCA Uncharacterized protein OS=Aeromonas caviae OX=648 GN=C0708_04260 PE=4 SV=1
MGESWLVDIEMSGELNEMSMLLDFGRVKKLIKSIIDEEVDHKLLVPTECPLVHVHALDNDESTVDLLRPGRAIHLRCPTQGFAFIPAPQVDKESVTRYLLGVLAKRLPGNIKDLSLTLRSERIEGAFYHYSHGLKKHDGNCQRIAHGHRSPVEILVDGERDEELEFNWAERWADIYLGTEEDRVALGELALSERAEASLKEGDAHYIGFKYVAPQGLFQLAMPAVEVEMIDTDTTIELLAHYIAREVKKQVGDKFVKIVAYEGVGKGAIAYA

SEQ ID NO: 17091 - protein, 294 aa, Aeromonas caviae
  REGION 1..294: note = tr|A0A2X4RT39|A0A2X4RT39_AERCA Queuosine biosynthesis protein QueD OS=Aeromonas caviae OX=648; GN = NCTC12244_02641 PE=4 SV=1
MKLFVRDLTVIDSSYLCERRGMVGESWLVDIEMSGELNEMSMLLDFGRVKKLIKSIIDEEVDHKLLVPTECPLVHVHALENDESTVDLLRPGRAIHLRCPAQGFAFIPAPQVDKESVTRYLLGVLAKRLPGNIKDLSLTLRQERIEGAFYHYSHGLKKHDGNCQRIAHGHRSPVEILVNGERDEELEFNWAERWADIYLGTEEDRVALGELVLSERAEASLKEGNAHYIGFKYVAPQGLFQLAMPAAEVEMIDTDTTIELLAHYIAREVKKQVGDKFVKIVAYEGVGKGAIAYA

SEQ ID NO: 17092 - protein, 272 aa, unidentified
  source 1..272: note = Aeromonas dhakensis
  REGION 1..272: note = tr|A0A433GH98|A0A433GH98_9GAMM Uncharacterized protein OS=Aeromonas dhakensis OX=196024 GN=CX648_12950; PE = 4 SV=1
MGESWLVDIEMSGELNEMSMLLDFGRVKKLIKSIIDDEVDHKLLVPTECPLVQVAQLDGDESTVDLLRPGRSIHLRCPSQGFAFIPAPQVDKESVTRYLLAVLAKRLPGNIKDLSLTLRQEAIDGAFYHYSHGLKKHDGNCQRIAHGHRSPIEIHVDGERDQELELNWAERWADIYLGTDEDRVALGDLALSEQAKAILQEAGEHYVGFKYVAPQGLFQLAMPAAEVEMIDTDTTIELLAHYIAREVKKSVGDKFIKIVAYEGVGKGAIAYA

SEQ ID NO: 17093 - protein, 294 aa, unidentified
  source 1..294: note = Aeromonas dhakensis
  REGION 1..294: note = tr|K1JKM4|K1JKM4_9GAMM Uncharacterized protein; OS = Aeromonas dhakensis OX=196024 GN=HMPREF1171_01716 PE=4; SV = 1
MKLFVKDLTVIDSSYLCERRGMVGESWLVDIEMSGELNEMSMLLDFGRVKKLIKSIIDDEVDHKLLVPTENPLVQVAQLDGDESTVDLLRPGRSIHLRCPSQGFAFIPAPQVDKESVTRYLLAVLAKRLPGNIKDLSLTLRQEAIDGAFYHYSHGLKKHDGNCQRIAHGHRSPIEIHVDGERDQELELNWAERWADIYLGTDEDRVALGDLALSEQAKAILQEAGEHYVGFKYVAPQGLFQLAMPAAEVEMIDTDTTIELLAHYIAREVKKSVGDKFVKIVAYEGVGKGAIAYA

SEQ ID NO: 17094 - protein, 291 aa, Aeromonas diversa
  REGION 1..291: note = tr|N9TXU5|N9TXU5_9GAMM Uncharacterized protein; OS = Aeromonas diversa CDC 2478-85 OX=1268237 GN=G114_15998; PE = 4 SV=1
MKLFVRDLTVIDSSYLCERRGMVGESWVVDIELGGELNEMSMLLDFGRVKKLIKAIIDREVDHKLLIPADNPLLRRAAPAAGEVWVDWLRPGHTIHLRSPEQAFAFIPGQQVDKESLVAYLMEILARELPGNIKDLALTLRHEKIEGAFYHYSHGLKKHDGNCQRIAHGHRSPIELYVDGERAPEFEAAFAERWSDIYLGTLEDEVALETLALSPQAALIGPDSHIGFAYEAPQGRFELAMPRAGVEMIDTDTTVELLAHYIAREVKKQVGEKFLKVVAYEGVGKGAIAWA

SEQ ID NO: 17095 - protein, 291 aa, Aeromonas encheleia
  REGION 1..291: note = tr|A0A3S4T3B5|A0A3S4T3B5_9GAMM Queuosine biosynthesis protein QueD OS=Aeromonas encheleia OX=73010; GN = NCTC12917_01624 PE=4 SV=1
MKLFVRDLTVIDSSYLCERRGMVGESWLVDVEMSGELNEMSMLLDFGRVKKLIKSIIDEEVDHKLLVPTDCGLVHIQPLDDGECTVDLLRPQRSIHLRCPSQAFAFIPAPQVDKESVTRYLLAVLAKRLPDNIKDLALTLRQERLDGAFYHYSHGLKKHDGNCQRIAHGHRSPIEILVDGERDGELELNWAERWADIYLGTEEDKVPLNELALSELAQAELGEHHLGFKYVAPQGLFQLAMPAAEVEMIDTDTTIELLAHYIAREVKKQVGDKFVKIVAYEGVGKGAIAYA

SEQ ID NO: 17096 - protein, 291 aa, Aeromonas enteropelogenes
  REGION 1..291: note = tr|A0A175VKX0|A0A175VKX0_AEREN 6-pyruvoyl tetrahydropterin synthase OS=Aeromonas enteropelogenes; OX = 29489 GN=LCR_06790 PE=4 SV=1
MKLFVRDLTVIDSSYLCERRGMVGESWLVDIEMSGELNEMSMLLDFGRVKKLIKSIIDEEVDHKLLVPTECALIHVEHLEGDESTVDLLRQGRSIHLRCPTQGFAFIPAPQVDKESVTRYLLAVLAKRLPGNIKDLSLTLRQEQIEGAFYHYSHGLKKHDGNCQRIAHGHRSPIEIHVDGERDEELEQNWAERWADIYLGTEEDRAALTELALSARANVLLGDHHAGFKYVAPQGLFQLAIPSAEVEMIDTDTTVELLAHYIAREVKKAVGDKFVKIVAYEGVGKGAIAYA

SEQ ID NO: 17097 - protein, 272 aa, Aeromonas hydrophila; identical to SEQ ID NO: 17092
  REGION 1..272: note = tr|A0A2R4U221|A0A2R4U221_AERHY Uncharacterized protein OS=Aeromonas hydrophila subsp. hydrophila; OX = 196023 GN=C1A23_16070 PE=4 SV=1

SEQ ID NO: 17098 - protein, 272 aa, Aeromonas hydrophila
  REGION 1..272: note = tr|A0A454GF09|A0A454GF09_AERHY Uncharacterized protein OS=Aeromonas hydrophila OX=644 GN=B7E00_18060 PE=4; SV = 1
MGESWLVDIEMSGELNEMSMLLDFGRVKKLIKSIIDDEVDHKLLVPTECPLVQVAQLDGNESSVDLLRPGRSIHLRCPSQGFAFIPAPQVDKESVTRYLLAVLAKRLPGNIKDLSLTLRQEAIDGAFYHYSHGLKKHDGNCQRIAHGHRSPIEIHVDGERDQELELNWAERWADIYLGTDEDRVALGELALSEQAKAILQEAGELYVGFKYVAPQGLFQLAMPAAEVEMIDTDTTIELLAHYIAREVKKSVGDKFIKIVAYEGVGKGAIAYA

SEQ ID NO: 17099 - protein, 269 aa, Aeromonas jandaei
  REGION 1..269: note = tr|A0A2S5FDF0|A0A2S5FDF0_AERJA Uncharacterized protein OS=Aeromonas jandaei OX=650 GN=C3737_08755 PE=4; SV = 1
MGESWLVDIEMSGELNEMSMLLDFGRVKKLIKSIIDDEVDHKLLVPTECSLVHVETLEDGESCVDLLRPGRSIHLRCPTQGFAFIPAPQVDKESVTRYLLAVLAKRLPGNIKDLSLTLRQEAIDGPFYHYSHGLKKHDGNCQRIAHGHRSPIEIHIDGERDGDLEQQWAERWADIYLGTNEDKVALKELALSARANVQLGEHHTGFKYVAPQGLFQLAIPTTEVEMIDTDTTVELLACYIAREVKKMVGDKFVKIVAYEGVGKGAIAYA

SEQ ID NO: 17100 - protein, 270 aa, Aeromonas jandaei
  REGION 1..270: note = tr|A0A3N6V6N9|A0A3N6V6N9_AERJA Uncharacterized protein OS=Aeromonas jandaei OX=650 GN=EHZ47_15890 PE=4; SV = 1
MGESWLVDIEMSGELNEMSMLLDFGRVKKLIKSIIDDEVDHKLLVPTECPLVHVETLEEDGESCVDLLRPGRSIHLRCPTQGFAFIPAPQVDKESVTRYLLAVLAKRLPGNIKDLSLTLRQEAIDGPFYHYSHGLKKHDGNCQRIAHGHRSPIEIHIDGERDSELELNWAERWADIYLGTDEDKVALAELALSARANVQLGEHHTGFKYVAPQGLFQLAIPTTEVEMIDTDTTVELLACYIAREVKKMVGDKFVKIIAYEGVGKGAIAYA

SEQ ID NO: 17101 - protein, 270 aa, unidentified
  source 1..270: note = Aeromonas lusitana
  REGION 1..270: note = tr|A0A2M8HA08|A0A2M8HA08_9GAMM Uncharacterized protein OS=Aeromonas lusitana OX=931529 GN=CUC44_10185; PE = 4 SV=1
MVGESWLVDIEMSGELNEMSMLLDFGRVKKLIKSIIDEEVDHKLLVPTGCGLVHIAALDNDECTVDLLRPARSIHLRSPSQAFAFIPAPQVDKESVTRYLLGVLATRLPGNIKDLSLTLRQERLDGAFYHYSHGLKKHDGNCQRIAHGHRSPIEILVDGERDEELELNWAERWNDIYLGTQEDQVSLSELDLSDLAKAHLGEHHLGFKYVAPQGLFQLAMPAAEVEMIDTDTTIELLAHYIAREVKKQVGDKFVKIVAYEGVGKGAIAYA

SEQ ID NO: 17102 - protein, 291 aa, Aeromonas media
  REGION 1..291: note = tr|A0A023RII4|A0A023RII4_AERME Uncharacterized protein OS=Aeromonas media WS OX=1208104 GN=B224_1506 PE=4; SV = 1
MKLFVRDLTVIDSSYLCERRGMVGESWLVDIEMSGELNEMSMLLDFGRVKKLIKSIIDEEVDHKLLVPAECPLVHVHALDCGESTVDLLRPGRSIHLRCPTQGFAFIPASQVDKESVTRYLLAVLAKRLPGNIKDLSLTLRQEKIEGAFYHYSHGLKKHDGNCQRIAHGHRSPVEIEVDGVRDEELELNWAERWADIYLGTQEDKVALSELALSELAKAHLGEHHLGFKYVAPQGLFQLAMPAAEVEMIDTDTTIELLAHYIAREVKKQVGEKFVKIVAYEGVGKGAIAYA

SEQ ID NO: 17103 - protein, 284 aa, Aeromonas molluscorum
  REGION 1..284: note = tr|R1F587|R1F587_9GAMM Uncharacterized protein; OS = Aeromonas molluscorum 848 OX=1268236 GN=G113_11439 PE=4; SV = 1
MTVIDSSYLCERRGMVGESWLVDVELGGELNEMSMLLDFGRVKKLIKAIIDREVDHKLLVPTESALVRIESLAEGEQCVDLLRPDRSIHLRCPEEAFAFIPAAQVDKESVTRYLLAVLAKELPDNIRDLSLTLRHEAIAGAFYHYSHGLKKHDGNCQRIAHGHRSPIEIEVEGVRDEELEQNWAERWADIYLGTAEDEVPLAELALSAVAAPLLGGRHIGFKYTAPQGLFQLAMVKAEVEMIDTDTTIELLAHYIAREVKRQLGDKLVKVVAYEGVGKGAIAYA

SEQ ID NO: 17104 - protein, 270 aa, unidentified
  source 1..270: note = Aeromonas rivipollensis
  REGION 1..270: note = tr|A0A2P1PLA7|A0A2P1PLA7_9GAMM Uncharacterized protein OS=Aeromonas rivipollensis OX=948519; GN = C7N77_16535 PE=4 SV=1
MVGESWLVDIEMSGELNEMSMLLDFGRVKKLIKSIIDEEVDHKLLVPTESALVHIHPLDDDECTVDLLRPGRSIHLRCPAQAFAFIPAPQVDKESVTRYLLAVLAKRLPGNIKDLSLTLRQEQIEGAFYHYSHGLKKHDGNCQRIAHGHRSPVEIEVDGARNEELELNWAERWADIYLGTLEDKVALSELELSELAKAELGEHHLGFKYTAPQGLFQLAMPAAEVEMIDTDTTIELLAHHIAREVKKQVGDKFVKIVAYEGVGKGAIAYA

SEQ ID NO: 17105 - protein, 291 aa, Aeromonas salmonicida
  REGION 1..291: note = tr|A0A290VLV1|A0A290VLV1_AERSA Uncharacterized protein OS=Aeromonas salmonicida subsp. masoucida; OX = 197700 GN=BHG40_16780 PE=4 SV=1
MKLFVRDLTVIDSSYLCERRGMVGESWLVDVEMSGELNEMSMLLDFGRVKKLIKSIIDEEVDHKLLVPAECALIHVAHLEGEESTVDLLRPQGSIHLRCPTQGFAFIPAPQVDKESVTRYLLAVLAQRLPGNIRDLSVTLRQEQIDGAFYHYSHGLKKHDGNCQRIAHGHRSPIEIHVDGMRDGELELNWAERWADIYLGTDEDKVDLSELNLSDVARSQLGEQHLGFKYVAPQGLFQLAMPAAEVEMIYTDTTIELLACYIAREVKKAVGDKFVKVVAYEGVGKGAIAYA

SEQ ID NO: 17106 - protein, 291 aa, Aeromonas salmonicida; identical to SEQ ID NO: 17105
  REGION 1..291: note = tr|A0A4U7JRF6|A0A4U7JRF6_AERSA 6-pyruvoyl tetrahydropterin synthase OS=Aeromonas salmonicida subsp. salmonicida OX=29491 GN=WH04_10735 PE=4 SV=1

SEQ ID NO: 17107 - protein, 291 aa, Aeromonas schubertii
  REGION 1..291: note = tr|A0A0W7TZE5|A0A0W7TZE5_9GAMM 6-pyruvoyl tetrahydropterin synthase OS=Aeromonas schubertii OX=652; GN = ATO46_07630 PE=4 SV=1
MKLFVRDLTVIDSSYLCERRGMVGESWLVDIELGGELNEMSMLLDFGRVKKLIKAIIDREVDHKLLVPSDNDLLRRAEGAPGELTVDWLRPGRSIHLRCPEQAFAFIPGDQVDRESLTAYLMQILARELPGNIKDLTLTLRHEKIDGAFYHYSHGLKKHDGNCQRIAHGHRSPIELHVDGERAPELEAAFAERWSDIYLGTDEDRVALESLTLSPHAAVVTPESHIGFAYEAPQGRFELAMPHAEVEMIDTDTTVELLAHYIAREVKKEVGEKFLKVVAYEGVGKGAIAWA

SEQ ID NO: 17108 - protein, 291 aa, Aeromonas schubertii
  REGION 1..291: note = tr|A0A0S2SMS6|A0A0S2SMS6_9GAMM 6-pyruvoyl tetrahydropterin synthase OS=Aeromonas schubertii OX=652; GN = WL1483_3553 PE=4 SV=1
MKLFVRDLTVIDSSYLCERRGMVGESWLVDIELGGELNEMSMLLDFGRVKKLIKAIIDREVDHKLLVPSDNGLLRRAEGAPGELTVDWLRPGRSIHLRCPEQAFAFIPGDQVDRESLTAYLMQILARELPGNIKDLTLTLRHEKIDGAFYHYSHGLKKHDGNCQRIAHGHRSPIELHVDGERAPELEAAFAERWSDIYLGTDEDRVALDSLTLSPHAAVVTPESHIGFAYEAPQGRFELAMPRAEVEMIDTDTTVELLAHYIAREVKKEVGEKFLKVAAYEGVGKGAIAWA

SEQ ID NO: 17109 - protein, 269 aa, Aeromonas sobria
  REGION 1..269: note = tr|A0A2N3J242|A0A2N3J242_AERSO Uncharacterized protein OS=Aeromonas sobria OX=646 GN=CJP16_08290 PE=4 SV=1
MGESWLVDIEMSGELNEMSMLLDFGRVKKLIKSIIDEEVDHKLLVPTGCPQIHIETLDGDESTVDLLRPERSIHLRCPTQGFAFIPAPHVDKESVTRYLLAVLAKRLPDNIKDLSLTLRQEAITGAFYHYSHGLKKHDGNCQRIAHGHRSPIEIHVDGERDDELELNWAERWGDIYLGTEEDKVALTELSLSSRANAQLGAHHLGFKYVAPQGLFQLAIPAAEVEMIDTDTTVELLACYIAREVKQMVGDKFVKIVAYEGVGKGAIAYA

SEQ ID NO: 17110 - protein, 291 aa, Aeromonas sobria
  REGION 1..291: note = tr|A0A2N3IL24|A0A2N3IL24_AERSO 6-pyruvoyl tetrahydropterin synthase OS=Aeromonas sobria OX=646; GN = AOX56_09230 PE=4 SV=1
MKLFVRDLTVIDSSYLCERRGMVGESWLVDIEMSGELNEMSMLLDFGRVKKLIKSIIDEEVDHKLLVPTGCPLIHIETLDGDESTVDLLRPERSIHLRCPTQGFAFIPAPHVDKESVTRYLLAVLAKRLPDNIKDLSLTLRQEAITGAFYHYSHGLKKHDGNCQRIAHGHRSPIEIHVDGERDDELELNWAERWGDIYLGTEEDKVALTELSLSSRANAQLGDHHLGFKYVAPQGLFQLAIPAAEVEMIDTDTTVELLACYIAREVKQMVGDKFVKIVAYEGVGKGAITYA

SEQ ID NO: 17111 - protein, 291 aa, Aeromonas sp.
  REGION 1..291: note = tr|A0A1Q8D0W3|A0A1Q8D0W3_9GAMM Uncharacterized protein OS=Aeromonas sp. YN13HZO-058 OX=1921564; GN = BSP75_18075 PE=4 SV=1
MKLFVRDLTVIDSSYLCERRGMVGESWLVDIEMSGELNEMSMLLDFGRVKKLIKSIIDEEVDHKLLVPTECPLIHIETLDGDESTVDLLRPGRSIHLRCPTQGFAFIPAPLVDKESVTRYLLAVLAKRLPGNIKDLSLTLRHEAIDGAFYHYSHGLKKHDGNCQRIAHGHRSPIEIHVDGMRDGELELNWAERWGDIYLGTEEDKVALTELALSPRANAQLGEHHTGFKYVAPQGLFQLAIPSAEVEMIDTDTTVELLACYIAREVKKMVGDKFVKIVAYEGVGKGAIAYA

SEQ ID NO: 17112 - protein, 269 aa, Aeromonas sp.
  REGION 1..269: note = tr|A0A2R7N4S7|A0A2R7N4S7_9GAMM Uncharacterized protein OS=Aeromonas sp. HMWF017 OX=2056853 GN=DBR30_07630; PE = 4 SV=1
MGESWLVDIEMSGELNEMSMLLDFGRVKKLIKSIIDEEVDHKLLVPTECPLIHVETLDGDESTVDLLRPGRSIHLRCPSQGFAFIPAPQVDKESVTRYLLAVLAKRLPGNIKDLSLTLRQEAITGAFYHYSHGLKKHDGNCQRIAHGHRSPIEIHVDGERDQELELNWAERWGDIYLGTEEDKVALTELALSPRANAQLGEHHTGFKYVAPQGLFQLAIPSAEVEMIDTDTTVELLACYIAREVKKMVGDKFVKIVAYEGVGKGAIAYA

SEQ ID NO: 17113 - protein, 272 aa, Aeromonas taiwanensis
  REGION 1..272: note = tr|A0A5F0K9X2|A0A5F0K9X2_9GAMM Uncharacterized protein OS=Aeromonas taiwanensis OX=633417 GN=DRM93_12450; PE = 4 SV=1
MGESWLVDIEMSGELNEMSMLLDFGRVKKLIKSIIDEEVDHKLLVPAESPLVHIHPLDNDECTVDLLRPGRSIHLRCPSQGFAFIPAPQVDKESVTRYLLAVLAVLAKRLPGNIKDLTLTLRQERIDGAFYHYSHGLKKHDGNCQRIAHGHRSPIEILVDGERDEELELNWAERWADIYLGTEEDRVALSDLALSEQAKAHLGEHHQGFKYVAPQGLFQLAMPAAEVEMIDTDTTIELLAHYIAREVKKLVGDKFVKIVAYEGVGKGAIAYA

SEQ ID NO: 17114 - protein, 291 aa, Aeromonas veronii
  REGION 1..291: note = tr|A0A160F063|A0A160F063_9GAMM 6-pyruvoyl tetrahydropterin synthase OS=Aeromonas veronii OX=654; GN = WM43_20010 PE=4 SV=1
MKLFVRDLTVIDSSYLCERRGMVGESWLVDIEMSGELNEMSMLLDFGRVKKLIKSIIDEEVDHKLLVPTECPLIHVETLDDDESTVDLLRPGRSIHLRCPSQGFAFIPAPQVDKESVTRYLLAVLAKRLPGNIKDLSLTLRQEAITGAFYHYSHGLKKHDGNCQRIAHGHRSPIEIHVDGERDQELELNWAERWGDTYLGTEEDKVALTELALSPRANAQLGEHHCGFKYVAPQGLFQLAIPSTEVEMIDTDTTVELLACYIAREVKKMVGDKFVKIVAYEGVGKGAIAYA

SEQ ID NO: 17115 - protein, 269 aa, Aeromonas veronii
  REGION 1..269: note = tr|A0A4R8UA58|A0A4R8UA58_9GAMM Uncharacterized protein OS=Aeromonas veronii OX=654 GN=CGZ76_08360 PE=4; SV = 1
MGESWLVDIEMSGELNEMSMLLDFGRVKKLIKSIIDEEVDHKLLVPTECPLIHVETLDGDESTVDLLRPGRSIHLRCPSQGFAFIPAPQVDKESVTRYLLAVLAKRLPGNIKDLSLTLRQEAITGAFYHYSHGLKKHDGNCQRIAHGHRSPIEIHVDGERDQELELNWAERWGDIYLGTEEDKVALTELALSPRANAQLGEHHCGFKYVAPQGLFQLAIPSAEVEMIDTDTTVELLACYIAREVKKMVGDKFVKIVAYEGVGKGAIAYA

SEQ ID NO: 17116 - protein, 291 aa, Aestuariibacter sp.
  REGION 1..291: note = tr|A0A506RQI8|A0A506RQI8_9ALTE Uncharacterized protein OS=Aestuariibacter sp. GS-14 OX=2590670; GN = FJ444_05675 PE=4 SV=1
MQLFVNDLTVMDFSYLCPQRGMVGESWIVDVLLDGTLNEESMVQDFGIVKKNLKRLIDSYVDHKLLVPAECSATTIRHDDDTDYVEVNFALADQKAIQMYCPADAYAFIYAPIITMESVSEYLREVIATHLPDNVDNLTILLRTEVINTPFYHYTHGLKKHDGNCQRIAHGHRSKVDIYTDGENDLESQTYWANRWCDIYIASEEDRITAEQLKLQQKLPSYQDHVCFAYEATQGYFEIVLPESQCEVITTDSTVECLAQYIYQQQKLRKPGSHCCVLAYEGVGKGARVSD

SEQ ID NO: 17117 - protein, 291 aa, Aestuariibacter sp.
  REGION 1..291: note = tr|A0A2D6XWB8|A0A2D6XWB8_9ALTE Uncharacterized protein OS=Aestuariibacter sp. OX=1872400 GN=CL531_03055; PE = 4 SV=1
  VARIANT 15: note = Xaa can be any naturally occurring amino acid
MQLFVNDLTVMDFSXLCPERGMVGESWIVDVLLDGTLNEESMVQDFGIVKKNLKRLIDSYVDHKLLVPAECQATSIRHDDDTDYVEVNFTLAEQKAIQMYCPADAYAFIYAPTITMESVSEYLREVIATHLPDNVDNLTILLRTEVINTPFYHYTHGLKKHDGNCQRIAHGHRSKVDIITDGEIDLDSQAYWADRWCDIYIASEEDRISAEQLKLQQKLPSYQAHVCFAYEATQGYFEIVLPESQCEVITTDSTVECLAQFIYQQQKQRKPDTHCCVLAYEGVGKGARVSD

SEQ ID NO: 17118 - protein, 119 aa, unidentified
  source 1..119: note = Aestuariispira insulae
  REGION 1..119: note = tr|A0A3D9HGH6|A0A3D9HGH6_9PROT 6-carboxy-5,6,7,8-tetrahydropterin synthase; OS = Aestuariispira insulae OX=1461337 GN=DFP90_107106 PE=3; SV = 1
MMYRIAKEFHFSASHQLLHLAEDHPCARLHGHNYVVEVELASKELNSDGFVRDYRELGALKDYIDGELDHRHLNDVLGDDFVTAELIAKHFYDWCKARWPETVAVRVSETPKTWSEYRP

SEQ ID NO: 17119 - protein, 121 aa, Afipia broomeae
  REGION 1..121: note = tr|K8PK78|K8PK78_9BRAD 6-carboxy-5,6,7,8-tetrahydropterin synthase OS=Afipia broomeae ATCC 49717 OX=883078 GN=HMPREF9695_00276 PE=3 SV=1
MWELTKSFRFEAAHSLPGTTLGEASDEIHGHSFRAEVSIRGIPDPATGMVTDLGVLEQRMAEVQKMLDHKLLNKVEALGAPTLENLTRFIWERVQHAGKVTRVSVHRDSCNESCTYFGPQG

SEQ ID NO: 17120 - protein, 121 aa, Afipia broomeae
  REGION 1..121: note = tr|A0A2M8ZXP4|A0A2M8ZXP4_9BRAD 6-carboxy-5,6,7,8-tetrahydropterin synthase OS=Afipia broomeae OX=56946 GN=BKA77_7234 PE=3 SV=1
MWELTKSFRFEAAHALPGTTLGEASEEIHGHSFRAEVSVRGMPDPATGMVLDLGLLERSMTDVRKMLDHKLLNKVDALGPPTLENLSRFIWEKVQHAGHVTRVSVHRDSCNESCTYFGPQS

SEQ ID NO: 17121 - protein, 121 aa, Afipia clevelandensis
  REGION 1..121: note = tr|K8NR54|K8NR54_9BRAD 6-carboxy-5,6,7,8-tetrahydropterin synthase OS=Afipia clevelandensis ATCC 49720 OX=883079 GN=HMPREF9696_03814; PE = 3 SV=1
MWELTKSFRFEAAHSLPGTTLGEASDEVHGHSFRAEVTIRGTPDPATGMVTDLGLLEQRMTEVQTILDHKWLNKIETLGAPTLENLTRFIWDRVQHTGQVVRVSVYRDSCGESCTYFGPQG

SEQ ID NO: 17122 - protein, 122 aa, Afipia felis
  REGION 1..122: note = tr|A0A090MTM9|A0A090MTM9_AFIFE 6-carboxy-5,6,7,8-tetrahydropterin synthase OS=Afipia felis OX=1035 GN=queD_2 PE=3 SV=1
MWELTKSFHFEAAHSLKGTTLGENSEEIHGHSFRAEVTIRGMPDPATGMVMDLGLLERKIADVRKALDHKFLNKIEAIGLPTLENLSRYIWDSVQGAGDVTRVSVHRDSCGESCTYFGPQSK

SEQ ID NO: 17123 - protein, 122 aa, Afipia felis
  REGION 1..122: note = tr|A0A380WAG8|A0A380WAG8_AFIFE 6-carboxy-5,6,7,8-tetrahydropterin synthase OS=Afipia felis OX=1035 GN=queD PE=3 SV=1
MWELTKSFHFEAAHSLSGTTLGDISQEIHGHSFRAEVTIRGTPDPATGMVMDLGLLERRVADVRKELDHKFLNKIEALGLPTLENLSRYIWDRVQGAGEVTRVSVHRDSCGESCTYFGPQPK

SEQ ID NO: 17124 - protein, 121 aa, Afipia massiliensis
  REGION 1..121: note = tr|A0A4V6BDU6|A0A4V6BDU6_9BRAD 6-carboxy-5,6,7,8-tetrahydropterin synthase OS=Afipia massiliensis OX=211460 GN=YH63_002720 PE=3 SV=1
MWELTKSFRFEAAHSLPGTTLGEASDEIHGHSFRAEISIRGTPDPATGMVMDLGVLEQSMADVQKMLDHKLLNKVEALGAPTLENLTRFIWDRVQHAGKVTRVSVHRDSCNESCTYYGPQG

SEQ ID NO: 17125 - protein, 121 aa, Afipia sp.; identical to SEQ ID NO: 17119
  REGION 1..121: note = tr|A0A2D6YZF5|A0A2D6YZF5_9BRAD 6-carboxy-5,6,7,8-tetrahydropterin synthase OS=Afipia sp.; OX = 1871052 GN=CL533_04900 PE=3 SV=1

SEQ ID NO: 17126 - protein, 133 aa, Afipia sp.
  REGION 1..133: note = tr|W3RJL3|W3RJL3_9BRAD 6-pyruvoyl tetrahydropterin synthase OS=Afipia sp. P52-10 OX=1429916 GN=X566_06450; PE = 4 SV=1
MFAVEVRDHVMIAHSFRGDVFGPAQALHGATFVIDAAFMAATLDRNGIVVDIGLAHQVLKDILTPLNYRNLDEMPVFKGINTTTEFLTKHVFDGLAAAAAQGRLGRAANELTAIRVTISESHVARAWYEAPLP

SEQ ID NO: 17127 - protein, 290 aa, Agarivorans albus
  REGION 1..290: note = tr|R9PN51|R9PN51_AGAAL NADPH dependent preQ0 reductase OS=Agarivorans albus MKT 106 OX=1331007; GN = AALB_2882 PE=4 SV=1
MKLFVKDLTVIDSTYLCPDRGLVGESWLVDIELGGSLNDMDMLLDFGQVKKLIKRLIDEKVDHKLLVPNRSPLCKVKTGEGYTQLDFMRPHGKSIHLRCPDEAYTFIDSVEVSNEALTAYVKNVVLEQLPANIQDLAITLRHESIDGPYYHYSHGLKKHDGNCQRIAHGHRSTIEIQVDGEYDIDLATSWAMKWRNIYLGSESDEISQQDISFYQQQAWQDHYAFAYQSPQGFFELVLPKQETDILPCETTVENLAAYIASTLAKVMEGHSLKVIAYEGVGKGAISEVYR

SEQ ID NO: 17128 - protein, 290 aa, Agarivorans sp.
  REGION 1..290: note = tr|A0A4D4IPB5|A0A4D4IPB5_9ALTE Uncharacterized protein OS=Agarivorans sp. Toyoura001 OX=2283141; GN = AHAT_17610 PE=4 SV=1
MKLFVKDLTVIDSTYLCPDRGLVGESWLVDIELGGSLNDMDMLLDFGQVKKLIKRLIDDKVDHKLLVPRRSPLCKVSNSEGYTQLDFQRPHGKSIHLRCPDEAYTFIDAVEVSNEALTAYVKAVVLEQLPSNIQDISINLRHEAIDGPYYHYSHGLKKHDGNCQRIAHGHRSTIEILVDAEGDVDLATSWAMKWRNIYLGSANDEISANDISFYQRQEWQQHYAFAYQSPQGFFELVVPKQETDILPCETTVENLAAYIAQTLSKAMDGHTLKVIAYEGVGKGAISEVYR

SEQ ID NO: 17129 - protein, 139 aa, unidentified
  source 1..139: note = Agathobacter ruminis
  REGION 1..139: note = tr|A0A2G3E2H5|A0A2G3E2H5_9FIRM 6-carboxy-5,6,7,8-tetrahydropterin synthase; OS = Agathobacter ruminis OX=1712665 GN=queD PE=3 SV=1
MYYLTAEAAFDAAHFLSGYEGKCSNIHGHRWRVILKIKSQNLQEQGQERGMVVDFGEVKAALKKEADYFDHTFIYEKDSLKPATVAALADEAFVVRPVDYRPTAENFAKHFFDRFAEHGFEVDEVTVYETPNNCATYRA

SEQ ID NO: 17130 - protein, 141 aa, Aggregatibacter actinomycetemcomitans
  REGION 1..141: note = tr|H0KCN6|H0KCN6_AGGAC 6-carboxy-5,6,7,8-tetrahydropterin synthase; OS = Aggregatibacter actinomycetemcomitans RhAA1 OX=1089447; GN = RHAA1_02109 PE=3 SV=1
MFKVSKEFSFDMAHLLDGHDGKCQNLHGHTYKLQVEVRGNLYQEGAKQGMVIDFSDLKKTVNHAILEPMDHAFIYDQTSERESKIAALLQQLDSKTFGVPFRTTAEQLAQFIFNQLKYQNNHPVSAVRLWETPTSFCEYGE

SEQ ID NO: 17131 - protein, 141 aa, Aggregatibacter actinomycetemcomitans
  REGION 1..141: note = tr|A0A142FYE6|A0A142FYE6_AGGAC 6-carboxy-5,6,7,8-tetrahydropterin synthase; OS = Aggregatibacter actinomycetemcomitans OX=714 GN=queD; PE = 3 SV=1
MFKVSKEFSFDMAHLLDGHDGKCQNLHGHTYKLQVEVRGDLYQEGAKQGMVIDFSDLKKTVNHTILEPMDHAFIYDQTSERESKIAALLQQLDSKTFGVPFRTTAEQLAQFIFNQLKYQKNLPVSAIRLWETPTSFCEYGE

SEQ ID NO: 17132 - protein, 141 aa, Aggregatibacter aphrophilus
  REGION 1..141: note = tr|A0A0K1N3N7|A0A0K1N3N7_AGGAP 6-carboxy-5,6,7,8-tetrahydropterin synthase; OS = Aggregatibacter aphrophilus OX=732 GN=queD PE=3 SV=1
MFKVSKEFSFDMAHLLDGHDGKCQNLHGHTYKLQVEVCGNLYASGAKQGMVIDFSDLKSIVKRAVLDPMDHAFIYDQTSERESKIATLLQQLDSKTFGVPFRTTAEQLAQFIYRRLKDEENLPVSAIRLWETPTSFCEYEE

SEQ ID NO: 17133 - protein, 141 aa, Aggregatibacter aphrophilus
  REGION 1..141: note = tr|A0A336NCJ3|A0A336NCJ3_AGGAP 6-carboxy-5,6,7,8-tetrahydropterin synthase; OS = Aggregatibacter aphrophilus OX=732 GN=queD PE=3 SV=1
MFKVSKEFSFDMAHLLDGHDGKCQNLHGHTYKLQVEVCGNLYAIGAKQGMVIDFSDLKTIVKRAVLDPMDHAFIYDQTSERESKIATLLQQLDSKTFGVPFRTTAEQLAQFIYRRLKDEENLPVSAIRLWETPTSFCEYEE

SEQ ID NO: 17134 - protein, 198 aa, Agitococcus lubricus
  REGION 1..198: note = tr|A0A2T5IZ52|A0A2T5IZ52_9LACT 6-pyruvoyltetrahydropterin/6-carboxytetrahydropterin synthase OS=Agitococcus lubricus OX=1077255 GN=C8N29_10710; PE = 4 SV=1
MLIRKLFRFENAHIVRNCTSQRCSRSIHGHSYQVEIILEAQAFDQGQMVYDFGLLKGHIKDLIDSFDHAIAFWDKDNAEYIAYCQQFSARWISLPVSPSAEQFSRLIFVLVDAVLKQTVMQNGEADVALYSVIVHETQTGYAQCFRADVDNPRMGLIRLQDIIFSSQIQQEWSDPTLYEQLKNGQLFINPVVEPQVRL

SEQ ID NO: 17135 - protein, 132 aa, unidentified
  source 1..132: note = Agrobacterium albertimagni
  REGION 1..132: note = tr|K2QEN2|K2QEN2_9RHIZ Uncharacterized protein; OS = Agrobacterium albertimagni AOL15 OX=1156935; GN = QWE_11751 PE=4 SV=1
MFAVEVRDHIMIAHSLPRPVFGPAQGMHGATFVVDAAFFTKDVDEDGLAVDIGAATTVLSEVLKPLNYQNLDELAVFKGKVSTTEVIAKHIFDQLAQAVSDKRLGPGSHRICRLKVMLHESHAARGWYEADL

SEQ ID NO: 17136 - protein, 118 aa, unidentified
  source 1..118: note = Agrobacterium arsenijevicii
  REGION 1..118: note = tr|A0A0D8KU27|A0A0D8KU27_9RHIZ 6-carboxy-5,6,7,8-tetrahydropterin synthase; OS = Agrobacterium arsenijevicii OX=1585697 GN=RP75_11745; PE = 3 SV=1
MFRITKEFHFSASHQLKSLPADHQCSRLHGHNYIVEIELSGAELNEHGFVRDYHELAPLKRYIDDHFDHRHLNDVLGHDRVTAECLAKHFYDWCKLSLPETSAVRVSETAKTWAEYRP

SEQ ID NO: 17137 - protein, 122 aa, unidentified
  source 1..122: note = Agrobacterium bohemicum
  REGION 1..122: note = tr|A0A135P8N3|A0A135P8N3_9RHIZ 6-carboxy-5,6,7,8-tetrahydropterin synthase; OS = Agrobacterium bohemicum OX=2052828 GN=ATO67_17320 PE=3; SV = 1
MFRITKEFHFSASHQLTGLPADHQCARLHGHNYIVEVELSGETLNEHGFVRDYQELSPLKHYIDDRFDHRHLNDVLGHDMVTAERLAKHFYDWCKERLPETSAVRVSETAKTWAEYRPLRQP

SEQ ID NO: 17138 - protein, 132 aa, unidentified
  source 1..132: note = Agrobacterium bohemicum
  REGION 1..132: note = tr|A0A135P7V8|A0A135P7V8_9RHIZ 6-pyruvoyl tetrahydropterin synthase OS=Agrobacterium bohemicum; OX = 2052828 GN=ATO67_19650 PE=4 SV=1
MFAVEVRDHIMIAHSLPRPVFGPAQGMHGATFVVDAAFFTKDVDEDSLAVDIGAATTVLSEVLKPLNYQNLDELSIFKGKISTTEVIAKHIFDELAAAVAAKRLGPGSHRISRLKITLHESHAARGWYEADL

SEQ ID NO: 17139 - protein, 118 aa, unidentified
  source 1..118: note = Agrobacterium deltaense
  REGION 1..118: note = tr|A0A1S7QZE4|A0A1S7QZE4_9RHIZ 6-carboxy-5,6,7,8-tetrahydropterin synthase; OS = Agrobacterium deltaense RV3 OX=1183426 GN=AGR7B_Lc40088; PE = 3 SV=1
MFRITKEFHFSASHQLKSLPSDHQCNRLHGHNYIVEIELAGEALNEHGFVRDYHELAPLKRYIDDHFDHRHLNDVLGHDRVTAECLAKHFYDWCKDRLPETSAVRVSETAKTWAEYRP

SEQ ID NO: 17140 - protein, 118 aa, unidentified
  source 1..118: note = Agrobacterium deltaense
  REGION 1..118: note = tr|A0A1S7RWH4|A0A1S7RWH4_9RHIZ 6-carboxy-5,6,7,8-tetrahydropterin synthase; OS = Agrobacterium deltaense Zutra 3/1 OX=1183427; GN = AGR7C_Lc70002 PE=3 SV=1
MFRITKEFHFSASHQLKSLPSDHQCNRLHGHNYIVEVELSGEALNEHGFVRDYHELSPLKRYIDDHFDHRHLNDVLGHDRVTAECLAKHFYEWCKDRLPETSAVRVSETAKTWAEYRP

SEQ ID NO: 17141 - protein, 118 aa, unidentified
  source 1..118: note = Agrobacterium fabrum
  REGION 1..118: note = tr|A9CF17|A9CF17_AGRFC 6-carboxy-5,6,7,8-tetrahydropterin synthase; OS = Agrobacterium fabrum (strain C58 / ATCC 33970); OX = 176299 GN=exsC PE=3 SV=1
MFRITKEFHFSASHQLKSLPSDHQCNRLHGHNYIVEVELSGEELNEHGFVRDYHELAPLKRYIDDHFDHRHLNDVLGHDQVTAECLAKHFYDWCKTSLPETSAVRVSETTKTWAEYRP

SEQ ID NO: 17142 - protein, 118 aa, unidentified
  source 1..118: note = Agrobacterium fabrum
  REGION 1..118: note = tr|A0A3G2D9L6|A0A3G2D9L6_9RHIZ 6-carboxy-5,6,7,8-tetrahydropterin synthase; OS = Agrobacterium fabrum OX=1176649 GN=exsC PE=3 SV=1
MFRITKEFHFSASHQLKSLPSDHQCNRLHGHNYIVEVELSGEELNEHGFVRDYHELAPLKRYIDDHFDHRHLNDVLGHDWVTAECLAKHFYDWCKTSLPETSAVRVSETTKTWAEYRP

SEQ ID NO: 17143 - protein, 118 aa, unidentified
  source 1..118: note = Agrobacterium genomosp.
  REGION 1..118: note = tr|A0A1S7QVJ8|A0A1S7QVJ8_9RHIZ 6-carboxy-5,6,7,8-tetrahydropterin synthase; OS = Agrobacterium genomosp. 3 str. CFBP 6623 OX=1183432; GN = AGR3A_Lc100002 PE=3 SV=1
MFRITKEFHFSASHQLKSLPSDHQCNRLHGHNYIVEVELSGEALNEHGFVRDYHELSPLKRYIDDHFDHRHLNDVIGHDRVTAECLAKHFYDWCKDRLPETSAVRVSETAKTWAEYRP

SEQ ID NO: 17144 - protein, 118 aa, unidentified
  source 1..118: note = Agrobacterium genomosp.
  REGION 1..118: note = tr|A0A1S7S7K4|A0A1S7S7K4_9RHIZ 6-carboxy-5,6,7,8-tetrahydropterin synthase; OS = Agrobacterium genomosp. 5 str. CFBP 6626 OX=1183435; GN = ptpS PE=3 SV=1
MFRITKEFHFSASHQLKSLPSDHQCNRLHGHNYIVEVELSGEELNEHGFVRDYHELAPLKRYIDDHFDHRHLNDVLGHDRVTAECLAKHFYDWCKDRLPETSAVRVSETTKTWAEYRP

SEQ ID NO: 17145 - protein, 132 aa, unidentified
  source 1..132: note = Agrobacterium larrymoorei
  REGION 1..132: note = tr|A0A4D7DW11|A0A4D7DW11_9RHIZ 6-carboxytetrahydropterin synthase OS=Agrobacterium larrymoorei OX=160699 GN=CFBP5473_15675 PE=4 SV=1
MFAVEVRDHIMIAHSLPRPVFGPAQGMHGATFVVDAAFFTKDVDEDGLAVDIGAATTVLSEVLKPLNYQNLDELDVFKGRVSTTEVIAKHIFDELAAAVAAKRLGPGSHRISRLKVTLHESHAARGWYEADL

SEQ ID NO: 17146 - protein, 122 aa, unidentified
  source 1..122: note = Agrobacterium larrymoorei
  REGION 1..122: note = tr|A0A4Z1Q6G1|A0A4Z1Q6G1_9RHIZ 6-carboxy-5,6,7,8-tetrahydropterin synthase; OS = Agrobacterium larrymoorei OX=160699 GN=queD PE=3 SV=1
MFRITKEFHFSASHQLKGLPSDHQCARLHGHNYIVEVELAGEELNEHGFVRDYHELAPLKRYIDDSFDHRHLNDVLGHDMVTAERLAKHFYDWCKERLPETSAVRVSETAKTWAEYRPAVQP

SEQ ID NO: 17147 - protein, 118 aa, unidentified
  source 1..118: note = Agrobacterium radiobacter
  REGION 1..118: note = tr|W1KZS9|W1KZS9_RHIRD 6-carboxy-5,6,7,8-tetrahydropterin synthase; OS = Agrobacterium radiobacter DSM 30147 OX=1336745; GN = L902_12230 PE=3 SV=1
MFRITKEFHFSASHQLKSLPSDHQCARLHGHNYIVEVELTGEELNEHGFVRDYHELAPLKHYIDSHFDHRHLNDVLGHDRVTAECLAKHFYDWCKISLPETSAVRVSETAKTWAEYRP

SEQ ID NO: 17148 - protein, 118 aa, unidentified; identical to SEQ ID NO: 17139
  source 1..118: note = Agrobacterium radiobacter
  REGION 1..118: note = tr|W1L1S2|W1L1S2_RHIRD 6-carboxy-5,6,7,8-tetrahydropterin synthase; OS = Agrobacterium radiobacter DSM 30147 OX=1336745; GN = L902_11140 PE=3 SV=1

SEQ ID NO: 17149 - protein, 132 aa, unidentified
  source 1..132: note = Agrobacterium rhizogenes
  REGION 1..132: note = tr|A0A2T7VFQ1|A0A2T7VFQ1_AGRRH Uncharacterized protein OS=Agrobacterium rhizogenes OX=359 GN=DC430_10010; PE = 4 SV=1
MFAVEVRDHIMIAHSLPRPVFGPAQGMHGATFVVDAAFFTKDVDDDGLAVDIGAATTVLSETLKPLNYQNLDELDIFKGKVSTTEVIAKHIFDQLAEAVAVKRLGPGSHRICRIRVLLHESHAARGWYEADL

SEQ ID NO: 17150 - protein, 118 aa, unidentified
  source 1..118: note = Agrobacterium rhizogenes
  REGION 1..118: note = tr|A0A178GZI2|A0A178GZI2_AGRRH 6-carboxy-5,6,7,8-tetrahydropterin synthase; OS = Agrobacterium rhizogenes OX=359 GN=A8L48_04485 PE=3 SV=1
MFRITKEFHFSASHQLKSLPSDHQCNRLHGHNYIVEVELSGEALNEHGFVRDYHELSPLKRYIDDHFDHRHLNDVLGHDRVTAEYLAKHFYDWCKDRLPETSAVRVSETAKTWAEYRP

SEQ ID NO: 17151 - protein, 122 aa, unidentified
  source 1..122: note = Agrobacterium rosae
  REGION 1..122: note = tr|A0A2S4EAF4|A0A2S4EAF4_9RHIZ 6-carboxy-5,6,7,8-tetrahydropterin synthase; OS = Agrobacterium rosae OX=1972867 GN=queD PE=3 SV=1
MFRITKEFHFSASHQLKGLPADHQCARLHGHNYIVEVELSGEALNEHGFVRDYQELSPLKHYIDDHFDHRHLNDVLGHDMVTAERLAHHFYDWCKARLPETSAVRVSETAKTWAEYRPSRQS

SEQ ID NO: 17152 - protein, 122 aa, unidentified
  source 1..122: note = Agrobacterium rubi
  REGION 1..122: note = tr|A0A081CSA9|A0A081CSA9_9RHIZ 6-carboxy-5,6,7,8-tetrahydropterin synthase; OS = Agrobacterium rubi TR3 = NBRC 13261 OX=1368415 GN=queD; PE = 3 SV=1
MYRITKEFHFSASHQLKSLPADHQCARLHGHNYIVEVELSGQELNEHGFVRDYQELAPLKHYIDDRFDHRHLNDVMGHDRVTAECLAKHFYDWCKERLPETSAVRVSETSKTWAEYRPQPKP

SEQ ID NO: 17153 - protein, 122 aa, unidentified
  source 1..122: note = Agrobacterium rubi
  REGION 1..122: note = tr|A0A1B9TX06|A0A1B9TX06_9RHIZ 6-carboxy-5,6,7,8-tetrahydropterin synthase; OS = Agrobacterium rubi OX=28099 GN=A6U92_24495 PE=3 SV=1
MYRITKEFHFSASHQLKSLPADHQCARLHGHNYIVEVELTGHELNEHGFVRDYQELAPLKHYIDDRFDHRHLNDVMGHDKVTAECLAKHFYDWCKERLPETSAVRVSETAKTWAEYRPQPKP

SEQ ID NO: 17154 - protein, 118 aa, unidentified
  source 1..118: note = Agrobacterium salinitolerans
  REGION 1..118: note = tr|A0A1S9E5G6|A0A1S9E5G6_9RHIZ 6-carboxy-5,6,7,8-tetrahydropterin synthase; OS = Agrobacterium salinitolerans OX=1183413 GN=queD PE=3; SV = 1
MFRITKEFHFSASHQLKSLPSDHQCNRLHGHNYIVEIELAGEALNEHGFVRDYHELAPLKHYIDDKFDHRHLNDVLGHDRVTAECLAKHFYDWCKERLPETSAVRVSETAKTWAEYRP

SEQ ID NO: 17155 - protein, 118 aa, unidentified
  source 1..118: note = Agrobacterium salinitolerans
  REGION 1..118: note = tr|A0A1S7UCH5|A0A1S7UCH5_9RHIZ 6-carboxy-5,6,7,8-tetrahydropterin synthase; OS = Agrobacterium salinitolerans str. Hayward 0363; OX = 1183434 GN=AGR9A_Lc60176 PE=3 SV=1
MFRITKEFHFSASHQLKSLPSDHQCNRLHGHNYIVEVELKGEALNEHGFVRDYHELAPLKHYIDDKFDHRHLNDVLGHDRVTAECLAKHFYDWCKERLPETSAVRVSETAKTWAEYRP

SEQ ID NO: 17156 - protein, 118 aa, unidentified
  source 1..118: note = Agrobacterium sp.
  REGION 1..118: note = tr|A0A3R9J2B0|A0A3R9J2B0_9RHIZ 6-carboxy-5,6,7,8-tetrahydropterin synthase; OS = Agrobacterium sp. FDAARGOS_525 OX=2420311 GN=queD PE=3; SV = 1
MFRITKEFHFSASHQLKSLPSDHQCNRLHGHNYIVEVELSGEELNEHGFVRDYHELAPLKRYIDDHFDHRHLNDVLGHDRVTAECLAKHFYDWCKDRLPETSAIRVSETAKTWAEYRP

SEQ ID NO: 17157 - protein, 118 aa, unidentified; identical to SEQ ID NO: 17139
  source 1..118: note = Agrobacterium sp.
  REGION 1..118: note = tr|A0A0X6ZZX7|A0A0X6ZZX7_9RHIZ 6-carboxy-5,6,7,8-tetrahydropterin synthase; OS = Agrobacterium sp. D14 OX=1336743 GN=L901_25190 PE=3 SV=1

SEQ ID NO: 17158 - protein, 118 aa, unidentified
  source 1..118: note = Agrobacterium tumefaciens
  REGION 1..118: note = tr|A0A1S7RKY7|A0A1S7RKY7_RHIRD 6-carboxy-5,6,7,8-tetrahydropterin synthase; OS = Agrobacterium tumefaciens str. Kerr 14 OX=1183424; GN = ptpS PE=3 SV=1
MFRITKEFHFSASHQLKSLPADHQCARLHGHNYIVEVELSGEELNEHGFVRDYHELAPLKRYIDDHFDHRHLNDVLGHDRVTAECLAKHFYDWCKDRLPETSAVRVSETAKTWAEYRP

SEQ ID NO: 17159 - protein, 118 aa, unidentified
  source 1..118: note = Agrobacterium tumefaciens
  REGION 1..118: note = tr|H0H3E9|H0H3E9_RHIRD 6-carboxy-5,6,7,8-tetrahydropterin synthase; OS = Agrobacterium tumefaciens 5A OX=1107544 GN=AT5A_00860; PE = 3 SV=1
MFRITKEFHFSASHQLKSLPADHQCARLHGHNYIVEVELSGEELNEHGFVRDYHELAPLKRYIDDHFDHRHLNDVLGHDRVTAECLAKHFYDWCKTSLPETSAVRVSETAKTWAEYRP

SEQ ID NO: 17160 - protein, 118 aa, unidentified
  source 1..118: note = Agrobacterium vitis
  REGION 1..118: note = tr|A0A1S2DXX7|A0A1S2DXX7_AGRVI 6-carboxy-5,6,7,8-tetrahydropterin synthase; OS = Agrobacterium vitis OX=373 GN=BBK77_05575 PE=3 SV=1
MYRITKEFHFSASHQLKGLPADHQCARLHGHNYIVEVELSGEELNEHGFLRDYHELKVLKTYIDEAFDHRHLNDVLGHDKTTAECLAKHFYDWCKQHFAETSAVRVSETQKTWAEYRP

SEQ ID NO: 17161 - protein, 118 aa, unidentified
  source 1..118: note = Agrobacterium vitis
  REGION 1..118: note = tr|A0A202F0B6|A0A202F0B6_AGRVI 6-carboxy-5,6,7,8-tetrahydropterin synthase; OS = Agrobacterium vitis OX=373 GN=B7W85_13685 PE=3 SV=1
MYRITKEFHFSASHQLKGLPADHQCARLHGHNYIVLVELSGEELNEYGFLRDYHELKVLKTYIDETFDHRHLNDVLGHDKTTAECLAKHFYDWCKQHFAETSAVRVSETQKTWAEYRP

SEQ ID NO: 17162 - protein, 133 aa, Agromyces flavus
  REGION 1..133: note = tr|A0A1H1SLV2|A0A1H1SLV2_9MICO 6-pyruvoyl-tetrahydropterin synthase OS=Agromyces flavus; OX = 589382 GN=SAMN04489721_1402 PE=4 SV=1
MTYTVTVRDHIMIAHSFAGEAFGPAQRLHGATFIVDATFRAGELDPDGVVVDIGLASEALGEITAELNYRNLDDEPQFAGMNTTTERLCQVIADRLAERAAGGRLGAAGERLSSIEVILHESHVAWASYERTV

SEQ ID NO: 17163 - protein, 127 aa, Agromyces ramosus
  REGION 1..127: note = tr|A0A4Q7M9I9|A0A4Q7M9I9_9MICO 6-carboxy-5,6,7,8-tetrahydropterin synthase OS=Agromyces ramosus OX=33879 GN=EV187_2921 PE=3 SV=1
MTFYAELSREFSFESAHFLPNVPAGHKCGRMHGHSYTVEVHVRGAVDDESGFVQDFGDLSTAFAPISAQLDHRLLNDIEGLENPTSEHLARWMWDRLSVALPLLHAIVVSETPRSRCTYRGESNGGQ

SEQ ID NO: 17164 - protein, 123 aa, Agromyces sp.
  REGION 1..123: note = tr|A0A0Q9JPJ2|A0A0Q9JPJ2_9MICO 6-pyruvoyl tetrahydropterin synthase OS=Agromyces sp. Soil535; OX = 1736390 GN=ASG80_16340 PE=4 SV=1
MMVAHSFSGEAFGAAQRLHGATFIVDASFRASELDSDGVVIDIGRAAEALSQITGSLTYRNLDDEPEFAGMNTTTERLCRVIADRLAERAADGRLGSAGGRLSSIEVTLHESHVAWASYERKM

SEQ ID NO: 17165 - protein, 133 aa, Agromyces sp.
  REGION 1..133: note = tr|A0A4V0YHC4|A0A4V0YHC4_9MICO 6-carboxytetrahydropterin synthase OS=Agromyces sp. FW100M-8 OX=2509455 GN=ET445_13690 PE=4 SV=1
MSFTLTVRDHIMVAHSLTGEAFGPAQRLHGATFVVDAAFRARELDADGVVVDIGDAAAALREITGSLTYRNLDDEPALAGVNTTTEALCRFIADRLAERIADGRLGSGDGRLSSIEVTLHESHVAWASYERDV

SEQ ID NO: 17166 - protein, 119 aa, unidentified
  source 1..119: note = Ahniella affigens
  REGION 1..119: note = tr|A0A2P1PY70|A0A2P1PY70_9GAMM 6-carboxy-5,6,7,8-tetrahydropterin synthase OS=Ahniella affigens OX=2021234 GN=queD PE=3 SV=1
MNLFKSFRIEAAHRLPNVPAGHKCARLHGHSFEIEIHVDGPVDPHTGWVIDFAEIKAAFKPYYEQLDHHYLNDIDGLENPTSENLARWIFDKLKPVLPLLSEVVVYETCTSGCRYRGDG

SEQ ID NO: 17167 - protein, 281 aa, Aidingimonas halophila
  REGION 1..281: note = tr|A0A1H3B6B7|A0A1H3B6B7_9GAMM 6-pyruvoyl tetrahydropterin synthase OS=Aidingimonas halophila; OX = 574349 GN=SAMN05443545_105135 PE=4 SV=1
MTLFVNDLTHMDVSLYCPERGLVGASWHVDVVLDGELGHDGMLFDFGEVKPWIKARLDGGMDHTLLVPTEAPGITVIECSEGLCLRASQPYPLEIRGPRQAFTLLPWKEITHGRLAERLSADLMRRPPPRVNDIRLELRPESIDGAGYQYSHGLRHHEGNCQRIAHGHRSRLHLWVQGQRAPDLERQWAEWLDGRYLVDEHDIVPASDDDIRGFLTLRYQASQGRFYLRLPSARCVIMPTPTTIEHIAAWLAQRVAESSGQSIRIAAFEGIDKGAMAEAHP

SEQ ID NO: 17168 - protein, 132 aa, Aidingimonas halophila
  REGION 1..132: note = tr|A0A1H3ECT0|A0A1H3ECT0_9GAMM 6-pyruvoyl-tetrahydropterin synthase OS=Aidingimonas halophila OX=574349 GN=SAMN05443545_10761 PE=4 SV=1
MYSLTVRDHFMIAHSFDGDAFGPAQRTHGATYVTDVTFRRPELDDNDLVVDIALAGQVLGEVLNEFHLSNLDDVEAFKGRNTTTEFMAHVIFERLSTAIRQGRLGEHAKGLTALCVTLHESHVAWASYEGAL

SEQ ID NO: 17169 - protein, 150 aa, unidentified
  source 1..150: note = Akkermansia glycaniphila
  REGION 1..150: note = tr|A0A1C7P9R7|A0A1C7P9R7_9BACT 6-pyruvoyl tetrahydropterin synthase OS=Akkermansia glycaniphila; OX = 1679444 GN=PYTT_2310 PE=4 SV=1
MYRICKRIELESGHLLSKHPGNCQFPHGHTRSVEMVFAAEELDANDMVMDFKAIKEMLGDFLTRFDHALCMNTDDPNYETFRTAYGDRVIPFTSKDPTSEVMARTVFIQASSALADAIEGKYAYPVRPSVRLERVRVWETSSSWAEYSAH

SEQ ID NO: 17170 - protein, 150 aa, Akkermansia muciniphila
  REGION 1..150: note = tr|A0A2N8HDP4|A0A2N8HDP4_9BACT 6-pyruvoyl tetrahydropterin synthase OS=Akkermansia muciniphila; OX = 239935 GN=CXU22_05415 PE=4 SV=1
MAYRICKSIELESGHLLSKHPGNCKFPHGHTRSVEMVFRADTLDANDMVLDFKAVKQMVGDFLQQFDHSLCVNTEDPNYAAFVAAYGERIIPFDREDPTSEVMARTIFNFARHALEKAKEGCGEYPVRDCVTLERVRVWETSSSWAEYGE

SEQ ID NO: 17171 - protein, 150 aa, Akkermansia muciniphila
  REGION 1..150: note = tr|A0A2N8HZC3|A0A2N8HZC3_9BACT 6-carboxytetrahydropterin synthase OS=Akkermansia muciniphila OX=239935 GN=AKKM5201_12395 PE=4 SV=1
MVYRICKSIELESGHLLSKHPGNCKFPHGHTRSVEMVFRAETLDANDMVLDFKAIKQMMGDFLQQFDHSLCVNTEDPNFAAFVAAYGERIIPFDREDPTSEVMARVIFNVARHALEKARENPGEYPVRACVELERVRVWETSSSWAEYGE

SEQ ID NO: 17172 - protein, 150 aa, Akkermansia sp.
  REGION 1..150: note = tr|R7DSK6|R7DSK6_9BACT 6-pyruvoyl-tetrahydropterin synthase-like protein OS=Akkermansia sp. CAG:344; OX = 1262691 GN=BN616_01500 PE=4 SV=1
MAYRICKSIELESGHLLSKHPGNCKFPHGHTRSVEMVFRADTLDANDMVVDFKAIKQMMGDFLQQFDHSLCVNTDDPNYAAFVAAYGERIIPFDREDPTSEVMARTIFNFARHALEKAREGSGEYPVRDCVTLERVRVWETSSSWAEYGE

SEQ ID NO: 17173 - protein, 150 aa, Akkermansia sp.
  REGION 1..150: note = tr|A0A5B6G5T4|A0A5B6G5T4_9BACT 6-carboxytetrahydropterin synthase OS=Akkermansia sp. BIOML-A11 OX=2584567 GN=F1974_02720 PE=4 SV=1
MAYRICKSIELESGHLLSKHPGNCKFPHGHTRSVEMVFRADSLDASDMVLDFKAVKQMMGEFLQQFDHSLCMNTEDPNYRTFLAAYGDRIIPFDREDPTSEVMARTIFTYARKALEKAKKTFTEYPVRDCVTLERVRVWETSSSWAEYGE

SEQ ID NO: 17174 - protein, 121 aa, Albidiferax sp.
  REGION 1..121: note = tr|A0A1H0SS47|A0A1H0SS47_9BURK 6-carboxy-5,6,7,8-tetrahydropterin synthase OS=Albidiferax sp. OV413 OX=1855285 GN=SAMN05216303_104304 PE=3 SV=1
MQLTISQRFYFDAAHTLQREIETEGSRRIHGHTYHAEVSVTGPRDPVNGMVLDLGFLRQRLETVREQLDHHLLDEVPKLGTPTLENLCSFIAEQLSGVHPPVSRVRVWRDAIGDACTLDIP

SEQ ID NO: 17175 - protein, 130 aa, Albimonas donghaensis
  REGION 1..130: note = tr|A0A1H2TDT6|A0A1H2TDT6_9RHOB 6-pyruvoyl-tetrahydropterin synthase OS=Albimonas donghaensis OX=356660 GN=SAMN05444336_101965 PE=4 SV=1
MYAVEVRDHVMLAHSLPGEVFGPAQGLHGATYVVDVAFFREELGPERIVADIGRAHDVLKAALAPINYANLDAVFPGELTTTEWLARHIFDRLAEAARGGELGTGSEGIERIRVTLNESHIAKAWFEGAV

SEQ ID NO: 17176 - protein, 130 aa, unidentified
  source 1..130: note = Albimonas pacifica
  REGION 1..130: note = tr|A0A1I3H223|A0A1I3H223_9RHOB 6-pyruvoyl-tetrahydropterin synthase OS=Albimonas pacifica; OX = 1114924 GN=SAMN05216258_105466 PE=4 SV=1
MYAVEVRDHVMLAHSLPGEVFGPAQGLHGATYVVDVAFYRAELGPERIVVDIGRAHEALKAALAPLNYANLDETFPGELTTTEWLAKHVHDQLSAAARAGGLGVGSEGIERIRVTLNESHVARAWYEAAP

SEQ ID NO: 17177 - protein, 364 aa, unidentified
  source 1..364: note = Alcaligenaceae bacterium
  REGION 1..364: note = tr|A0A354K340|A0A354K340_9BURK 6-pyruvoyl tetrahydropterin synthase OS=Alcaligenaceae bacterium; OX = 2021368 GN=DDY24_11965 PE=4 SV=1
MSDQLLFVAAAPFEAACRVDCLPEGHRASRLHGHSFLGEVRAALPKDWAPFPGAEVESLSRHLSQCVSVLDYSDLNKTIPTPTDENIARWIRRNLTVPGISVVGVQSTTHSGVDLDARDHAHVWRRYIFQSAHQLPNVPNGHKCGRMHGHGFEVILHADQDVGTRDLSIDYDHLDALWAPIHEELDHACLNDIPGLENPTSENISAWIWNRLKPILPELSWVTVYETGSCGAHFDGHHYRIWKELTLDSAVRLKHAPEGDKRRRIHGHTFTLRLHLHAPLDQVHGWTVDFGDVKAVFDPIFKQLDHQPLHKVMDDRDADVASIARYIKELVAMQLPQIDRIDLNSTRGCGVILHWGELGPALPI

SEQ ID NO: 17178 - protein, 123 aa, unidentified
  source 1..123: note = Alcaligenaceae bacterium
  REGION 1..123: note = tr|A0A2G4J8T3|A0A2G4J8T3_9BURK 6-carboxy-5,6,7,8-tetrahydropterin synthase; OS = Alcaligenaceae bacterium OX=2021368 GN=CK528_06385 PE=3; SV = 1
MNPRHFELSQRFYFEAAHSLARTIDAQGSRRIHGHTYEAEVTLQGQPDPLTGMLIDLAYLRQEIERVRNLLDHHFLDDIADLGPVTLENLCVFIANKLRATLPQLSCVTVERRASADKCVLHL

SEQ ID NO: 17179 - protein, 147 aa, unidentified; identical to SEQ ID NO: 16831
  source 1..147: note = Alcaligenes xylosoxydans
  REGION 1..147: note = tr|A0A2T5CJR3|A0A2T5CJR3_ALCXX 6-carboxy-5,6,7,8-tetrahydropterin synthase OS=Alcaligenes xylosoxydans xylosoxydans OX=85698 GN=queD PE=3 SV=1

SEQ ID NO: 17180 - protein, 147 aa, unidentified
  source 1..147: note = Alcaligenes xylosoxydans
  REGION 1..147: note = tr|A0A176XSZ9|A0A176XSZ9_ALCXX 6-carboxy-5,6,7,8-tetrahydropterin synthase OS=Alcaligenes xylosoxydans xylosoxydans OX=85698 GN=A7J67_00515 PE=3 SV=1
MISVTRRLEFDAGHRIPDHRSQCRNLHGHRYVLEITLTGDVVQAPGESDNGMVMDFSEIKHIAKTHIVDVWDHAFLVYEGDTAVRGFLDTLPGHKTVVLDRIPTAENLATIVFDTLAPHYHGHYGAELRLTRVRLYETPNCWADCNG

SEQ ID NO: 17181 - protein, 283 aa, unidentified
  source 1..283: note = Alcanivoracaceae bacterium
  REGION 1..283: note = tr|A0A3L8AZZ3|A0A3L8AZZ3_9GAMM 6-pyruvoyl tetrahydropterin reductase OS=Alcanivoracaceae bacterium GenoA1_TS13_700 OX=2072747 GN=D9N13_18865 PE=4 SV=1
MSALFVKHLTVIDFSYVHITRGILGESWIVDVELYGELDNQGMVFDFGHVKKQVRDAVESLFDHKLVVPSGLPQWQTNTTAQGLALSWQDDQGRTFSHLSPEEAVQPVNADVINTDALIPLLEDVAMAAVPDNVSRVVIELRPEEIAGPFYHYSHGLKKHDGNCQRIAHGHRSRIKILRNGKRDPLLEKAWALKWRDIYIGTEADMIKRFEDNGVEYCHFGYDAPQGRFELTLPAAQVYLIPTDSTVEYLADHIAATLKQDHPDHQFEVKAYEGVMKGAIAHR

SEQ ID NO: 17182 - protein, 302 aa, unidentified
  source 1..302: note = Alcanivoracaceae bacterium
  REGION 1..302: note = tr|A0A2E2DMM1|A0A2E2DMM1_9GAMM 6-pyruvoyl tetrahydropterin reductase OS=Alcanivoracaceae bacterium; OX = 2024895 GN=CL537_16475 PE=4 SV=1
MATLFVENLTVADFSYLHPKRGMIGESWLVDLELSGDLDHQGMVFDFGHIKKSIKRIIDDNVDHRLLVPMDCEQVSVAERDNNTSLEWQYRGGTIRMVVPSESLLLMSGPEVSKASLTLYLMELVQSVVPENVAEVRVILREEDTGTAPYYHYSHGLKKHDGNCQRIAHGHRSSIHIFENGRRSRYWEKLWADRWEDIYIGTEDDLEGTYYIDEIPHHRFRYDAPQGRFELVIPEDHCYLIDTDSTVEQLAAHIAEQLAVEAPGKHFRVRAFEGVGKGAIAEAGEDLPGRTQSGWLTGSAVI

SEQ ID NO: 17183 - protein, 302 aa, Alcanivorax borkumensis
  REGION 1..302: note = tr|Q0VMN5|Q0VMN5_ALCBS Uncharacterized protein; OS = Alcanivorax borkumensis (strain ATCC 700651 / DSM 11573 / NCIMB 13689 / SK2) OX=393595 GN=ABO_2115 PE=4 SV=1
MATLFVENLTVADFSYLHSKRGMVGESWLVDLELSGELDDQGMVFDFGHIKKQIKQLIDDNVDHRLLVPVDSDQVTITERDKDISLEWIYRGGTIRMIAPNQSLLLMAGPEVTKASLTLYLMDLIQTVVPKNVEEVRVVLREEDTGTAPFYHYSHGLKKHDGNCQRIAHGHRSNIHIFENGRRSRYWEKLWADRWEDIYLGTEEDLEGTYYIDEIPHHRFRYDAQQGYFELVIPEDHCYMIDTDTTVEQLATHIANQLATEAPGKHFRVRAFEGVGKGAIADAGENMPGKTHNSWLSSTPVI

SEQ ID NO: 17184 - protein, 292 aa, Alcanivorax dieselolei
  REGION 1..292: note = tr|K0CC05|K0CC05_ALCDB Uncharacterized protein; OS = Alcanivorax dieselolei (strain DSM 16502 / CGMCC 1.3690 / B-5) OX=930169 GN=B5T_00903 PE=4 SV=1
MATLFVDNLTVLDFSYLHPKRGMIGESWIVDLELSGDLDGQGMVFDFGQVKRQLKRLIDDQVDHRLLFPGAHEALSLNRRKDQQLSLTWQYGAGEIRLLAPTESLLEIPGTEVSKASVTLFLMELLEPSLPDNVNEARILLREEDTGTAPFYHYSHGLKKHDGNCQRIAHGHRSTIQIFENGRRSRYWEKLWADRWEDIYIGTREDLEGTYFVEEVPHHRFRYDAPQGHFELVIPEDHCYLIDTDTTVEYLADHIARQLAEEAPGKHFRVRAFEGVGKGAIAEAGENNLKSS

SEQ ID NO: 17185 - protein, 303 aa, Alcanivorax hongdengensis
  REGION 1..303: note = tr|L0WG81|L0WG81_9GAMM Uncharacterized protein; OS = Alcanivorax hongdengensis A-11-3 OX=1177179; GN = A11A3_00125 PE=4 SV=1
MATLFVENLTVVDFSYLHAKRGMVGESWMVDLELTGELDHQGMVFDFGLIKKQIKKLIDTHVDHRLLVPADSEQLTRSQRDDDLSIEWAYRAGTIRMVSPRESVLLMPGPEVSKASLTLYLMELVQQAVPDNVAEVQIVLREEDTGTAPFYHYSHGLKKHDGNCQRIAHGHRSGIHIFENGRRSRYWEKMWADRWEDIYIGTQEDLEGTYYIEEIPHHRFRYDADQGHFELVIPEDHCYLVDSDTTVEQLASHIAGQLAVEAPGKHFRVRAFEGIGKGAIAEAGENLPGRVQTGWLTGGVASI

SEQ ID NO: 17186 - protein, 302 aa, Alcanivorax jadensis
  REGION 1..302: note = tr|A0A095TIK2|A0A095TIK2_9GAMM Uncharacterized protein OS=Alcanivorax jadensis T9 OX=1177181 GN=T9A_00544; PE = 4 SV=1
MATLFVENLTVADFSYLHPKRGMVGESWLVDLELTGDLDHQGMVFDFGHIKKRIKQIIDDNVDHRLLVPVDSEHATVSERDNNTSLEWLYRGGTIRMVAPSESLLLMSGPEVSKANLTLFLMDLVQQVVPDNVAEVRIVLREEDTGTAPFYHYSHGLKKHDGNCQRIAHGHRSGIHIFENGRRSRYWEKLWADRWEDIYLGTEEDLEGTYYIEEIPHHRFRYDAPQGHFELVIPEDHCYLVDTDTTVEQLAGHIAEQLATEAPGKHFRVRAFEGIGKGAIAEAGENMPGKTHSGWLSGATVI

SEQ ID NO: 17187 - protein, 302 aa, unidentified
  source 1..302: note = Alcanivorax nanhaiticus
  REGION 1..302: note = tr|A0A095SIZ6|A0A095SIZ6_9GAMM Uncharacterized protein OS=Alcanivorax nanhaiticus OX=1177154 GN=Y5S_02307; PE = 4 SV=1
MATLFVENLTVADFSFLHSKRGMVGESWLVDLELTGDLDHQGMVFDFGHIKKRIKQAIDERVDHRLLVPVDCDQASVVERDNDTSLEWQYRGGTIRMVVPSESLLLMPGTEVSKASLTLHLMELVQSVVPENVHEVRIILREEDTGTAPYYHYSHGLKKHDGNCQRIAHGHRSNIHIFENGRRSRYWEKLWADRWEDIYLGTREDLEGTYYIDEIPHHRFRYDAPQGHFELVIPEDHCYLIDTDSTVEQLAAHIAEQLAEEAPGKHFRVRAFEGVGKGAIAEAGENLPGKAHSGWLSGAAVI

SEQ ID NO: 17188 - protein, 293 aa, Alcanivorax pacificus
  REGION 1..293: note = tr|A0A0B4XT51|A0A0B4XT51_9GAMM Uncharacterized protein OS=Alcanivorax pacificus W11-5 OX=391936; GN = S7S_15300 PE=4 SV=1
MATLFVDNLTVLDFSYLHGKRGMVGESWIVDLELTGDLDEQGMVFDFGLIKKAVKKAVDATVDHKLVVPADSDHLVAGQAGGDVNLEWVYQGGTIRMKAPTCSTVYLPGSEVTKSTLTLFLLDIVQPVLPANVRELVLTLREEDVGTAPSYHYSHGLKKHDGNCQRIAHGHRSCIQIFENGRRSRYWEKLWADRWEDIYIGTREDLEGTYYIDEVPHHRFRYEAEQGLFELLIPEDHCYLIDTDSTVEHLAEHIARQLADEAPGKHFRVRAFEGVAKGALAEAGSLGPRGPVG

SEQ ID NO: 17189 - protein, 302 aa, unidentified
  source 1..302: note = Alcanivorax profundi
  REGION 1..302: note = tr|A0A418XU16|A0A418XU16_9GAMM 6-pyruvoyl tetrahydropterin reductase OS=Alcanivorax profundi; OX = 2338368 GN=D4A39_15305 PE=4 SV=1
MATLFVENLTVADFSYLHPKRGMIGESWLVDLELSGDLDHQGMVFDFGHIKKSIKRIIDDNVDHRLLVPMDCEQVSVAERDNNTSLEWQYRGGTIRMVVPSESLLLMSGPEVSKASLTLYLMELVQSIVPENVAEVRVILREEDTGTAPYYHYSHGLKKHDGNCQRIAHGHRSSIHIFENGRRSRYWEKLWADRWEDIYIGTEEDLEGTYYIDEIPHHRFRYDAPQGRFELVIPEDHCYLINTDSTVEQLAAHIAEQLAVEAPGKHFRVRAFEGVGKGAIAEAGEDLPGRTQSGWLAGSAVI

SEQ ID NO: 17190 - protein, 302 aa, Alcanivorax sp.
  REGION 1..302: note = tr|A0A1H5VXS8|A0A1H5VXS8_9GAMM 6-pyruvoyl tetrahydropterin synthase OS=Alcanivorax sp. DSM 26293; OX = 1798238 GN=SAMN04515663_10519 PE=4 SV=1
MATLFVENLTVADFSYLHPKRGMVGESWLVDLELTGDLDHQGMVFDFGHIKKRIKQIIDDSVDHRLLVPVDSEHATVSERDNNTSLEWLYRGGTIRMVAPSESLLLMNGPEISKANLTLFLMDLVQQVVPENVAEVHIVLREEDTGTAPFYHYSHGLKKHDGNCQRIAHGHRSGIHIFENGRRSRYWEKLWADRWEDIYLGTEEDLEGTYYIDEIPHHRFRYDAPQGHFELVIPEDHCYLVDTDTTVEQLAAHIAEQLATEAPGKHFRVRAFEGVGKGAIAEAGENLPGKAHSGWLSGAAVI

SEQ ID NO: 17191 - protein, 292 aa, Alcanivorax sp.
  REGION 1..292: note = tr|A0A154C3N0|A0A154C3N0_9GAMM 6-pyruvoyl tetrahydropterin reductase OS=Alcanivorax sp. KX64203; OX = 1817793 GN=A3Q32_15610 PE=4 SV=1
MATLFVDNLTVLDFSYLHPKRGMIGESWIVDLELSGDLDGQGMVFDFGQVKRRLKRLIDDQVDHRLLFPGAHEALSLNQREDQQLSLTWQYAAGEIRLVAPSESLLEIAGTEVSKASVTLFLMELLEPSLPDNVNEARILLREEDTGTAPFYHYSHGLKKHDGNCQRIAHGHRSTIQIFENGRRSRYWEKLWADRWEDIYIGTREDLEGTYFVEEVPHHRFRYDAPQGHFELVIPEDHCYLIDTDTTVEYLADHIARQLAEEAPGKHFRVRAFEGVGKGAIAEAGENNLKSS

SEQ ID NO: 17192 - protein, 136 aa, unidentified
  source 1..136: note = Algibacter alginicilyticus
  REGION 1..136: note = tr|A0A0P0CVZ8|A0A0P0CVZ8_9FLAO 6-carboxy-5,6,7,8-tetrahydropterin synthase OS=Algibacter alginicilyticus OX=1736674 GN=APS56_05505 PE=3 SV=1
MKVTVSRKAHFNAAHRLYRKDWDFEKNDAIFGKCNNPNFHGHNYELIVSVTGDINKETGYVIDIKVLKEIIKDEVEDAFDHKNLNVEVPEFKDLNPTAENIAVVIYNKIKPKLNSNLELEITLFETPRNFVSYSGN

SEQ ID NO: 17193 - protein, 150 aa, unidentified
  source 1..150: note = Algibacter alginicilyticus
  REGION 1..150: note = tr|A0A0P0CS76|A0A0P0CS76_9FLAO 6-pyruvoyl tetrahydropterin synthase OS=Algibacter alginicilyticus; OX = 1736674 GN=APS56_11310 PE=4 SV=1
MNHIRITKQFSFESGHALYGYDGKCKNVHGHSYKLSVTVIGVPISDKTNVKYGMVIDFGDLKKIVKEEIVNVFDHATVFNKNTPHVELAKELQDRGHNVLLVDYQPTSEMMVIDFAKKIKKRLPAHIDLHSLKLQETDSSFAEWYNYDNI

SEQ ID NO: 17194 - protein, 151 aa, unidentified
  source 1..151: note = Algibacter amylolyticus
  REGION 1..151: note = tr|A0A556QYQ5|A0A556QYQ5_9FLAO 6-carboxytetrahydropterin synthase OS=Algibacter amylolyticus OX=1608400 GN=FPF71_01465 PE=4 SV=1
MANNIRITKQFSFETGHALYGYDGKCKNVHGHSYKLSVTVIGQPITDTNNVKYGMVIDFGDLKKIVKEEIVNVFDHATVFNKNTPHVELAKELSDRGHNVLLVDYQPTSEMMVLDFAKKIGKRLPSHIKLHSLKLQETDTSFAQWFQYDNI

SEQ ID NO: 17195 - protein, 136 aa, unidentified
  source 1..136: note = Algibacter amylolyticus
  REGION 1..136: note = tr|A0A556QFB9|A0A556QFB9_9FLAO 6-carboxy-5,6,7,8-tetrahydropterin synthase OS=Algibacter amylolyticus OX=1608400 GN=FPF71_10335 PE=3 SV=1
MKVTVSRKAHFNAAHRLYRKDWSFEKNDDIFGKCNNPNFHGHNYELIVSVTGQIDKETGYVIDMKVLKDIIKNNVEDAFDHKNLNLEVPEFKDLNPTAENIAVVIYNKIKPELSDNLDLEITLYETPRNFVSYSGN

SEQ ID NO: 17196 - protein, 136 aa, unidentified
  source 1..136: note = Algibacter aquaticus
  REGION 1..136: note = tr|A0A1E5SII9|A0A1E5SII9_9FLAO 6-carboxy-5,6,7,8-tetrahydropterin synthase OS=Algibacter aquaticus OX=1849968 GN=A8C32_07100 PE=3 SV=1
MKVTVSRKAHFNAAHRLHRPDWSFEKNEEIFGKCNNPNFHGHNYELIVSVTGDIDEETGYVIDIKILRNLIKNEVEDAFDHKNLNVEVLEFKNLNPTAENIAVVIYNKIKPKLKPSLELEITLYETPRNFVSYSGK

SEQ ID NO: 17197 - protein, 151 aa, unidentified
  source 1..151: note = Algibacter aquaticus
  REGION 1..151: note = tr|A0A1E5TE34|A0A1E5TE34_9FLAO 6-carboxytetrahydropterin synthase QueD OS=Algibacter aquaticus OX=1849968 GN=A8C32_13150 PE=4 SV=1
MSNNIRITKQFSFETGHALYGYDGKCKNVHGHSYKLSVTVIGQPITDNTNVKFGMVIDFSDLKKIVTEEIVDVFDHATVFNKNTPHVELAKELQDRDHNVLLVDYQPTSEMMVIDFAKKIKTRLPKHINLHSLKLQETESSFAEWFAYENN

SEQ ID NO: 17198 - protein, 75 aa, Algibacter lectus
  REGION 1..75: note = tr|A0A090X5N0|A0A090X5N0_9FLAO 6-pyruvoyl tetrahydrobiopterin synthase OS=Algibacter lectus; OX = 221126 GN=JCM19274_2489 PE=4 SV=1
MDMKVLKDLIEAEVEDQLDHKNLNLEVPEFKDLNPTAENIAVVIYNKLKPKLDDKLALEITLYETPRNFVTYSGK

SEQ ID NO: 17199 - protein, 136 aa, Algibacter lectus
  REGION 1..136: note = tr|A0A090VMA9|A0A090VMA9_9FLAO 6-carboxy-5,6,7,8-tetrahydropterin synthase OS=Algibacter lectus OX=221126 GN=JCM19300_566 PE=3 SV=1
MEVTVNRKAHFNAAHRLYRKDWSFEKNDAVFGKCNNPNFHGHNYELIVSVTGEIDKETGFVMDMKVLKDLIEAEVEDQLDHKNLNLEVPEFKDLNPTAENIAVVIYNKLKPKLDDKLALEITLYETPRNFVTYSGK

SEQ ID NO: 17200 - protein, 151 aa, unidentified
  source 1..151: note = Algibacter pectinivorans
  REGION 1..151: note = tr|A0A1I1NSW4|A0A1I1NSW4_9FLAO 6-pyruvoyltetrahydropterin/6-carboxytetrahydropterin synthase OS=Algibacter pectinivorans OX=870482; GN = SAMN04487987_102361 PE=4 SV=1
MANNIRITKQFSFETGHALYGYDGKCKNVHGHSYKLSVTVIGQPITDTNNVKYGMVIDFGDLKKIVKEEIVNVFDHATVFNKNTPHVELAKELQDRGHNVLLVDYQPTSEMMVLDFAKKIGKRLPGHIKLHSLKLQETDTSFAQWYQYDNI

SEQ ID NO: 17201 - protein, 136 aa, unidentified
  source 1..136: note = Algibacter pectinivorans
  REGION 1..136: note = tr|A0A1I1R7I7|A0A1I1R7I7_9FLAO 6-carboxy-5,6,7,8-tetrahydropterin synthase OS=Algibacter pectinivorans OX=870482 GN=SAMN04487987_1095 PE=3 SV=1
MKVTVSRKAHFNAAHRLYRKDWSFEKNDDMFGKCNNPNFHGHNYELIVSVTGHIDKETGYVIDMKVLKDIIKTNVEDAFDHKNLNVEVPEFKDLNPTAENIAVVIYNKIKPELKDDLSLEITLYETPRNFVSYSGN

SEQ ID NO: 17202 - protein, 136 aa, Algibacter sp.
  REGION 1..136: note = tr|A0A2U2X540|A0A2U2X540_9FLAO 6-carboxy-5,6,7,8-tetrahydropterin synthase OS=Algibacter sp. ZY111 OX=2100723 GN=DIS18_11595 PE=3 SV=1
MKVTVSRKAHFNAAHRLYRKDWSFEKNDKIFGKCNNPNFHGHNYELIVSVTGGIDKETGYVIDMKVLKDIIKTEVEDAFDHKNLNLEVPEFTNLNPTAENIAVVIYNKMKPKLNSNLELEITLYETPRNFVTYSGN

SEQ ID NO: 17203 - protein, 151 aa, Algibacter sp.
  REGION 1..151: note = tr|A0A2U2X8A7|A0A2U2X8A7_9FLAO 6-carboxytetrahydropterin synthase QueD OS=Algibacter sp. ZY111 OX=2100723 GN=DIS18_05570 PE=4 SV=1
MGNNIRITKQFSFETGHALYGYDGKCKNVHGHSYKLSVTVIGKPITDNTNVKFGMVIDFGDLKKIVKEEIVNVFDHATVFNKNTPHVELAKELQDRGHNVLLVDYQPTSEMMVLDFSKKIGKRLPKHIKLHSLKLQETDTSFAEWFAYENN

SEQ ID NO: 17204 - protein, 136 aa, unidentified; identical to SEQ ID NO: 17199
  source 1..136: note = Algibacter wandonensis
  REGION 1..136: note = tr|A0A4R8M9U6|A0A4R8M9U6_9FLAO 6-carboxy-5,6,7,8-tetrahydropterin synthase OS=Algibacter wandonensis OX=1343161 GN=DFQ06_3173 PE=3 SV=1

SEQ ID NO: 17205 - protein, 151 aa, unidentified
  source 1..151: note = Algibacter wandonensis
  REGION 1..151: note = tr|A0A4R8MDT7|A0A4R8MDT7_9FLAO 6-pyruvoyltetrahydropterin/6-carboxytetrahydropterin synthase OS=Algibacter wandonensis OX=1343161; GN = DFQ06_2333 PE=4 SV=1
MGNNIRITKKFAFETGHALYGYDGKCKNVHGHSYKLSVTVIGQPISDSTNVKYGMVIDFGDLKKIVKEEIVDVFDHATVFNKNTPHVELAKELEARDHNVLLVDYQPTSEMMVLDFAKKIKNRLPKHISLHSLKLQETDSSFAQWFASDNI

SEQ ID NO: 17206 - protein, 136 aa, unidentified
  source 1..136: note = Algoriella xinjiangensis
  REGION 1..136: note = tr|A0A1I4TA71|A0A1I4TA71_9FLAO 6-carboxy-5,6,7,8-tetrahydropterin synthase OS=Algoriella xinjiangensis OX=684065 GN=SAMN05421738_102115 PE=3 SV=1
MKVTVNRKAHFNAAHRLFNQNWSDEKNFEVFGKCSYPHFHGHNYEIIVSVKGEVDPETGFVMNLDELRQIIEVEVEDYLDHKNLNIDIEEFKNTNPTAENIVILIWNKIRAKLNADLELKVTLYETPRNFVEYDGE

SEQ ID NO: 17207 - protein, 150 aa, unidentified
  source 1..150: note = Algoriella xinjiangensis
  REGION 1..150: note = tr|A0A1I4YJP9|A0A1I4YJP9_9FLAO 6-pyruvoyltetrahydropterin/6-carboxytetrahydropterin synthase OS=Algoriella xinjiangensis OX=684065; GN = SAMN05421738_11179 PE=4 SV=1
MKIIRLTKAFTFETAHALHGYDGKCKNIHGHSYKLFVTVKGKPSEDLDDVKLGMVMDFGDLKKIVNKEIVHIFDHAILLNENSPHKILGEKLLAEGHTVVFTDYQPSAENMILWIVEKIKPLLPENIELVALKLHETENSYAEWLAEDNQ

SEQ ID NO: 17208 - protein, 139 aa, Algoriphagus alkaliphilus
  REGION 1..139: note = tr|A0A1G5ZHT0|A0A1G5ZHT0_9BACT 6-pyruvoyltetrahydropterin/6-carboxytetrahydropterin synthase OS=Algoriphagus alkaliphilus OX=279824; GN = SAMN03080617_03843 PE=4 SV=1
MIHVCRKEHFNAAHKLWNPKWSDEKNFEVFGPCANVNWHGHNFELIVTVRGLPDPETGFVVDLKQLSTLIRKLVTEKVDHKNLNVDVDFMLGKMASCEILVMEFWKILEPAVKEITPHGGLYKLTLYETPRNFVEYFGG

SEQ ID NO: 17209 - protein, 139 aa, Algoriphagus alkaliphilus
  REGION 1..139: note = tr|A0A1G5VSH9|A0A1G5VSH9_9BACT 6-carboxy-5,6,7,8-tetrahydropterin synthase; OS = Algoriphagus alkaliphilus OX=279824; GN = SAMN03080617_00639 PE=3 SV=1
MIYLTKKIEFEAAHRISNYPGTCSEIHGHTYYLEVTVSGKVDWNTDMVLDFKILKSIIQTGVIDHFDHALILKRNSENEKIFSSYPGKIAWMESEPTAEQMLLWIVSSISPLLPDEISLAKLKLHETSGSCASWKDNKR

SEQ ID NO: 17210 - protein, 139 aa, Algoriphagus antarcticus
  REGION 1..139: note = tr|A0A3E0DFS4|A0A3E0DFS4_9BACT 6-pyruvoyltetrahydropterin/6-carboxytetrahydropterin synthase OS=Algoriphagus antarcticus OX=238540; GN = C8N25_12669 PE=4 SV=1
MIYVCRKEHFNAAHKLWNPKWSDEKNVEVFGPCANVNWHGHNFELIVMVKGLPDPDTGFVVDLKKLSTVIRNLVIEKVDHKNLNVDVDFMLGKLASCENLIMEFWKILEPAVKEITPYGGLHKLTLYETPRNFVEYLGD

SEQ ID NO: 17211 - protein, 136 aa, Algoriphagus antarcticus
  REGION 1..136: note = tr|A0A3E0E1R5|A0A3E0E1R5_9BACT 6-carboxy-5,6,7,8-tetrahydropterin synthase; OS = Algoriphagus antarcticus OX=238540 GN=C8N25_104194 PE=3; SV = 1
MKVTVFRKEHFNAAHRLHNSDWSDEQNQAVFGKCNNPNYHGHNYDLIVKLRGEIDSRTGYVYDMKMLSDLIKEHILKKLDHKNLNLDTDEFKELNPTAENIAVVIWNILREKIDRKFELTIRLYETERNFVEYDGN

SEQ ID NO: 17212 - protein, 136 aa, Algoriphagus aquaeductus
  REGION 1..136: note = tr|A0A326RRV3|A0A326RRV3_9BACT 6-pyruvoyltetrahydropterin/6-carboxytetrahydropterin synthase OS=Algoriphagus aquaeductus OX=475299; GN = CLV31_10480 PE=4 SV=1
MKVSVFRKEHFNAAHRLFNPTWSAQKNEEVFGKCNNPNFHGHNYELIVQLKGEINPETGYVYDMKVLSDLIKIHVLNKFDHKNLNLDTDEFKNLNPSAENIAVVIWNILRVKIDRKFELTIRLYETERNFVEYDGN

SEQ ID NO: 17213 - protein, 139 aa, Algoriphagus aquaeductus
  REGION 1..139: note = tr|A0A326RUU3|A0A326RUU3_9BACT 6-pyruvoyltetrahydropterin/6-carboxytetrahydropterin synthase OS=Algoriphagus aquaeductus OX=475299; GN = CLV31_103371 PE=4 SV=1
MIYVSRKEHFNAAHKLWNPNWSDEKNFEVFGPCANVNWHGHNFELIVTVKGLPDAETGFVVDLKQLSTLIRRLVIDKVDHKNLNVDVDFMAGKLASCETLVMEFWKILQPAIKEITKHGGLYKLTLYETPRNFVEYFGE

SEQ ID NO: 17214 - protein, 139 aa, Algoriphagus aquimarinus
  REGION 1..139: note = tr|A0A5C7AXQ8|A0A5C7AXQ8_9BACT 6-carboxytetrahydropterin synthase OS=Algoriphagus aquimarinus OX=237018 GN=ESV85_07295 PE=4 SV=1
MIYVCRKEHFNAAHKLWNPKWSDEKNVEIFGPCANVNWHGHNFELIVMVKGLPDPDTGFVVDLKKLSTIIRNLVIERVDHKNLNVDVDFMYGKLASCENLIMEFWKILEPAVNEITSHGGLHKLTLYETPRNFVEYFGE

SEQ ID NO: 17215 - protein, 139 aa, Algoriphagus aquimarinus
  REGION 1..139: note = tr|A0A1I1C8Y0|A0A1I1C8Y0_9BACT 6-pyruvoyltetrahydropterin/6-carboxytetrahydropterin synthase OS=Algoriphagus aquimarinus OX=237018; GN = SAMN04489723_12514 PE=4 SV=1
MIYVCRKEHFNAAHKLWNPKWSDEKNVEVFGPCANVNWHGHNFELIVMVKGLPDPDTGFVVDLKKLSTIIRNLVIERVDHKNLNVDVDFMEGKLASCENLIMEFWKILEPAVNEITSHGGLHKLTLYETPRNFVEYFGE

SEQ ID NO: 17216 - protein, 136 aa, Algoriphagus boritolerans
  REGION 1..136: note = tr|A0A1H5WMC3|A0A1H5WMC3_9BACT 6-carboxy-5,6,7,8-tetrahydropterin synthase; OS = Algoriphagus boritolerans DSM 17298 = JCM 18970; OX = 1120964 GN=SAMN03080598_02151 PE=3 S V=1
MKVSVYRKEHFNAAHRLNNPLWSQAENEAIFGKCNNSNYHGHNYDLVVQLKGEIDSRTGYVYDMKVLSDMIKEYVLNRFDHKNLNLDTDEFRNLNPSAENIAVVIWNILREKIDRKFELTIRLYETERNFVEYDGN

SEQ ID NO: 17217 - protein, 139 aa, Algoriphagus boritolerans
  REGION 1..139: note = tr|A0A1H5Z563|A0A1H5Z563_9BACT 6-pyruvoyltetrahydropterin/6-carboxytetrahydropterin synthase OS=Algoriphagus boritolerans DSM 17298 = JCM 18970 OX=1120964 GN=SAMN030 80598_03334 PE=4 SV=1
MIHVCRKEHFNAAHKLWNPKWSEEKNFEVFGPCANVNWHGHNFELIVTVKGLPDPETGFVVDLKQLSTVIRRLVIDKVDHKNLNVDVDFMAGKMASCEILVMEFWKILEPAVKEITPHGGLYKLTLYETPRNFVEYYGG

SEQ ID NO: 17218 - protein, 136 aa, unidentified
  source 1..136: note = Algoriphagus boseongensis
  REGION 1..136: note = tr|A0A4R6T6T6|A0A4R6T6T6_9BACT 6-carboxy-5,6,7,8-tetrahydropterin synthase; OS = Algoriphagus boseongensis OX=1442587 GN=DFQ04_0125 PE=3; SV = 1
MKVSVYRKEHFNAAHRLYNASWSDEQNEAVFGKCNNPNFHGHNYELIVQLKGEIDPDTGYVYDMKVLSDLIKAHVLNKFDHKNLNLDTDEFKNLNPSAENIAVVIWNILREKIDRKFELTVRLYETERNFVEYDGN

SEQ ID NO: 17219 - protein, 139 aa, unidentified
  source 1..139: note = Algoriphagus boseongensis
  REGION 1..139: note = tr|A0A4R6T3B6|A0A4R6T3B6_9BACT 6-pyruvoyltetrahydropterin/6-carboxytetrahydropterin synthase OS=Algoriphagus boseongensis OX=1442587; GN = DFQ04_3165 PE=4 SV=1
MIYISRKEHFNAAHKLWNPKWSDEKNFEVFGPCANVNWHGHNFELIVTVKGLPDPETGFVVDLKQLSTLIRRSVIDKVDHKNLNVDVDFMVGKLASCEILVMEFWKILEPAVKEITKNGGLYKLTLYETPRNFVEYYGE

SEQ ID NO: 17220 - protein, 139 aa, Algoriphagus chordae
  REGION 1..139: note = tr|A0A2W7QSB9|A0A2W7QSB9_9BACT 6-pyruvoyltetrahydropterin/6-carboxytetrahydropterin synthase OS=Algoriphagus chordae OX=237019 GN=LV85_03440; PE = 4 SV=1
MIYVCRKEHFNAAHKLWNPKWSDEKNVEVFGPCANVNWHGHNFELIVMVKGLPDPETGFVVDLKKLSTIIRNLVIERVDHKNLNVDVDFMQGKLASCENLIMEFWKILEPAVNEITTHGGLHKLTLYETPRNFVEYFGE

SEQ ID NO: 17221 - protein, 136 aa, Algoriphagus chordae
  REGION 1..136: note = tr|A0A2W7SXU4|A0A2W7SXU4_9BACT 6-carboxy-5,6,7,8-tetrahydropterin synthase; OS = Algoriphagus chordae OX=237019 GN=LV85_00857 PE=3 SV=1
MKVSVYRKEHFNAAHRLHNPDWSDEQNQAVFGKCNNPHFHGHNYELVVKLRGEVDPRTGYVYDMKVLSDLIKEHVLRKLDHKNLNLDTDEFKELNPSAENIAVVIWNILREKIDRKFELTIRLYETERNFVEYDGN

SEQ ID NO: 17222 - protein, 138 aa, Algoriphagus faecimaris
  REGION 1..138: note = tr|A0A1G6RYC4|A0A1G6RYC4_9BACT 6-carboxy-5,6,7,8-tetrahydropterin synthase; OS = Algoriphagus faecimaris OX=686796; GN = SAMN04488104_101492 PE=3 SV=1
MMMKVSVFRKEHFNAAHRLNNPTLSAEENESIFGKCNNANYHGHNYDLIVQLRGEIDPVTGYVYDMKKLSDLIKEHVLNKFDHKNLNLDTDEFKELNPSAENIAVVIWNILREKIDRKFELIIRLYETERNYVEYDGN

SEQ ID NO: 17223 - protein, 139 aa, Algoriphagus faecimaris
  REGION 1..139: note = tr|A0A1G6M8U7|A0A1G6M8U7_9BACT 6-pyruvoyltetrahydropterin/6-carboxytetrahydropterin synthase OS=Algoriphagus faecimaris OX=686796; GN = SAMN04488104_100164 PE=4 SV=1
MIYVCRKEHFNAAHKLWNPNWSEEKNFEVFGPCANVNWHGHNFELIVTVKGMPDPETGFVVDLKQLSTLIRRLVIDKVDHKNLNMDVDFMKDKMASCEILIMEFWKILEPAVKEITPNGGLYKLTLYETPRNFVEYFGE

SEQ ID NO: 17224 - protein, 139 aa, Algoriphagus halophilus
  REGION 1..139: note = tr|A0A1N6HG22|A0A1N6HG22_9BACT 6-pyruvoyltetrahydropterin/6-carboxytetrahydropterin synthase OS=Algoriphagus halophilus OX=226505; GN = SAMN05444394_3819 PE=4 SV=1
MIYVCRKEHFNAAHKLWNPKWTDEKNVEVFGPCANVNWHGHNFELIVMVKGLPDPDTGFVVDLKKLSTIIRKLVIEKVDHKNLNVDVDFMEGKLASCENLVMEFWKILEPAVKEITNEGGLHKLTLYETPRNFVEYYGD

SEQ ID NO: 17225 - protein, 136 aa, Algoriphagus halophilus
  REGION 1..136: note = tr|A0A1N6DA17|A0A1N6DA17_9BACT 6-carboxy-5,6,7,8-tetrahydropterin synthase; OS = Algoriphagus halophilus OX=226505 GN=SAMN05444394_0578; PE = 3 SV=1
MKVTVFRKEHFNAAHRLHNPEWSDEQNKAFFGKCNNPNYHGHNYELVVTLKGEVDPASGYVYDMKVLSDLIKEHVLNRFDHKNLNLDTDEFSQLNPTAENIAVVIWNILRDKIDRKFELKIRLYETERNFVEYDGN

SEQ ID NO: 17226 - protein, 139 aa, Algoriphagus hitonicola
  REGION 1..139: note = tr|A0A1I2NQ20|A0A1I2NQ20_9BACT 6-pyruvoyltetrahydropterin/6-carboxytetrahydropterin synthase OS=Algoriphagus hitonicola OX=435880; GN = SAMN04487988_101244 PE=4 SV=1
MIYVCRKEHFNAAHKLWNPNWSEEKNFEVFGPCANVNWHGHNFELIVTVKGLPDPETGFVVDLKQLSTLIRNLVIDKVDHKNLNIDVDFMQGKMASCEILIMEFWKILEPAVKEITPNGGLFKLTLYETPRNFVEYFGE

SEQ ID NO: 17227 - protein, 136 aa, Algoriphagus hitonicola
  REGION 1..136: note = tr|A0A1I2PDJ1|A0A1I2PDJ1_9BACT 6-carboxy-5,6,7,8-tetrahydropterin synthase; OS = Algoriphagus hitonicola OX=435880; GN = SAMN04487988_101459 PE=3 SV=1
MKVSVFRKEHFNAAHRLHNPSWSAEENQAVFGKCNNANYHGHNYDLIVQLRGEIDPKTGYVYDMKVLSDLIKENILNKFDHKNLNLDTDEFKDLNPSAENIAVVIWNILREKIDRKFELTIRLYETERNYVEYDGN

SEQ ID NO: 17228 - protein, 136 aa, Algoriphagus locisalis
  REGION 1..136: note = tr|A0A1I7BKX3|A0A1I7BKX3_9BACT 6-carboxy-5,6,7,8-tetrahydropterin synthase; OS = Algoriphagus locisalis OX=305507 GN=SAMN04489724_2506; PE = 3 SV=1
MKVSVFRKEHFNAAHRLHNPEWSDEQNQTVFGKCNNPHFHGHNYELIVKLRGEVDPRTGYVYDMKVLSDLIKEHVLRKLDHKNLNLDTDEFKELNPTAENIAVVVWNILREKIDRKFELTIRLYETERNFVEYDGN

SEQ ID NO: 17229 - protein, 139 aa, Algoriphagus locisalis
  REGION 1..139: note = tr|A0A1I6ZP02|A0A1I6ZP02_9BACT 6-pyruvoyltetrahydropterin/6-carboxytetrahydropterin synthase OS=Algoriphagus locisalis OX=305507; GN = SAMN04489724_1383 PE=4 SV=1
MIYVCRKEHFNAAHKLWNPNWSDEKNVEVFGPCANVNWHGHNFELIVMVKGLPDPETGFVVDLKKLSAIIRNLVIEKVDHKNLNVDVDFMQGKLASCENLIMEFWKILEPAVNEITSQGGLHKLTLYETPRNFVEYFGE

SEQ ID NO: 17230 - protein, 139 aa, unidentified
  source 1..139: note = Algoriphagus machipongonensis
  REGION 1..139: note = tr|A3HZM1|A3HZM1_9BACT 6-pyruvoyl tetrahydrobiopterin synthase OS=Algoriphagus machipongonensis OX=388413 GN=ALPR1_07275 PE=4 SV=1
MIYVCRKEHFNAAHKLWNPKWSEEKNVEVFGPCANVNWHGHNFELIVMVKGTPDPETGFVVDLKKLSTTIRTLVIDRVDHKNLNVDVDFMEGKLASCENLVMEFWKILEPAVRELTHHGGLHKLTLYETPRNFVEYFGD

SEQ ID NO: 17231 - protein, 136 aa, unidentified
  source 1..136: note = Algoriphagus machipongonensis
  REGION 1..136: note = tr|A3I139|A3I139_9BACT 6-carboxy-5,6,7,8-tetrahydropterin synthase; OS = Algoriphagus machipongonensis OX=388413 GN=ALPR1_16189; PE = 3 SV=1
MKVTVFRKEHFNAAHRLHNPDWSDEQNKAVFGKCNNPHFHGHNYELIVKLRGEIDPRTGYVYDMKLLSDLIKEFVLKRFDHKNLNLDTDEFIQLNPTAENIAVVIWNILREKIDRKFELTIRLYETERNFVEYDGN

SEQ ID NO: 17232 - protein, 139 aa, Algoriphagus marincola
  REGION 1..139: note = tr|A0A0P7YHV7|A0A0P7YHV7_9BACT 6-pyruvoyltetrahydropterin/6-carboxytetrahydropterin synthase OS=Algoriphagus marincola HL-49 OX=1305737; GN = queD-2 PE=4 SV=1
MIYVCRKEHFNAAHKLWNPNWSEEKNFEVFGPCANVNWHGHNFELIVTVKGIPDPETGFVVDLKDLSSLIKKLVIDKVDHKNLNMDVDFMQGKMASCEILVMEFWKILEPAIKEITPKGGLHKLTLYETPRNFVEYRGE

SEQ ID NO: 17233 - protein, 136 aa, Algoriphagus marincola
  REGION 1..136: note = tr|A0A0P7YEI2|A0A0P7YEI2_9BACT 6-carboxy-5,6,7,8-tetrahydropterin synthase; OS = Algoriphagus marincola HL-49 OX=1305737 GN=queD PE=3; SV = 1
MKVTVIRKEHFNAAHRLHNPNWSDEKNADIFGKCNNPNFHGHNYDLHVSLRGDIDPDTGYVYDMKVLSDLIKEHVLNKFDHKNLNLDTDEFKNLNPTAENIAVVIWNILREKIDRKFELSIRLYETERNYVDFDGN

SEQ ID NO: 17234 - protein, 138 aa, Algoriphagus ornithinivorans
  REGION 1..138: note = tr|A0A1I5APZ6|A0A1I5APZ6_9BACT 6-pyruvoyltetrahydropterin/6-carboxytetrahydropterin synthase OS=Algoriphagus ornithinivorans OX=226506; GN = SAMN04488519_101240 PE=4 SV =1
MIYVCRKEHFNAAHKLWNPKWSDEKNFEVFGPCANVNWHGHNFELIVTVKGLPDPETGFVVDLKELSTLIKKLVIDKVDHKNLNMDVDFMEGKMASCEILVMEFWKILEPAVKEITPNGGLHKLTLYETPRNFVEYFG

SEQ ID NO: 17235 - protein, 144 aa, Algoriphagus ornithinivorans
  REGION 1..144: note = tr|A0A1I5H3P0|A0A1I5H3P0_9BACT 6-carboxy-5,6,7,8-tetrahydropterin synthase; OS = Algoriphagus ornithinivorans OX=226506; GN = SAMN04488519_106270 PE=3 SV=1
MELLFREVMKVTVFRKEHFNAAHRLNNPAWSPEKNQAVFGKCNNPNYHGHNYDLIVKLRGEVDPDTGYVYDMKVLSDLIKKHVLNKFDHKNLNLDTDEFKNLNPSAENIAVVIWNILREKIDRKFELTIRLYETERNFVEYDGN

SEQ ID NO: 17236 - protein, 136 aa, Algoriphagus ratkowskyi
  REGION 1..136: note = tr|A0A2W7RQ85|A0A2W7RQ85_9BACT 6-carboxy-5,6,7,8-tetrahydropterin synthase; OS = Algoriphagus ratkowskyi OX=57028 GN=LV84_00094 PE=3 SV=1
MKVSVFRKEHFNAAHRLHNAEWSDEKNQAAFGKCNNPHFHGHNYELIVKLRGETDTRTGYVYDMKLLSDLIKEHILSKLDHKNLNLDTDEFKELNPTAENIAVVIWNILREKIDRKLELTIRLYETERNFVEYDGN

SEQ ID NO: 17237 - protein, 139 aa, Algoriphagus ratkowskyi
  REGION 1..139: note = tr|A0A2W7RYG9|A0A2W7RYG9_9BACT 6-pyruvoyltetrahydropterin/6-carboxytetrahydropterin synthase OS=Algoriphagus ratkowskyi OX=57028 GN=LV84_02318; PE = 4 SV=1
MIYVCRKEHFNAAHKLWNPKWSDEKNVEVFGPCANVNWHGHNFELIVMVKGLPDPDTGFVVDLKKLSTIIRNLVIERVDHKNLNIDVDFMQGKLASCENLIMEFWKILEPAVNEITSHGGLHKLTLYETPRNFVEYFGE

SEQ ID NO: 17238 - protein, 136 aa, Algoriphagus sp.
  REGION 1..136: note = tr|A0A418PVG1|A0A418PVG1_9BACT 6-carboxy-5,6,7,8-tetrahydropterin synthase; OS = Algoriphagus sp. N3 OX=2056311 GN=D0X99_06340 PE=3 SV=1
MKVSVYRKEHFNAAHRLNNPNWSDERNEAVFGKCNNPNFHGHNYELIVQLKGEVDPETGYVYDMKVLSDLIKEHVLNKFDHKNLNLDTDEFRNLNPSAENIAVVIWNILREKIDRKFELTVRLYETERNYVEYDGN

SEQ ID NO: 17239 - protein, 139 aa, Algoriphagus sp.
  REGION 1..139: note = tr|A0A258EN07|A0A258EN07_9BACT 6-carboxytetrahydropterin synthase QueD OS=Algoriphagus sp. 32-45-6 OX=1970314 GN=B7Z16_05865 PE=4 SV=1
MIHVSRKEHFNAAHKLWNPNWSDEKNFEVFGPCANVNWHGHNFELIVTVKGLPDPETGFVVDLKKLSNLIRRLVIDKVDHKNLNVDVDFMQGKLASCETLVVEFWKILDPAIKEITKHGGLYKLTLYETPRNFVEYFGE

SEQ ID NO: 17240 - protein, 139 aa, Algoriphagus yeomjeoni
  REGION 1..139: note = tr|A0A327PDF1|A0A327PDF1_9BACT 6-pyruvoyltetrahydropterin/6-carboxytetrahydropterin synthase OS=Algoriphagus yeomjeoni OX=291403 GN=LV83_02261; PE = 4 SV=1
MIYVCRKEHFNAAHKLWNPKWSDEKNVEVFGPCANVNWHGHNFELIVMVKGLPDPETGFVVDLKKLSTIIRNLVIEKVDHKNLNVDVDFMQGKLASCENLIMEFWKILEPAVSEITSQGGLHKLTLYETPRNFVEYLGE

SEQ ID NO: 17241 - protein, 136 aa, Algoriphagus yeomjeoni
  REGION 1..136: note = tr|A0A327P829|A0A327P829_9BACT 6-carboxy-5,6,7,8-tetrahydropterin synthase; OS = Algoriphagus yeomjeoni OX=291403 GN=LV83_02668 PE=3 SV=1
MKVSVYRKEHFNAAHRLHNPEWSDEQNQSVFGKCNNPHFHGHNYELIVKLRGEVDPRTGYVYDMKVLSDLIKEHVLRKLDHKNLNLDTDEFKELNPTAENIAVVVWNILREKIDRKFELTIRLYETERNFVEYDGN

SEQ ID NO: 17242 - protein, 139 aa, unidentified
  source 1..139: note = Algoriphagus zhangzhouensis
  REGION 1..139: note = tr|A0A1M7ZDZ1|A0A1M7ZDZ1_9BACT 6-pyruvoyltetrahydropterin/6-carboxytetrahydropterin synthase OS=Algoriphagus zhangzhouensis OX=1073327; GN = SAMN04488108_2543 PE=4 SV=1
MIYVCRKEHFNAAHKLWNPNWSDEKNFEVFGPCANVNWHGHNFELIVTVKGLPDPETGFVVDLKQLSTLIRTLVIDKVDHKNLNMDVDFMQGKMASCEILIMEFWKILQPAVEKITPHGGLYKLTLYETPRNFVEYFGD

SEQ ID NO: 17243 - protein, 136 aa, unidentified
  source 1..136: note = Algoriphagus zhangzhouensis
  REGION 1..136: note = tr|A0A1M7Z6J0|A0A1M7Z6J0_9BACT 6-carboxy-5,6,7,8-tetrahydropterin synthase; OS = Algoriphagus zhangzhouensis OX=1073327; GN = SAMN04488108_0875 PE=3 SV=1
MKVKVFRKEHFNAAHRLNNPNWSEEKNQAVFGKCNNPHYHGHNYELIVTLKGEINPETGYVYDMKLLSDLIKEHVLRKFDHKNLNLDTDEFTNLNPTAENIAVVIWNILREKIDRKLELIIRLYETERNFVEYDGN

SEQ ID NO: 17244 - protein, 155 aa, Alicyclobacillus acidocaldarius
  REGION 1..155: note = tr|B7DN74|B7DN74_9BACL Queuosine biosynthesis protein QueD OS=Alicyclobacillus acidocaldarius LAA1; OX = 543302 GN=AaLAA1DRAFT_0449 PE=4 SV=1
MSAYEIPSRLQVLGSDIDRSQLKYHDRRVAVTKEFTFDAAHHLHAYDGKCANLHGHTYKLVITVSGRVNDIGIVVDFGDLKRLFEDVIKRRLDHQYLNEVLPPMNTTAENMIVWIWEELERALEAYGRDRDVRLERLELYETPTSRASLERAWMS

SEQ ID NO: 17245 - protein, 180 aa, Alicyclobacillus acidocaldarius
  REGION 1..180: note = tr|F8IES2|F8IES2_ALIAT Queuosine biosynthesis protein QueD OS=Alicyclobacillus acidocaldarius (strain Tc-4-1) OX=1048834 GN=ptpS PE=4 SV=1
MGQPLSCERNLAAANMAGVLRGVRRVSAYGIPGRLQVLGSDIDRSQLKYHDRRVAVTKEFTFDAAHHLHAYDGKCANLHGHTYKLVITVSGRVNDIGIVVDFGDLKRLFEDVIKRRLDHQYLNEVLPPMNTTAENMIVWMWEELERALEAYGRDRDVRLERLELYETPTSRASLERAWMS

SEQ ID NO: 17246 - protein, 156 aa, Alicyclobacillus acidoterrestris
  REGION 1..156: note = tr|A0A512CT44|A0A512CT44_9BACL 6-carboxytetrahydropterin synthase QueD; OS = Alicyclobacillus acidoterrestris OX=1450; GN = AAC03nite_31580 PE=4 SV=1
MGVYRIPSQLQQLGQDITEHQLAYHRRRVALTKEFTFDAAHHLHLYEGKCKNLHGHTYRLVITVSGFINEIGLVIDFADLKRIYQTTIEEKLDHQYLNEVLPPMNTSAENMIVWMWEQLDSALRKETAPAQEIRLEELVLYETPTSYATLKRAWME

SEQ ID NO: 17247 - protein, 275 aa, Alicyclobacillus acidoterrestris
  REGION 1..275: note = tr|T0BVT2|T0BVT2_ALIAG Uncharacterized protein; OS = Alicyclobacillus acidoterrestris (strain ATCC 49025 / DSM 3922 / CIP 106132 / NCIMB 13137 / GD3B) OX=1356854; GN = N00 7_10880 PE=4 SV=1
MMYMSRKVTFSAAHFYRIDNWSEEENQRAFGPCSNPNGHGHDYTLEVMVRGDIDEKTGIVVNIVDVDKVVQDFLHAEIDGKFLNHEHPYFHENLPTTENIVNFIWDSLQDKFSDCELHHLRLHENDFLYSEKEFGPMVQLTRKYHFSAAHRLHSDQLTDEENVKLFGKCNNPHGHGHNYKLEVTVRGPIDPVTGMVIGLAELDETVSRIVLQQFDHKHLNLDTEQFKTLNPTSEVVATVIWDMLCDHVPNLYKVGLWETEKNYFEYYGDGQGVSK

SEQ ID NO: 17248 - protein, 159 aa, Alicyclobacillus ferrooxydans
  REGION 1..159: note = tr|A0A0P9CA85|A0A0P9CA85_9BACL 6-pyruvoyl tetrahydrobiopterin synthase OS=Alicyclobacillus ferrooxydans OX=471514 GN=AN477_18080 PE=4 SV=1
MPTTRICKIFTFDAAHQLIGHSGKCANLHGHTYTLEVVVSGEPIGEENPSDEGFVMDFAKLKAVVKTEVTDILDHAFISRGNEPALEVLRASGSKVAVLGFRTTAENLARYIVYRLKTAGLPVESVKLWETQTAWAQVYAAEVPDDGPFYQEVGGCDSE

SEQ ID NO: 17249 - protein, 155 aa, Alicyclobacillus hesperidum
  REGION 1..155: note = tr|J9E857|J9E857_9BACL Uncharacterized protein; OS = Alicyclobacillus hesperidum URH17-3-68 OX=1200346; GN = URH17368_0281 PE=4 SV=1
MAEYRIPERLQVLGVDIEKSELPYHQKRVAVTKEFTFDAAHHLHAYDGKCTNLHGHTYRLVVTVSGFVNAIGIVIDFGELKQIYRDVIERKLDHQYLNEVLPKMNTTAENMVVWIWEQFEAALAQYDAYRGLRLEQIDLFETPTSKATLKREWMI

SEQ ID NO: 17250 - protein, 155 aa, Alicyclobacillus hesperidum; identical to SEQ ID NO: 17249
  REGION 1..155: note = tr|A0A1H2U568|A0A1H2U568_9BACL PreQ(0) biosynthesis protein QueD OS=Alicyclobacillus hesperidum OX=89784; GN = SAMN04489725_10756 PE=4 SV=1

SEQ ID NO: 17251 - protein, 147 aa, Alicyclobacillus macrosporangiidus
  REGION 1..147: note = tr|A0A1I7JNW7|A0A1I7JNW7_9BACL 6-pyruvoyltetrahydropterin/6-carboxytetrahydropterin synthase OS=Alicyclobacillus macrosporangiidus OX=392015; GN = SAMN05421543_11115 PE =4 SV=1
MLQQFYPQVPHHYRYELNKDMHLAAAHFIPHPDAGVCARTHGHTYFINITVAGDDLDDSGFLVNFKELKEAVHGRWDHTLLNDDRDVFDPNDPDRFPSTEVVARVVWERIQALLDQKPNRPRCLQVVVRETPTSYVVFRPRPGVDLR

SEQ ID NO: 17252 - protein, 157 aa, unidentified
  source 1..157: note = Alicyclobacillus montanus
  REGION 1..157: note = tr|A0A1M6JRM9|A0A1M6JRM9_9BACL PreQ(0) biosynthesis protein QueD OS=Alicyclobacillus montanus OX=1830138; GN = SAMN05443507_10132 PE=4 SV=1
MTHYHLPPKIQTLHEDIFPEQLRYHQRRVSIEKHFTFDAAHHLHEYMGKCHNLHGHTYLLQIEMSGIPDPRGIVMDFAELKELFENRIKNRLDHQYLNEVLPPMNTTAENMIVWIWEELEDALNVQFGDRGLRLESLVLYETPTSCAKLRREWMINE

SEQ ID NO: 17253 - protein, 155 aa, Alicyclobacillus sacchari
  REGION 1..155: note = tr|A0A4R8LNU8|A0A4R8LNU8_9BACL PreQ(0) biosynthesis protein QueD OS=Alicyclobacillus sacchari OX=392010; GN = C7445_105149 PE=4 SV=1
MAEYAIPGRLQVLGVDIEKSELPYHRKRVAVTKEFTFDAAHHLHAYDGKCTNLHGHTYRLVVTVSGFVNDIGIVIDFGELKQMYRDVIERKLDHQYLNDVLPKMNTTAENMVVWIWEQLEAALAQYDTNHALRLEQVDLYETPTSKATVKREWMV

SEQ ID NO: 17254 - protein, 159 aa, Alicyclobacillus sp.
  REGION 1..159: note = tr|A0A1F2Y991|A0A1F2Y991_9BACL 6-carboxytetrahydropterin synthase QueD; OS = Alicyclobacillus sp. RIFOXYA1_FULL_53_8 OX=1797236; GN = A2201_03045 PE=4 SV=1
MNQVRVCKIFTFDAAHQLEGHKGKCANVHGHTYKLEVIVSGVPITADNPAEEGFVMDFGDIKEVVKEKIVDVLDHSFLAMGNEPGFEALRHTGSKISQLGFRTTAENLCLFICHTLRSSGLPMYSVRVWETPTSYAEVLAAEIPASGPVYRTVGVCDIG

SEQ ID NO: 17255 - protein, 155 aa, unidentified
  source 1..155: note = Alicyclobacillus tengchongensis
  REGION 1..155: note = tr|A0A0V0PPA7|A0A0V0PPA7_9BACL 6-pyruvoyl tetrahydrobiopterin synthase OS=Alicyclobacillus tengchongensis OX=368812 GN=SD51_07615 PE=4 SV=1
MAEYKIPERLQVLGVDIEKSELPYHQKRVAVTKEFTFDAAHHLHAYDGKCTNLHGHTYRLVVTVSGFVNAIGIVIDFGELKQIYRDVIERKLDHQYLNEVLPKMNTTAENMVVWIWEQFEAALAQYDAYRGLRLEQIELFETPTSKATLKREWMI

SEQ ID NO: 17256 - protein, 155 aa, Alicyclobacillus vulcanalis
  REGION 1..155: note = tr|A0A1N7KWT8|A0A1N7KWT8_9BACL PreQ(0) biosynthesis protein QueD OS=Alicyclobacillus vulcanalis OX=252246; GN = SAMN05421799_102242 PE=4 SV=1
MSAYKIPSRLQELGSDIQRSQLKYHDRRVAVTKEFTFDAAHHLHAYDGKCANLHGHTYRVVMTVSGRVNDIGIVVDFGDLKRLFEDVIKKRLDHQYLNEVLPPMNTTAENMIVWMWEELERALTDMGEERDVRLERLELYETPTSRASLERAWMS

SEQ ID NO: 17257 - protein, 292 aa, unidentified
  source 1..292: note = Aliidiomarina haloalkalitolerans
  REGION 1..292: note = tr|A0A432VY67|A0A432VY67_9GAMM Uncharacterized protein OS=Aliidiomarina haloalkalitolerans OX=859059; GN = CWE06_01915 PE=4 SV=1
MQLFVKDLTVIDFSYLCPQRGIVGESWIVDILLDGSLNDQSMVLDFGRVKKQIKAIIDQSVDHKLLVPSEHPYTLVTKHENETHYWVDFVRPQNSIHLFCPADAYAFIDAPEIDMAATVAYLHAVIKKELPTNVKGLELNLRAEEIPSFYYHYTHGLKKHDGNCQRIAHGHRSAIQIFLDGMRSPAWEQRWSRRWQDIYIGTAEDVVAKEHMTLSTAAQDLIDSQHVCYSYLAEQGVFELALPKAENEVMTADSTVECIAEYIAKEIKNQEPSHDIKVIAFEGVGKGAIGYA

SEQ ID NO: 17258 - protein, 315 aa, unidentified
  source 1..315: note = Aliidiomarina iranensis
  REGION 1..315: note = tr|A0A432W0A5|A0A432W0A5_9GAMM Uncharacterized protein OS=Aliidiomarina iranensis OX=1434071; GN = CWE08_04355 PE=4 SV=1
MQLFVNDLTVIDFSYLCPERGIVGESWIVDIILDGSLNDQSMVLDFGRVKKQVKAIIDQSVDHKLLIPTEHAYTQVTRETEGTHYWVDFLRPGKTVHLYCPADAYAFIDSDVITQESTIDYLQAVIKRELPANVEGLQLTLRAEEINGFYYHYTHGLKKHDGNCQRIAHGHRSALKIFIDGMRSTAWEQRWSRRWEDIYVGTAEDISNAESMKLSSSAQAHAGEGHIFYSYMAEQGLFELILPKNENEVMPTDTTVERIADYIAREIAIEVANERKVLTANTSTANTAASELSAQSLKIKVIAFEGVGKGAIGYA

SEQ ID NO: 17259 - protein, 296 aa, unidentified
  source 1..296: note = Aliidiomarina maris
  REGION 1..296: note = tr|A0A327X2V0|A0A327X2V0_9GAMM 6-pyruvoyl tetrahydropterin synthase-like protein OS=Aliidiomarina maris OX=531312 GN=B0I24_104166 PE=4 SV=1
MQLFVNDLTVIDFSYLCPQRGVVGESWIVDITLDGTLNDQSMVLDFGRVKKQIKAIIDNSVDHKLAVPAEHPYTHVTRRDDDSGYWVDFMRPDARSIHLFCPADAFAFIDADVVDIDSVKAYLHAVIKRELPTNVAGLELTLRAEDINGFYYHYTHGLKKHDGNCQRIAHGHRSAIQIYHNGMRTPRLEKLWATRWQDIYVGSQEDVVSAEQMQLSSLAREAIAASPDAYICYSYQADQGLFELALSVQENTVIETDSTVECISEYLAQRIKQEEGAGDVKVIAFEGVGKGAIGYA

SEQ ID NO: 17260 - protein, 293 aa, unidentified
  source 1..293: note = Aliidiomarina minuta
  REGION 1..293: note = tr|A0A432W6M6|A0A432W6M6_9GAMM Uncharacterized protein OS=Aliidiomarina minuta OX=880057 GN=CWE09_03100; PE = 4 SV=1
MQLFVNDLTVIDFSYLCPQRGVVGESWIVDITLDGSLNDQSMVLDFGRVKKQIKAIIDDSVDHKLAVPSDHPYTQVSRSEDESGYWVDFIRPDTKSVHLFCPADAFAFIDADEVSMETVKTYLHAVIKRELPTNVEGLKLTLRAEDISGFYYHYTHGLKKHDGNCQRIAHGHRSRLQIFVDGIRFPRLEKLWASRWEDIYVGSAEDEVASKVMQLSGKAAELVGEHHVCYSYQADQGLFELAIPAAENTIIATDSTVECISEYLANAIKADFPDSKVKVIAYEGVGKGAIGYA

SEQ ID NO: 17261 - protein, 304 aa, unidentified
  source 1..304: note = Aliidiomarina sanyensis
  REGION 1..304: note = tr|A0A432WRP4|A0A432WRP4_9GAMM Uncharacterized protein OS=Aliidiomarina sanyensis OX=1249555; GN = CWE11_01215 PE=4 SV=1
MQLFVNDLTVIDFSYLCPTRGIVGESWIVDIVLDGSLNDQSMVLDFGRVKKQVKAIIDQSVDHKLLVPAEHPYTRVTKHDNETHYWVDFLRPERSVHLFCPSDAYAFIDAELITMEATIAYLKAVIKREMPANVQGIQLSLRSEDISGFYYHYTHGLKKHDGNCQRIAHGHRSAIQVFVDGMRSPAWEQRWSRRWEDIYVGTREDLCEPSAMTLSPHAQGHIQAHHVCYSYVAEQGVFELALPMDENEIMDKDTTVECIAEYIAETIGKQISTETDSQITKQHPESSVKVVAFEGVGKGAIGYA

SEQ ID NO: 17262 - protein, 299 aa, unidentified
  source 1..299: note = Aliidiomarina shirensis
  REGION 1..299: note = tr|A0A432WX27|A0A432WX27_9GAMM Uncharacterized protein OS=Aliidiomarina shirensis OX=1048642; GN = CWE13_01330 PE=4 SV=1
MQLFVNDLTVIDFSYLCPERGIVGESWIVDIILDGSLNDQSMVLDFGRVKKQVKAIIDQSVDHKLLIPTEHVFTQVTREEAGTHYWVDFLRPNKSIHLYCPADAYAFIDSDTITQESTIAYLQAVIKRELPANVKGLELTLRAEEMNGFYYHYTHGLKKHDGNCQRIAHGHRSAIKIFIDGMRSPAWEQRWSRRWEDIYVGTAEDVGEASSLKLSAAARKHTGEHHICYSYMAEQGLFELILPAQENEVMFTDTTVECIADYVAHEIAKTIAAESMPTHTPEVKVIAFEGVGKGAIGYA

SEQ ID NO: 17263 - protein, 293 aa, unidentified
  source 1..293: note = Aliidiomarina soli
  REGION 1..293: note = tr|A0A432WMC1|A0A432WMC1_9GAMM Uncharacterized protein OS=Aliidiomarina soli OX=1928574 GN=CWE14_02720; PE = 4 SV=1
MQLFVNDLTVIDFSYLCPQRGIVGESWIVDITLDGSLNDQSMVLDFGRVKKQIKAIIDDSVDHKLAVPAEHPFTKVSRNQDESGYWVDFMRPDNGSIHLFCPADAYAFVDADEVTMDTVKAYLHGVIKRQLPTNVEGLQLTLRAEQINGFYYHYTHGLKKHDGNCQRIAHGHRSAIQVYLNGMRTPRLEQQWARKWQDIYVGSVEDVVMPNSMQLSEYGRESVGNDHVCYSYQADQGLFELAVPRTENTVIDTDSTVECISNYLAATIKMAEPEADVKVIAYEGVGKGAIGYA

SEQ ID NO: 17264 - protein, 298 aa, Aliidiomarina sp.
  REGION 1..298: note = tr|A0A552X3V6|A0A552X3V6_9GAMM Uncharacterized protein OS=Aliidiomarina sp. IM1326 OX=2593535; GN = FM042_02310 PE=4 SV=1
MQLFVNDLTVIDFSYLCPERGIVGESWIVDIMLDGSLNDQSMVLDFGRVKKQVKAIIDQSVDHKLLIPTEHPFTRVSAHPNETHHWVDFMRPGRSIHLYCPSDAYAFIDASQIDMDATISYLQAAIKRELPANVQGITLTLRSEAIPGFYYHYTHGLKKHDGNCQRIAHGHRSAIQVYIDGMRSPALEQRWSRRWEDIYVGTREDLASPDELTLSPEATKALGAHHVCYSYVAEQGVFELILPADENEVMEVDSTVECIAEYIAQEIKTSLNDSDYGPSPQIRVIAYEGVGKGAIGYA

SEQ ID NO: 17265 - protein, 152 aa, unidentified
  source 1..152: note = Aliifodinibius roseus
  REGION 1..152: note = tr|A0A1M5BEI5|A0A1M5BEI5_9BACT 6-pyruvoyltetrahydropterin/6-carboxytetrahydropterin synthase OS=Aliifodinibius roseus OX=1194090; GN = SAMN05443144_10893 PE=4 SV=1
MDLVFVTRKAHFNAAHRLHNPDKSDEWNRQTFGKCNHENWHGHNYIVKVTVAGKTDRATGYVIDLSTLKSIIEERIVEECDHKNLNLDVPFLEGIMPSTENLVKAFFEQVEEPIANEAYGSGFLYSLELEETERNSAEYCPYRLGKPLPEID

SEQ ID NO: 17266 - protein, 131 aa, unidentified
  source 1..131: note = Aliifodinibius sediminis
  REGION 1..131: note = tr|A0A521B085|A0A521B085_9BACT 6-carboxy-5,6,7,8-tetrahydropterin synthase; OS = Aliifodinibius sediminis OX=1214077; GN = SAMN06265218_10243 PE=3 SV=1
MPSWTLHTEFKFDAAHFLEGYEGKCGRMHGHSYKVHIAATSNQLNPSKYLDSADMVCDFHELKWAAKGSEKGGLDHSVLNEELPVNPTAERIAEFIHKETLQRIPDGIKLNVTVWETENSWVEYTDEDGEN

SEQ ID NO: 17267 - protein, 150 aa, unidentified
  source 1..150: note = Aliifodinibius sediminis
  REGION 1..150: note = tr|A0A521B920|A0A521B920_9BACT 6-pyruvoyltetrahydropterin/6-carboxytetrahydropterin synthase OS=Aliifodinibius sediminis OX=1214077; GN = SAMN06265218_102307 PE=4 SV=1
MVFVTRKAHFNAAHRLHNPEKSDEWNRRTFGKCNHENWHGHNYKLSVTVAGKINSTTGYVIDLATLKSIIEQRIVVKCDHKNLNLDVPFLEGIMPSTENLVKAFFEQIEEPIAEKSGGDGFLYSVELQETERNSAEYCPYRLGKPLPEID

SEQ ID NO: 17268 - protein, 129 aa, unidentified
  source 1..129: note = Aliifodinibius sp.
  REGION 1..129: note = tr|A0A2A2GEU4|A0A2A2GEU4_9BACT 6-carboxy-5,6,7,8-tetrahydropterin synthase; OS = Aliifodinibius sp. WN023 OX=2032627 GN=CK503_00165 PE=3; SV = 1
MPTWTLHTEFKFDAAHLIEGYDGKCGRMHGHSYKVHISAKSYKLNPSKYLDTDDMVCDFRELKWASKGSEKGGLDHSVLNEEMPINPTAERIAEFIYKETQQRIPEGVTLNVTVWETENSWVEYTEDNV

SEQ ID NO: 17269 - protein, 150 aa, unidentified
  source 1..150: note = Aliifodinibius sp.
  REGION 1..150: note = tr|A0A2A2G7Z5|A0A2A2G7Z5_9BACT 6-pyruvoyl tetrahydrobiopterin synthase OS=Aliifodinibius sp. WN023; OX = 2032627 GN=CK503_13170 PE=4 SV=1
MVFVTRRAHFNAAHRLHNPEKSDKWNKQIFGKCNHENWHGHNYVLKVTVAGKQNPETGYVIDLSELKTIIESRIVEKCDHKNLNLDVPFLDGIMPSTENLVQAFFKELEDPIRNATNQRGFLYSIELQETERNSAKYCPYLLEKEIPTLD

SEQ ID NO: 17270 - protein, 291 aa, unidentified
  source 1..291: note = Aliiglaciecola lipolytica
  REGION 1..291: note = tr|K6YSE8|K6YSE8_9ALTE Uncharacterized protein; OS = Aliiglaciecola lipolytica E3 OX=1127673 GN=GLIP_1591; PE = 4 SV=1
MQLFVNDLTVMDFSYLCAQRGMVGESWIVDVILDGELNEESMVLDFGKVKKELKFLIDEYVDHKLLVPAEHPFSIINRDPNTDEVKVDFLRPDGKSIHLLCPAEAYAFVYAEEVDIVSVGQYLKEVIATHLPSNVEGIELILRPEVINTPFYHYTHGLKKHDGNCQRIAHGHRSKIIVYENDELSLDWQEYWAQRWSDIYIGSEEDIISHQSGLFTQSLSDSSQHFLFAYESSQGEFSLAIPKAECEIVNTDSTVECLAQYIAVELKQQRPDSDFKVLAYEGVGKGAIAYA

SEQ ID NO: 17271 - protein, 291 aa, unidentified
  source 1..291: note = Aliiglaciecola sp.
  REGION 1..291: note = tr|A0A553L6A8|A0A553L6A8_9ALTE Uncharacterized protein OS=Aliiglaciecola sp. M165 OX=2593649; GN = FM019_06815 PE=4 SV=1
MQLFVNDLTVMDFSYLCPERGMVGESWIVDVILDGSLNEESMVLDFGKVKKELKFLIDEYVDHKLLVPAEHAFSVITRDELTDQVSVDFMRENNRTIHLVCPAEAYAFVYSDKVTISSVGQYLKEVIATHLPSNVQGIELVLRAEVIDTPFYHYTHGLKKHDGNCQRIAHGHRSKVTVFENDTYSLSWQQYWATRWKDIYIGSEDDLVNAKDSAFVSIPVDEQSHYFFSYESSQGSFSLAIPIAESEIIKTDSTVECLAQYMADELKKHETSSSFKVFAFEGVGKGAIAYA

SEQ ID NO: 17272 - protein, 283 aa, unidentified
  source 1..283: note = Aliikangiella marina
  REGION 1..283: note = tr|A0A545TK34|A0A545TK34_9GAMM 6-pyruvoyl tetrahydropterin reductase OS=Aliikangiella marina; OX = 1712262 GN=FLL45_00920 PE=4 SV=1
MQALFVDNLTVIDFSYFHPHRGIVGESLILDVILHGELNEEGMLFDFSFVKKRIKSCVDSLVDHKFLVARKTPLLKVTESPQQLELQLVLRTGEHYTHVSPEQAVYFVDSDEVTPETIAASINHEIKKILPENVTRVDLNLRAELIEGDFYHYSHGLKKHFGDCQRIAHGHRSKIEVWENDYFSAKWSSHIAKMWQDIYLATQDDIIERPTIKGAEYLTFQYHANQGTFKLTMPAEKCFIMNTDTTVELIALFLANYLKQQVPEAEFKVKAYEGVDKGAIAIR

SEQ ID NO: 17273 - protein, 283 aa, unidentified
  source 1..283: note = Aliikangiella sp.
  REGION 1..283: note = tr|A0A545UAQ1|A0A545UAQ1_9GAMM 6-pyruvoyl tetrahydropterin reductase OS=Aliikangiella sp. M105; OX = 2592383 GN=FLL46_16655 PE=4 SV=1
MQALFVDNLTVIDFAYFHPERGIVGESLILDVTLFGELNDEGMLFDFSFVKKRIKSCVDSLVDHKFLVAKQQAEIEISESPQHLNITLKSTTGDYYEHISPHEAVYFVDAESVTPETISTAINSEIMEILPDNVKKLTLGLRAEDIQKDFYHYSHGLKKHFGDCQRIAHGHRSKIEVWENEHYAPDWTSHIAEIWRDIYLATEEDIQDTKIINGQKYYVFRYHANQGMFQLTIPQNDCHIIQTDTTVELIADYLANYLKAKKPDSNFKVKAYEGVDKGAIVSV

SEQ ID NO: 17274 - protein, 120 aa, Aliivibrio finisterrensis
  REGION 1..120: note = tr|A0A4Q5KW44|A0A4Q5KW44_9GAMM 6-carboxy-5,6,7,8-tetrahydropterin synthase OS=Aliivibrio finisterrensis OX=511998 GN=queD PE=3 SV=1
MTTELYKDFMFEAAHHLPHVPEGHKCGRLHGHSFLVRLYVEGEVDQHTGWVIDFSEIKAAFKPTYDRLDHYYLNDIEGLENPTSEVLAKWIWNEVKPSLPLLSKIEIKETCTAGCTYRGE

SEQ ID NO: 17275 - protein, 120 aa, Aliivibrio fischeri
  REGION 1..120: note = tr|A0A1B9PC50|A0A1B9PC50_ALIFS 6-carboxy-5,6,7,8-tetrahydropterin synthase OS=Aliivibrio fischeri OX=668 GN=sscR PE=3 SV=1
MTTELYKDFMFEAAHHLPHVPEGHKCGRLHGHSFLVRLYVEGEVDPHTGWVVDFAEIKAAFKPTYDRLDHYYLNDIKGLENPTSEVLAKWIWNEVKPNLPLLSKIEIKETCTAGCTYRGE

SEQ ID NO: 17276 - protein, 120 aa, Aliivibrio fischeri; identical to SEQ ID NO: 17275
  REGION 1..120: note = tr|Q5E5P1|Q5E5P1_ALIF1 6-carboxy-5,6,7,8-tetrahydropterin synthase OS=Aliivibrio fischeri (strain ATCC 700601 / ES114) OX=312309 GN=sscR; PE = 3 SV=1

SEQ ID NO: 17277 - protein, 120 aa, Aliivibrio logei
  REGION 1..120: note = tr|A0A1B9P0V1|A0A1B9P0V1_ALILO 6-carboxy-5,6,7,8-tetrahydropterin synthase OS=Aliivibrio logei OX=688 GN=A6E04_09055 PE=3 SV=1
MTTELYKDFMFEAAHHLPHVPEGHKCGRLHGHSFLVRLYVEGEVDQHTGWVIDFSEIKAAFKPTYDRLDHYYLNDIKGLENPTSEVLAKWIWNEVKPSLPLLSKIEIKETCTAGCTYRGQ

SEQ ID NO: 17278 - protein, 120 aa, Aliivibrio salmonicida; identical to SEQ ID NO: 17277
  REGION 1..120: note = tr|B6EKD1|B6EKD1_ALISL 6-carboxy-5,6,7,8-tetrahydropterin synthase OS=Aliivibrio salmonicida (strain LFI1238) OX=316275 GN=VSAL_I1330 PE=3; SV = 1

SEQ ID NO: 17279 - protein, 120 aa, Aliivibrio sifiae
  REGION 1..120: note = tr|A0A2S7XIT2|A0A2S7XIT2_9GAMM 6-carboxy-5,6,7,8-tetrahydropterin synthase OS=Aliivibrio sifiae OX=566293 GN=BTO23_05945 PE=3 SV=1
MTTELYKDFMFEAAHHLPHVPEGHKCGRLHGHSFLVRLYVEGEVDQHTGWVIDFSEIKAAFKPTYDRLDHYYLNDIEGLENPTSEVLAKWIWNEVKPNLPLLSKIEIKETCTAGCTYRGE

SEQ ID NO: 17280 - protein, 120 aa, Aliivibrio sifiae
  REGION 1..120: note = tr|A0A2S7XCE8|A0A2S7XCE8_9GAMM 6-carboxy-5,6,7,8-tetrahydropterin synthase OS=Aliivibrio sifiae OX=566293 GN=BTO22_05235 PE=3 SV=1
MTTELYKDFMFEAAHHLPHVPEGHKCGRLHGHSFLVRLYVEGEVDQHTGWVIDFSEIKAAFKPTYDRLDHYYLNDIEGLENPTSEVLAKWIWNEVKPTLPLLSKIEIKETCTAGCTYRGE

SEQ ID NO: 17281 - protein, 120 aa, Aliivibrio sp.
  REGION 1..120: note = tr|A0A1B9PQ91|A0A1B9PQ91_9GAMM 6-carboxy-5,6,7,8-tetrahydropterin synthase OS=Aliivibrio sp. 1S175 OX=1840087 GN=A6E06_13960 PE=3 SV=1
MTTELYKDFMFEAAHHLPHVPEGHKCGRLHGHSFLVRLYVEGEVDQHTGWVIDFSEIKAAFKPTYDRLDHYYLNDIEGLENPTSEVLAKWIWNEVKPTLPLLSKIEIKETCTAGCTYRGQ

SEQ ID NO: 17282 - protein, 120 aa, Aliivibrio wodanis; identical to SEQ ID NO: 17279
  REGION 1..120: note = tr|A0A090KI97|A0A090KI97_9GAMM 6-carboxy-5,6,7,8-tetrahydropterin synthase OS=Aliivibrio wodanis OX=80852 GN=AWOD_I_1149 PE=3 SV=1

SEQ ID NO: 17283 - protein, 286 aa, Alishewanella aestuarii
  REGION 1..286: note = tr|J2IE84|J2IE84_9ALTE Uncharacterized protein; OS = Alishewanella aestuarii B11 OX=1197174 GN=AEST_18110; PE = 4 SV=1
MILFVRDLTVIDFSYLHRQRGMLGESYIVDVELQGALDDTAMVFDFGKVKKVIKQAIDSLVDHKLAVAAECPALQLDTAGELTLLRYQSERGLLQLACPEQAFAVIPGTEINEATVTAFLQQQIKPLLPANVEQLTLTLRPENISGFYYHYSHGLKKHDGNCQRIAHGHRSTIQIYENNMLAPKLNKGWAERWQDIYLGTESDLVAAEQLVHLTPGAQDYSFRYQASQGWFELCIPQSHCEIVPCDTTVECLVDFIADTLKAQHSTHSYKVVAYEGVGKGAIAVRP

SEQ ID NO: 17284 - protein, 286 aa, Alishewanella agri
  REGION 1..286: note = tr|I9DV57|I9DV57_9ALTE Uncharacterized protein; OS = Alishewanella agri BL06 OX=1195246 GN=AGRI_02745 PE=4; SV = 1
MILFVRDLTVIDFSYLHRQRGMLGESYIVDVELHGALDDTAMVFDFGKVKKVIKQAIDRLVDHKLAVAADCPAFSQQVCDDLSIVRYQSERGLIQLACPAQAFAVIPGAEINEATVTAFLQQQIKPLLPANVEQLVLTLRPEAISGFYYHYSHGLKKHDGNCQRIAHGHRSTIQIYENNMLAPKLNKLWAERWQDIYLGTQSDLVVPQQLQHLTPAVTDYSFRYQASQGWFELCMPQAHCEIVPCDTTVECLADFIADTLKAQNIKQTYKVVAYEGVGKGAVAMRP

SEQ ID NO: 17285 - protein, 286 aa, Alishewanella jeotgali
  REGION 1..286: note = tr|H3Z9V9|H3Z9V9_9ALTE Uncharacterized protein; OS = Alishewanella jeotgali KCTC 22429 OX=1129374; GN = AJE_00550 PE=4 SV=1
MILFVRDLTVIDFSYLHRQRGMLGESYIVDVELQGALDDTAMVFDFGKVKKVIKQAIDSLVDHKLAVAAECPALQLDTAGELTLLRYQSERGLLQLACPEQAFAVIPGTEINEATVTAFLQQQIKPLLPANVEQLTLTLRPENISGFYYHYSHGLKKHDGNCQRIAHGHRSTIQIYENNMLAPKLNKGWAERWQDIYLGTESDLVAAEQLVHLTPGAQDYSFRYQASQGWFELCIPQSHCEIVPCDTTVECLADFIADTLKAQHSTHSYKVVAYEGVGKGAIAVRP

SEQ ID NO: 17286 - protein, 220 aa, Alishewanella sp.
  REGION 1..220: note = tr|A0A1C2C221|A0A1C2C221_9ALTE QueD like protein; OS = Alishewanella sp. HH-ZS OX=1856684 GN=A9165_10745 PE=4; SV = 1
MEFVMLLLVLLVVLVALVASRFIDNSNPFQVQAKPSLFSPVERSFLSLLEKAAAADYKILNRVKLADVLEVRDSANDKTRRSTLLKLNAKYLDFILCEPESMKVIAVVDLVNVQHRDGHKAVPDWFVSGALEAAGIPYLRIAIKSGYTVTELQAALAQKLGKPAPKVEPTLKGLVKKGPTRPIRSLKPTTATLAAPALRAVPALSHSQIKAQSTALIQAS

SEQ ID NO: 17287 - protein, 286 aa, Alishewanella sp.
  REGION 1..286: note = tr|A0A258CBH7|A0A258CBH7_9ALTE Uncharacterized protein OS=Alishewanella sp. 32-51-5 OX=1970315; GN = B7Z18_07540 PE=4 SV=1
MILFVRDLTVIDFSYLHRQRGMLGESYIVDVELHGALDDTAMVFDFGKVKKVIKQAIDRLVDHKLAVAADCPAFSQQVCDDLSIVRYQSERGLIQLACPAQAFAVIPGAEINEATVTAFLQQQIKPLLPANVEQLVLTLRPEAISGFYYHYSHGLKKHDGNCQRIAHGHRSTIQIYENNMLAPKLNKLWAERWQDIYLGTQSDLVVPEQLQHLTPAANDYSFRYQASQGWFELCMPQAHCEIVPCDTTVECLADFIADTLKTQNIKHTYKVVAYEGVGKGAIAVRP

SEQ ID NO: 17288 - protein, 145 aa, Alistipes finegoldii
  REGION 1..145: note = tr|A0A4Q5JNW2|A0A4Q5JNW2_9BACT 6-carboxy-5,6,7,8-tetrahydropterin synthase OS=Alistipes finegoldii OX=214856 GN=EAI98_05455 PE=3 SV=1
MTKEFSFEAAHALDGYDGPCREIHGHSYRLFVTVKGCPAAGEGDPKCGMVMDFGVLKRIVNEEIVSHFDHSLVLRQTPCNASLRAMLAERFGNIVTVDYQPTCENMLGDFARRISRRLPEGVELHSLRLHETATSFAEWFAEDNR

SEQ ID NO: 17289 - protein, 150 aa, Alistipes finegoldii
  REGION 1..150: note = tr|I3YLH3|I3YLH3_ALIFI 6-pyruvoyl-tetrahydropterin synthase OS=Alistipes finegoldii (strain DSM 17242 / JCM 16770 / AHN 2437 / CCUG 46020 / CIP 107999) OX=679935 GN= Alfi_1498 PE=4 SV=1
MTVIRLTKEFSFEAAHALDGYDGPCREIHGHSYRLFVTVKGRPMAGEGDPKCGMVMDFGVLKRIVNEEIVSHFDHSLVLRQTPCNASLRAMLAERFGNIVTVDYQPTCENMLGDFARRISRRLPEGVELHSLRLHETATSFAEWFAEDNR

SEQ ID NO: 17290 - protein, 148 aa, Alistipes indistinctus
  REGION 1..148: note = tr|G5H5I8|G5H5I8_9BACT Uncharacterized protein; OS = Alistipes indistinctus YIT 12060 OX=742725; GN = HMPREF9450_00198 PE=4 SV=1
MIRLTKEFSFEMAHTLAGYDGPCREIHGHSYRLFVTVRGVPVRDPQSPKYGMVMDFGDLKHIVGRLIVERYDHALVLRETPENHAALEAMRGTYTKIIVTPYQPTCENMVEDFARAIAAELPAGVELFSVKLHETATSFAEWYASDNL

SEQ ID NO: 17291 - protein, 145 aa, Alistipes indistinctus
  REGION 1..145: note = tr|A0A412SID7|A0A412SID7_9BACT 6-carboxytetrahydropterin synthase OS=Alistipes indistinctus OX=626932 GN=DWW78_05960 PE=4 SV=1
MTKEFSFEMAHTLAGYDGPCREIHGHSYRLFVTVRGVPVRDPQSPKYGMVMDFGDLKHIVGRLIVERYDHALVLRETPENHAALEAMRGTYTKIIVTPYQPTCENMVEDFARAIAAELPAGVELFSVKLHETATSFAEWYASDNL

SEQ ID NO: 17292 - protein, 150 aa, unidentified
  source 1..150: note = Alistipes inops
  REGION 1..150: note = tr|A0A0B0BWI1|A0A0B0BWI1_9BACT 6-pyruvoyl tetrahydropterin synthase OS=Alistipes inops OX=1501391; GN = LG35_00025 PE=4 SV=1
MSRIRVTKEFSFEMAHMLEGYDGPCSEIHGHSYRLFVTVAGTPCSDPQNPKYGMVIDFGVLKRIVGGRIVDVYDHSLVVRRTADNGELIRTLAARFGKLQAVEFQPTCENLVTRFAETIAAELPRGVELFSLRLHETATSYAEWFASDNA

SEQ ID NO: 17293 - protein, 150 aa, unidentified
  source 1..150: note = Alistipes obesi
  REGION 1..150: note = tr|A0A3D2BDP0|A0A3D2BDP0_9BACT 6-carboxytetrahydropterin synthase QueD OS=Alistipes obesi; OX = 1118061 GN=DIT81_03380 PE=4 SV=1
MTKIRLTKEFSFEAAHLLEGYDGACREIHGHSYRLFVTVRGVPVCDGRNPKLGMVMDFGQLKRIVGEEVVQRLDHAFVMRRTPAGEAFAEALGTRFERIVCVDYQPTCENMLADFAARIAPRLPEGVELYALRLHETATSYAEWVADDNN

SEQ ID NO: 17294 - protein, 145 aa, Alistipes onderdonkii
  REGION 1..145: note = tr|A0A1Y3R008|A0A1Y3R008_9BACT 6-carboxy-5,6,7,8-tetrahydropterin synthase OS=Alistipes onderdonkii OX=328813 GN=B5G41_10030 PE=3 SV=1
MTKEFSFEAAHALDGYDGPCREIHGHSYRLFVTVKGCPADDDTNPKCGMVMDFGVLKSIVNEEVVSRFDHALVLRATRRDAPLRAVLAERFGNIVTVDYQPTCENMLGDFAARIARRLPLGVELHSLRLHETATSFAEWFAEDNR

SEQ ID NO: 17295 - protein, 119 aa, Alistipes onderdonkii
  REGION 1..119: note = tr|A0A4Q5INN1|A0A4Q5INN1_9BACT 6-carboxytetrahydropterin synthase OS=Alistipes onderdonkii OX=328813 GN=EAI99_01375 PE=4 SV=1
MYYVSKRMEIAGSHRLTLSYKSQCQQLHGHNWVVTVFCKAKKLNADGMVCDFKRIKDKIHGYLDHGNFNKLLPFNPTAENIARWIVEQIPECYKATVQESEGNVAIYVSDTSKDEEGAL

SEQ ID NO: 17296 - protein, 156 aa, Alistipes putredinis
  REGION 1..156: note = tr|R7JG87|R7JG87_9BACT 6-pyruvoyl tetrahydropterin synthase/QueD family protein OS=Alistipes putredinis CAG:67 OX=1263036 GN=BN752_01558 PE=4 SV=1
MENEKKPTIIRLTKEFTFEAAHALEGYDGLCREIHGHSYRLFVTVKGTPCADESNPKFGMVMDFGELKRIVNEQILSRLDHAFVMRRTAESTRVAEQIGCRFGRIVLVDYQPTCENMLADFAARIEANLPSHVKLHALRLHETATSFAEWMAEDNR

SEQ ID NO: 17297 - protein, 112 aa, Alistipes putredinis
  REGION 1..112: note = tr|B0MZT9|B0MZT9_9BACT 6-pyruvoyl tetrahydropterin synthase/QueD family protein OS=Alistipes putredinis DSM 17216 OX=445970 GN=queD PE=4 SV=1
MEIAGSHRLTLSYKSQCQQLHGHNWVVTVFCKAKKLNADGMVCDFKRIKDKIHGYLDHGNFNKLLPFNPTAENIARWIVEQIPECYKATVQESEGNVAIYVSDTSKDEEGAL

SEQ ID NO: 17298 - protein, 189 aa, Alistipes shahii
  REGION 1..189: note = tr|A0A5B3FX14|A0A5B3FX14_9BACT Rubredoxin; OS = Alistipes shahii OX=328814 GN=F2Y13_14385 PE=4 SV=1
MRSITTFDLQYAHRFYGFQGEAQYLHGHTGKLTIEVEDSIEAGVNMVYPCNEIQKVAWDVLRNFDHALVLREDDPLLPAVLDVYEKQGIRNGHPQNKMKGPAFKTELATAYPDCRLVVTKETLTVEGMIKIVYDLLKDKLNIAKITFTSGVNAASAEFVTKNDIDRCPLCGVAFNEEGVCPKCGYRKKK

SEQ ID NO: 17299 - protein, 145 aa, Alistipes shahii
  REGION 1..145: note = tr|A0A5B3GKE9|A0A5B3GKE9_9BACT 6-carboxy-5,6,7,8-tetrahydropterin synthase OS=Alistipes shahii OX=328814 GN=F2Y07_11465 PE=3 SV=1
MTKEFSFEAAHALDGYDGPCREIHGHSYRLFVTVKGTPAEDASNPKCGMVLDFGVLKRIVSEEIVSHFDHALVLRASESGEEFFRVLAERFGNVVTVGYQPTCENMLGDFAARIAARLPEGVALHSLRLHETATSFAEWFAEDNM

SEQ ID NO: 17300 - protein, 145 aa, Alistipes sp.
  REGION 1..145: note = tr|A0A1Q6EIB2|A0A1Q6EIB2_9BACT 6-carboxytetrahydropterin synthase QueD OS=Alistipes sp. 56_sp_Nov_56_25 OX=1896969 GN=BHV64_06345 PE=4 SV=1
MTKEFSFEAAHALDGYDGPCREIHGHSYRLFVTVKGTPAEDEADPKCGMVMDFGVLKRIVNEEIVSRFDHALVLRGSASGAELRRVLAERFGNILTVDYQPTCENMLADFARRIAARLPEGVALHSLKLHETATSFAEWFAGDNE

SEQ ID NO: 17301 - protein, 150 aa, Alistipes sp.
  REGION 1..150: note = tr|A0A4Y1X217|A0A4Y1X217_9BACT 6-carboxytetrahydropterin synthase QueD OS=Alistipes sp. 5CPEGH6 OX=2585119 GN=A5CPEGH6_11940 PE=4 SV=1
MTTIRLTKEFSFEAAHALDGYDGPCREIHGHSYRLFVTVKGTPGEDPRDPKYGMVMDFGLLKRIVNEEVVSRFDHALVLRASASGDALRRLLADRFGNIVAVDYQPTCENMLADFARRIAARLPQGVRLHSLRLNETATSFAEWFAEDNG

SEQ ID NO: 17302 - protein, 150 aa, unidentified
  source 1..150: note = Alistipes timonensis
  REGION 1..150: note = tr|A0A1H4BA86|A0A1H4BA86_9BACT 6-pyruvoyltetrahydropterin/6-carboxytetrahydropterin synthase OS=Alistipes timonensis JC136 OX=1033731; GN = SAMN05444145_103294 PE=4 SV= 1
MTVIRLTKEFSFEAAHALDGYDGPCREIHGHSYRLFVTVKGCPAEDADDPKCGMVMDFGVLKRIVNEEIVSRFDHALVLRDSASGAELRRVLAARFGNIVTVDYQPTCENMLADFARRIAARLPEGVALHSLKLHETATSFAEWFAGDNE

SEQ ID NO: 17303 - protein, 288 aa, unidentified
  source 1..288: note = Aliterella atlantica
  REGION 1..288: note = tr|A0A0D8ZS51|A0A0D8ZS51_9CYAN 6-pyruvoyl tetrahydropterin synthase OS=Aliterella atlantica CENA595; OX = 1618023 GN=UH38_11205 PE=4 SV=1
MQCIINRRAQFSASHRYWLPELSEAENYQRFDLCARHPGHGHNYVLYVSILGELDRYGMVMNLSEVKQVIKQEVTSQLDFSYLNDVWVEFQQTLPTTENIARVIWQKLESHLPLVNIQLFEHPQLWADYQGNGMEAFLTVSTHFSAAHRLAHPDLSYEENVEIYGKCARPNGHGHNYHLEVTVKGEIDAKTGMLVDLGALQQVIDEQVLEPFDHTFLNKDIAYFAEVVPTAENIAVRIGELLRSPVQQLGAELHKIKLIESPNNSCEVYCSQLDANQLSTISQHLTSV

SEQ ID NO: 17304 - protein, 158 aa, Alkalibacillus haloalkaliphilus
  REGION 1..158: note = tr|A0A511W321|A0A511W321_9BACI 6-carboxytetrahydropterin synthase QueD OS=Alkalibacillus haloalkaliphilus OX=94136 GN=ygcM PE=4 SV=1
MWDFKIVDRLEKLDEDIKREQLKYHNKRVMVSKEFTFDAAHHLHCYEGKCKNLHGHTYKVIFGISGYVDDTGILIDFGDIKKIWKELIEIYLDHRYLNEMLPPMNTTAENMVVWIYEKMDEALQQDESRYDGTRVEFIRLFETPTSYAEARREWMNDE

SEQ ID NO: 17305 - protein, 159 aa, unidentified
  source 1..159: note = Alkalicoccus halolimnae
  REGION 1..159: note = tr|A0A5C7F3A5|A0A5C7F3A5_9BACI 6-carboxytetrahydropterin synthase QueD OS=Alkalicoccus halolimnae OX=1667239 GN=queD PE=4 SV=1
MFGFRIVEELQKLGEDIQKKELKYHSRRVMISKEFSFDAAHHLHEYEGKCKNLHGHTYRVVFGISGYVDDIGIMIDFGDIKEIWKENIETYLDHRYLNEMLPPMNTTAENMVVWIYEQMEQALQERNKAGNQELRTEFVRLFETPTSYAEITREWMRNE

SEQ ID NO: 17306 - protein, 159 aa, unidentified
  source 1..159: note = Alkalicoccus saliphilus
  REGION 1..159: note = tr|A0A2T4UA01|A0A2T4UA01_9BACI 6-carboxytetrahydropterin synthase QueD OS=Alkalicoccus saliphilus OX=200989 GN=queD PE=4 SV=1
MFGFRIVEKLQKLGTDIQKKDLKYHNKRVMVSKEFTFDAAHHLHEYEGKCKNLHGHTYRAVFGISGYVDEIGMMLDFGDIKDIWKEKIETYLDHRYINEMLPPMNTTAENMVVWLFDQMEKELQERNVKGSQEFRVEFVRLFETPTSYAEMRREWMTDE

SEQ ID NO: 17307 - protein, 175 aa, Alkalilimnicola ehrlichii
  REGION 1..175: note = tr|Q0AAF2|Q0AAF2_ALKEH 6-pyruvoyl-tetrahydropterin synthase OS=Alkalilimnicola ehrlichii (strain ATCC BAA-1101 / DSM 17681 / MLHE-1) OX=187272 GN=Mlg_0831 PE=4; SV = 1
MSSFTVTRRVEIDAAHRIPDHGSRCRHLHGHRYVVEAACGNPSLQEAGEERGMVLDFGFLKEEMLAVIDAPCDHGLLLSVDDHVMLALLAGGSDRPEAWLEGLRERVAGQGYAEGRDPALGGKLYLVPGPPTAEVLARHWYERLAPRVHARSRGNAALLAVTVWETPNCWARYQP

SEQ ID NO: 17308 - protein, 286 aa, Alkalilimnicola ehrlichii
  REGION 1..286: note = tr|A0A3E0X3B9|A0A3E0X3B9_9GAMM Uncharacterized protein OS=Alkalilimnicola ehrlichii OX=351052; GN = CAL65_03620 PE=4 SV=1
MARLFVDQLTVIDCSYLDARRGIVGESWIVDLELGGELDEQGMVFDFGLVKKQVKAAIDGLVDHTLLVPMHAPGLQLSVSGDRVALTFAFADGDLCEFNAPSCAACLLETVEIDTHCVERYLESTLLEELPRNVTSIRIRLRTEAIDGAYYHYSHGLKKHQGQCQRIAHGHRSRLLIERDGVRAPELEQEWAERWRDIYIGSREDVVADELHGGQRYLRFRYQAAEGEFELLLARKRCYLIDTDSTVEHIAAHLASELGRAQPQARFLVRAFEGVGKGALAHNVAL

SEQ ID NO: 17309 - protein, 285 aa, Alkalimonas amylolytica
  REGION 1..285: note = tr|A0A1H3Z6B6|A0A1H3Z6B6_ALKAM 6-pyruvoyl tetrahydropterin synthase OS=Alkalimonas amylolytica; OX = 152573 GN=SAMN04488051_10251 PE=4 SV=1
MILFVRDLTVIDFSYLCAERGLLGESLIVDVELHGSLDKTSMVFDFGLVKKVIKKAIDGSIDHALAVPTDFPGCTLTEQDKQQLVKFTSARGDIQVSGPTQAFALLQAEQVNLQSIEQFILQQLAGKLPDNVKEVRLTLRPEASQGFYYQYSHGLKKHDGNCQRIAHGHRSTIQIYQDGMLSPRLNKFWADRWQDIYLITEQDLCQPADLKWLQANVGDLCSRYQSGQGVFEICLPASHCELVPCDTTVECLADYIAGELKTLDAEHQYKVVAYEGVGKGAIAVS

SEQ ID NO: 17310 - protein, 289 aa, unidentified
  source 1..289: note = Alkalinema sp.
  REGION 1..289: note = tr|A0A251W9H5|A0A251W9H5_9CYAN 6-pyruvoyl tetrahydropterin synthase OS=Alkalinema sp. CACIAM 70d; OX = 1934309 GN=B0A82_23375 PE=4 SV=1
MKCVINRRAKFSASHRYWLPELSDSENVEQFGACARFPGHGHNYTLYVSMLGELDEYGMVLNLSDVKHIIKQEVTGQLDFSYLNDVWEDFKQTLPTTENLARVIWQRLAPHLPIVEIRLYENETLWADYQGNAMEAYLTVSTHFSAAHRLAHPDLSFEENSQIYGKCARVNGHGHNYHLDVTVKGKIHPRTGMLVDLGALQAAIDHYIVEPMDHTFLNKDIPYFERVVPTAENIAAYVCRTLEEPVRQLGATLHKVKLYESPNNACEVYASSNTDNIALKIQLPELATV

SEQ ID NO: 17311 - protein, 129 aa, unidentified
  source 1..129: note = Alkalinema sp.
  REGION 1..129: note = tr|A0A251WGY2|A0A251WGY2_9CYAN 6-carboxy-5,6,7,8-tetrahydropterin synthase OS=Alkalinema sp. CACIAM 70d OX=1934309 GN=B0A82_09760 PE=3 SV=1
MPRWKLATEFHFSAAHQIRDYNGPCGRLHGHTYTVKLEATSDRLHGSEYCPHPVMVADFRTLRWAKKDVTKGGLDHCVLNEVMPPEYETTAEMIAKYIYDKTKKMLPDGVRLNVSVSESPHSWAEYTDD

SEQ ID NO: 17312 - protein, 130 aa, Alkaliphilus peptidifermentans
  REGION 1..130: note = tr|A0A1G5KLH0|A0A1G5KLH0_9CLOT 6-carboxy-5,6,7,8-tetrahydropterin synthase; OS = Alkaliphilus peptidifermentans DSM 18978 OX=1120976; GN = SAMN03080606_03564 PE=3 SV=1
MNNKLIDVTKIFTFDSAHKLDDYDGDCKYLHGHTYRMEITIRGRIDYRGMVMDFNDLKELVKKEILLKLDHRYLNDVFDFNPTCENMLVWIFERLDESLKGEDYFIQKIVLWETPTSYGTLEREQYYAEN

SEQ ID NO: 17313 - protein, 175 aa, Alkalispirillum mobile
  REGION 1..175: note = tr|A0A498BYX9|A0A498BYX9_9GAMM 6-pyruvoyltetrahydropterin/6-carboxytetrahydropterin synthase OS=Alkalispirillum mobile OX=85925 GN=DFR31_1718; PE = 4 SV=1
MSSFTVTRRLEIDAAHRIPDHGSRCRHLHGHRYVVEAACGNPDLHESGEERGMVLDFGFLKEEMLAVIDGPCDHGLLLSVDDQTLLEMLAGGSEQPAEWLAGLRQAVAANGFAEACDPSLGGKLYLLPGPPTAEVLARHWFQRLAPRVQQRSQGHADLLEVTVWETPNCWARYRP

SEQ ID NO: 17314 - protein, 148 aa, unidentified
  source 1..148: note = Alkalitalea saponilacus
  REGION 1..148: note = tr|A0A1T5E8X5|A0A1T5E8X5_9BACT 6-carboxy-5,6,7,8-tetrahydropterin synthase OS=Alkalitalea saponilacus OX=889453 GN=SAMN03080601_01245 PE=3 SV=1
MAKIRLTKEFRFEMAHALWNYDGLCRNIHGHSYILQVTVIGEPISDQDNTKLGMVMDFGDLKAIVNREIVKDLDHSIVVSNMVSPEIIKQMGQMGERHFLVDYQPTCENMLIDFAQRLKNALPKEVSLFSLKLHETANSFAEWYAEDN

SEQ ID NO: 17315 - protein, 200 aa, Alkanindiges illinoisensis
  REGION 1..200: note = tr|A0A4Y7X896|A0A4Y7X896_9GAMM 6-carboxytetrahydropterin synthase OS=Alkanindiges illinoisensis OX=197183 GN=E2B99_14075 PE=4 SV=1
MLIRKLFKFENAHIVRNCTSDRCRRSIHGHSYQVELILSANRLDHGQMVYDFGLLKGVIKDLIDSFDHAICFWSKDDAGYIEACKTYSARWISLPVSPSAEQFSRVFFFLADQVLQQTTTQNGEGDVQVHSVIVHETATGYAQCFREDIENVQMGLLTLQEIEFSEQVQQEWANPQMYEQLKQGISFLNPEVTPQVVLQA

SEQ ID NO: 17316 - protein, 200 aa, Alkanindiges sp.
  REGION 1..200: note = tr|A0A1S8CSX8|A0A1S8CSX8_9GAMM 6-carboxytetrahydropterin synthase QueD OS=Alkanindiges sp. H1 OX=1907941 GN=BKE30_10750 PE=4 SV=1
MLIRKLFKFENAHIVRNCTSDRCRRSIHGHSYQVELILSANRLDHGQMVYDFGLLKGVIKDLIDSFDHAICFWSQDDAGYIDACKTYSARWISLPVSPSAEQFSRVFFFLADQVLQQTTTQNGEGDVQVHSVIVHETATGYAQCFREDIANSQMGLLSLNDIEFSEQVQQEWANPQMYEQLKQGISFLNPEVTPQVIVNA

SEQ ID NO: 17317 - protein, 109 aa, Allisonella histaminiformans
  REGION 1..109: note = tr|A0A1G5WD92|A0A1G5WD92_9FIRM 6-pyruvoyltetrahydropterin/6-carboxytetrahydropterin synthase OS=Allisonella histaminiformans OX=209880; GN = SAMN02910343_01304 PE=4 SV= 1
MYTITKRMEVSGAHFLHLDYESKCSHLHGHNWIITVTCQRETLDSNGMVVDFTKIKETVNQLDHVLINDVIGNLNPTAENMAKWICDRIPYCVKVSVEETEGNVAIYEK

SEQ ID NO: 17318 - protein, 229 aa, Alloactinosynnema album
  REGION 1..229: note = tr|A0A1H0L9Y0|A0A1H0L9Y0_9PSEU 6-pyruvoyl-tetrahydropterin synthase OS=Alloactinosynnema album OX=504798 GN=SAMN05192558_10461 PE=4 SV=1
MKATEEKCVADGQITISQSFGFSASHELRQLPAGHKCHRNHGHNYTVTASALVHDDAPGDLSPLGDYLAATFDHRLLNEQVTFHPTSELLAAHLAEWFRDNMESAMPITLVEMLVSETAATSARCDGVTSEVTISKTFKTSHGDVTLVLMADGLNEVGFITDFGDLKPFGTYLQAPDADAGLRAAGPALVAHLAGWFIDNVEPEIRGRLVSLRVDSGTTTGLWERGDAS

SEQ ID NO: 17319 - protein, 136 aa, Alloactinosynnema album
  REGION 1..136: note = tr|A0A1H0NEL6|A0A1H0NEL6_9PSEU 6-pyruvoyl-tetrahydropterin synthase OS=Alloactinosynnema album OX=504798 GN=SAMN05192558_105312 PE=4 SV=1
MEVTLFSITVRDHVMIAHSFRGEVFGPAQRLHGATFVVDARFTRAELDSDNIVVDIGLATEELGKVLADFNYRNLDDEPAFAGINTSTEFLAKVIADRLAERVHAGALGEGARGLTGIAVTLHESHVAWASYERSL

SEQ ID NO: 17320 - protein, 236 aa, unidentified
  source 1..236: note = Alloactinosynnema iranicum
  REGION 1..236: note = tr|A0A1G6VY60|A0A1G6VY60_9PSEU 6-pyruvoyl-tetrahydropterin synthase OS=Alloactinosynnema iranicum OX=1271860 GN=SAMN05216174_113157 PE=4 SV=1
MTEGSYMKVNDETSAARGQITVSQSFGFSASHELRLLPTSHKCRRNHRHNYTVTATALVRDGDHSDLSPLGDYLTSTFDHRLLNEQVDFHPTSELLAGHLAGWFHGNIKSAMPASLLAMTVSETSSTSARCDGVTGEITISKTFKSGRGDVTLIVGADGLDEVGFVTDFGDLKPFAAYLRGPAAAEAGLATTGPALADHLAGWFIDNIEPEIRGRLVSIQVISGTTTALCKRGDAS

SEQ ID NO: 17321 - protein, 252 aa, Alloactinosynnema sp.
  REGION 1..252: note = tr|A0A0H5CCQ2|A0A0H5CCQ2_9PSEU Queuosine biosynthesis QueD, PTPS-I OS=Alloactinosynnema sp. L-07; OX = 1653480 PE=4 SV=1
MSDLARGRYRIGDGSFSFAAAHRLTKLPDAENKAARPHGHTFTVEVELTDTELLAPGFVADYAELAPVGEYLKRELDHRDLNALFTFDTTTDALAQHLTAWFLAHMPPERGKQLRAIHVGLGTATAACRHVDDESFTFEAAHHLEGLPGGHKCGWPHGHSYRVALRLDSQTDPRRRARLRALLAEYLDLHLDHHDLNAVLPFQPTSELLAEHLYAWTLSQANAREAAVVQAVRVWESPRRWAEFSQDEWSGR

SEQ ID NO: 17322 - protein, 136 aa, Alloactinosynnema sp.
  REGION 1..136: note = tr|A0A0H5CCP5|A0A0H5CCP5_9PSEU PTPS-like type 4; OS = Alloactinosynnema sp. L-07 OX=1653480 PE=4 SV=1
MEDTLFSITVRDHVMIAHSFRGEVFGPAQRLHGATYVVDARFTRPELDADNIVVDIGLATVQLHEVLDELNYRNLDDVPAFAGINTSTEYLAKHIADQLADRVHQGALGEGARGLAGIEVTLQESHVAWAGYTRSL

SEQ ID NO: 17323 - protein, 364 aa, Allochromatium vinosum
  REGION 1..364: note = tr|D3RQ60|D3RQ60_ALLVD Uncharacterized protein; OS = Allochromatium vinosum (strain ATCC 17899 / DSM 180 / NBRC 103801 / NCIMB 10441 / D) OX=572477 GN=Alvin_2762; PE = 4 S V=1
MNARLFHLAAVPFEAACRVDILPEGHRCRRLHGHSFLAQVRAELPLGWAGFPGAESDDLQAALACCVEPLDYRDLNAILPIPTDENLARWVRDRLDVPGIASVGIQSTRDQGADLDGADHAHLWRRFRFESAHRLPNVPEGHPCGRMHGHGFEVILHADQDLGGQDMGIDFDRLAALWTPLHDELHQVCLNDIPGLENPTSERLSSWIWSRLKPELPALSWVTVYETATAGCHFDGAHYRIWKEQRFEAALRLERSPEGDARRRLHGHSYLLRLHLTAPLDQVLGWTVDYGDVKRLFKPLYDRLDHHRLDALDGLEAADPGSLIRWIRERIQDDLPELDRIDLQPTPGCGASLCWGELGPALPT

SEQ ID NO: 17324 - protein, 174 aa, Allochromatium vinosum
  REGION 1..174: note = tr|D3RTI4|D3RTI4_ALLVD Uncharacterized protein; OS = Allochromatium vinosum (strain ATCC 17899 / DSM 180 / NBRC 103801 / NCIMB 10441 / D) OX=572477 GN=Alvin_1560; PE = 4 S V=1
MPMETFVAEAILTRIEISKDYLNFSAGHFTLFSATERENLHGHNFRVRCAVTAQVGEGGLTFDYVILKRALKELCDALDERMLLPLESPYLRIERRDGLVLAHFADERIPFLDRDVLLLPIRNVTIEELAPLLLGRLRAHPEIAAMAAAIRAIELGVSSGQGQWAIAQSESVSA

SEQ ID NO: 17325 - protein, 175 aa, Allochromatium warmingii
  REGION 1..175: note = tr|A0A1H3DUT7|A0A1H3DUT7_ALLWA 6-pyruvoyltetrahydropterin/6-carboxytetrahydropterin synthase OS=Allochromatium warmingii OX=61595; GN = SAMN05421644_11019 PE=4 SV=1
METLVADAILTRIEISKDYLNFSSGHFTLFSATERENLHGHNFRVRCAVTAQVGDGGLTFDYVILKRALKVLCDALDERVLLPLESPYLRIERQDGLVLAHFADERIPFLERDVLLLPIRNVTIEELAPLLLERLRTQVEIAAMTAAIRAIELGVSSGQGQWAIAQWDNRAQAIA

SEQ ID NO: 17326 - protein, 364 aa, Allochromatium warmingii
  REGION 1..364: note = tr|A0A1H3DBN5|A0A1H3DBN5_ALLWA 6-pyruvoyltetrahydropterin/6-carboxytetrahydropterin synthase OS=Allochromatium warmingii OX=61595; GN = SAMN05421644_10848 PE=4 SV=1
MNTHLFYLAAVPFEAARQVASLPDGHRGRRRHGHGFVARVRAALPADWASFAGAETDALREALAACIAPLDYQDLNTLLPIPTDENLARWVRERLAVPGIASIGIQSTRDQGADLDGQEQIHLWRRFRFESAHRLPNVPAGHPCGRMHGHGFEVIVHANQDVAGQDMGLDCDRLAALWAPLHEALHQICLNDIAGLENPTSELLARWIWTRLKPELAALSWVTVYETATAGCHFDGQHYRIWKEQHFEAALRLAHAPEGDTRRRLHGHSYLLRLHLTAPLDQVLGWTVDYGDVKRLFQPLYKRLDHHPLDALDGLTSADPASLTRWIRERIGAELPELDRIDLHPTPGCGAALCWGELGPALPT

SEQ ID NO: 17327 - protein, 169 aa, unidentified
  source 1..169: note = Allofrancisella guangzhouensis
  REGION 1..169: note = tr|A0A0A8E987|A0A0A8E987_9GAMM Uncharacterized protein OS=Allofrancisella guangzhouensis OX=594679; GN = SD28_03250 PE=4 SV=1
MNLNSLSTVIELFREDMKFSAAHFTIFSETQRECLHGHNFQVYAIITAPVIGNNLSFDYTICRKEILNLCYSLNERCLMPSKSPYLKIEKQHRCYMIKFDKTKFVLPEEDVLLLPIKNITTEGLAQWFVKTIASNKDFYGLEDAEILTIKIATAPGQYASATVLLKEFN

SEQ ID NO: 17328 - protein, 81 aa, unidentified
  source 1..81: note = Allonocardiopsis opalescens
  REGION 1..81: note = tr|A0A2T0Q2X1|A0A2T0Q2X1_9ACTN 6-pyruvoyl tetrahydropterin synthase/QueD family protein; OS = Allonocardiopsis opalescens OX=1144618 GN=CLV72_105371; PE = 4 SV=1
MIGDVDPATGWLMDFAEIKAAFKPLLDQLDHYYLNDVPGLENPTSEVLAKWIWDRLIDQLPLSAVVVRETCTSGCIYRGEK

SEQ ID NO: 17329 - protein, 178 aa, unidentified
  source 1..178: note = Allonocardiopsis opalescens
  REGION 1..178: note = tr|A0A2T0Q295|A0A2T0Q295_9ACTN 6-pyruvoyltetrahydropterin/6-carboxytetrahydropterin synthase OS=Allonocardiopsis opalescens OX=1144618; GN = CLV72_105180 PE=4 SV=1
MDTLSTGGAGAVRRPAAAVRTAFAVTVRHNFETAHRLPHLAGKCVNLHGHSWWAEVTVTAPGLLDGTVVRFSAFKAELREWIDRHLDHGAMLGAADPLAKLLPDCGSRVFRFGAADPLPHERPAADLPYPTVEAVAELLARVSTGLVARLDRAPGARVTRVHITETHVNAAEWREAGA

SEQ ID NO: 17330 - protein, 114 aa, unidentified
  source 1..114: note = Alloprevotella rava
  REGION 1..114: note = tr|G5GDG4|G5GDG4_9BACT 6-carboxy-5,6,7,8-tetrahydropterin synthase; OS = Alloprevotella rava F0323 OX=679199 GN=HMPREF9332_01615; PE = 3 SV=1
MYYIKKRIEVAFAHHLTLNYASKCTNLHGHNAIITIYCKTKELNENGMVVDFKHVKDIVSGQLDHRCANDVVDFNPTAENLARWICEQIPHCYKVSFQESEGNIATYEKDDIQD

SEQ ID NO: 17331 - protein, 112 aa, unidentified
  source 1..112: note = Alloprevotella sp.
  REGION 1..112: note = tr|A0A328Q4H3|A0A328Q4H3_9BACT 6-carboxy-5,6,7,8-tetrahydropterin synthase; OS = Alloprevotella sp. E39 OX=2133944 GN=C7Y71_02935 PE=3; SV = 1
MFYLEKSIEISYAHRLSLQYESKCTNMHGHNAIVTVYCKAEKLDENGMVVDFMHVKQVVKRLDHVCFNDIFSFNPTAENVARWICEQIPNCYKVAFKESEGNIAIYSLEENI

SEQ ID NO: 17332 - protein, 117 aa, unidentified
  source 1..117: note = Alloprevotella sp.
  REGION 1..117: note = tr|A0A496KJ45|A0A496KJ45_9BACT 6-carboxy-5,6,7,8-tetrahydropterin synthase; OS = Alloprevotella sp. OX=1872471 GN=D8H91_08700 PE=3 SV=1
MYYISKRIEIAYSHQLKLDYESKCTRPHGHNGIVTVYCCAEELNEYGMVVDFTHVKQRVQDKLDHRNVNEILEFNTTAENMARWICDQIPNAYKVSFQESEGNVAVYVKPGFEDAAL

SEQ ID NO: 17333 - protein, 115 aa, unidentified
  source 1..115: note = Alloprevotella tannerae
  REGION 1..115: note = tr|C9LE54|C9LE54_9BACT 6-carboxy-5,6,7,8-tetrahydropterin synthase; OS = Alloprevotella tannerae ATCC 51259 OX=626522 GN=queD; PE = 3 SV=1
MFYVSKRIEIAYAHQLKLDYESKCTHLHGHNAVVTVYCKAKELDHNGMVVDFKKVKDIVQGKLDHRFANDVVNFNTTAENLAKWICDQVPHCYKVSFQESEGNIAVYIKEDDDAL

SEQ ID NO: 17334 - protein, 138 aa, unidentified
  source 1..138: note = Unknown
  REGION 1..138: note = tr|A0A0N1BTK3|A0A0N1BTK3_9PROT 6-pyruvoyl tetrahydropterin synthase OS=alpha proteobacterium AAP38; OX = 1523418 GN=IP70_12510 PE=4 SV=1
MYSVSVRDHIMIAHSFVGAIFGPAQALHGATFVVDAEFRRRQLSPEGLVVDIGAASALLKQVLAPLNYKNLDEMPEYRGRNTTTEYLAGDIHRKIAAGIRAGALGADGPALDGLRVTLSESHTAWGSYEAPLNADAAR

SEQ ID NO: 17335 - protein, 170 aa, unidentified
  source 1..170: note = Unknown
  REGION 1..170: note = tr|A0A1V1PPV4|A0A1V1PPV4_9PROT 6-carboxytetrahydropterin synthase OS=alpha proteobacterium U9-1i OX=1605283 GN=U91I_02221 PE=4 SV=1
MEFTRRYAMAHRLLATDSPRCAVPHGHNEFVTVKLAPLERFRFSATNSTAPFERVKKRWHQWIDEAVDHSLHLGEGDPLIAFFREREPQRLNQIMTFQGDPTTEALAACFWLKLSAFIADDRLPFRLEELRIEETPTNTVVVSEATFDAATCGLRAGAWPWRADMSINDF

SEQ ID NO: 17336 - protein, 118 aa, unidentified
  source 1..118: note = Alphaproteobacteria bacterium
  REGION 1..118: note = tr|A0A257HQJ8|A0A257HQJ8_9PROT 6-carboxy-5,6,7,8-tetrahydropterin synthase; OS = Alphaproteobacteria bacterium PA1 OX=2015569 GN=queD; PE = 3 SV=1
MTKSVTFDAAHHLHQGDESHPYRRLHGHSFRLDVSVEDEADGKDHWVRDFAELAKAISEVRNVLDHSFLNEIEGLETPTLENICAWVAERLKPSLPNLRRVSVARPSLGEMCTLEIGL

SEQ ID NO: 17337 - protein, 118 aa, unidentified
  source 1..118: note = Alphaproteobacteria bacterium
  REGION 1..118: note = tr|A0A2S6RGE1|A0A2S6RGE1_9PROT 6-carboxy-5,6,7,8-tetrahydropterin synthase; OS = Alphaproteobacteria bacterium MarineAlpha9_Bin4; OX = 2013099 GN=queD PE=3 SV=1
MNKLICKSFTFEAAHNLTTTTNDKNKNIHGHSFHVKIYIKGEVKKNGMIVDFFILDKTVKKLKDKLDHSYLNDIKEIKTPTLENIGSWIWKQIKPTLKNLYKVDVARKTCGESFSIFK

SEQ ID NO: 17338 - protein, 135 aa, unidentified
  source 1..135: note = Alsobacter sp.
  REGION 1..135: note = tr|A0A2T1HLZ3|A0A2T1HLZ3_9RHIZ Uncharacterized protein OS=Alsobacter sp. SH9 OX=2109933 GN=SLNSH_22890; PE = 4 SV=1
MYAVEVRDHIMIAHSFKGELFGPAQRLHGATFVVDVAFFREALTPDNVVIDIGRAHEALKATLGPLNYRNLDEVPEFAGQQTTTEFLSRHIFDAMAQACRRGELGPGSEGVARIRVTLHESHVARAWFEGPVGGV

SEQ ID NO: 17339 - protein, 122 aa, Altererythrobacter sp.
  REGION 1..122: note = tr|A0A0T2QH58|A0A0T2QH58_9SPHN 6-carboxy-5,6,7,8-tetrahydropterin synthase; OS = Altererythrobacter sp. Root672 OX=1736584; GN = ASD76_08830 PE=3 SV=1
MWELSKTFWFESAHTLHRQVETEGSLRIHGHSYRAVVTVRGRPEPATGMLIDLSVFQAALSEACTGLDHRLLDEVVDLGPPTLENLCAWIWRTVQPALPDLHRVEVYRDSQGDRCSYEGNAE

SEQ ID NO: 17340 - protein, 149 aa, unidentified
  source 1..149: note = Alteribacillus bidgolensis
  REGION 1..149: note = tr|A0A1G8MK28|A0A1G8MK28_9BACI 6-carboxy-5,6,7,8-tetrahydropterin synthase; OS = Alteribacillus bidgolensis OX=930129; GN = SAMN05216352_11075 PE=3 SV=1
MLHQFYPQVQHEYRYELNKDMHLAAAHFIPASAAGKCTNIHGHTYVINLTIAGDELNDTGFLIDFKLLKDIVHKRFDHSLLNDYHEFGESQTNSADTFPTTEVVARTIWQLVQRELDQCDNKPCCLQVLVRETPTSYVVYRPKKGDFSS

SEQ ID NO: 17341 - protein, 148 aa, unidentified
  source 1..148: note = Alteribacillus iranensis
  REGION 1..148: note = tr|A0A1I2CVN6|A0A1I2CVN6_9BACI 6-carboxy-5,6,7,8-tetrahydropterin synthase; OS = Alteribacillus iranensis OX=930128; GN = SAMN05192532_103207 PE=3 SV=1
MLHQFYPQVPHPYRFELNKDMHIAAAHFIPARSAGKCANIHGHTYVINLTIAGDDLDNTGFLVNFKTLKDVVHKRFDHTLLNEDDQFGSEEEDSADTFPTTEVVARTIWQMVQSELDKKQNKPRCVQVLVRETPTSYVVYRPKEGDFR

SEQ ID NO: 17342 - protein, 150 aa, unidentified
  source 1..150: note = Alteribacillus persepolensis
  REGION 1..150: note = tr|A0A1G8GJ51|A0A1G8GJ51_9BACI PreQ(0) biosynthesis protein QueD OS=Alteribacillus persepolensis OX=568899; GN = SAMN05192534_1163 PE=4 SV=1
MLHQFYPQVLHDYRYELNKDMHLAAAHFIPASAAGKCTNIHGHTYVINITIAGDKLDRTGFLIDFKLLKDIVHKRFDHSLLNDHREFGDTDTSDPESFPTTEVVAKTIWEMIQRELDKLHNKPRCLQVLVRETPTSYVVYRPKEEDFSDE

SEQ ID NO: 17343 - protein, 280 aa, unidentified
  source 1..280: note = Alteromonadaceae bacterium
  REGION 1..280: note = tr|A0A495D6S7|A0A495D6S7_9ALTE 6-pyruvoyl tetrahydropterin synthase-like protein OS=Alteromonadaceae bacterium 2052S.S.stab0a.01 OX=1304900 GN=K256_0778 PE=4; SV = 1
MRLFVDNLTNVDFSYLDARRGMLGETWLASVELEGELDAQGMVCDFGIVKRKLRDWLDATIDHCLLVPAGSPALHHQLSENQCNLQWRLADGLCITCSSPAEAITLVDATSITPESVASWCITQLKPLFPDSIDRLTLRFTPESISGPYYHYSHGLKKHAGNCQRIAHGHRSKIEIWRNGELSIADMERWGREWQDIYIGSEDDLSRGNTDESTLHFAYQAQQGHFSLTMPKDHCYLINTDSTVEFIAAHIAGRLKSETPADTIRVKAYEGLAKGAICEL

SEQ ID NO: 17344 - protein, 281 aa, unidentified
  source 1..281: note = Alteromonadaceae bacterium
  REGION 1..281: note = tr|A0A2A5HG14|A0A2A5HG14_9ALTE Uncharacterized protein OS=Alteromonadaceae bacterium OX=1916082; GN = COA42_20865 PE=4 SV=1
MLLFIDNLCNIDFSYFHPTRGLVGETWLASIELEGELNEQGMICDFGIVKQVVRQWLDEEVDHRLLVATQSTCAKKVATSQDIVEIHWQTKSGESYLCNSPQSAIVSLDAESTDARSLSAWCKQRLKDKLPSDIGNLNLRFTPEQIVDPFYHYSHGLKKHSGNCQRIAHGHRSKIEIWKNDVLDTGLIAAWAERWQDIYIGSKEDLTKEQASGANYTFAYRSSQGEFYLSIPKGKCALIDTDSTVEFLAQHIAQQLKLEHPNDHFKVKAYEGIGKGAVAKI

SEQ ID NO: 17345 - protein, 285 aa, unidentified
  source 1..285: note = Alteromonadales bacterium
  REGION 1..285: note = tr|A0Y1S3|A0Y1S3_9GAMM Uncharacterized protein; OS = Alteromonadales bacterium TW-7 OX=156578 GN=ATW7_12763; PE = 4 SV=1
MILFVNSLTVIDFSYLCNKRGAVGESWIVDLTLHGKLNDESMVLDFGLVKKQIKGIIDECIDHRLAIPNSINGSVTEFDEHKTLDCTFGDNHHLAMSAPHQAYCMIDADEINVESVTAFLVDTILPKLPSNIEKIELSLKPEHSQSFYYHYSHGLKKHDGNCQRIIHGHRSQIGISLDGISMPRLQKEWAMQWEDIYLATSEDQIEPHNLKHISARDNDVCFAYTSAQGYFEMAISETRCDILPIDTTVECIAGYIAGQVKAKHPEQNVKITAYEGVGKGAISYA

SEQ ID NO: 17346 - protein, 296 aa, unidentified
  source 1..296: note = Alteromonadales bacterium
  REGION 1..296: note = tr|A0A2N0WRB9|A0A2N0WRB9_9GAMM Uncharacterized protein OS=Alteromonadales bacterium alter-6D02 OX=2058087; GN = CW748_08520 PE=4 SV=1
MKLFVNNLTVIDYSYLCHERGMVGESLIVDIELDGSLNDECMVLDFGLVKKQIKAVIDDEVDHKLLVPATNQCVSYNVLESTTQILLDRPEELPIYLNCPHQAFALIDNDIVDEQSIIKHLEQVIKNVLPENVTGLVLKLAPEPVFGPYYHYSHGLKKHDGNCQRIAHGHRSIIEIERNGEKAEDLEQYWASRWNDIYLITEQDMVSAEEITLPEPLEVLRQVPNMHHVAYDAPQGRFELIIPMQHCEVVDFDTTVELLTVYVAKTLATENPGDTISVIGYEGVDKGAMASHQVSA

SEQ ID NO: 17347 - protein, 291 aa, unidentified
  source 1..291: note = Alteromonas aestuariivivens
  REGION 1..291: note = tr|A0A3D8M8H1|A0A3D8M8H1_9ALTE Uncharacterized protein OS=Alteromonas aestuariivivens OX=1938339; GN = DXV75_08025 PE=4 SV=1
MQLFVNDLTVMDFSYLCAERGMVGESWIVDVLLDGALNDESMIQDFGKVKKDLKRLIDEYVDHKLLVPADYAQTRVIHDENSAQVEVQFRCHDGRQFMLSSPADAYAFVYAPEVTMTSVSDYLKEVLATHLPDNVDDIELILRTEVIDTPFYHYTHGLKKHDGNCQRIAHGHRSKIDIFIDGVSCLESQNYWAQRWKDIYIATREDQVDLADTCIQGEISAPENYHCFAYEASQGRFEIILPKSDCEIIDTDSTVECLAQYIFQHQKQRRPEGKCKVLAYEGVGKGAMISE

SEQ ID NO: 17348 - protein, 195 aa, unidentified
  source 1..195: note = Alteromonas australica
  REGION 1..195: note = tr|A0A075P2D1|A0A075P2D1_9ALTE DUF2726 domain-containing protein OS=Alteromonas australica; OX = 589873 GN=DEB45_02875 PE=4 SV=1
MELAIILMMLLIVVALGAIKLSDGGVAFPFRRKPQLFTPVEHSFLNLIEQAMGREFRIVCRVKLSDIVSVRQSTNKKTASQALSRASSRQLDFVLVDKHDMSPILAIDLVHNQGKEGYKTQRDWFVSGALDAAGVPHARIKVKSGYSVDDIRECLENKLIPYRRVQQKLSQVPTHNPEPTKRPTRPIRSSRAAAA

SEQ ID NO: 17349 - protein, 291 aa, unidentified
  source 1..291: note = Alteromonas australica
  REGION 1..291: note = tr|A0A075P1U7|A0A075P1U7_9ALTE 6-pyruvoyl tetrahydropterin synthase OS=Alteromonas australica; OX = 589873 GN=EP13_09755 PE=4 SV=1
MQLFVNDLTVMDFSYLCPKRGMVGESWIVDVVLDGELNEESMVQDFGKVKKNLKRLIDEYVDHKLLVPAEYAGSKVIHDEVTEQVEVQFTCEDGRQIMLHCPAEAYAILYSDVVTMASVSVYLKEVLATHLPENVDNITLKLRTEVIHSPFYHYTHGLKKHDGNCQRIAHGHRSRIDILLDGQVSEAEQSYWAKRWEDIYIATQEDEIAYTERKITGSVAEPSAYLCFAYESSQGYFELIIPKSDCEVIDTDSTVECLAQYLLEEQKKRTPDSHCQVIAYEGVGKGAMVSE

SEQ ID NO: 17350 - protein, 290 aa, unidentified
  source 1..290: note = Alteromonas confluentis
  REGION 1..290: note = tr|A0A1E7ZE23|A0A1E7ZE23_9ALTE Uncharacterized protein OS=Alteromonas confluentis OX=1656094; GN = BFC18_05980 PE=4 SV=1
MQLFVNDLTVMDFSYLCPKRGMVGESWIVDVVLSGDLNDESMIQDFGKVKKNLKRLIDDYVDHKLLVPADYNDVAIIRNDDEQVDARFTCEDGRVLQLYCPAEAYAFIYGESVTMESVGLYLREVLATHLPENVDNLELILRTEVITTPFYHYTHGLKKHDGNCQRIAHGHRSKIDVFVDGQNSLESQEYWASRWEDIYIASEEDRLAFDKRQASGDVPGDQSYSCFAYESSQGYFEILLPDADCEVVTTDSTVECLAQFIYDQEKQRKQGAAVKILAYEGVGKGALVCD

SEQ ID NO: 17351 - protein, 291 aa, unidentified
  source 1..291: note = Alteromonas lipolytica
  REGION 1..291: note = tr|A0A1E8FGS0|A0A1E8FGS0_9ALTE Uncharacterized protein OS=Alteromonas lipolytica OX=1856405; GN = BFC17_16310 PE=4 SV=1
MQLFVNDLTVMDFSYLCPQRGMVGESWIVDVLLDGTLNEESMIQDFGVVKKNLKRLIDGYIDHKLLVPAECESAFIRHDENTEQVEVRFDLGADKAIQMYCPAEAYAFIYAPTITMESVSEYLREVIATHLPDNVDNLTIKLRTEVITTPFYHYTHGLKKHDGNCQRIAHGHRSRVDIITDGKTDLDSEAYWANRWEDIYIASREDQIEPDALQCQHKLVSYADHVCFAYEAAQGYFEIVLPASICEIIDTDSTVECLAQHIYNEQKRRIPAQSCCVMAYEGVGKGAMVGD

SEQ ID NO: 17352 - protein, 291 aa, Alteromonas macleodii
  REGION 1..291: note = tr|K0EGE6|K0EGE6_ALTMB Uncharacterized protein; OS = Alteromonas macleodii (strain Balearic Sea AD45); OX = 1004787 GN=AMBAS45_09840 PE=4 SV=1
MQLFVNDLTVMDFSYLCPKRGMVGESWIVDVILDGELNEESMVQDFGHVKKNLKRLIDEYVDHKLLVPAEYSGSEVIHDDDSEQVEARFTCIDGRSIMLHCPAEAYAFVYSDEINMESVGVYLKEVLATHLPENVENITLHLREEVINSPYYHYTHGLKKHDGNCQRIAHGHRSRIDIILDGKVCVESQQYWADRWADIYIATREDEIAYSDKKLKGQVSNEADYYCFAYESSQGYFELLIPKSDCEVIETDSTVECLAQYLLEEQKKRTPDGVCQVIAYEGVGKGATVKG

SEQ ID NO: 17353 - protein, 195 aa, Alteromonas macleodii
  REGION 1..195: note = tr|A0A126Q2L5|A0A126Q2L5_ALTMA DUF2726 domain-containing protein OS=Alteromonas macleodii; OX = 28108 GN=AVL55_15800 PE=4 SV=1
MELAIILMMLLIVVALGAIKLSDGGVAFPFRRKPQLFTPVEHSFLNLIEQAMGREFRIVCRVRLNDLVAVRQSANKKTASQAISRASSRQLDFVLVDKHDMSPVLAIDLVHSQGKDGYKSQKDWFVTGALDAAGLPHARIKVKSGYTVDDIRECLENKLIPYRRLQQKMAQLPTHNPEPPKRPTRPVRSSRPAAA

SEQ ID NO: 17354 - protein, 195 aa, Alteromonas marina
  REGION 1..195: note = tr|A0A0B3Z7Q9|A0A0B3Z7Q9_9ALTE QueD like protein; OS = Alteromonas marina OX=203795 GN=RJ41_07595 PE=4 SV=1
MELAIILMMLLIVVALGAIKLSDGGVAFPFRRKPQLFTPVEHTFLNLIEQAMGREFRIVCRVRLNDLVSVRQSANKKTASQALSRASSRQLDFVLVDKQDMSPVMAIDLVHSQGKEGYKAQKDWFVTGALDAAGLPHARIKVKSGYTVDDIRECLENKLIPYRRLQNKMAQLPTHNPEPPKRPTRPVRSSRPAAA

SEQ ID NO: 17355 - protein, 291 aa, Alteromonas marina
  REGION 1..291: note = tr|A0A0B3Y656|A0A0B3Y656_9ALTE 6-pyruvoyl tetrahydropterin synthase OS=Alteromonas marina OX=203795; GN = RJ41_10565 PE=4 SV=1
MQLFVNDLTVMDFSYLCPKRGMVGESWIVDVILDGELNEESMVQDFGHVKKNLKRLIDEYVDHKLLVPAEYSGSEVIHDDDSEQVEARFTCIDGRSIMLHCPAEAYAFVYSDEINMESVGVYLKEVLATHLPENVENITLHLREEVINSPYYHYTHGLKKHDGNCQRIAHGHRSRIDIILDGKVCVESQQYWADRWADIYIATREDEIAYSDRKLKGQVPNEADYYCFAYESSQGYFELLIPKSDCEVIETDSTVECLAQYLLEEQKKRTPNGVCQVIAYEGVGKGATVKG

SEQ ID NO: 17356 - protein, 291 aa, unidentified
  source 1..291: note = Alteromonas mediterranea
  REGION 1..291: note = tr|S5AE33|S5AE33_9ALTE Uncharacterized protein; OS = Alteromonas mediterranea 615 OX=1300253 GN=I633_10530; PE = 4 SV=1
MQLFVNDLTVMDFSYLCPQRGMVGESWIVDVVLDGELNEESMVQDFGHVKKNLKRLIDEYVDHKLLVPAEYSGSEVLHDDETEQVETRFTCTDGRSIMLHCPAEAYAFVYSDEINMDSVGVYLKEVLATHLPENVENITLNLREEVITSPFYHYTHGLKKHDGNCQRIAHGHRSRIDIILDGKVSVESQQYWADRWEDIYIATQEDEIAYSDRKLKGTVDNAEDYYCFAYESSQGYFELLIPKSDCEVIDTDSTVECLAQYLLEEQKKRTPEGICQVIAYEGVGKGATVKG

SEQ ID NO: 17357 - protein, 291 aa, unidentified; identical to SEQ ID NO: 17356
  source 1..291: note = Alteromonas mediterranea
  REGION 1..291: note = tr|F2GC59|F2GC59_ALTMD Isocitrate dehydrogenase (NADP(+  )) OS=Alteromonas mediterranea (strain DSM 17117 / CIP 110805 / LMG 28347 / Deep ecotype) OX=1774373; GN = MADE_1 009685 PE=4 SV=1

SEQ ID NO: 17358 - protein, 291 aa, unidentified
  source 1..291: note = Alteromonas naphthalenivorans
  REGION 1..291: note = tr|F5Z7P2|F5Z7P2_ALTNA Uncharacterized protein; OS = Alteromonas naphthalenivorans OX=715451 GN=ambt_07785; PE = 4 SV=1
MQLFVNDLTVMDFSYLCPKRGMVGESWIVDVILTGELNEESMVQDFGIVKKDLKRLIDEYVDHKLLVPAEYAGATVIHDDVNEQVEVRFTCEDSREIMLRCPAEAYAFLYSDVVTMESVSVYLKEVLATHLPENVDNITLKLRTEVIESPFYHYTHGLKKHDGNCQRIAHGHRSRIDIYLDGKISEQEQAYWANRWDDIYIATTEDEIAYEDRKITGSVATPSDYFSFAYESSQGYFELLIPKADCEVITTDSTVECLAQYLLVEQKKRTPNNHCQVVAYEGVGKGAMVSD

SEQ ID NO: 17359 - protein, 291 aa, unidentified
  source 1..291: note = Alteromonas pelagimontana
  REGION 1..291: note = tr|A0A2A6AYK1|A0A2A6AYK1_9ALTE Uncharacterized protein OS=Alteromonas pelagimontana OX=1858656; GN = CA267_05815 PE=4 SV=1
MQLFVNDLTVMDFSYLCPKRGMVGESWIVDVILDGDLNDESMIQDFGKVKKNLKRLIDDYVDHKLAVPAEYVNADVIHNEENDQVEVRFTCDDERQIQLYCPADAYAFIYSDSVTMDSVGRYLREVIATHLPENVDNIELKLRTEVIDTPFYHYTHGLKKHDGNCQRIAHGHRSKIDIIIDKQPCLESQKYWAERWQDIYIGTTEDAISFSDRQGAGKVPKEDEYYCFAYEASQGYFEIVIPKSDCEVIDTDSTVECLAKYIFTQQKMRSSKGSLQVVAYEGVGKGAIVTE

SEQ ID NO: 17360 - protein, 291 aa, Alteromonas sp.
  REGION 1..291: note = tr|A0A349Z7X8|A0A349Z7X8_ALTSX Uncharacterized protein OS=Alteromonas sp. OX=232 GN=DCW59_14945 PE=4 SV=1
MQLFVNDLTVMDFSYLCPERGMVGESWIVDVLLDGTLNEESMIQDFGVVKKNLKRLIDGYIDHKLLVPAESEQAHIRRDEDSEQVEVRFDLTNDQAIQMYCPAEAYAFIYAPTITMDSVSEYLREVIATHLPDNVDNLTIKLRTEVINTPFYHYTHGLKKHDGNCQRIAHGHRSRVDIITNGNEDLESEAYWAKRWEDIYIASREDQISADALQCQHRLANYDDHVCFAYEAAQGYFEIVLPESICEIIDTDSTVECLAQYIYTQQKQRLPDDSCCVMAYEGVGKGAMVGD

SEQ ID NO: 17361 - protein, 291 aa, Alteromonas sp.
  REGION 1..291: note = tr|A0A3S5AW37|A0A3S5AW37_9ALTE 6-pyruvoyl tetrahydropterin synthase-like protein OS=Alteromonas sp. 76-1 OX=2358187 GN=ALT761_02111 PE=4 SV=1
MQLFVNDLTVMDFSYLCPKRGMVGESWIVDVILTGELNEESMVQDFGIVKKDLKRLIDEYVDHKLLVPAEYAGATVIHDDVNEQVEVRFTCEDGREIMLRCPAEAYAFLYSDVVTMESVSVYLKEVLATHLPENVDNITLKLRTEVIESPFYHYTHGLKKHDGNCQRIAHGHRSRIDIYLDGKISEQEQAYWANRWDDIYIATTEDEIAYEDRKITGSVATPSDYFSFAYESSQGYFELLIPKADCEVITTDSTVECLAQYLLVEQKKRTPNNHCQVVAYEGVGKGAMVSD

SEQ ID NO: 17362 - protein, 281 aa, Alteromonas stellipolaris
  REGION 1..281: note = tr|A0A0S1YJ57|A0A0S1YJ57_9ALTE NADPH-dependent 7-cyano-7-deazaguanine reductase OS=Alteromonas stellipolaris LMG 21856 OX=1160720 GN=AOR13_1448 PE=4 SV=1
MDFSYLCPKRGMVGESWIVDVILTGELNEESMVQDFGIVKKDLKRLIDEYVDHKLLVPAEYAGATVIHDDVNEQVEVRFTCEDAREIMLRCPAEAYAFLYSDVVTMESVSVYLKEVLATHLPENVDNITLKLRTEVIDSPFYHYTHGLKKHDGNCQRIAHGHRSRIDIYLDGKISEQEQAYWANRWDDIYIATTEDEIAYEDRKITGSVATPSDYFLFAYESSQGYFELLIPKADCEVITTDSTVECLAQYLLVEQKKRTPNNHCQVVAYEGVGKGAMVSD

SEQ ID NO: 17363 - protein, 195 aa, Alteromonas stellipolaris
  REGION 1..195: note = tr|A0A0S1YFX3|A0A0S1YFX3_9ALTE Putative queD like; OS = Alteromonas stellipolaris LMG 21856 OX=1160720; GN = AOR13_310 PE=4 SV=1
MELAIILMMLLIVVALGAIKLSDGGVAFPFRRKPQLFTPVEHSFLNLIEQAMGREFRIICRVRLSDIVSVRQSANKKTASQAISRASSRQLDFILVDKQDMSPILAIDLVHNQGKEGYKTQRDWFVSGALDAAGVPHARIKVKSGYTVDDIRECLENKLIPYRRIQQKMSQLPTHNPEPTKRPTRPVRSSRAAAA

SEQ ID NO: 17364 - protein, 150 aa, unidentified
  source 1..150: note = Altibacter sp.
  REGION 1..150: note = tr|A0A2D9N8M1|A0A2D9N8M1_9FLAO 6-carboxytetrahydropterin synthase QueD OS=Altibacter sp.; OX = 2024823 GN=CL605_12590 PE=4 SV=1
MNKIRITKQFSFETGHALYGYDGKCRNVHGHSYRLSVTVIGTPISNTENVKYGMVIDFSDLKKIVKEEIVDVFDHATVFNKNTPHVELANELKDRGHNVLLVNYQPTSEMMVMDFAEKIKTRLPETIKLHSLKLQETATSYAEWFASDNA

SEQ ID NO: 17365 - protein, 141 aa, Alysiella crassa
  REGION 1..141: note = tr|A0A376BSQ5|A0A376BSQ5_9NEIS 6-carboxy-5,6,7,8-tetrahydropterin synthase OS=Alysiella crassa OX=153491 GN=queD PE=3 SV=1
MFKTAKQFTFDMAHMLDGHDGKCQNLHGHTYILQVEVSGCLHEEGAKKGMVMDFADLKDIVKQHILDKMDHAFIYDTTSARESQVADLLNQLNSKTYGIATRTTAEEMTRHIFNTLKIEANLPVSLVRLWETPSSYCEYAE

SEQ ID NO: 17366 - protein, 141 aa, Alysiella filiformis
  REGION 1..141: note = tr|A0A286ED78|A0A286ED78_9NEIS 6-carboxy-5,6,7,8-tetrahydropterin synthase OS=Alysiella filiformis DSM 16848 OX=1120981 GN=SAMN02746062_01430 PE=3; SV = 1
MFKTAKQFTFDMAHMLDGHDGKCQNLHGHTYVLQVEVSGSLHETGAKKGMVMDFADLKDIVKTHILDKMDHAFIYDNTNERETQVADLLNKLDSKTYGIASRTTAEEMARHIFTVLKTQADLPVSLIRLWETPSSYCEYAE

SEQ ID NO: 17367 - protein, 198 aa, unidentified
  source 1..198: note = Amantichitinum ursilacus
  REGION 1..198: note = tr|A0A0N0GQ36|A0A0N0GQ36_9NEIS 6-pyruvoyl tetrahydropterin synthase OS=Amantichitinum ursilacus; OX = 857265 GN=WG78_05470 PE=4 SV=1
MLIRKLFKFENAHIVRNCSSDRCRHSIHGHSYKVEVLLEAHTLDHGQMVYDFGLMKGTIKDVIDAFDHAICFWDKDDPEYIRLCKQFSARWIALPVSPSAEQFARLFFIVIDAILQNTVMKNGEGDVRLHSVIAHETDTGYAQAFREDADNARMGIIRPADIVFSEQVLAEWQDPQMMQKLIAGQTFVNPDVPLQVKV

SEQ ID NO: 17368 - protein, 131 aa, Amaricoccus sp.
  REGION 1..131: note = tr|A0A501WTY8|A0A501WTY8_9RHOB 6-carboxytetrahydropterin synthase OS=Amaricoccus sp. HB172011 OX=2589815 GN=FJM51_04060 PE=4 SV=1
MFAVEVRDHIMVAHSLPSPTFGPAQGVHGATFVVDAAFLAEELDAEGLVVDIGLATEALAAALAPLRYANLDEKPEFAGKFTTTEFLCKHVFDALAGAARAGRLADGGRLARIRVTLHESHLARGWYEGAL

SEQ ID NO: 17369 - protein, 187 aa, unidentified
  source 1..187: note = Aminipila sp.
  REGION 1..187: note = tr|A0A410PW00|A0A410PW00_9FIRM Rubredoxin; OS = Aminipila sp. JN-39 OX=2507160 GN=EQM06_07510 PE=4 SV=1
MRSFTTLDLQYAHRFYGFKGEAQYLHGHTGILTLEVEDTVNMGVNMVFPCNEIKKTAWEVLQNFDHALILREDDPLLPAILDVYEAQGIKNGAPTNKQKGPAFKTELATAYPECRLVVTKETMTVEGMIKIVYDLLKDKLNIVKITFTSGVNGATEEYEPQKSVERCPLCGIALDKNGVCPKCGYKK

SEQ ID NO: 17370 - protein, 123 aa, unidentified
  source 1..123: note = Aminivibrio pyruvatiphilus
  REGION 1..123: note = tr|A0A4R8MJI0|A0A4R8MJI0_9BACT 6-carboxy-5,6,7,8-tetrahydropterin synthase OS=Aminivibrio pyruvatiphilus OX=1005740 GN=C8D99_101349 PE=3 SV=1
MLLRKEFIFDAAHNLVEYHGKCERLHGHTYRLAVVLKGSPDREGMIADFCEVSSLVKERVISRLDHAYLNDILPQPTAEYIARWVWEQVAEPLRRPNCRLWEVEVWETATSCAVLTAEDMDHA

SEQ ID NO: 17371 - protein, 123 aa, Aminobacter aminovorans
  REGION 1..123: note = tr|A0A381ILX7|A0A381ILX7_AMIAI 6-carboxy-5,6,7,8-tetrahydropterin synthase OS=Aminobacter aminovorans OX=83263 GN=queD PE=3 SV=1
MIETYKEFTFEAAHQLQPYSGLHGHSFQVSVHLVGDPDPVFGWPANLYELEQQIEVVRMTLDHKYLNEIEGLSVPSLENVARWIWEKLEPQFPQLDRVAVRRGAQGQAEGTVYNGRVLRRARA

SEQ ID NO: 17372 - protein, 123 aa, Aminobacter aminovorans
  REGION 1..123: note = tr|A0A142MDR8|A0A142MDR8_AMIAI 6-carboxy-5,6,7,8-tetrahydropterin synthase OS=Aminobacter aminovorans OX=83263 GN=AA2016_5583 PE=3 SV=1
MIETYKEFTFEAAHQLQPFSGLHGHSFQVSVHLVGDPDPVFGWPANLYELEQQIEVVRMTLDHKYLNEIEGLSVPSLENVARWIWDKLEPQFPQLDRVAVRRGAQGQAEGTVYNGRALQKARA

SEQ ID NO: 17373 - protein, 119 aa, Aminobacter sp.
  REGION 1..119: note = tr|A0A2S0XMY6|A0A2S0XMY6_9RHIZ 6-carboxy-5,6,7,8-tetrahydropterin synthase OS=Aminobacter sp. MSH1 OX=374606 GN=queD PE=3 SV=1
MVETFKEFTFEAAHQLPPFSGLHGHSFRVSVHLVGAPDPVFGWPANLYEVEKRIEIVRKTLDHTYLNDIEGLSVPSIENIARWIWEQMEDHFPQLDRVAVARGADGQAEGTVYRGRLVN

SEQ ID NO: 17374 - protein, 119 aa, Aminobacter sp.
  REGION 1..119: note = tr|A0A0Q6M646|A0A0Q6M646_9RHIZ 6-carboxy-5,6,7,8-tetrahydropterin synthase OS=Aminobacter sp. Root100 OX=1736420 GN=ASC75_18580 PE=3 SV=1
MVETFKEFTFEAAHQLPPFSGLHGHSFRVSIHLVGAPDPVFGWPANLYEVEKRIEIVRKTLDHTYLNDIEGLAVPSIENIARWIWEQMENHFPQLDRVAVARGADGQAEGTVYRGRLAN

SEQ ID NO: 17375 - protein, 122 aa, Aminobacterium colombiense
  REGION 1..122: note = tr|D5EG49|D5EG49_AMICL 6-carboxy-5,6,7,8-tetrahydropterin synthase; OS = Aminobacterium colombiense (strain DSM 12261 / ALA-1); OX = 572547 GN=Amico_1414 PE=3 SV=1
MLLKKEFVFDAAHNLIHYKGKCEKLHGHTYRMVVIIEGIPDHEGMVIDFCEVSSLVKERVISRLDHAYINDIIPQPSAENIAVWVWKEIEGFLRRPNCHLEAVEIWETATSGVVVRKEDINA

SEQ ID NO: 17376 - protein, 122 aa, Aminobacterium sp.
  REGION 1..122: note = tr|A0A3D0MRL8|A0A3D0MRL8_9BACT 6-carboxy-5,6,7,8-tetrahydropterin synthase; OS = Aminobacterium sp. OX=1872491 GN=queD PE=3 SV=1
MFLKKEFTFDAAHNLVHYKGKCEKLHGHTYRLVVTIEGTPDHEGMVIDFCELSSLVKERVLSRLDHSYINDFIPQPTAENIALWVWNQLEEVLRYPHCCLVEIEVWETATSGVILRKEDVYA

SEQ ID NO: 17377 - protein, 121 aa, Aminomonas paucivorans
  REGION 1..121: note = tr|E3CW98|E3CW98_9BACT 6-carboxy-5,6,7,8-tetrahydropterin synthase OS=Aminomonas paucivorans DSM 12260 OX=584708 GN=Apau_0923 PE=3 SV=1
MRLRRDFTFDAAHNLVAYHGKCERLHGHTYRLGVTLEGTPDEEGMVLDFVELKRIVREQVLDQVDHAYLNDLVPQPTAENLARWAFQRLDAPLHRPHCRLTSVEVFETADSSVTFYREDLS

SEQ ID NO: 17378 - protein, 124 aa, Ammonifex degensii
  REGION 1..124: note = tr|C9RBW1|C9RBW1_AMMDK 6-carboxy-5,6,7,8-tetrahydropterin synthase OS=Ammonifex degensii (strain DSM 10501 / KC4) OX=429009 GN=Adeg_0590; PE = 3 SV=1
MYRLTVKGSFSAAHRLPNHPSPCSRLHGHNWEVTVTVIGEELGPDGMLLDFTVLKQILQEVLAKLDHQYLNEIPPFGKELPPTAENLARYIYHEVATRLAPYPAVTLQEVKVGESPSAWVVYTP

SEQ ID NO: 17379 - protein, 124 aa, Ammonifex sp.
  REGION 1..124: note = tr|A0A3A6MWN3|A0A3A6MWN3_9THEO 6-carboxy-5,6,7,8-tetrahydropterin synthase OS=Ammonifex sp. OX=1872493 GN=queD PE=3 SV=1
MYELTVETSFSAAHCLEKHPSPCGRLHGHNWTVAVTVTGDELNTMGMVVDFAVLKQALREAVAVFDHRYLNELPPFCDGAQPTAENIARHIWGAVAEKLAAYASVTVKEIKIAESPSAWVVYRP

SEQ ID NO: 17380 - protein, 124 aa, Ammonifex thiophilus
  REGION 1..124: note = tr|A0A3D8P4N1|A0A3D8P4N1_9THEO 6-carboxy-5,6,7,8-tetrahydropterin synthase OS=Ammonifex thiophilus OX=444093 GN=queD PE=3 SV=1
MYRLTVKGSFSAAHRLPDHPSPCSRLHGHNWEVAVTVIGEELGPDGMLLDFAVLKQILREVLAKLDHQYLNELPPFGKEFPPTAENLARYIYHEVAARLASYSAVTLQEVRVGESPSAWVVYTP

SEQ ID NO: 17381 - protein, 155 aa, Ammoniphilus oxalaticus
  REGION 1..155: note = tr|A0A419SM96|A0A419SM96_9BACL 6-carboxytetrahydropterin synthase QueD OS=Ammoniphilus oxalaticus OX=66863 GN=BEP19_04550 PE=4 SV=1
MKPYQIPTTLQTLGEDIQLDQLRYHRKRVGVIREFTFDAAHHLHAYEGKCKSLHGHTYRLVIHLSGRVDEIGIVVDFAEIKRIFKERIDAHLDHRYLNDVLPPMNTTAENMIVWIWEQLQDEITKLNIPELRLEELTLYETPTSRAYLKREWMEE

SEQ ID NO: 17382 - protein, 155 aa, Ammoniphilus sp.
  REGION 1..155: note = tr|A0A4Q1SRC5|A0A4Q1SRC5_9BACL 6-carboxytetrahydropterin synthase QueD OS=Ammoniphilus sp. CFH 90114 OX=2493665 GN=queD PE=4 SV=1
MSEYKIPTRVQKLGEDITYNQLKYHHRRVGVVKEFTFDAAHHLHAYDGKCVNLHGHTYKVIIHFSGFVNEIGIVVDFGDIKTIFKEKIESKLDHQYLNEVLPAMNTTAENMIVWIWEELEKAIAEMKNDDLRIEELTLYETPTSYAYLKREWMAD

SEQ ID NO: 17383 - protein, 153 aa, unidentified
  source 1..153: note = Amphibacillus marinus
  REGION 1..153: note = tr|A0A1H8H9M3|A0A1H8H9M3_9BACI 6-pyruvoyltetrahydropterin/6-carboxytetrahydropterin synthase OS=Amphibacillus marinus OX=872970; GN = SAMN04488134_101275 PE=4 SV=1
MERFKIVKDLQKIDIDIERDELKFHQKRVLVSKSFTFDAAHHLHCYEGKCKTLHGHTYEVIFGVSGYPNEIGLVIDFGDIKKIWKDQIEIHLDHQYLNQSLPKMNTTAENMVVWIFEQMDQFLNELNQNELRVEFVKLYETPTSYAEARREWM

SEQ ID NO: 17384 - protein, 118 aa, unidentified
  source 1..118: note = Amphiplicatus metriothermophilus
  REGION 1..118: note = tr|A0A239PP92|A0A239PP92_9PROT 6-carboxy-5,6,7,8-tetrahydropterin synthase; OS = Amphiplicatus metriothermophilus OX=1519374; GN = SAMN06297382_1153 PE=3 SV=1
MRIVKSITFDAAHYLADCPDARPYARMHGHSFTLEVAIDGEPDPETGWVVDLGDVAEALAELRDSLDHRLLNEVEGLGRPTLENICRYAAERLRARFPGLARVRVARPSCGEACEYEL

SEQ ID NO: 17385 - protein, 278 aa, Amphritea atlantica
  REGION 1..278: note = tr|A0A1H9LFP8|A0A1H9LFP8_9GAMM 6-pyruvoyl tetrahydropterin synthase OS=Amphritea atlantica OX=355243; GN = SAMN03080615_03914 PE=4 SV=1
MKLFVDNLTNVDFSYLHPQRGLLGESWLVQLVLDGNLNEQGMICDFAIVKKAVKQWFDNCIDHGLVVPTAMANLSAIQTGGETTVTWQYPDGGEFFCRSPKQAIVLVDLEQVTETSLAKWCKDQLLALFSDEVQGLEISFVPESISGAFYHYSHGLQQHDGNCQRIAHGHRSRIEIYLDGQRDTGVEQHWAEIFHDIYIGTRSHLLAEPSTEHHYQYDAPQGQFEIRLPAEHCYLIDTETTVEQIACHLAGQVKAEYPDRDVMVRAFEGVGKGAIATA

SEQ ID NO: 17386 - protein, 278 aa, Amphritea balenae
  REGION 1..278: note = tr|A0A3P1SKX2|A0A3P1SKX2_9GAMM Uncharacterized protein OS=Amphritea balenae OX=452629 GN=EHS89_19590 PE=4; SV = 1
MKLFVDNLTNVDFSYLHPQRGLLGESWLVQLVLDGSLNDQGMICDFGIVKKAVKQWFDNCIDHALVVPAGMDNLQVKQADGETSVNWQYPAGGKFYCRSPEQAIVLVDLEQITETSLAQWCRDQLLAIFPDEVKGLEISFVPEAISGAFYQYSHGLQQHDGNCQRIAHGHRSRIEIFLDGQRDTGVEQQWAETYHDIYIGTRDHLVSEPGAEHHYRYEAPQGEFEIRLPAQYCYLIDTETTVEQIACHLAQQVKAEHSDRDVMVRAFEGVGKGAIATA

SEQ ID NO: 17387 - protein, 278 aa, Amphritea sp.
  REGION 1..278: note = tr|A0A430KME7|A0A430KME7_9GAMM Uncharacterized protein OS=Amphritea sp. MCCC 1K03512 OX=2490544; GN = EH243_16270 PE=4 SV=1
MKLFVDNLTNVDFSYLHPQRGLLGESWLVQLVLDGDLNAEGMICDFGIVKKAVKHWFDNSIDHALVVPTEMANLHSEQLNGETTVIWRYPAGGEFYCRSPEQAIVLVDIDQIDEISLAAWCNAQLLALFPEEVKGLEISFVPEAINGASYHYSHGLQQHDGNCQRIAHGHRSRIEVFLDGQRDAAVEQQWATTFNDIYIGTRGHLVSATDEEHHYCYDAPQGEFEIRLPASHCYLIDTETTVEQIACHLAAQVKLSHPDKEVMVKAFEGVGKGAIATA

SEQ ID NO: 17388 - protein, 132 aa, unidentified
  source 1..132: note = Amycolatopsis acidiphila
  REGION 1..132: note = tr|A0A558ACM0|A0A558ACM0_9PSEU 6-carboxytetrahydropterin synthase OS=Amycolatopsis acidiphila OX=715473 GN=FNH06_14745 PE=4 SV=1
MFSITVRDHIMVAHSFRGEVFGPAQRLHGATFVVDATFRRAELDADNIVVDIGLATTELGAVLAALNYRNLDDEPAFEGVNTSTEFLAKHIADTLAERVHAGALGEGARGLAGIAVTLHESHVASAGYEREL

SEQ ID NO: 17389 - protein, 187 aa, Amycolatopsis alba
  REGION 1..187: note = tr|A0A229RC32|A0A229RC32_9PSEU 6-pyruvoyl tetrahydrobiopterin synthase OS=Amycolatopsis alba DSM 44262 OX=1125972 GN=CFP75_35660 PE=4 SV=1
MHDTETHEQVSPGQEKPAVAVVAPTAHQISIEHTFETAHRLPQLPGKCTSLHGHSWRVTVSVSAPALSSDGTVVEFGALKAGVRQWIDTHLDHGTMLGIRDPLALHLYTAGSKVFRFGADGRESASDEERLASDLPWPTVEAVAVLLRRVSQAALVALPSAPDASIGRVLVRETHLNTATYGPSDAL

SEQ ID NO: 17390 - protein, 132 aa, Amycolatopsis alba
  REGION 1..132: note = tr|A0A229RRF8|A0A229RRF8_9PSEU 6-carboxytetrahydropterin synthase OS=Amycolatopsis alba DSM 44262 OX=1125972 GN=CFP75_19210 PE=4 SV=1
MFSITVRDHVMVAHSFRGEVFGPAQNLHGATFVVDATFRRSGLDADNIVVDIGKATEELKAVLADLNYRNLDDVPEFAGINTSTEFLAKVIADRLADRVHTGALGEGARGLEGIVVSLHESHVAWASYERAL

SEQ ID NO: 17391 - protein, 161 aa, unidentified
  source 1..161: note = Amycolatopsis albispora
  REGION 1..161: note = tr|A0A344LB61|A0A344LB61_9PSEU 6-pyruvoyl tetrahydrobiopterin synthase OS=Amycolatopsis albispora; OX = 1804986 GN=A4R43_24600 PE=4 SV=1
MSHKITIEHSFESGHRLPHLGGKCVNLHGHSWSVAVTVSAAELSPEVTVVEFGALKVGVRRWIDEHLDHATMLGVRDRLIAPLVADGNRVFRFGAERPADDAEKFGYGLPWPTVEAVAVLLGRVAESALAELARADGARVERVLVRETRLNTAVYEPPVTR

SEQ ID NO: 17392 - protein, 132 aa, unidentified
  source 1..132: note = Amycolatopsis albispora
  REGION 1..132: note = tr|A0A344L9B1|A0A344L9B1_9PSEU 6-pyruvoyl tetrahydropterin synthase OS=Amycolatopsis albispora; OX = 1804986 GN=A4R43_20765 PE=4 SV=1
MFSVNVRGHIMVAHSFRGEVFGPAQQLHGATFVVDATFRRSELDSDNIVVDIGLATEQLSAVLGELNYRNLDDVPEFAGTNTSTEFLAKVIADRLADKVHAGELGEGARGLAGITVTLHESHVAWASYERSL

SEQ ID NO: 17393 - protein, 229 aa, unidentified
  source 1..229: note = Amycolatopsis antarctica
  REGION 1..229: note = tr|A0A263D024|A0A263D024_9PSEU Uncharacterized protein OS=Amycolatopsis antarctica OX=1854586; GN = CFN78_23830 PE=4 SV=1
MKATKEKCVADGQVTVAQSFGFSASHELRQLPAGHKCRRNHGHNYTVTASALVHDEARGDLSPLGDYLAATFDHRLLNEQVTFHPTSELLVVHLAEWFRDNMESAMPITLVEMVVSETATTSARYDGVTGEITISKTFTTSHGGVTLVLGADGLDEVGFITDFGDLKPFGAYLQAPDADAGLRAAGPALVADLAGWFVDNIEPKIRGRLVSVRVGSGATTGLWERGDAS

SEQ ID NO: 17394 - protein, 132 aa, Amycolatopsis australiensis
  REGION 1..132: note = tr|A0A1K1QU36|A0A1K1QU36_9PSEU 6-pyruvoyl-tetrahydropterin synthase OS=Amycolatopsis australiensis OX=546364 GN=SAMN04489730_2225 PE=4 SV=1
MFSITVRDHVMVAHSFRGEVFGPAQRLHGATFVVDATFRRAELDEDNIVVDIGKATEELKAVLGELNYRNLDDEPAFKGINTSTEFLAKVVADRLVDAVHAGRLGEGARGLDSIAVSLHESHVAWASYERAL

SEQ ID NO: 17395 - protein, 132 aa, Amycolatopsis azurea
  REGION 1..132: note = tr|M2QBG0|M2QBG0_9PSEU PTPS-like type 4; OS = Amycolatopsis azurea DSM 43854 OX=1238180 GN=C791_6437; PE = 4 SV=1
MFSITVRDHVMVAHSFRGEVFGPAQNLHGATFVVDATFRRSELDSDNIVVDIGKATEELKAVLADLNYRNLDDVPEFAGINTSTEFLAKVIADRLAGRVHAGALGEGARGLEGITVSLHESHVAWASYERAL

SEQ ID NO: 17396 - protein, 132 aa, Amycolatopsis balhimycina
  REGION 1..132: note = tr|A0A428WHD9|A0A428WHD9_AMYBA 6-carboxytetrahydropterin synthase OS=Amycolatopsis balhimycina DSM 5908 OX=1081091 GN=DMA12_21430 PE=4 SV=1
MFSITVRDHVMVAHSFRGEVFGPAQRLHGATFVVDATFRRAELDEDNIVVDIGKATEELRAVLSDLNYRNLDDEPEFKGINTSTEFLAKVIADRLADAVHAGRLGDGARGLDGITVSLHESHVAWASYERAL

SEQ ID NO: 17397 - protein, 132 aa, unidentified
  source 1..132: note = Amycolatopsis bartoniae
  REGION 1..132: note = tr|A0A557YU00|A0A557YU00_9PSEU 6-carboxytetrahydropterin synthase OS=Amycolatopsis bartoniae OX=941986 GN=FNH07_25840 PE=4 SV=1
MFAITVRDHVMVAHSFRGEVFGPAQQLHGATFVVDATFRREELDADNIVVDIGLATTELKAVLADLNYRNLDDVPEFAGVNTSTEFLAKVIADRLAGRVHAGALGEGARGLSGIAVTLHESHVAWASYERTL

SEQ ID NO: 17398 - protein, 132 aa, unidentified
  source 1..132: note = Amycolatopsis cihanbeyliensis
  REGION 1..132: note = tr|A0A542CS96|A0A542CS96_9PSEU 6-pyruvoyl-tetrahydropterin synthase OS=Amycolatopsis cihanbeyliensis OX=1128664 GN=FB471_5832 PE=4 SV=1
MFQLTVRDHVMVAHSFRGEVFGPAQRLHGATFVVEATFRRAELDADNIVVDIGLATRELGQVLGELNYRNLDEEPAFAGVNTSTEFLAKVVADELAERVHAGALGAGARGLAGIAVTLRESPVAWASYERAL

SEQ ID NO: 17399 - protein, 148 aa, unidentified
  source 1..148: note = Amycolatopsis cihanbeyliensis
  REGION 1..148: note = tr|A0A542DPU0|A0A542DPU0_9PSEU 6-carboxy-5,6,7,8-tetrahydropterin synthase; OS = Amycolatopsis cihanbeyliensis OX=1128664 GN=FB471_4910; PE = 3 SV=1
MTHSATVPSPVTAAWQPPPGSYRITRTFDFAAAHHLDGMPDGHRCARNHGHTWTIEVTLSSTRLVGPGWVADFADLNPLGAFIEDTLDHRDLNEVLPAPPTSELLAAFLADWCIRHLETRLGARLESIVVSEGGANRVEFRPDRRRAQ

SEQ ID NO: 17400 - protein, 132 aa, Amycolatopsis coloradensis
  REGION 1..132: note = tr|A0A1R0KVG4|A0A1R0KVG4_9PSEU Uncharacterized protein OS=Amycolatopsis coloradensis OX=76021; GN = BS329_14855 PE=4 SV=1
MFSITVRDHVMVAHSFHGEVFGPAQNLHGATFVVDATFRRSGLDSDNIVVDIGKATEELKAVLADLNYRNLDDVPEFAGINTSTEFLAKVIADRLAERVHAGALGEGARGLEGITVALHESPVAWASYERAL

SEQ ID NO: 17401 - protein, 169 aa, Amycolatopsis coloradensis
  REGION 1..169: note = tr|A0A1R0L1X8|A0A1R0L1X8_9PSEU 6-pyruvoyl tetrahydrobiopterin synthase OS=Amycolatopsis coloradensis; OX = 76021 GN=BS329_03965 PE=4 SV=1
MADSAPASHQICIEHTFETAHRLPHLEGKCASLHGHSWRVTVSVFAPALSGDGTVVEFGVLKTGVRQWIDTHLDHGTMLGVRDPLAVHLYTAGSKVFRFGAHSCETVDDAELLAADLPWPTVEAVAVLLRRVSQSVLIALPCAPEARVGRVFVRETHLNTATYGPADAP

SEQ ID NO: 17402 - protein, 120 aa, Amycolatopsis decaplanina
  REGION 1..120: note = tr|M2X1V5|M2X1V5_9PSEU Uncharacterized protein; OS = Amycolatopsis decaplanina DSM 44594 OX=1284240; GN = H074_25897 PE=4 SV=1
MEVTAACQELASTATVVEFGEFKKQLREWIDLRLDHGTMLGYQDPLRDALTADGSKLFVFGEAEAGPAVADLEWPTVENVAVLLGRIAEKVIEGTESAQGARITRVVVKETHVNAAEWCP

SEQ ID NO: 17403 - protein, 132 aa, Amycolatopsis decaplanina
  REGION 1..132: note = tr|M2WWK4|M2WWK4_9PSEU 6-pyruvoyl tetrahydropterin synthase OS=Amycolatopsis decaplanina DSM 44594 OX=1284240; GN = H074_32422 PE=4 SV=1
MFSITVRDHVMVAHSFRGEVFGPAQRLHGATFLVDATFRRSELDADNIVVDIGKATEELKAVLAGLNYRNLDDVPEFAGINTSTEFLAKVIADRLADRVHTGALGEGARGLEGITVSLHESHVAWASYERAL

SEQ ID NO: 17404 - protein, 136 aa, Amycolatopsis eurytherma
  REGION 1..136: note = tr|A0A3N2H8W5|A0A3N2H8W5_9PSEU 6-pyruvoyl-tetrahydropterin synthase OS=Amycolatopsis eurytherma OX=196083 GN=EDD35_7231 PE=4 SV=1
MFSVTVRDHVMVAHSFRGEVFGPAQRLHGATFVVDATFRRAELDADNIVVDIGLATQQLGAVLADLNYRNLDEVPEFAGTNTSTEFLAKVIADRLADRVHSGALGAGAHGLSGISVTLRESHVAWASYDRDLHPAG

SEQ ID NO: 17405 - protein, 187 aa, Amycolatopsis japonica
  REGION 1..187: note = tr|A0A075UKA6|A0A075UKA6_9PSEU 6-pyruvoyl-tetrahydropterin synthase OS=Amycolatopsis japonica OX=208439 GN=AJAP_01865 PE=4 SV=1
MSDTEANGHIVAGQEKATMAAAAPTTHLISIEHTFETAHRLPHLNGKCTSLHGHSWRVTVSVCAPVLSSDGTVVEFGALKAGVRQWIDTHLDHGTMLGIRDPLGMHLDTAGSKVFRFGANDREAVGSEELLAADLPWPTVEAVAVLLRRASQTVLVGLPCAPEASVGRVFVRETHLNAASYGPADVL

SEQ ID NO: 17406 - protein, 132 aa, Amycolatopsis japonica
  REGION 1..132: note = tr|A0A075V2I9|A0A075V2I9_9PSEU 6-pyruvoyl-tetrahydropterin synthase OS=Amycolatopsis japonica OX=208439 GN=ptpS PE=4 SV=1
MFSITVRDHVMVAHSFRGEVFGPAQRLHGATFLVDATFRRSELDADNIVVDIGKATEELKAVLADLNYRNLDDVPEFAGINTSTEFLAKVIADRLAGRVHAGALGEGARGLEGLTVSLHESHVAWASYERAL

SEQ ID NO: 17407 - protein, 132 aa, Amycolatopsis keratiniphila
  REGION 1..132: note = tr|A0A1W2LNC9|A0A1W2LNC9_9PSEU Uncharacterized protein OS=Amycolatopsis keratiniphila subsp. keratiniphila OX=227715 GN=AVR91_0228830 PE=4 SV=1
MFSITVRDHVMVAHSFRGEVFGPAQRLHGATFLVDATFRRSELDADNIVVDIGKATEELKAVLADLNYRNLDDVPEFAGINTSTEFLAKVIADRLADRVHSGALGEGARGLEGLTVSLHESHVAWASYERAL

SEQ ID NO: 17408 - protein, 187 aa, Amycolatopsis keratiniphila
  REGION 1..187: note = tr|A0A1H2JCP7|A0A1H2JCP7_9PSEU 6-pyruvoyltetrahydropterin/6-carboxytetrahydropterin synthase OS=Amycolatopsis keratiniphila OX=129921; GN = SAMN04489733_5715 PE=4 SV=1
MSDTETNGHIVAGQEKVTMAAAVPTTHLISIEHTFETAHRLPHLNGKCTSLHGHSWRVTVSVCAPVLSSDGTVVEFGALKAGVRQWIDTHLDHGTMLGIRDPLSMHLDTAGSKVFRFGANDREAVGSEELLAADLPWPTVEAVAVLLRRASQTVLVGLPCAPEASVGRVFVRETHLNAASYGPADVL

SEQ ID NO: 17409 - protein, 132 aa, Amycolatopsis lurida
  REGION 1..132: note = tr|A0A2P2FLK0|A0A2P2FLK0_9PSEU 6-pyruvoyl tetrahydropterin synthase OS=Amycolatopsis lurida NRRL 2430 OX=1460371 GN=BB31_29660 PE=4 SV=1
MFSITVRDHVMVAHSFRGEVFGPAQRLHGATFLVDATFRRSELDADNIVVDIGKATEELKAVLADLNYRNLDDVPEFAGINTSTEFLAKVIADRLADRVHTGALGEGARGLESLTVSLHESHIAWASYERAL

SEQ ID NO: 17410 - protein, 119 aa, Amycolatopsis marina
  REGION 1..119: note = tr|A0A1I1BW66|A0A1I1BW66_9PSEU 6-carboxy-5,6,7,8-tetrahydropterin synthase; OS = Amycolatopsis marina OX=490629 GN=SAMN05216266_116105; PE = 3 SV=1
MEIFREFTFEAAHRLPHVPEGHKCARLHGHSYRVTVHVAGEVGTESGWVMDFADVKAAIVPLMEQLDHHYLNEVPGLDNPTSEVLARWIWQRLIDALPLSQVIVRETCTSGCVYRGEED

SEQ ID NO: 17411 - protein, 161 aa, Amycolatopsis marina
  REGION 1..161: note = tr|A0A1I1BHL9|A0A1I1BHL9_9PSEU 6-pyruvoyltetrahydropterin/6-carboxytetrahydropterin synthase OS=Amycolatopsis marina OX=490629; GN = SAMN05216266_1143 PE=4 SV=1
MPHKITVEHSFESGHRLPHLGGKCVSLHGHSWSVAVTVSAPELSPEVTVVEFGALKVGLRRWIDEHLDHATMLGARDRLIEPLIAEGSRVFCFGVERPADVAEQFGHGLAWPTVEAVAVLLGRVAESVLAGLPRADGARVERVLVHETRLNTAAYEPSVPR

SEQ ID NO: 17412 - protein, 132 aa, Amycolatopsis mediterranei
  REGION 1..132: note = tr|G0FZ77|G0FZ77_AMYMS 6-pyruvoyl tetrahydropterin synthase OS=Amycolatopsis mediterranei (strain S699); OX = 713604 GN=RAM_42885 PE=4 SV=1
MFSITVRDHVMVAHSFRGEVFGPAQRLHGATFVVDATFRRAELDEDNIVVDIGKATEELGAVLSDLNYRNLDDEPEFKGINTSTEFLAKVIADRLADAVHAGRLGEGARGLDGIVVSLHESHIAWASYERAL

SEQ ID NO: 17413 - protein, 132 aa, Amycolatopsis mediterranei; identical to SEQ ID NO: 17412
  REGION 1..132: note = tr|A0A0H3DIM2|A0A0H3DIM2_AMYMU 6-pyruvoyl tetrahydropterin synthase OS=Amycolatopsis mediterranei (strain U-32) OX=749927 GN=ptpS PE=4 SV=1

SEQ ID NO: 17414 - protein, 136 aa, Amycolatopsis methanolica
  REGION 1..136: note = tr|A0A076N0N8|A0A076N0N8_AMYME Queuosine biosynthesis protein QueD OS=Amycolatopsis methanolica 239; OX = 1068978 GN=ptpS PE=4 SV=1
MFSVTVRDHVMVAHSFRGEVFGPAQRLHGATFVVDATFRRAELDADNIVVDIGLATQQLGAVLADLNYRNLDEVPEFAGVNTSTEFLAKVIADRLADRVHSGALGAGAHGLAGISVTLRESHVAWASYDRDLHPAG

SEQ ID NO: 17415 - protein, 171 aa, Amycolatopsis methanolica
  REGION 1..171: note = tr|A0A076N3H1|A0A076N3H1_AMYME Quercetinase QueD; OS = Amycolatopsis methanolica 239 OX=1068978 GN=AMETH_4435; PE = 4 SV=1
MTAEFATPYRRASRIPAEPGKPYFIEKGEGDRVHLHPDTYEVFYVTAGAVRLFVEDTEGGQQEKLLTPGDFGFVPKNCPHAYRMERHHSMIAGVAAGPGGTFERFFENLGVPAEEMGLLKVPAVPEPHKFAVVPQRYDAVPAGAPLAHHALRRMYRGPTRHRARVVVRSTR

SEQ ID NO: 17416 - protein, 132 aa, Amycolatopsis niigatensis
  REGION 1..132: note = tr|A0A2N3WJ50|A0A2N3WJ50_9PSEU 6-pyruvoyl-tetrahydropterin synthase OS=Amycolatopsis niigatensis OX=369932 GN=ATK30_4744 PE=4 SV=1
MFSVTVRDHIMVAHSFRGEVFGPAQRLHGATFVVDATFRRSELDSDNIVVDIGLATQQLGAVLADLNYRNLDDEPDFAGINTSTEYLAKVIADRLADRIHAGELGENARGLAQISVTLHESHAASAGYERSL

SEQ ID NO: 17417 - protein, 169 aa, Amycolatopsis orientalis
  REGION 1..169: note = tr|A0A193CCZ4|A0A193CCZ4_AMYOR 6-pyruvoyl tetrahydrobiopterin synthase OS=Amycolatopsis orientalis; OX = 31958 GN=SD37_40010 PE=4 SV=1
MADSAPTSHQICIEHTFETAHRLPHLKGKCTSLHGHSWRVAVSVSAPALSTDGTIVEFGFLKAGVRQWIDTHLDHGTMLGVRDPLAVHLYTASSKVFRFGANTCETVDDAELLATDLPWPTVEAVAVLLRRVSQSVLIALPCAPEARVGRVFVRETHLNTATYGPADTP

SEQ ID NO: 17418 - protein, 132 aa, Amycolatopsis orientalis
  REGION 1..132: note = tr|A0A193C6Z8|A0A193C6Z8_AMYOR 6-pyruvoyl tetrahydropterin synthase OS=Amycolatopsis orientalis; OX = 31958 GN=SD37_34610 PE=4 SV=1
MFSITVRDHVMVAHSFRGEVFGPAQKLHGATFVVDATFRRSELDADNIVVDIGKATEELKAVLADLNYRNLDDVPEFAGINTSTEFLAKVIADRLADRVHAGALGEGARGLEGITVSLHESHVAWASYERAL

SEQ ID NO: 17419 - protein, 132 aa, Amycolatopsis pretoriensis
  REGION 1..132: note = tr|A0A1H5REN7|A0A1H5REN7_9PSEU 6-pyruvoyl-tetrahydropterin synthase OS=Amycolatopsis pretoriensis OX=218821 GN=SAMN05421837_111257 PE=4 SV=1
MFSITVRDHVMVAHSFRGEVFGPAQRLHGATFVVDATFRRAELDEDNIVVDIGKATEELGAVLSDLNYRNLDDEPVFKGINTSTEFLAKVIADRLADAVHVGRLGEGARGLEGIAVSLKESHVAWASYERAL

SEQ ID NO: 17420 - protein, 132 aa, Amycolatopsis regifaucium
  REGION 1..132: note = tr|A0A154MSW5|A0A154MSW5_9PSEU 6-pyruvoyl tetrahydropterin synthase OS=Amycolatopsis regifaucium; OX = 546365 GN=ATP06_0207435 PE=4 SV=1
MFSITVRDHVMVAHSFRGEVFGPAQKLHGATFVVDATFRRSELDADNIVVDIGKATEELKAVLADLNYRNLDDVPEFAGINTSTEFLAKVIADRLADRVHAGALGEGARGLGGITVALHESHVAWASYERAL

SEQ ID NO: 17421 - protein, 132 aa, Amycolatopsis rifamycinica
  REGION 1..132: note = tr|A0A066TRS0|A0A066TRS0_9PSEU 6-pyruvoyl tetrahydropterin synthase OS=Amycolatopsis rifamycinica; OX = 287986 GN=DV20_42230 PE=4 SV=1
MFSITVRDHVMVAHSFRGEVFGPAQRLHGATFVVDATFRRAELDEDNIVVDIGKATEELGAVLSDLNYRNLDDEPEFKGINTSTEFLAKVIADRLADAVHAGRLGEGARGLEGIAVSLHESHIAWASYERAL

SEQ ID NO: 17422 - protein, 132 aa, Amycolatopsis rubida
  REGION 1..132: note = tr|A0A1I5W7L7|A0A1I5W7L7_9PSEU 6-pyruvoyl-tetrahydropterin synthase OS=Amycolatopsis rubida OX=112413 GN=SAMN05421854_109100 PE=4 SV=1
MFSVTVRDHIMVAHSFRGEVFGPAQRLHGATFVVDATFRRSELDSDNIVVDIGLATQRLGAVLADLNYRNLDDEPDFAGINTSTEYLAKVIADRLADRIHAGELGENARGLAQISVTLHESHAASAGYERSL

SEQ ID NO: 17423 - protein, 264 aa, Amycolatopsis rubida
  REGION 1..264: note = tr|A0A1I5WK81|A0A1I5WK81_9PSEU 6-pyruvoyltetrahydropterin/6-carboxytetrahydropterin synthase OS=Amycolatopsis rubida OX=112413; GN = SAMN05421854_109274 PE=4 SV=1
MKPHPVSSTRVAVSDLARGRYSIGDGTFSFAAAHHLTDLPDAENKAGRSHGHTFTVEVELTDTELRAPGFVADYAELATLGEYLKRELDHRDLNAIFTFDTTTDALAQHITAWFLAHMPSERGKQLHAIHVNIGTTTRSPQHTAVDSFAFEAAHHLEGLPDGHKCGRPHGHSYRVDLRLDQQTSPRRRARIRALLAEYLDRQLDHRDLNAVLQFQPTSELVAEHLYAWTLSQAKGQEAAAVQALRVWESPRRWAEFTQDERSGR

SEQ ID NO: 17424 - protein, 132 aa, Amycolatopsis saalfeldensis
  REGION 1..132: note = tr|A0A1H8WPY6|A0A1H8WPY6_9PSEU 6-pyruvoyl-tetrahydropterin synthase OS=Amycolatopsis saalfeldensis OX=394193 GN=SAMN04489732_105386 PE=4 SV=1
MFSVTVRDHIMVAHSFRGEVFGPAQRLHGATFVVDATFRRAELDADNIVVDIGLATERLGAVLADLNYRNLDEVPEFKGVNTSTEFLAKVIADRLAGQVHAGDLGEGAHGLASISVTLHESHVASAGYERDL

SEQ ID NO: 17425 - protein, 229 aa, Amycolatopsis saalfeldensis
  REGION 1..229: note = tr|A0A1H8YN09|A0A1H8YN09_9PSEU 6-pyruvoyl-tetrahydropterin synthase OS=Amycolatopsis saalfeldensis OX=394193 GN=SAMN04489732_126105 PE=4 SV=1
MKTTDEKLLADGQITISQSFGFSASHELKLLPTSHKCHRNHGHNYRVTASALVHEGGSGDLSSLGTYLAATFDHRLLNEQVAFHPTSELLASHLAEWFRNNIESAVPITLVAMVVSETSSTSARCDGATSAVTISKTFNTAHGDVTLILGADGLDEVGFVTDFGDLKPFAAYLDAPVADAALRASGPASVAHLASWFVDNIEPEIRGRLVSVGVDSITTTGLWERGDAS

SEQ ID NO: 17426 - protein, 132 aa, Amycolatopsis sacchari
  REGION 1..132: note = tr|A0A1I3KBR8|A0A1I3KBR8_9PSEU 6-pyruvoyl-tetrahydropterin synthase OS=Amycolatopsis sacchari OX=115433 GN=SAMN05421835_101483 PE=4 SV=1
MFAITVRDHVMVAHSFRGEVFGPAQRLHGATFVVDATFRRAELDQDNIVVDIGLATTELKAVLADLNYRNLDDEPDFRGINTSTEFLAKVIADRLAERVHAGALGEGARGLSGIAVTLHESHVAWASYERTL

SEQ ID NO: 17427 - protein, 132 aa, Amycolatopsis sp.; identical to SEQ ID NO: 17422
  REGION 1..132: note = tr|A0A178XD25|A0A178XD25_9PSEU 6-pyruvoyl tetrahydropterin synthase OS=Amycolatopsis sp. M39; OX = 1825094 GN=A4R44_00106 PE=4 SV=1

SEQ ID NO: 17428 - protein, 132 aa, Amycolatopsis sp.
  REGION 1..132: note = tr|A0A429F381|A0A429F381_9PSEU Uncharacterized protein OS=Amycolatopsis sp. WAC 04182 OX=2203198; GN = DMH01_29745 PE=4 SV=1
MFSITVRDHVMVAHSFRGEVFGPAQRLHGATFLVDATFRRSELDADNIVVDIGKATEELKAVLADLNYRNLDDVPEFAGINTSTEFLAKVIADRLADRVHTGALGEGARGLEGLTVSLHESHVAWASYERAL

SEQ ID NO: 17429 - protein, 187 aa, Amycolatopsis sulphurea
  REGION 1..187: note = tr|A0A2A9FI03|A0A2A9FI03_9PSEU 6-pyruvoyltetrahydropterin/6-carboxytetrahydropterin synthase OS=Amycolatopsis sulphurea OX=76022 GN=ATK36_5411; PE = 4 SV=1
MRGTATTDHTIARLANLLPGDLARTAHQVTIEHTFETAHRLPHLGGKCTSLHGHSWQVVVPVIAPTLSDDVTVVEFGVLKAGIREWIDTYLDHGTMLGVRDPLAVSLYAERCKVFRFGADDDQAVDGTELLAADLGWPTVEAVAVLLRRVSQAVLAALPCAPDVRVGGVFVRETHLNTATFGPVATP

SEQ ID NO: 17430 - protein, 136 aa, Amycolatopsis thailandensis
  REGION 1..136: note = tr|A0A229RUF0|A0A229RUF0_9PSEU 6-carboxy-5,6,7,8-tetrahydropterin synthase; OS = Amycolatopsis thailandensis OX=589330 GN=CFP71_28020; PE = 3 SV=1
MDTATAQLPDGKFEIGKTFTFEAGHRLTGLPPEHKCSRQHGHSYTVEIILTATTLQAPGFVTDFADLDPVKQFLDRTLDHHNLPDVLPIEPTSELLAQYLAGWFLQHVEPTIHGELIAVRVRETGRSWAQFTVDRP

SEQ ID NO: 17431 - protein, 132 aa, Amycolatopsis thailandensis
  REGION 1..132: note = tr|A0A229S086|A0A229S086_9PSEU Uncharacterized protein OS=Amycolatopsis thailandensis OX=589330; GN = CFP71_23755 PE=4 SV=1
MFSITVRDHVMVAHSFRGEVFGPAQNLHGATFVVDATFRRSELDADNIVVDIGKATEELKAVLADLNYRNLDDVPEFAGINTSTEFLAKVIADRLAGRVHAGALGEGARGLEGITVSLHESHVAWASYERAL

SEQ ID NO: 17432 - protein, 132 aa, Amycolatopsis tolypomycina
  REGION 1..132: note = tr|A0A1H5CNN1|A0A1H5CNN1_9PSEU 6-pyruvoyl-tetrahydropterin synthase OS=Amycolatopsis tolypomycina OX=208445 GN=SAMN04489727_8877 PE=4 SV=1
MFSITVRDHVMVAHSFRGEVFGPAQRLHGATFVVDATFRRTELDEDNIVVDIGKATEELKAVLSDLNYRNLDDEPEFKGVNTSTEFLAKVIADRLADAVHAGRLGEGARGLEGITVSLHESHVAWASYERAL

SEQ ID NO: 17433 - protein, 132 aa, Amycolatopsis vancoresmycina
  REGION 1..132: note = tr|R1HX27|R1HX27_9PSEU 6-pyruvoyl tetrahydropterin synthase OS=Amycolatopsis vancoresmycina DSM 44592; OX = 1292037 GN=H480_29576 PE=4 SV=1
MFSITVRDHVMVAHSFRGEVFGPAQRLHGATFVVDATFRRAELDEDNIVVDIGKATEELKAVLSDLNYRNLDDEPEFKGVNTSTEFLAKVVADRLADAVHAGRLGEGARGLEGIAVSLKESHVAWASYERAL

SEQ ID NO: 17434 - protein, 132 aa, Amycolatopsis xylanica
  REGION 1..132: note = tr|A0A1H2S6M7|A0A1H2S6M7_9PSEU 6-pyruvoyl-tetrahydropterin synthase OS=Amycolatopsis xylanica OX=589385 GN=SAMN05421504_101126 PE=4 SV=1
MFSVTVRDHVMIAHSFRGEVFGPAQRLHGATFVVDARFKRPELDADNIVVDIGLATVELGKVLAEFNYRNLDEVPAFAGINTSTEYLAKYIADRLADLVHDGTLGEGARGLSAIEVTLHESHVAWAGYERAL

SEQ ID NO: 17435 - protein, 158 aa, Amycolatopsis xylanica
  REGION 1..158: note = tr|A0A1H3PBX8|A0A1H3PBX8_9PSEU 6-pyruvoyltetrahydropterin/6-carboxytetrahydropterin synthase OS=Amycolatopsis xylanica OX=589385; GN = SAMN05421504_108137 PE=4 SV=1
MGTHTVLVRHNFETAHRLPHLAGKCLNLHGHSWWMEATVSAPSLTAGTVVEFGDLKRRVRDWIDTHLDHGAMLGAADPLACLLLEHKSKVFRFGAGDPDPAERFAEDLAYPTVEAVAELLARVVGDALGSLDHAPGAFVSRVSVSETHVNAAEFKESR

SEQ ID NO: 17436 - protein, 129 aa, Anabaena cylindrica
  REGION 1..129: note = tr|K9ZJA2|K9ZJA2_ANACC 6-carboxy-5,6,7,8-tetrahydropterin synthase OS=Anabaena cylindrica (strain ATCC 27899 / PCC 7122) OX=272123; GN = Anacy_3000 PE=3 SV=1
MPKWKLLTEFTFDSAHYIKDYKGPCGRMHGHTYKVKIEAKSSQLHSSEYCPHPVMVADFRSLRWAKKDVTQGGLDHCVLNEVLPPEYETTAEMIAKYIYDETKKRLPADVKLKVAVSETPNSWAEYEDD

SEQ ID NO: 17437 - protein, 290 aa, Anabaena cylindrica
  REGION 1..290: note = tr|K9ZKK7|K9ZKK7_ANACC Uncharacterized protein; OS = Anabaena cylindrica (strain ATCC 27899 / PCC 7122); OX = 272123 GN=Anacy_3465 PE=4 SV=1
MQCIVNRRAQFSASHRYWLPELSENENVEKFGLCAKFPGHGHNYVLFVSLAGELDEYGMVLNLSDVKHVIKREVTGQLDFSYLNDVWTEFQQTLPTTENIARVIWERLAPHLPLVRVQLFEHPELWAEYMGNGMEAYLSISTHFSAAHRLAHPDLSLEENTEIYGKCARVNGHGHNYHLEVTVKGEIDPRTGMTVDLGALNQVIEDYVVEPFDHTFLNKDIAFFAKVVPTAENIALYISNVLRSPIQELGAKLYKVKLIESPNNSCEIYAADSETTSVIAAVSQPVLARV

SEQ ID NO: 17438 - protein, 141 aa, Anabaena sp.
  REGION 1..141: note = tr|A0A1B7VPV8|A0A1B7VPV8_9NOST 6-carboxy-5,6,7,8-tetrahydropterin synthase OS=Anabaena sp. WA113 OX=1710889 GN=AN488_08020 PE=3 SV=1
MTSKSESESFLETWIIGKEFRFEAAHQLPNHDGKCSRLHGHSWRGIVYVAGDKLINSGVKQGMIMDYGDISKYIKPLLENYLDHYHLNESTGLTNPTSEAIAKWIYEQLEPQIPGLVAVRIDETCTSQCIYSKGKVNFLGF

SEQ ID NO: 17439 - protein, 290 aa, Anabaena sp.
  REGION 1..290: note = tr|A0A1W5CCX4|A0A1W5CCX4_9NOST 6-pyruvoyl tetrahydropterin synthase OS=Anabaena sp. 39858 OX=1710890; GN = AN489_23790 PE=4 SV=1
MQCIVNRRAQFSASHRYWLPELSEAENIEKFGACSRFPGHGHNYVIFISLAGELDEYGMVLNLSDVKQVIKREVTSQLDFSYLNDVWAEFGQTLPTTENIARVIWQRLAPHLPLVRVQLFEHPELWADYQGNGMEAYLTISTHFSAAHRLAHPNLSQEDNTEIYGKCARPHGHGHNYHLEVTVKGEIDPRTGMIIDLGALNQAIEDYVVEPFDHTFLNKDIPYFAEVVPTAENIALYISNLLRSPVQELGAKLYKVKLIESPNNSCEIYSTDSESNTVNTAKPEPILARI

SEQ ID NO: 17440 - protein, 128 aa, Anabaenopsis circularis
  REGION 1..128: note = tr|A0A1Z4GIE9|A0A1Z4GIE9_9CYAN 6-carboxy-5,6,7,8-tetrahydropterin synthase; OS = Anabaenopsis circularis NIES-21 OX=1085406; GN = NIES21_31270 PE=3 SV=1
MPKWKVVTEFSFNSAHYIKDYDGPCGRMHGHNYEVRIEAISTQLHSSQFCPHPVMVADFRTLRWAKQDATKGGLDHCILNEVMPPEYETTAEMIAKYIYDETKKRLPPNVQLKVHVSETPNSWVEYEE

SEQ ID NO: 17441 - protein, 290 aa, Anabaenopsis circularis
  REGION 1..290: note = tr|A0A1Z4GP41|A0A1Z4GP41_9CYAN 6-pyruvoyl-tetrahydropterin synthase homolog; OS = Anabaenopsis circularis NIES-21 OX=1085406; GN = NIES21_51410 PE=4 SV=1
MQCIVNRRAQFSASHRYWLPELSEAENFEKFGAGSKFPGHGHNYVLFISLAGELDKYGMVLNLSDVKQVIKREVTSVLDFSYLNDVWAEFQETLPTTENIARVIWRRLAPHLPVVRVQLFEHPELWADYMGNSMEAYLSISTHFSAAHRLAHPDLSLEDNTEIYGKCARTNGHGHNYHLEVTVKGEIDQRTGMIVDLGALHQAIADYVVEPFDHTFLNKDVPYFAEVVPTAENIALYISNLLRSPIQNLGAQLYKIKLIESPNNSCEIYCTDTDSNSMSAVDSQPVLARL

SEQ ID NO: 17442 - protein, 162 aa, Anaerobacillus alkalidiazotrophicus
  REGION 1..162: note = tr|A0A1S2MAV3|A0A1S2MAV3_9BACI 6-carboxytetrahydropterin synthase QueD OS=Anaerobacillus alkalidiazotrophicus OX=472963 GN=BKP45_04190 PE=4 SV=1
MCNSHNLFGFRIVDKLQKFGEDIQKEQLRYHNKRVLVSKEFTFDAAHHLHHYEGKCKNLHGHTYKVVFGISSLTDEIGIAIDFGDIKKIWKEQIEIYLDHRYLNETLPLMNTTAENMVVWIYEKMADYLKDSQFKTLKPRVEFVRLFETPTSYAEARREWME

SEQ ID NO: 17443 - protein, 162 aa, Anaerobacillus alkalilacustris
  REGION 1..162: note = tr|A0A1S2LWV8|A0A1S2LWV8_9BACI 6-carboxytetrahydropterin synthase QueD OS=Anaerobacillus alkalilacustris OX=393763 GN=BKP37_00210 PE=4 SV=1
MCNSHNLFGFRIVDKLQKFGEDIQKEQLRYHNKRVLVSKEFTFDAAHHLHHYEGKCKNLHGHTYKVVFGISSLTDEIGIAIDFGDIKKIWKEQIEIYLDHRYLNETLPPMNTTAENLVVWIYEKMADYLKKSQFKELQPRVEFVRLFETPTSYAEARREWME

SEQ ID NO: 17444 - protein, 162 aa, unidentified
  source 1..162: note = Anaerobacillus isosaccharinicus
  REGION 1..162: note = tr|A0A1S2MHQ7|A0A1S2MHQ7_9BACI 6-carboxytetrahydropterin synthase QueD OS=Anaerobacillus isosaccharinicus OX=1532552 GN=AWH56_00845 PE=4 SV=1
MCSSDGLFGFRIVDKLQKLGEDIHIEDLRYHNKRVLVSKEFTFDSAHHLHHYEGKCKNLHGHTYKVIFGISSLTDEIGIAIDFGDIKAIWKEHIEIYLDHRYLNETLPPMNTTAENMVVWIYEKMADYLKESQFKTLKPRVEFVRLFETPTSYAEARREWME

SEQ ID NO: 17445 - protein, 158 aa, unidentified
  source 1..158: note = Anaerobacillus macyae
  REGION 1..158: note = tr|A0A0J6FYU1|A0A0J6FYU1_9BACI 6-pyruvoyl tetrahydrobiopterin synthase OS=Anaerobacillus macyae; OX = 157733 GN=AB986_10300 PE=4 SV=1
MSYMIPKKVEVLGEDIQKSELKYHNKRVAVTKEFTFDAAHHLHCYEGKCKSMHGHTYKVVITISGFVNEIGISVDFGEIKTLFKEVIDSKLDHHYLNEVLPNMNTTAENMIVWMWEQLDQALVERNMKDHGQRLEELVLYETPTSYATLKREWMEDNE

SEQ ID NO: 17446 - protein, 127 aa, unidentified
  source 1..127: note = Anaerobacterium chartisolvens
  REGION 1..127: note = tr|A0A369BG22|A0A369BG22_9FIRM 6-carboxy-5,6,7,8-tetrahydropterin synthase; OS = Anaerobacterium chartisolvens OX=1297424; GN = DFR58_102282 PE=3 SV=1
MKGRTLNITKTFTFDSAHHLNNYSGKCKNIHGHTYKLEVTVKGPVAENGLVIDFHDLNDIVEKNVLSYVDHKYLNDLFEFNPTCENLGLWIWDELLPEIAKEGCCLEKIVLWETPTSYITINREDTL

SEQ ID NO: 17447 - protein, 140 aa, unidentified
  source 1..140: note = Anaerobium acetethylicum
  REGION 1..140: note = tr|A0A1D3TN84|A0A1D3TN84_9FIRM 6-carboxy-5,6,7,8-tetrahydropterin synthase OS=Anaerobium acetethylicum OX=1619234 GN=SAMN05421730_100117 PE=3 SV=1
MYLLKTEHSFDAAHFLAGYEGKCSNIHGHRWRVVVGIESETLQEDGQCSGMVVDFSQLKKDIKNAIDYFDHSLIVEKNSMKEKTMDALEEEHFRIIQVDFRPTAENLAKYFYDLFAEKGYCVRCVDVYETPNNCASYASC

SEQ ID NO: 17448 - protein, 188 aa, unidentified
  source 1..188: note = Anaerobium acetethylicum
  REGION 1..188: note = tr|A0A1D3TZI1|A0A1D3TZI1_9FIRM 6-pyruvoyltetrahydropterin/6-carboxytetrahydropterin synthase OS=Anaerobium acetethylicum OX=1619234; GN = SAMN05421730_10748 PE=4 SV=1
MRSFTTFDLQYAHRFFGFKGEAQYLHGHTGILTIEVEDTVNMGVNMVFPCNEIQKTAWEVLQNFDHALILREDDPLLPAILGVYEAQGIKDGAPTNKQKGPAFKTELATAYPECRLVVTKETMTVEGMIKIVYDLLKDKLNIAKITFTSGVNGATEEYEPQKDSIDRCPLCGIALNENGVCPKCGYKK

SEQ ID NO: 17449 - protein, 154 aa, unidentified
  source 1..154: note = Anaerobutyricum hallii
  REGION 1..154: note = tr|C0ERV5|C0ERV5_9FIRM Queuosine biosynthesis protein QueD OS=Anaerobutyricum hallii DSM 3353 OX=411469; GN = queD PE=4 SV=1
MFAASFLLGGFLMYILETEQSFDSAHFLSGYEGKCSNLHGHRWRVVARIAMDELNKEGQTRDMVIDFGDFKNALKKLTDALDHSFIFETGSLKERTVAALKDEGFLLHEVPFRPTAEQFSRYFYEQLKGLNFPVYDISVYETPTNCSTYREASL

SEQ ID NO: 17450 - protein, 142 aa, unidentified
  source 1..142: note = Anaerobutyricum hallii
  REGION 1..142: note = tr|A0A174IXK0|A0A174IXK0_9FIRM 6-carboxytetrahydropterin synthase OS=Anaerobutyricum hallii OX=39488 GN=DW833_09095 PE=4 SV=1
MYILETEQSFDSAHFLSGYEGKCSNLHGHRWRVVARIAMDELNKEGQTRDMVIDFGDFKNALKKLTDALDHSFIFETGSLKERTVAALKDEGFLLHEVPFRPTAEQFSRYFYEQLKGLNFPVYDISVYETPTNCSTYREASL

SEQ ID NO: 17451 - protein, 110 aa, unidentified
  source 1..110: note = Anaerococcus nagyae
  REGION 1..110: note = tr|A0A3E2TI04|A0A3E2TI04_9FIRM 6-carboxy-5,6,7,8-tetrahydropterin synthase; OS = Anaerococcus nagyae OX=1755241 GN=queD PE=3 SV=1
MYYIKKNIEISASHQLHLPYESKCNELHGHNYDINIYCKSEELDENGMVLDFTHIKKKVMDKLDHKNLNEILDVPTTAENIARWICEQLGPKCYKVKVAESKGNLAIYER

SEQ ID NO: 17452 - protein, 144 aa, unidentified
  source 1..144: note = Anaerocolumna xylanovorans
  REGION 1..144: note = tr|A0A1M7YCA9|A0A1M7YCA9_9FIRM 6-pyruvoyltetrahydropterin/6-carboxytetrahydropterin synthase OS=Anaerocolumna xylanovorans DSM 12503; OX = 1121345 GN=SAMN02745217_02647PE=4 SV=1
MGYSQYKFKFYLNAIHAIYIQGVMGEKHPHTWEIEISTLKQQEEFVQFKEVEEPVEKFLDKYQNKFLNACEPFKDINPTLENITNYLLKEIQAILMPIGWYIFCIEVGETPSRSYIISLVENRAKSELQKADMVNDIIANSFLT

SEQ ID NO: 17453 - protein, 216 aa, Anaeroglobus geminatus
  REGION 1..216: note = tr|G9YHC8|G9YHC8_9FIRM Queuosine biosynthesis protein QueD OS=Anaeroglobus geminatus F0357 OX=861450; GN = HMPREF0080_01055 PE=4 SV=1
MFLSLYFLIVPVTARFLQTAYIDKDKIVHYTKEAVMRTVRLYHPVLKQNQDCFFVAFLRLKTGSAFMQGLFLRGDTMYYITSEASFDGAHFLRNYSGKCRNLHGHHWLVRVHMRSYALQRDIQTDGMLNDFGDLKKTLKDLCDYFDHSLIYEAGSLRKSTLACLAAEEFLLREVPFRPTAENLAKYFYDTLQAKRSEIYRVEVYETPANCAAYEAQ

SEQ ID NO: 17454 - protein, 125 aa, Anaerolinea thermolimosa
  REGION 1..125: note = tr|A0A3D1JI34|A0A3D1JI34_9CHLR 6-carboxytetrahydropterin synthase OS=Anaerolinea thermolimosa OX=229919 GN=DEQ80_09565 PE=4 SV=1
MYHVAVMRDFMARHYLIGGDWGPENQEHTHHYRIEVELWGKELNEHQYLVDIIAVEDHLATLLSYYRDRVLNELPEFSGVNPSLETFARVLCQSFDRAFQEKNITAVTVRLWENEYARAGYTVER

SEQ ID NO: 17455 - protein, 158 aa, Anaerolinea thermolimosa
  REGION 1..158: note = tr|A0A3D1JIH3|A0A3D1JIH3_9CHLR 6-carboxytetrahydropterin synthase OS=Anaerolinea thermolimosa OX=229919 GN=DEQ80_09275 PE=4 SV=1
MTIDRKTIEPTMMQEDPFWQIDPTLVLNPPPAYARYKLIMSAFFNAAHSVSFGPSRGNLHRHSYHLRVTAMASALAPDNSLVPYETLRQIMTKITAAYEGTILNNLPPFRTIQPTTEALAAIVAQQIERLARDLPIKIIEVTVMESPTQGVSIQLNPS

SEQ ID NO: 17456 - protein, 129 aa, unidentified
  source 1..129: note = Anaerolineaceae bacterium
  REGION 1..129: note = tr|A0A2E0ZJ01|A0A2E0ZJ01_9CHLR 6-pyruvoyl tetrahydropterin synthase OS=Anaerolineaceae bacterium; OX = 2024896 GN=CL608_25030 PE=4 SV=1
MYTVAVKRDFVAQHFLIGGDWGPENEWHSHHYVVELQLSGPTLDQHGYLVDIVDIEANLEALVAYYKDKTLNDLPEFAGLNPSIEHFARLLATQLAERIQASTLSHLTVKVWENEIAWAAFRLPVNGKP

SEQ ID NO: 17457 - protein, 125 aa, unidentified
  source 1..125: note = Anaerolineaceae bacterium
  REGION 1..125: note = tr|A0A351X8E3|A0A351X8E3_9CHLR 6-pyruvoyl tetrahydropterin synthase OS=Anaerolineaceae bacterium; OX = 2024896 GN=DCP32_01795 PE=4 SV=1
MYRVSVQKTFTARHYLIGGDWGAENQLHAHPYRLELELSGYDLDQHQYLADIVAIENALEHQIELVRDKTLNEIPAFAGVNPSLEYFARWLCESLSAKIDASNIQRVAVRLWESDTAWAGYELER

SEQ ID NO: 17458 - protein, 128 aa, unidentified
  source 1..128: note = Anaerolineae bacterium
  REGION 1..128: note = tr|A0A3D0RNM3|A0A3D0RNM3_9CHLR 6-pyruvoyl tetrahydropterin synthase OS=Anaerolineae bacterium; OX = 2052143 GN=DEP19_01220 PE=4 SV=1
MYTLGVRRDFIARHFLIGGDWGPENFPNSHHYVLELQLIGNELDKHGYLVDIVDVEKHLDEVVGYYKEQMLNEKPEFAGLNPSIEHFARIVCVSLNERIKAKNILEVKVVLWENDSAWSAFQVDRLKG

SEQ ID NO: 17459 - protein, 90 aa, unidentified
  source 1..90: note = Anaerolineae bacterium
  REGION 1..90: note = tr|A0A1J4S240|A0A1J4S240_9CHLR 6-pyruvoyl tetrahydropterin synthase (Fragment) OS=Anaerolineae bacterium CG1_02_58_13 OX=1805002 GN=AUJ21_05775 PE=4 SV=1
NYLDQHGYLVDIMDVEKHLDEIVGYYKEQMLNDKSEFAGLNPSLENFARILATSLNERIQAKNITALKVVLWEHANAWAAYSVERQKSKV

SEQ ID NO: 17460 - protein, 196 aa, unidentified
  source 1..196: note = Anaerolineales bacterium
  REGION 1..196: note = tr|A0A524ADX2|A0A524ADX2_9CHLR 6-carboxytetrahydropterin synthase OS=Anaerolineales bacterium OX=2073117 GN=E3J21_16520 PE=4 SV=1
MPSPSDTAPWGSSAGKSCGANTWSDTPLWKNGWRDRAVYRVVVEKGNLRFSAAHFISFGGKCERLHGHNYAVSVELEGGLTEDRYVFDFVVLKKITRRICDSLDHHFLLPQQSKDLDIKKTDGEWEIRFENRRYVLPAEDVLALPVDNITAERLAEYICGQLVEALHEHDVANLTSVTVGVEETAGQTAFYQRPLS

SEQ ID NO: 17461 - protein, 129 aa, unidentified
  source 1..129: note = Anaerolineales bacterium
  REGION 1..129: note = tr|A0A363UAZ0|A0A363UAZ0_9CHLR 6-pyruvoyl tetrahydropterin synthase OS=Anaerolineales bacterium; OX = 2073117 GN=C3F07_03590 PE=4 SV=1
MYSLGVRRDFIARHFLIGGDWGAENYPNSHHYILELQLEGAQLDGHGYLVDIVEVEKHLDEIVNYYKEQMLNDKPEFAGLNPSIEHFARILATSLSERIKAGNIAAVKVVLWENESAWAAFRVERPRSG

SEQ ID NO: 17462 - protein, 187 aa, unidentified
  source 1..187: note = Anaeromassilibacillus sp.
  REGION 1..187: note = tr|A0A1Y4HTM9|A0A1Y4HTM9_9FIRM Rubredoxin; OS = Anaeromassilibacillus sp. An200 OX=1965587; GN = B5F35_10795 PE=4 SV=1
MRSITKLDLQYAHRFYGFKGEAQYLHGHTGVLTIEVEDSVEPGVNMVFPCNEIQKTAWDVLKNFDHALVLREDDPLLPAILEVYEKQGIKDGAPNNKMKGEAFKTELATAYPDCRLVVTKETMTVEGMIKIVYDLLKDKLNIAKLTFTSGVNAATAEFETKNQIDRCPLCGIALKNGVCPKCGYKKG

SEQ ID NO: 17463 - protein, 189 aa, unidentified
  source 1..189: note = Anaeromassilibacillus sp.
  REGION 1..189: note = tr|A0A1Y4N3X2|A0A1Y4N3X2_9FIRM Rubredoxin; OS = Anaeromassilibacillus sp. An172 OX=1965570; GN = B5F08_11180 PE=4 SV=1
MRSITTLDLQYAHRFYGFKGEAQYLHGHTGVLTIEVEDTVEPGVNMVFPCNEIQKTAWDVLKNFDHALILREDDPLLPAVLDVYEKQGIRNGAPQNTMVGAAFKTELATAYPECRLVVTKETLTVEGMIKIVYDLLKDKLNIAKITFTSGVNAASAEFTTKNKIDRCPLCGIALDENGVCPKCGYRKQK

SEQ ID NO: 17464 - protein, 141 aa, unidentified
  source 1..141: note = Anaeromicrobium sediminis
  REGION 1..141: note = tr|A0A267MB63|A0A267MB63_9CLOT 6-carboxy-5,6,7,8-tetrahydropterin synthase; OS = Anaeromicrobium sediminis OX=1478221 GN=queD PE=3 SV=1
MYILRSEHSFDSAHFLAGYEGKCSNIHGHRWRVVVEVMEEKLKSGGQLDGMVVDFGDLKNDLKEIVDFHDHKLIIEMGTMKKHLVELLKEEGFKIMEVNFRPTAENFSKYFYDYITQKGYKVKRAEVYETPTNCAIYEGER

SEQ ID NO: 17465 - protein, 129 aa, Anaeromyxobacter dehalogenans
  REGION 1..129: note = tr|B8J839|B8J839_ANAD2 6-carboxy-5,6,7,8-tetrahydropterin synthase; OS = Anaeromyxobacter dehalogenans (strain 2CP-1 / ATCC BAA-258) OX=455488 GN=A2cp1_1997 PE=3 SV=1
MAPIDYTDRRRMRLDVEFYFAAAHRLPRYEGPCFRMHGHNYRFFVALEGEVDPATGMIADFGDVKRIVQEHVLARVDHRTLNDVLDNPTAENIARWVWEVLEPHLPGLCEIRLYEIPDSCVTYRGPGGR

SEQ ID NO: 17466 - protein, 138 aa, Anaeromyxobacter dehalogenans
  REGION 1..138: note = tr|Q2IKV5|Q2IKV5_ANADE 6-carboxy-5,6,7,8-tetrahydropterin synthase; OS = Anaeromyxobacter dehalogenans (strain 2CP-C) OX=290397; GN = Adeh_2514 PE=3 SV=1
MPGYIAARMGSPVYEISKDFVFSAAHQIRFHGGKCERLHGHNWRVRVHARASTLNRIGMVIDFADLQKLVAEVGSRFDHQNVNEVAPFDQENTTAELIARFFYREMSRRLAELEGGRVTVARVDVWENEGSLAIYREE

SEQ ID NO: 17467 - protein, 130 aa, Anaeromyxobacter sp.
  REGION 1..130: note = tr|A7HA15|A7HA15_ANADF 6-carboxy-5,6,7,8-tetrahydropterin synthase; OS = Anaeromyxobacter sp. (strain Fw109-5) OX=404589; GN = Anae109_1354 PE=3 SV=1
MGVPVFEISKEFLFSAAHQIRFHGGKCERLHGHNWRIRVHARASELNRIGMVIDFADLQRIVADIGGRFDHQNVNEIPPFDELNTTAELLARHFYEEANRAVLEREGGRVRVSKVEVWENEGSLAVYRED

SEQ ID NO: 17468 - protein, 129 aa, Anaeromyxobacter sp.
  REGION 1..129: note = tr|A0A0D6QP72|A0A0D6QP72_9DELT 6-carboxy-5,6,7,8-tetrahydropterin synthase; OS = Anaeromyxobacter sp. PSR-1 OX=1300915 GN=queD PE=3 SV=1
MAPIDYTDRRRMRLDVEFYFAAAHRLPRYEGPCFRMHGHNYRFFVALEGEVDPATGMIADFGDVKRIVQEHVLARVDHRTLNDVLDNPTAENIARWMWEVLEPHLAGLCEIRLYEIPDSCVTYRGPGGR

SEQ ID NO: 17469 - protein, 133 aa, Anaerosporobacter mobilis
  REGION 1..133: note = tr|A0A1M7M6A7|A0A1M7M6A7_9FIRM 6-carboxy-5,6,7,8-tetrahydropterin synthase; OS = Anaerosporobacter mobilis DSM 15930 OX=1120996; GN = SAMN02746066_03660 PE=3 SV=1
MKQDYDFIGKEVYMTKRFSFSAAHQLSGSTRHNDQLHGHNYTVSVTVKGFLNKDGFLIDFDKFESLLYTHVFFKLDHSVLNDHLEPLNPTVEVLTLYLYNEIETCLRICECTENLKIAEITVYETDSFSATIK

SEQ ID NO: 17470 - protein, 150 aa, Anaerosporobacter mobilis
  REGION 1..150: note = tr|A0A1M7KZ83|A0A1M7KZ83_9FIRM 6-pyruvoyl tetrahydropterin synthase OS=Anaerosporobacter mobilis DSM 15930 OX=1120996 GN=SAMN02746066_02967 PE=4 SV=1
MILQDKLLHYYKFKYYFSAQHSMTKSDEGMHPHTFTILLYMETYENYNIDLFSKVDRFLEEYFSRFSGEKLNKLACFEEEVPTIEVMGEYFYEEIKEKLQSVNLDLIQIDICENPLRIYSISDRILLSSAHIQNSSRQLERILEAQKKYL

SEQ ID NO: 17471 - protein, 127 aa, unidentified
  source 1..127: note = Anaerosporomusa subterranea
  REGION 1..127: note = tr|A0A154BMI5|A0A154BMI5_ANASB 6-carboxy-5,6,7,8-tetrahydropterin synthase; OS = Anaerosporomusa subterranea OX=1794912 GN=AXX12_15920; PE = 3 SV=1
MKIKAKKGFHFDAAHCLPGHSGKCASMHGHTYRLEVVVARKDGGIIADGSSEGMIIDFGDLNRIVKEEILDKVDHQCLNDLFDFRTTSENLAAHFFTILNERLHANDIVLERILLWESNTSCVEVER

SEQ ID NO: 17472 - protein, 139 aa, Anaerostipes caccae
  REGION 1..139: note = tr|B0ME53|B0ME53_ANACD 6-carboxy-5,6,7,8-tetrahydropterin synthase; OS = Anaerostipes caccae (strain DSM 14662 / NCIMB 13811 / L1-92) OX=411490 GN=queD PE=3 SV=1
MYQLNTHASFDSAHFLAGYEGKCRNLHGHRWKLSVTIQKEKVEEQGQTRGMVVDFGELKDKVKEIADEFDHALIMEKDTLKAKTIEALREEEFRIIEVKFRPTAENFARYFYDRIKQDGYDVSFVEVYETPNNCAIYGE

SEQ ID NO: 17473 - protein, 139 aa, unidentified
  source 1..139: note = Anaerostipes hadrus
  REGION 1..139: note = tr|D4MWU0|D4MWU0_ANAHA 6-carboxy-5,6,7,8-tetrahydropterin synthase; OS = Anaerostipes hadrus OX=649756 GN=CL2_30930 PE=3 SV=1
MYQLTTHASFDSAHFLSGYEGKCSNIHGHRWKLEVTVQSETLEQTGEIRGMVVDFGQLKDDIKKLADEFDHSLIIEDGTLKEKTVEALKEENFKMIFVDFRPTAESFAKYFYDRVKEIGYDVKLAKVYETPNNMAAYGE

SEQ ID NO: 17474 - protein, 139 aa, unidentified
  source 1..139: note = Anaerostipes hadrus
  REGION 1..139: note = tr|A0A173RVB9|A0A173RVB9_ANAHA 6-carboxy-5,6,7,8-tetrahydropterin synthase; OS = Anaerostipes hadrus OX=649756 GN=queD PE=3 SV=1
MYQLTTHASFDSAHFLSGYEGKCSNIHGHRWKLEVTVQSETLEQTGQIRGMVVDFGQLKDDIKKLADEFDHSLIIEDGTLKEKTVEALKEENFKMIFVDFRPTAESFAKYFYDRVKEIGYDVKLAKVYETPNNMAAYGE

SEQ ID NO: 17475 - protein, 139 aa, unidentified
  source 1..139: note = Anaerostipes rhamnosivorans
  REGION 1..139: note = tr|A0A4P8IGC1|A0A4P8IGC1_9FIRM 6-carboxy-5,6,7,8-tetrahydropterin synthase; OS = Anaerostipes rhamnosivorans OX=1229621 GN=AR1Y2_1410; PE = 3 SV=1
MYQLNTHASFDSAHFLAGYEGKCSNLHGHRWKLSVTIQKEKVEQQGQTRGMVVDFGQLKDKVKEIADEFDHALIIEKNTLKEKTMEALKEEDFRIIEVAFRPTAENFAKYFYDCFKQSGYDVSFVEVYETPNNCAIYGE

SEQ ID NO: 17476 - protein, 139 aa, Anaerostipes sp.
  REGION 1..139: note = tr|R6QD91|R6QD91_9FIRM 6-carboxy-5,6,7,8-tetrahydropterin synthase; OS = Anaerostipes sp. CAG:276 OX=1262699 GN=BN583_03004 PE=3; SV = 1
MYQLNTHASFDSAHFLAGYEGKCRNLHGHRWKLSVTIQKEKVEEQGQTRGMVVDFGELKDKVKEIADEFDHALIMEKDTLKTKTIEALREEEFRIIEVKFRPTAENFARYFYDRIKQDGYDVSFVEVYETPNNCAIYGE

SEQ ID NO: 17477 - protein, 140 aa, Anaerostipes sp.
  REGION 1..140: note = tr|A0A1Q9JPV9|A0A1Q9JPV9_9FIRM 6-carboxy-5,6,7,8-tetrahydropterin synthase; OS = Anaerostipes sp. 494a OX=1261636 GN=BHF70_00525 PE=3; SV = 1
MYRLTTHASFDSAHFLAGYDGKCSNLHGHRWKLEVTVESEKLEENGQIRGMIVDFGKLKQDVKMLADEFDHCLIVEKNTLKSKTMEALLEEKFKIITVEFRPTAENFAKYFFDRMKAQGYQVSFVNVYETPNNMAGYGEG

SEQ ID NO: 17478 - protein, 188 aa, Anaerotruncus colihominis
  REGION 1..188: note = tr|B0PAB7|B0PAB7_9FIRM Uncharacterized protein; OS = Anaerotruncus colihominis DSM 17241 OX=445972; GN = ANACOL_01686 PE=4 SV=1
MRSITTLDLQYAHRFYGFKGEAQYLHGHTGVLTIEVEDSIEPGVNMVFPCNEIQKTAWEVLKNFDHALVLREDDPLLPAILDVYKAQGIRDGAPNNKMMGPAFKTELATAYPECRLVVTKETMTVEGMIKIVYSLLKDKLNIAKITFTSGVNAASEEFEPANKIDRCPLCGIALNENGVCPKCGYKKK

SEQ ID NO: 17479 - protein, 188 aa, Anaerotruncus colihominis; identical to SEQ ID NO: 17478
  REGION 1..188: note = tr|A0A174T100|A0A174T100_9FIRM Queuosine biosynthesis protein QueD OS=Anaerotruncus colihominis; OX = 169435 GN=B5F11_11195 PE=4 SV=1

SEQ ID NO: 17480 - protein, 125 aa, Anaerovibrio lipolyticus
  REGION 1..125: note = tr|A0A1M6E6G9|A0A1M6E6G9_9FIRM 6-carboxy-5,6,7,8-tetrahydropterin synthase; OS = Anaerovibrio lipolyticus DSM 3074 OX=1120997; GN = SAMN02745671_01767 PE=3 SV=1
MFEIHVSAEFEAAHRVAGYNGKCDRLHGHSWTVEAAVTGKKLDNLGMLVDFKVVKGRLRDLLETLDHQYLNELPAFADGHNPTAEHLAQYIYEEMAKAEFFDDNVKLKHIQVWESPKSSVIYSLE

SEQ ID NO: 17481 - protein, 125 aa, Anaerovibrio lipolyticus; identical to SEQ ID NO: 17480
  REGION 1..125: note = tr|A0A0B2JZT4|A0A0B2JZT4_9FIRM 6-carboxy-5,6,7,8-tetrahydropterin synthase; OS = Anaerovibrio lipolyticus OX=82374 GN=NZ47_06670 PE=3; SV = 1

SEQ ID NO: 17482 - protein, 125 aa, Anaerovibrio sp.
  REGION 1..125: note = tr|A0A1X1Q6W6|A0A1X1Q6W6_9FIRM 6-carboxy-5,6,7,8-tetrahydropterin synthase; OS = Anaerovibrio sp. JC8 OX=1240085 GN=D081_1344 PE=3 SV=1
MFEIHVSAEFEAAHRVAGYNGKCDRLHGHSWTVEAAVIGTKLDNLGMLVDFKVVKGRLRDLLETLDHQYLNELPAFADGHNPTAEHLAQYIYEEMAKAEFFNDNVKLKHIQVWESPKSSVIYSLD

SEQ ID NO: 17483 - protein, 125 aa, Anaerovibrio sp.
  REGION 1..125: note = tr|A0A3D4AN06|A0A3D4AN06_9FIRM 6-carboxy-5,6,7,8-tetrahydropterin synthase; OS = Anaerovibrio sp. OX=1872532 GN=queD PE=3 SV=1
MFEIHVSAEFEAAHRVAGYNGKCDRLHGHSWIVEASVTGKKLDNLGMLVDFKVVKGRLRDLLETLDHQYLNELPAFADGHNPTAEHIAKYVYEEMAKAEFFDDNVKLKYIQVWESPKSSAIYSLE

SEQ ID NO: 17484 - protein, 133 aa, Ancylobacter aquaticus
  REGION 1..133: note = tr|A0A431Q6I2|A0A431Q6I2_ANCAQ 6-carboxytetrahydropterin synthase OS=Ancylobacter aquaticus OX=100 GN=EJV44_15025 PE=4 SV=1
MYSVEVRDRIMIAHSLPDPFFGPAQGLHGATFVVDVAFFREALTAQNVVVDIGAALDVLKQTLAPLAYQNLDTLPAFAGKLTTTEFLARHIFDAMAAAAKAGALGAEGHGLAKIRVTLHETDLARASFESGLG

SEQ ID NO: 17485 - protein, 133 aa, Ancylobacter aquaticus
  REGION 1..133: note = tr|A0A4R1HM87|A0A4R1HM87_ANCAQ 6-pyruvoyl-tetrahydropterin synthase OS=Ancylobacter aquaticus OX=100 GN=EV667_3436 PE=4 SV=1
MYCVEVRDRIMIAHSLPDPFFGPAQGLHGATFVVDVAFFRAALTAQNVVVDIGAALDVLKKTLAPLAYQNLDTLPEFAGKLTTTEFLARHIFDAMATAAGAGALGEEGRGLAKIRVTLHETDLARASYEAGLG

SEQ ID NO: 17486 - protein, 133 aa, Ancylobacter rudongensis
  REGION 1..133: note = tr|A0A1G4UIR6|A0A1G4UIR6_9RHIZ 6-pyruvoyl-tetrahydropterin synthase OS=Ancylobacter rudongensis OX=177413 GN=SAMN05660859_3976 PE=4 SV=1
MYSVEVRDRIMIAHSLPDRFFGPAQGLHGATFVVDVAFFREALTAQNVVVDIGAALDVLKQTLAPLAYQNLDTLPDFAGKLTTTEFLARHIFDAMAAAAKAGALGAEGHGLSKIRVTLHETDLARASFESGLS

SEQ ID NO: 17487 - protein, 148 aa, unidentified
  source 1..148: note = Ancylomarina sp.
  REGION 1..148: note = tr|A0A4V1N063|A0A4V1N063_9BACT 6-carboxy-5,6,7,8-tetrahydropterin synthase; OS = Ancylomarina sp. SHSM-M15 OX=2501299 GN=EO244_08365; PE = 3 SV=1
MAKVRLTKEFRFEMAHALWNYDGLCKNIHGHSYILYVTVIGEPITDQANPKLGMVMDFGDLKRIVNQEIVDKLDHAVVLSDRTPMLEQLNIPQMFERFFVFDYQPTCENMIADFAERIIKRLPAEVKLHSLKLHETATSFAEWFAEDN

SEQ ID NO: 17488 - protein, 148 aa, unidentified
  source 1..148: note = Ancylomarina sp.
  REGION 1..148: note = tr|A0A425Y861|A0A425Y861_9BACT 6-carboxy-5,6,7,8-tetrahydropterin synthase; OS = Ancylomarina sp. M1P OX=2283627 GN=DWB61_00450 PE=3 SV=1
MAKVRLTKEFRFEMAHALWNYDGLCKNIHGHSYILYVTVIGEPIADENNPKLGMVMDFGDLKRIVNVEIVDKLDHAVVLSDKTPMLEQLNIPQMFERFFVFDYQPTCENMIADFAGRIMKRLPVDVSLHSLKLHETATSFAEWFAEDN

SEQ ID NO: 17489 - protein, 148 aa, unidentified
  source 1..148: note = Ancylomarina subtilis
  REGION 1..148: note = tr|A0A4Q7VMH9|A0A4Q7VMH9_9BACT 6-carboxy-5,6,7,8-tetrahydropterin synthase; OS = Ancylomarina subtilis OX=1639035 GN=EV201_2192 PE=3 SV=1
MAKVRLTKEFRFEMAHALWNYDGLCKNIHGHSYILYVTVIGEPITDESNPKLGMVMDFGDLKRIVNQEIVDKLDHAVVLSDRTPMLEQLNIPQMFERFFVFDYQPTCENMIADFAERIIKRLPEEVKLHSLKLHETATSFAEWFAEDN

SEQ ID NO: 17490 - protein, 138 aa, unidentified
  source 1..138: note = Anditalea andensis
  REGION 1..138: note = tr|A0A074L5Q0|A0A074L5Q0_9BACT 6-pyruvoyl tetrahydropterin synthase OS=Anditalea andensis OX=1048983; GN = EL17_22620 PE=4 SV=1
MLSITKSFHFEAAHRISDYDGACQYLHGHSYKLEVTISGKEMVKGDMLMDFKILKSLVNKIAIEPWDHALILKDNEINHSEFDHLNGKTYWMETEPTAERMVLHLSEQLAGLLPQGFSVRRVKLYETDSCFAEYENIH

SEQ ID NO: 17491 - protein, 138 aa, unidentified
  source 1..138: note = Anditalea andensis
  REGION 1..138: note = tr|A0A074LLW8|A0A074LLW8_9BACT 6-pyruvoyl tetrahydrobiopterin synthase OS=Anditalea andensis; OX = 1048983 GN=EL17_04115 PE=4 SV=1
MNVAVFRKEHFNAAHRLHNPSWSAEKNQEVFGKCNNPSFHGHNYELVVKLIGPIDPNTGYVFDMKMLSDLIKENILNKFDHKNLNLDTEEFSELNPTAENIAIVIWNILRGKIDNKLALIVRLYETERNFVEYDGNGS

SEQ ID NO: 17492 - protein, 129 aa, unidentified
  source 1..129: note = Andreesenia angusta
  REGION 1..129: note = tr|A0A1S1V7E2|A0A1S1V7E2_9FIRM 6-carboxy-5,6,7,8-tetrahydropterin synthase OS=Andreesenia angusta OX=39480 GN=queD PE=3 SV=1
MKDRRIDTTKIFTFDSAHKLNDYDGDCKYLHGHTYKLEVTVRGRRDSCGMVIDFKDLKAIVKEEIISELDHRYLNDIFSFNPTCENMVEWIFEKLDSRLSKGESSLQKIVLWETPTSYATLEREEYDAS

SEQ ID NO: 17493 - protein, 198 aa, Andreprevotia lacus
  REGION 1..198: note = tr|A0A1W1X1R5|A0A1W1X1R5_9NEIS 6-pyruvoyltetrahydropterin/6-carboxytetrahydropterin synthase OS=Andreprevotia lacus DSM 23236 OX=1121001; GN = SAMN02745857_00417 PE=4 S V=1
MLIRKLFKFENAHIVRNCSSDRCRRSIHGHSYKVEVLLEAHALDHGQMVYDFGLMKGTIKDVIDAFDHAICFWDKDDAEYIRLCKEFSARWIALPVSPSAEQFARLFFVLIDAILKQTVMKNGEADVLLHSVIAHETDTGYAQAFRDDAYNPRMGSIALADIVFSDQVRAEWGDPQLYDKLQSGTPLVNPDVTLQVKI

SEQ ID NO: 17494 - protein, 159 aa, Aneurinibacillus aneurinilyticus
  REGION 1..159: note = tr|U1X136|U1X136_ANEAE Queuosine biosynthesis protein QueD OS=Aneurinibacillus aneurinilyticus ATCC 12856 OX=649747 GN=HMPREF0083_03714 PE=4 SV=1
MSGFEIPRSVQLLYEDIQPEQLRYHQRRVALTKEFTFDSAHHLHLYEGKCKSLHGHTYKLIITMSGFVDDIGICVDFGDIKKVYEHTIKARLDHKYLNEVLPPMNTTAENMIVWIWEQIDEEIEYRGWKKHGTRIEELVLYETPTSYATLKREWMEDND

SEQ ID NO: 17495 - protein, 159 aa, Aneurinibacillus danicus
  REGION 1..159: note = tr|A0A511V9M6|A0A511V9M6_9BACL 6-carboxytetrahydropterin synthase QueD; OS = Aneurinibacillus danicus OX=267746 GN=ygcM PE=4 SV=1
MSGFEIPRKVQRIHEDIQPEQLRYHSRRVALTKEFTFDSAHHLHLYEGKCKSLHGHTYKLVITVSGFVDDIGICVDFGEIKQMYEDTIKAQLDHKYLNEVLPPMNTTAENMIVWIWEQLDQEIVRRGFRERGTRLEELVLYETPTSYATLKREWMESDE

SEQ ID NO: 17496 - protein, 159 aa, Aneurinibacillus migulanus
  REGION 1..159: note = tr|A0A0D1YK52|A0A0D1YK52_ANEMI 6-pyruvoyl tetrahydrobiopterin synthase OS=Aneurinibacillus migulanus; OX = 47500 GN=AF333_00160 PE=4 SV=1
MSGFDIPRSVQLLYKDIQPEQLRYHRRRVALTKEFTFDSAHHLHLYEGKCKSLHGHTYKLMITVSGFVDDIGICVDFGDIKKVYEDTIKAQLDHKYLNEVLPPMNTTAENMIVWIWEQIDGEMERRGWKEHGTRIEELVLYETPTSYATLKREWMESDD

SEQ ID NO: 17497 - protein, 159 aa, unidentified
  source 1..159: note = Aneurinibacillus soli
  REGION 1..159: note = tr|A0A0U5BCQ2|A0A0U5BCQ2_9BACL 6-carboxy-5,6,7,8-tetrahydropterin synthase; OS = Aneurinibacillus soli OX=1500254 GN=queD PE=4 SV=1
MSGYEIPQKVQRLYEDIQPSDLRYHTRRVALTKEFTFDSAHHLHLYEGKCKSMHGHTYKLVMTLSGYVNEIGICVDFSDMKRIYEETIKQRLDHRYLNDVMPLMNTTAENMIVWIWEQLDRRLIEEGLTEKGTRLEELVLYETPTSYATLKREWMQDDR

SEQ ID NO: 17498 - protein, 159 aa, Aneurinibacillus sp.
  REGION 1..159: note = tr|A0A120HSN5|A0A120HSN5_9BACL 6-pyruvoyl tetrahydrobiopterin synthase OS=Aneurinibacillus sp. XH2; OX = 1450761 GN=ACH33_14235 PE=4 SV=1
MSEFQIPRKVQRLHEDIRPEQLRYHSRRVAVTKEFTFDSAHHLHLYEGKCKSLHGHTYKLVITMSGFVNEIGICVDFGDIKEVYEEIIKSQLDHKYLNEVLPPMNTTAENMVVWIWEELDCAIEQRGWKQRGTRLEELVLYETPTSYATLKREWMESNA

SEQ ID NO: 17499 - protein, 131 aa, Aneurinibacillus sp.
  REGION 1..131: note = tr|A0A0X8D4R5|A0A0X8D4R5_9BACL 6-carboxy-5,6,7,8-tetrahydropterin synthase; OS = Aneurinibacillus sp. XH2 OX=1450761 GN=ACH33_11310 PE=3; SV = 1
MKQKYHLVKHFWIACAHRVPNAGKCDRIHGHNYKVTFCIEGSKLDDKGMLIDFRDVKHSIEDKYDHYLLNDFPEFDVDQGGSAPSTEKVAEVFYSIIKDLCLMKINQPKVKWVEVQETNEVFVRYSEELEN

SEQ ID NO: 17500 - protein, 131 aa, Aneurinibacillus thermoaerophilus
  REGION 1..131: note = tr|A0A1G8BMG2|A0A1G8BMG2_ANETH PreQ(0) biosynthesis protein QueD OS=Aneurinibacillus thermoaerophilus; OX = 143495 GN=SAMN04489735_102026 PE=4 SV=1
MKQKYHLVKHFWIACAHRVPNAGKCDRIHRHNYKVTFCIEGSKLDDKGMLIDFRDVKHSIEDKYDHYLLNDFPEFDVDQGGSAPSTEKVAEVFYSIIKDLCLMKINQPKVKWVEVQETNEVFVRYSEELEN

SEQ ID NO: 17501 - protein, 159 aa, Aneurinibacillus thermoaerophilus; identical to SEQ ID NO: 17498
  REGION 1..159: note = tr|A0A1G7WYF7|A0A1G7WYF7_ANETH PreQ(0) biosynthesis protein QueD OS=Aneurinibacillus thermoaerophilus; OX = 143495 GN=SAMN04489735_1002223 PE=4 SV=1

SEQ ID NO: 17502 - protein, 145 aa, Anoxybacillus amylolyticus
  REGION 1..145: note = tr|A0A160F2L3|A0A160F2L3_9BACI 6-carboxy-5,6,7,8-tetrahydropterin synthase; OS = Anoxybacillus amylolyticus OX=294699 GN=queD PE=3 SV=1
MIQQIYPQVFHNFRYELNKDMQIAAAHFIPHEAAGKCANMHGHTYFVNITVAGDELDESGFLINFQQLKKIVHGKLDHTLMNDHTDLFSNARAEDFPTTEVVARKIAEIVQAQLDTMPNRPTCVQVFVRESPTSYVVYRPKAGNR

SEQ ID NO: 17503 - protein, 251 aa, Anoxybacillus amylolyticus
  REGION 1..251: note = tr|A0A4R1FRZ4|A0A4R1FRZ4_9BACI 6-pyruvoyltetrahydropterin/6-carboxytetrahydropterin synthase OS=Anoxybacillus amylolyticus OX=294699; GN = BDK47_1224 PE=4 SV=1
MEKNKAVFGLCSNLNGHGHDYQLDVTVKGLVNPLTGIVVNITQVDAIMKEVVSAELDGKFLNQEHPYFQTHIPTTEMMVTYIWDVLQGKFSCCQLCKVKLQENETLYAVKEEQELVQLTRRYYFSSAHRLHSDQLTNEENQRLFGKCNNRYGHGHNYCLEVTVIGKPDPITGMVVNLAELDEIVNREVLVKFDHKHLNLDTDEFKQINPTAENIVIVIWELLAPHLSSLYKIGLWETQKNYFEYFGPHKEK

SEQ ID NO: 17504 - protein, 145 aa, Anoxybacillus ayderensis
  REGION 1..145: note = tr|A0A0D0HJ54|A0A0D0HJ54_9BACI 6-carboxy-5,6,7,8-tetrahydropterin synthase; OS = Anoxybacillus ayderensis OX=265546 GN=B7H16_09170 PE=3; SV = 1
MIQQIYPQVIHPFRYELNKDMQIAAAHFIPHEAAGQCANMHGHTYFINITVAGDELDDSGFLINFQQLKKLVHNRFDHTVMNDHKDVFSDTAAEHFPTTEVVARKIAEIVQEHLDTLPNKPTCVQVFVRESPTSYVVYRPKAGKQ

SEQ ID NO: 17505 - protein, 145 aa, Anoxybacillus flavithermus
  REGION 1..145: note = tr|B7GLA3|B7GLA3_ANOFW 6-carboxy-5,6,7,8-tetrahydropterin synthase; OS = Anoxybacillus flavithermus (strain DSM 21510 / WK1); OX = 491915 GN=Aflv_1970 PE=3 SV=1
MIQQIYPQVIHPFRYELNKDMQIAAAHFIPHEAAGRCANVHGHTYFINITVAGDELDDSGFLINFQQLKKLIHHRFDHTLMNDHTDVFSNTQAEHFPTTEVVARKIAEIVQQHLDTLPNKPTCVQVFVRESPTSYVVYRPKAGKQ

SEQ ID NO: 17506 - protein, 145 aa, Anoxybacillus flavithermus
  REGION 1..145: note = tr|R4G6R5|R4G6R5_9BACI 6-pyruvoyl tetrahydrobiopterin synthase OS=Anoxybacillus flavithermus NBRC 109594 OX=1315967 GN=KN10_1828 PE=4 SV=1
MIQQIYPQVIHPFRYELNKDMQIAAAHFIPHEAAGQCANMHGHTYFINITVAGDELDDSGFLINFQQLKKLIHNRFDHTLMNDHTDVFSNTQAEHFPTTEVVARKIAEIVQQHLDTLPNKPTCVQVFVRESPTSYVVYRPKAGKQ

SEQ ID NO: 17507 - protein, 145 aa, Anoxybacillus gonensis; identical to SEQ ID NO: 17504
  REGION 1..145: note = tr|M5QPK2|M5QPK2_9BACI 6-carboxy-5,6,7,8-tetrahydropterin synthase; OS = Anoxybacillus gonensis OX=198467 GN=F510_2721 PE=3 SV=1

SEQ ID NO: 17508 - protein, 145 aa, Anoxybacillus kamchatkensis; identical to SEQ ID NO: 17504
  REGION 1..145: note = tr|A0A4V3UUS0|A0A4V3UUS0_9BACI 6-carboxy-5,6,7,8-tetrahydropterin synthase; OS = Anoxybacillus kamchatkensis OX=196180 GN=queD PE=3 SV=1

SEQ ID NO: 17509 - protein, 145 aa, Anoxybacillus kamchatkensis; identical to SEQ ID NO: 17504
  REGION 1..145: note = tr|A0A346DDC6|A0A346DDC6_9BACI 6-carboxy-5,6,7,8-tetrahydropterin synthase; OS = Anoxybacillus kamchatkensis G10 OX=1212546 GN=queD PE=3; SV = 1

SEQ ID NO: 17510 - protein, 145 aa, Anoxybacillus pushchinoensis
  REGION 1..145: note = tr|A0A1I0U0A3|A0A1I0U0A3_9BACI PreQ(0) biosynthesis protein QueD OS=Anoxybacillus pushchinoensis OX=150248; GN = SAMN05216169_10631 PE=4 SV=1
MIQQIYPQVIHPFRYELNKDMQIAAAHFIPHEAAGQCANLHGHTYFINITVAGDELDDSGFLINFQQLKKLIHNRFDHTLMNDHTDVFSNTQAEHFPTTEVVARKIAEIVQAHLDTLPNRPTCVQVFVRESPTSYVVYRPKAGKQ

SEQ ID NO: 17511 - protein, 145 aa, Anoxybacillus sp.
  REGION 1..145: note = tr|A0A167UKD7|A0A167UKD7_9BACI 6-carboxy-5,6,7,8-tetrahydropterin synthase; OS = Anoxybacillus sp. B7M1 OX=1490057 GN=queD PE=3 SV=1
MMHQLYPQVFHDYCYELNKDMHIAAAHFIPHQLAGKCAHIHGHTYVVNITVAGDELDETGFLVNFQKLKQLIHGKLDHTLLNDHQDWFDSKNSEHFPTTEVVARKIYEVVQDYLDALPHKPKCLQVFVRETPTSYVVYRSKAGDR

SEQ ID NO: 17512 - protein, 145 aa, Anoxybacillus sp.
  REGION 1..145: note = tr|A0A1V3FGD7|A0A1V3FGD7_9BACI 6-carboxy-5,6,7,8-tetrahydropterin synthase; OS = Anoxybacillus sp. 103 OX=1919277 GN=BO219_13015 PE=3; SV = 1
MIQQIYPQVIHPFRYELNKDMQIAAAHFIPHEAAGQCANLHGHTYFINITVAGDELDDSGFLINFQQLKKLIHNRFDHTLMNDHTDVFSNTQAEHFPTTEVVARKIAEIVQQHLDTLPNKPTCVQVFVRESPTSYVVYRPKAGKQ

SEQ ID NO: 17513 - protein, 145 aa, unidentified
  source 1..145: note = Anoxybacillus suryakundensis
  REGION 1..145: note = tr|A0A0K6GK31|A0A0K6GK31_9BACI 6-carboxy-5,6,7,8-tetrahydropterin synthase; OS = Anoxybacillus suryakundensis OX=1325335; GN = Ga0061060_102132 PE=3 SV=1
MIQQIYPQVIHPFRYELNKDMQIAAAHFIPHEAAGQCANMHGHTYFINITVAGDELDDSGFLINFQQLKKLIHNRFDHTVMNDHKDVFSDTAAEHFPTTEVVARKIAEIVQEHLDTLPNKPTCVQVFVRESPTSYVVYRPKAGKQ

SEQ ID NO: 17514 - protein, 145 aa, Anoxybacillus thermarum; identical to SEQ ID NO: 17504
  REGION 1..145: note = tr|A0A0D0QZQ3|A0A0D0QZQ3_9BACI 6-carboxy-5,6,7,8-tetrahydropterin synthase; OS = Anoxybacillus thermarum OX=404937 GN=LH47_00924 PE=3; SV = 1

SEQ ID NO: 17515 - protein, 270 aa, unidentified
  source 1..270: note = Anoxybacillus vitaminiphilus
  REGION 1..270: note = tr|A0A327YSH5|A0A327YSH5_9BACI 6-pyruvoyltetrahydropterin/6-carboxytetrahydropterin synthase OS=Anoxybacillus vitaminiphilus OX=581036; GN = B0I26_101485 PE=4 SV=1
MYLLRKIFFSAAHYYRVSSWSEEQNKKVFGPCSSIHGHGHDYVLDVMVTGAFQQDSGIVVNINDVDKVVKSFIQEEFDGKFLNLEHPHFQKYMPTTEGIVSYMWNRLEERFQGCRLHKLTLHENDFLYAEKGRDNMVTLTRKYHFSSAHRLHSEQLSEEENLRLFGKCNNVHGHGHNYYLEVTVFGEPDPVTGMIVNLSELDQHVEREVLQKFDHKHLNLDTEEFKHLNPTSENLVIVIWKLLQDKIPNLYKIGLWETQKNYFEYYGPNR

SEQ ID NO: 17516 - protein, 145 aa, unidentified
  source 1..145: note = Anoxybacillus vitaminiphilus
  REGION 1..145: note = tr|A0A327YS30|A0A327YS30_9BACI 6-carboxy-5,6,7,8-tetrahydropterin synthase; OS = Anoxybacillus vitaminiphilus OX=581036 GN=B0I26_10180; PE = 3 SV=1
MLQQIYPQVSHHFQYELNKDMQIAAAHFIPHEAAGKCANIHGHTYFVNITVAGDELDDSGFLVNFQHLKKLVHDKFDHTLMNDHKELFNHQNSSDFPTTEVVARKIWEIVQNYLDTLPNQPKCLQVFVRETPTSYVVYRPKAGKQ

SEQ ID NO: 17517 - protein, 133 aa, unidentified
  source 1..133: note = Anseongella ginsenosidimutans
  REGION 1..133: note = tr|A0A4R3KXY9|A0A4R3KXY9_9SPHI 6-carboxy-5,6,7,8-tetrahydropterin synthase OS=Anseongella ginsenosidimutans OX=496056 GN=EDD80_10232 PE=3 SV=1
MILVTRKEHFNAAHKLENPDWTDEKNREIFGKCANKNWHGHNYQLFVTVKGEPDPETGYVTDLKKLSTIIREHIIEKVDHKNLNLDVDFMQGVLASTENLAIAIWDQLERHIDGLHCVRLYETENNFVEYFGK

SEQ ID NO: 17518 - protein, 136 aa, unidentified
  source 1..136: note = Antarcticibacterium flavum
  REGION 1..136: note = tr|A0A5B7X7I6|A0A5B7X7I6_9FLAO 6-carboxy-5,6,7,8-tetrahydropterin synthase; OS = Antarcticibacterium flavum OX=2058175 GN=FHG64_15470; PE = 3 SV=1
MKVTVHRKAHFNAAHRLYRKDWDDVKNENVFGKCSNPNYHGHNYDLVVAVTGEIDPETGFVVDMKYLKDLIAAEVETALDHKNLNVEVEEFRDLNPTAENIAVVIWNKLRPHLQEELELAVTLYETARNYVTYTGN

SEQ ID NO: 17519 - protein, 136 aa, unidentified
  source 1..136: note = Antarcticibacterium sp.
  REGION 1..136: note = tr|A0A5B8YI74|A0A5B8YI74_9FLAO 6-carboxy-5,6,7,8-tetrahydropterin synthase; OS = Antarcticibacterium sp. PAMC 28998 OX=2585771; GN = FK178_07880 PE=3 SV=1
MKVTVNRKAHFNAAHRLYRKDWDDSKNENVFGKCSNPNFHGHNYELVVSVTGEIDKETGFVVDMKILKDLIYSEIEIAFDHKNLNVEVAEFKELNPTAENIAVVIWNKLKPKLKPELELAITLYETPRNFVTYKGE

SEQ ID NO: 17520 - protein, 157 aa, unidentified
  source 1..157: note = Antarcticibacterium sp.
  REGION 1..157: note = tr|A0A5B8YL14|A0A5B8YL14_9FLAO 6-carboxytetrahydropterin synthase OS=Antarcticibacterium sp. PAMC 28998 OX=2585771 GN=FK178_12015 PE=4 SV=1
MSRIRITKQFSFETGHALYGYDGKCKNVHGHSYKLSVTVIGTPITDKANVKYGMVIDFGDLKKIVKSEVVDVFDHATVFNRNTPHIELAKELENRDHSVILVDYQPTSENMVVDFAEKISSRLPAHISLFSLKLQETDTSFAEWFAGDQVDNPTPKG

SEQ ID NO: 17521 - protein, 141 aa, Aphanizomenon flosaquae
  REGION 1..141: note = tr|A0A1B7VRU3|A0A1B7VRU3_APHFL 6-carboxy-5,6,7,8-tetrahydropterin synthase; OS = Aphanizomenon flos-aquae LD13 OX=1710894 GN=AN481_14835; PE = 3 SV=1
MTSKSESESFLETWIIGKEFRFEAAHQLPNHDGKCSRLHGHSWRGVVYVAGDKLINSGVKQGMIMDYGDISKYIKPLLENYLDHYHLNESTGLTNPTSEAIAKWIYEQLEPQIPGLVAVRIDETCTSQCIYSKGKVNFLGF

SEQ ID NO: 17522 - protein, 143 aa, Aphanizomenon flosaquae
  REGION 1..143: note = tr|A0A0B0QP99|A0A0B0QP99_APHFL 6-carboxy-5,6,7,8-tetrahydropterin synthase; OS = Aphanizomenon flos-aquae 2012/KM1/D3 OX=1532906; GN = OA07_05570 PE=3 SV=1
MTNQQWLLAKEFRFEAAHKLPYHDGKCSRLHGHSWRGVVYVAGDRLVTEGTKQGMVMDYSEIKKYLQPLLENYLDHYYLNESMGLESPTSEAIAAWIYDKLEQAGLAGLTAVRIDETCTSICLYSKNRISGWLNSGESINLLP

SEQ ID NO: 17523 - protein, 308 aa, unidentified
  source 1..308: note = Aphanocapsa feldmannii
  REGION 1..308: note = tr|A0A524RUL5|A0A524RUL5_9CYAN 6-pyruvoyl tetrahydropterin synthase OS=Aphanocapsa feldmannii 277cI; OX = 2507554 GN=ERJ68_02820 PE=4 SV=1
MTALMAAKPVAPAIVSHGKGRSCVITRRACFSASHRYWLPELSAAENEARFGPCSLAPGHGHNYELVVAMAGLLDANGMVLNLSDVKHHIREQVTAQLDFRCLNNCWEDFQRTLPTTEYLACCIWRRLQTHLPVVGIRVYEQPRLWADYLGNDLEAFLTISTHFAAAHRLARAELSQTENEAIYGKCARIHGHGHNYHLDVTVRGRIDPRSGMLCDLARLQQVVEEWVTEPFDHTFLNKDVAFFADTVPTAENIALHIADLLRVPITDCGAVLHKVRLQESPNNAAEVFVESPQLDMGSRTLAVLADA

SEQ ID NO: 17524 - protein, 121 aa, unidentified
  source 1..121: note = Aphanocapsa feldmannii
  REGION 1..121: note = tr|A0A524RJ35|A0A524RJ35_9CYAN 6-carboxytetrahydropterin synthase (Fragment); OS = Aphanocapsa feldmannii 288cV OX=2507555 GN=ERJ69_02485; PE = 4 SV=1
MAGRFTCSKTFPELPCSHRQWRHAGHCRFVHGYSRSFTCWFEASRLDENGFVVDFSSLKPLRARLLAQFDHTFLASADDPLLPDWRQLHALGALDLRVMDNVGMEASAVLVWGWANDLLLE

SEQ ID NO: 17525 - protein, 320 aa, unidentified
  source 1..320: note = Aphanothece cf.
  REGION 1..320: note = tr|A0A2T1EST5|A0A2T1EST5_9CHRO 6-pyruvoyl tetrahydropterin synthase OS=Aphanothece cf. minutissima CCALA 015 OX=2107695 GN=C7B81_15860 PE=4 SV=1
MTATRLTAPPAAPSPTRAAHGRGRPCVITRRATFSASHLYRLPELDDAENTRRFGRCSLAPGHGHNYELTVAMGGPLDADGMVLNLSDVKHAIRREVTEPLDFRFLNEVWPEFDLSRPEGRLPTTEALLQAIRQRLAPHLPLVALRLHEHPNLWADVLCGPTIDPMEAFLSIRTHFAAAHRLARPELSQSENEAIYGKCARPHGHGHNYLLDVTVRGPIDARTGMVCDLAELQRLVDDLVVEPFDHTFLNKDVEHFAGCVPTAENIALHIADLLSAPIAATGARLHKVRLQESPNNAAEVFAETPQLEMVPAALEALAAV

SEQ ID NO: 17526 - protein, 170 aa, unidentified
  source 1..170: note = Aphanothece cf.
  REGION 1..170: note = tr|A0A2T1EXB8|A0A2T1EXB8_9CHRO 6-pyruvoyl tetrahydropterin synthase OS=Aphanothece cf. minutissima CCALA 015 OX=2107695 GN=C7B81_10590 PE=4 SV=1
MSTPAAHTCSKSYGGFPCCHRQWRHPGHCHFVHGYSRSFTFWFAAHHLDVHGFVVDFSSLQPLRSRLEQQFDHTFLVNHDDPLLAQWQDLHDQGALDLRVMANVGMEASAELAWGWANELLGPRDGGRSCCWRVEARENEANAARFTAIPEWFEAGTAKAPATPEPWPAP

SEQ ID NO: 17527 - protein, 126 aa, unidentified
  source 1..126: note = Aphanothece hegewaldii
  REGION 1..126: note = tr|A0A2T1LV52|A0A2T1LV52_9CHRO 6-carboxy-5,6,7,8-tetrahydropterin synthase OS=Aphanothece hegewaldii CCALA 016 OX=2107694 GN=queD PE=3 SV=1
MQEWIIYKEFRFEAAHKLPHHEGKCRRLHGHSWVGRIYVKGNELMTEGSQQGMIIDYGEIKKYIEPLLDQFLDHYYLNETTGLENPTSELLAKWIYEQLESAKLPGLYAVEIHETCTSGCMYRKLD

SEQ ID NO: 17528 - protein, 288 aa, unidentified
  source 1..288: note = Aphanothece hegewaldii
  REGION 1..288: note = tr|A0A2T1LV17|A0A2T1LV17_9CHRO 6-pyruvoyl tetrahydropterin synthase OS=Aphanothece hegewaldii CCALA 016 OX=2107694 GN=C7H19_16050 PE=4 SV=1
MDCIINRRAQFSASHRYWLPELDEAENQRLFGAGSRFPGHGHNYVLYVSIAGKLDQYGMVENLSYVKQVIKKEITSQLDYAYLNDVWPEFSETLPSTENIARIIWQRLAPHLPIVNIQLFEHPELFADYQGNNMEASLTVKTHFSAAHRLALPELSLEENTEIYGKCARTNGHGHNYHLEVSVVGEIDSRTGMIVDLGDLQKIINDYVVEPFDHTFLNKDVPYFTQTVPTAENIAFYIAQLLQQPIKEIGAELDKVKLIESPNNSCEIFCRKSTRQLNSLQREAVLVG

SEQ ID NO: 17529 - protein, 132 aa, unidentified
  source 1..132: note = Aphanothece sacrum
  REGION 1..132: note = tr|A0A401IN62|A0A401IN62_APHSA 6-carboxy-5,6,7,8-tetrahydropterin synthase OS=Aphanothece sacrum FPU1 OX=1920663 GN=AsFPU1_4115 PE=3 SV=1
MNSFSTDQWLIYKEFRFEAAHQLLHHDGKCRRLHGHSWVGRVYVIGDRLITEGPKQGMIMDFADIQQHLDPLIENFLDHYYLNESTGLENPSCEAIAKWIFEKLEGAGLEGLQAVEIQETCTSGARYMRIKP

SEQ ID NO: 17530 - protein, 326 aa, unidentified
  source 1..326: note = Aphanothece sacrum
  REGION 1..326: note = tr|A0A401IKW5|A0A401IKW5_APHSA 6-pyruvoyltetrahydropterin synthase OS=Aphanothece sacrum FPU1 OX=1920663 GN=AsFPU1_3312 PE=4 SV=1
MAGTGDPKNFSANNDILKERESLLNFTKFLILTKPMQCIINRRAQFSASHRYWLPEWDEAQNREKFGVASQFPGHGHNYVLSVSLVGEIDTYGMVENLSIVKKVIKQEVTSQLDYGYLNDVWPEFEDTLPTTENIARVIWQRLAPRLPLVKIQVFEHPQLWADYQGNAMKATLTVQTHFSAAHRLALPELTLEQNSEIYGKCARIHGHGHNYHLEVSVAGEIDPRTGMLVDLDGLHQVINDYVVEPFDHSFLNKDIPYFAQVVPTAENIALHIAQLLQKPIQELGAELDKVKLIESPNNSCEIYCNQSLQPQEILSYREPALTGIK

SEQ ID NO: 17531 - protein, 149 aa, unidentified
  source 1..149: note = Apibacter adventoris
  REGION 1..149: note = tr|A0A2S8A7X6|A0A2S8A7X6_9FLAO 6-carboxy-5,6,7,8-tetrahydropterin synthase OS=Apibacter adventoris OX=1679466 GN=C4S77_10705 PE=3 SV=1
MIRLTKIFTFETAHALWGYDGKCKNIHGHSYKLYVTIKGIPVDDLDDKKNGMVMDFSDLKLIVNSLIIDPLDHGVVLNAQSKHKDLGERLIAEGHKVIFTDYQPTCENMLIDFAKKIQAKLPQNILLVKLKLYETETSYGEWRLEDQMK

SEQ ID NO: 17532 - protein, 147 aa, unidentified
  source 1..147: note = Apibacter mensalis
  REGION 1..147: note = tr|A0A0X3ANP6|A0A0X3ANP6_9FLAO 6-pyruvoyltetrahydropterin/6-carboxytetrahydropterin synthase OS=Apibacter mensalis OX=1586267; GN = Ga0061079_10387 PE=4 SV=1
MIRLTKIFTFETAHALWGYDGKCKNIHGHSYKLYVTVKGEPCNDIHHVKNGMVMDFGDLKSIVKKLIINPLDHAIILNAQTEHKKLGEQLQNQGHKVIFMNYQPTCENMLMDFADKIQLELPENIILAKLKLYETETSYGEWIREDQ

SEQ ID NO: 17533 - protein, 147 aa, unidentified
  source 1..147: note = Apibacter sp.
  REGION 1..147: note = tr|A0A2S8AD02|A0A2S8AD02_9FLAO 6-carboxy-5,6,7,8-tetrahydropterin synthase OS=Apibacter sp. wkB309 OX=1679467 GN=C4S75_00210 PE=3 SV=1
MIRLTKIFTFETAHALWGYDGKCKNIHGHSYKLYVTVKGEPCNDIHHVKNGMVMDFGELKSIVKKLIINPLDHAIILNAQTEHKQLGEQLQNQGHKVIFMNYQPTCENMLIDFAEKIQSELPENILLAKLKLYETETSYGEWIREDQ

SEQ ID NO: 17534 - protein, 147 aa, unidentified
  source 1..147: note = Apibacter sp.
  REGION 1..147: note = tr|A0A563DI42|A0A563DI42_9FLAO 6-carboxy-5,6,7,8-tetrahydropterin synthase OS=Apibacter sp. AL1 OX=2509005 GN=ETU09_01865 PE=3 SV=1
MIRLTKIFTFETAHALWGYDGKCKNIHGHSYKLYVTIKGNPLEDLNHKKNGMVMDFGDLKSIIKKLIIDPLDHAILLNVNSKHKELGEKLLLEGHKVVFTPYQPTCENMLLDFASKISSQLPEPIVLAKLKLFETETSYGEWILEDQ

SEQ ID NO: 17535 - protein, 118 aa, Aquabacter spiritensis
  REGION 1..118: note = tr|A0A4R3M7W2|A0A4R3M7W2_9RHIZ 6-carboxy-5,6,7,8-tetrahydropterin synthase OS=Aquabacter spiritensis OX=933073 GN=EDC64_101236 PE=3 SV=1
MRITQAFTFEAAHRLPHVKQTHKCFRMHGHSYRVELVLDGPVDPVTGFVADFFDVEAAFAPLLDRLDHHCLNDIEGLDNPTAEHIAIWIWTRTKPLLAPLAVVRVFETPLSWAEYDGR

SEQ ID NO: 17536 - protein, 131 aa, Aquabacter spiritensis
  REGION 1..131: note = tr|A0A4R3M3C8|A0A4R3M3C8_9RHIZ 6-pyruvoyl-tetrahydropterin synthase OS=Aquabacter spiritensis OX=933073 GN=EDC64_10140 PE=4 SV=1
MFAVEVRDHIMIAHSFTGAAFGPAQALHGATFVVDVAFFSAELTADGVVVDIGRAHDALKAILAPLSYRNLDVLPEFTGRNTTTEVVCKHIFDHMADAVRAGTLGDPAPSRLRVTLQESHVARAWYEADIA

SEQ ID NO: 17537 - protein, 129 aa, Aquabacterium commune
  REGION 1..129: note = tr|A0A4R6RI63|A0A4R6RI63_9BURK 6-carboxy-5,6,7,8-tetrahydropterin synthase; OS = Aquabacterium commune OX=70586 GN=EV672_102383 PE=3 SV=1
MFELSQTFAFDAAHTLKRQVSPEEAAGSRRIHGHTYTAEVIVRGERQADSGMVVDLAELRAVIAGIRNQLDHHFLDEVAGLGAPTLENLCVFIHERARQQIPQVSAVVVSRAAGDRCEYRPGPDHGAAA

SEQ ID NO: 17538 - protein, 124 aa, unidentified
  source 1..124: note = Aquabacterium olei
  REGION 1..124: note = tr|A0A2U8FNR6|A0A2U8FNR6_9BURK 6-carboxy-5,6,7,8-tetrahydropterin synthase; OS = Aquabacterium olei OX=1296669 GN=DEH84_02900 PE=3 SV=1
MMFELSQTFSFDAAHTLKRHVSPEEAAGSRRIHGHTYTAEVTVRGERQPESGMVVDLAVLREVLAEIRSQLDHHFLDEVAGLGAPTLENLSVFIHDHVQRRIPQVSSVAVSRAAGDRCVYRPQA

SEQ ID NO: 17539 - protein, 366 aa, unidentified
  source 1..366: note = Aquabacterium olei
  REGION 1..366: note = tr|A0A2U8FNV8|A0A2U8FNV8_9BURK 6-pyruvoyl tetrahydropterin synthase OS=Aquabacterium olei OX=1296669; GN = DEH84_00165 PE=4 SV=1
MSIATLFAASSTFESARQVGVLPADHPARRLHGHSFTAKVRASLDAGWAPWPGGDVSELAGLLGACTAQLDYRHLNELLPVPTDENLARWVRDQLQVSVPGLEQVGIQSTSDQGVDLDANDHAHIWRRYRFQSAHKLPNVPFGHKCGRLHGHGFEVILHANQDAGGRDLSIDYDHLDAIWAPFHYQLHHKYLNAIEGLENPTSEVIAGWLWQRLKAVLPELSWVTVYETGSCGANFNGHDYRIWKEMTLDSALFLRNAPADDPLSHIHGHTYTMRLHLSAPLDQVMGWTVDFGDVKERFNPIFKALDHHPLHELPGLEDCDAGSLARWVLAEGRRALPQIDRVDMYETRGCGAIALMDRDGPALPI

SEQ ID NO: 17540 - protein, 123 aa, Aquabacterium sp.
  REGION 1..123: note = tr|A0A521ZNG5|A0A521ZNG5_9BURK 6-carboxy-5,6,7,8-tetrahydropterin synthase; OS = Aquabacterium sp. OX=1872578 GN=EPO09_09375 PE=3 SV=1
MFELSQSFSFDAAHTLKRKVSAEEAAGSRRIHGHTYTAEIYVRGERQPESGMVVDLAVVREVIAGIRNQLDHHFLDEVAGLGAPTLENLCVFIYAQAKKQIPQVSSVAVSRAAGDRCVYRPTH

SEQ ID NO: 17541 - protein, 123 aa, Aquabacterium sp.
  REGION 1..123: note = tr|A0A0A0DPJ7|A0A0A0DPJ7_9BURK 6-carboxy-5,6,7,8-tetrahydropterin synthase; OS = Aquabacterium sp. NJ1 OX=1538295 GN=JY96_07020 PE=3 SV=1
MFELSQTFSFDAAHTLKRKVSAEEAAGSRRIHGHTYTAEIFVRGERQPESGMVVDLAVLREVIAGIRGQLDHHFLDEVSGLGAPTLENLCVFIYAQARLHIPQVSSVAVSRAAGDRCVYRPTH

SEQ ID NO: 17542 - protein, 118 aa, Aquamicrobium sp.
  REGION 1..118: note = tr|A0A4U6C3B8|A0A4U6C3B8_9RHIZ 6-carboxy-5,6,7,8-tetrahydropterin synthase; OS = Aquamicrobium sp. LC103 OX=1120658 GN=queD PE=3 SV=1
MFRITKEFHFSASHQLKKLPSEHPCARLHGHNYVVEVELSGETLDENGFVRDYHDLAVFKRYIDDTFDHRHLNDVFGHDAVTAEWLARHFYEWCRMRLPEISAVRVSETPKTWAEYRP

SEQ ID NO: 17543 - protein, 330 aa, Aquaspirillum sp.
  REGION 1..330: note = tr|A0A1U9JIN9|A0A1U9JIN9_9NEIS Uncharacterized protein OS=Aquaspirillum sp. LM1 OX=1938604 GN=BXU06_01985; PE = 4 SV=1
MPGLMYTASAGFEAARRIRTASDMRRCLHGHSFLLNARWAENLGTLSPEHVRQAVAPLDYADLNQALAVPDDATLLTQLADALPGHAGLWLRSAPDRGVLCSPHGGPLLHWLQVSFEAAHRLPNVPAGHQCGRLHGHGFGVTLCARNTHAELEQAWQGLHPQLHQRLLNDIPGLANPTSEVLSHWLWQQLANQLALDHVIVRETATAGSQFNGQDYRIWKTQRFEAATPFDAQGCYTGHSYSLRLHLAGTLDQVMGWVLDFGDVKTRFKPFYQQLDHHPLDQVAGLADFSCAGIARWAAEQLQADTPELTRVDVYQRPGEGALYECDGEG

SEQ ID NO: 17544 - protein, 165 aa, Aquicella lusitana
  REGION 1..165: note = tr|A0A370GH15|A0A370GH15_9COXI 6-pyruvoyltetrahydropterin/6-carboxytetrahydropterin synthase OS=Aquicella lusitana OX=254246 GN=C8D86_11553; PE = 4 SV=1
MVRFASLAIQKEELSFSAGHFTIFSATEREQLHGHNYYVSIEFLIKIEHNGLSFDYRHYKRKMLTLCDQLDRHFLLPSQSPYLRLEDSGEYWIAHFNQRKLPFLKEDIVLLPLTNITIEELSHWFLQKILDDSKQLAEHSIHGVTVKVYNGPGQSAGASWDKSAS

SEQ ID NO: 17545 - protein, 162 aa, Aquicella siphonis
  REGION 1..162: note = tr|A0A5E4PJV9|A0A5E4PJV9_9COXI Uncharacterized protein OS=Aquicella siphonis OX=254247 GN=AQUSIP_20840; PE = 4 SV=1
MRVASLEIHKEEFSFSAGHFTIFSATEREQLHGHNYHVSIAFKKVIQNNGLSFDYRVYKKKIHALCAQLDRHFLLPGQSQYLRLEEEGDYWLAHFNNKKIPFLKEDVVILPLSNITIEELSHWFLQKILEDAQEVKNHGIRGIIVKVYNGPGQSGGAAWGEN

SEQ ID NO: 17546 - protein, 162 aa, unidentified
  source 1..162: note = Aquifex aeolicus
  REGION 1..162: note = sp|O66626|QUED_AQUAE 6-carboxy-5,6,7,8-tetrahydropterin synthase OS=Aquifex aeolicus (strain VF5) OX=224324 GN=queD PE=3 SV=1
MKWEISKTFRFEAGHRVWKQNLTYGRGAQFTKEKPVNKCVNLHGHSYVLEVTVGSDTLSEQDMVMDFYHVKNALKGLIEEIDHSFIIDVNDPMYPELKDVAEKYGAMKIFPVEFCPTAEALAKFFYDFLKKRLEEAGLLGEVKVVKVVLWETATSKAEYKEE

SEQ ID NO: 17547 - protein, 114 aa, unidentified
  source 1..114: note = Aquifex aeolicus
  REGION 1..114: note = tr|O67020|O67020_AQUAE 6-carboxy-5,6,7,8-tetrahydropterin synthase OS=Aquifex aeolicus (strain VF5) OX=224324 GN=aq_853 PE=3 SV=1
MPWIVRVKRKFNAAHFLTDYHGKPEPLHGHTWTVEVFIKAEELDKGGMGVDFVEIDNFLKDILPDYTLLNDVFDFSPSAENVAKGLYKKVKEKYPNLVKVVVWETETCGAEYYE

SEQ ID NO: 17548 - protein, 115 aa, Aquifex sp.
  REGION 1..115: note = tr|A0A432PY16|A0A432PY16_9AQUI 6-carboxy-5,6,7,8-tetrahydropterin synthase OS=Aquifex sp.; OX = 313370 GN=DSY42_05420 PE=3 SV=1
MPWTIRVKRKFYAAHFLTDYHGSPEPLHGHTWTVEVYLKADELDKGGMGIDFVEIDKYLKEILPDYKLLNEVFDFSPSAENVAKWLYYKVKEKYPSVVKVVVWETENCGAEYYET

SEQ ID NO: 17549 - protein, 162 aa, Aquifex sp.
  REGION 1..162: note = tr|A0A432Q122|A0A432Q122_9AQUI 6-carboxy-5,6,7,8-tetrahydropterin synthase OS=Aquifex sp.; OX = 313370 GN=DSY42_02420 PE=4 SV=1
MKWEISKTFRFEAGHRVWKQNLTYGRGAQFTKEKPVNKCVNLHGHSYVLEVTVGSDTLSEQDMVMDFYHVKNALKDLIDEIDHSFIIDVNDPMYPELKEVAEKYGAMKIFPVEFCPTAEALAKFFYDFLKRKLEEAGLLGEIKVIKVTLWETATSKAEYKEE

SEQ ID NO: 17550 - protein, 115 aa, unidentified
  source 1..115: note = Aquificaceae bacterium
  REGION 1..115: note = tr|A0A350D0Q6|A0A350D0Q6_9AQUI 6-carboxy-5,6,7,8-tetrahydropterin synthase; OS = Aquificaceae bacterium OX=2053503 GN=DCX31_03470 PE=3; SV = 1
MPWNVIVKKKFSWAHFLTDYHGAPEPVHGHTWIVEVHIRADKVDAGGMGIDFLEIEEFLKKLLPDYVLLNDIVDFSPSAENMAKWIYERVKEKFPTVSKVLVWEKEDCGAEYWEG

SEQ ID NO: 17551 - protein, 164 aa, unidentified
  source 1..164: note = Aquificaceae bacterium
  REGION 1..164: note = tr|A0A3D3RTF5|A0A3D3RTF5_9AQUI 6-carboxy-5,6,7,8-tetrahydropterin synthase; OS = Aquificaceae bacterium OX=2053503 GN=DIT36_06465 PE=4; SV = 1
MKWQITKTFRFEAGHRVWKQNLTCGRGAELTLGKEVPVNKCVNLHGHSYLLEVVIGSNVLSEQEMVLDFYHVKNALKDLIDTIDHSFIIDVKDPMYEELKTVAEKYGALKIFPVDFCPTAEALAKFFYDFLVEKLSQVGLLGEVKVVKVVLWETATSKAEYYGE

SEQ ID NO: 17552 - protein, 117 aa, unidentified
  source 1..117: note = Aquificae bacterium
  REGION 1..117: note = tr|A0A3M2B133|A0A3M2B133_9BACT 6-carboxy-5,6,7,8-tetrahydropterin synthase OS=Aquificae bacterium OX=2202151 GN=D6699_00040 PE=3 SV=1
MPWTVVVKKQFNWAHYLTNYHGAPEPLHGHTWTVELHIYADRVDEGGMGYDFVEVKKFLEELLPDYRLLNELVDFSPSAENMAKWIYQKVKQRYPTLKKVVVWETPEGGAEYYEEGL

SEQ ID NO: 17553 - protein, 164 aa, unidentified
  source 1..164: note = Aquificae bacterium
  REGION 1..164: note = tr|A0A3M2AU15|A0A3M2AU15_9BACT 6-carboxytetrahydropterin synthase OS=Aquificae bacterium; OX = 2202151 GN=D6699_01885 PE=4 SV=1
MKWVISKTFRFEAGHRVWKQNLTHGRGAQFTLGRELPVNKCVNLHGHSYVLEVYLGSDRLSEQDMVIDFYHVKNALKDLIDTIDHSFIIDINDPMYPELKALAEKYGALKLFPVDFCPTAEALAKFFYDFLKEKLSQAGLLEEVKVIKVVLWETATSKAEYSEL

SEQ ID NO: 17554 - protein, 140 aa, Aquiflexum balticum
  REGION 1..140: note = tr|A0A1W2H284|A0A1W2H284_9BACT 6-pyruvoyltetrahydropterin/6-carboxytetrahydropterin synthase OS=Aquiflexum balticum DSM 16537 OX=758820; GN = SAMN00777080_1594 PE=4 SV= 1
MVHVCRKEHFNAAHKLWNPNWSEEKNKEVFGPCSNINWHGHNFELIVTVKGLPDPETGFVVDLKALSTLIRTLVIDKVDHKNLNMDVDFMQGKMASCENLVMEFWKILEPAVNEIVPHGSLYKLTLYETPRNFVEYFGED

SEQ ID NO: 17555 - protein, 136 aa, Aquiflexum balticum
  REGION 1..136: note = tr|A0A1W2H2T3|A0A1W2H2T3_9BACT 6-pyruvoyltetrahydropterin/6-carboxytetrahydropterin synthase OS=Aquiflexum balticum DSM 16537 OX=758820; GN = SAMN00777080_1825 PE=4 SV= 1
MKVAVYRKEHFNAAHRLYNPNWSDEKNQMIFGKCNNPHYHGHNYELIVKLVGEIDPDTGYVYDMKILSDLIKENVLNRFDHKNLNLDTDEFRTINPTAENIAVVIWNILRKKIDSKHELIIRLYETERNFVEYNGN

SEQ ID NO: 17556 - protein, 136 aa, unidentified
  source 1..136: note = Aquimarina aggregata
  REGION 1..136: note = tr|A0A162WRP1|A0A162WRP1_9FLAO 6-carboxy-5,6,7,8-tetrahydropterin synthase OS=Aquimarina aggregata OX=1642818 GN=AWE51_16995 PE=3 SV=1
MRIKACRKAHFNAAHRLYRKDWSDEKNAQVFGKCSNPKYHGHNYELIVSVIGEIDPETGFLIDLKILKDYIKSEVEDYMDHKNLNEEVAEFADLNPTAENIAVVIWNRLRNKIESKFDIEVTLYETPRNFVTYTGE

SEQ ID NO: 17557 - protein, 150 aa, unidentified
  source 1..150: note = Aquimarina aggregata
  REGION 1..150: note = tr|A0A162ZAG2|A0A162ZAG2_9FLAO 6-pyruvoyl tetrahydropterin synthase OS=Aquimarina aggregata; OX = 1642818 GN=AWE51_08440 PE=4 SV=1
MSKIRITKQFSFETGHALYGYDGKCRNVHGHSYKLSVTVIGTPITDTSHVKLGMVIDFGDLKKIVKEDIEDVFDHATVFNKNTPHKELAKELADRGHNVILVDYQPTSENMVIDFAQKIKDRLPGNIQLHSLKLQETETSYAEWFASDNS

SEQ ID NO: 17558 - protein, 150 aa, unidentified
  source 1..150: note = Aquimarina algiphila
  REGION 1..150: note = tr|A0A554VGD2|A0A554VGD2_9FLAO 6-carboxytetrahydropterin synthase OS=Aquimarina algiphila; OX = 2047982 GN=FOF46_19925 PE=4 SV=1
MSKIRITKQFSFETGHALYGYDGKCRNVHGHSYKLSVTVIGTPISDTSHVKLGMVIDFGDLKKIVKEDIEDVFDHATVFNKNTPHVELAKELQDRGHNVILVDYQPTSENMVIDFSKKIKARLPENIKLHSLKLQETETSYAEWYASDNQ

SEQ ID NO: 17559 - protein, 136 aa, unidentified
  source 1..136: note = Aquimarina algiphila
  REGION 1..136: note = tr|A0A554VAJ9|A0A554VAJ9_9FLAO 6-carboxy-5,6,7,8-tetrahydropterin synthase OS=Aquimarina algiphila OX=2047982 GN=FOF46_29960 PE=3 SV=1
MRIKACRKAHFNAAHRLYRKDWSDEKNLEVFGKCSNPRYHGHNYELIVALIGDIDPETGYLMDLKILKDYIKTEVEEYMDHKNLNEEVEEFKDTNPTVENIAVVIWNRLRNKINLVYDLEVTLYETPRNFVIYDGK

SEQ ID NO: 17560 - protein, 136 aa, unidentified
  source 1..136: note = Aquimarina amphilecti
  REGION 1..136: note = tr|A0A1H7PD26|A0A1H7PD26_9FLAO 6-carboxy-5,6,7,8-tetrahydropterin synthase OS=Aquimarina amphilecti OX=1038014 GN=SAMN04487910_2174 PE=3 SV=1
MRIKACRKAHFNAAHRLYRKDWSDEKNTQIFGKCSNPRYHGHNYELDVAVIGDVDPETGFLIDLKILKDYIKSEVEDYMDHKNLNEEVEEFKKLNPTAENIAIVIWNRLRKKLDLRYDIEVTLFETPRNYVIYDGK

SEQ ID NO: 17561 - protein, 150 aa, unidentified
  source 1..150: note = Aquimarina amphilecti
  REGION 1..150: note = tr|A0A1H7K9U5|A0A1H7K9U5_9FLAO 6-pyruvoyltetrahydropterin/6-carboxytetrahydropterin synthase OS=Aquimarina amphilecti OX=1038014; GN = SAMN04487910_1255 PE=4 SV=1
MSKIRITKQFSFETGHALYGYDGKCKNVHGHSYKLSVTVIGSPITDTSHVKLGMVIDFGDLKKIVKEDIEDVFDHATVFNKNTPHVELAEELQKRGHNVILVDYQPTSENMVIDFAKKIKARLPENILLHSLRLKETETSYAEWYASDND

SEQ ID NO: 17562 - protein, 150 aa, unidentified
  source 1..150: note = Aquimarina atlantica
  REGION 1..150: note = tr|A0A023BZJ4|A0A023BZJ4_9FLAO 6-pyruvoyl tetrahydropterin synthase OS=Aquimarina atlantica; OX = 1317122 GN=ATO12_09900 PE=4 SV=1
MSKIRITKQFSFETGHALYGYDGKCRNVHGHSYKLSVTVIGTPITDTSHVKLGMVIDFGDLKKIVKEDIEDVFDHATVFNKNTPHIELAKELEKRGHNVILVDYQPTSENMVIDFAKKITSRLPEGITLFSLKLQETETSFAEWYASDNK

SEQ ID NO: 17563 - protein, 136 aa, unidentified
  source 1..136: note = Aquimarina atlantica
  REGION 1..136: note = tr|A0A023BSX0|A0A023BSX0_9FLAO 6-carboxy-5,6,7,8-tetrahydropterin synthase OS=Aquimarina atlantica OX=1317122 GN=ATO12_18980 PE=3 SV=1
MRIKACRKAHFNAAHRLYRKDWSDEKNLQIFGKCSNPKYHGHNYELVVAVIGETDPETGFLMDLKILKEYIKTEVEDYMDHKNLNEEVEEFKSLNPTVENIAYVIWNRLRKKIAPQYDIEVTLYETPRNFVIYKGE

SEQ ID NO: 17564 - protein, 149 aa, Aquimarina brevivitae
  REGION 1..149: note = tr|A0A4Q7PI80|A0A4Q7PI80_9FLAO 6-carboxy-5,6,7,8-tetrahydropterin synthase OS=Aquimarina brevivitae OX=323412 GN=EV197_0740 PE=3 SV=1
MSKIRITKQFSFETGHALYGYDGKCRNVHGHSYKLSVTVIGTPITDTNHVKLGMVIDFSDLKKIVKEEVEDVFDHATVFNKNTPHIELAKELETRGHNVILVDYQPTSENMVIDFAEKIKARLPKEIALYSLKLQETETSYAEWFAADN

SEQ ID NO: 17565 - protein, 136 aa, Aquimarina brevivitae
  REGION 1..136: note = tr|A0A4Q7P012|A0A4Q7P012_9FLAO 6-carboxy-5,6,7,8-tetrahydropterin synthase OS=Aquimarina brevivitae OX=323412 GN=EV197_1672 PE=3 SV=1
MRIKACRKAHFNAAHRLYRSDWSDEKNAEIFGKCSNPHYHGHNYELIVALTGEIDPETGYLIDLKILKDHIKTEVEDYMDHKNLNEEVEEFKKLNPTVENIAVVIFNRLRAKLDTKYDIEITLYETPRNFVIYKGE

SEQ ID NO: 17566 - protein, 136 aa, Aquimarina sp.; identical to SEQ ID NO: 17556
  REGION 1..136: note = tr|A0A3A9VL48|A0A3A9VL48_9FLAO 6-carboxy-5,6,7,8-tetrahydropterin synthase OS=Aquimarina sp. AD10 OX=1714849 GN=D1816_10070 PE=3 SV=1

SEQ ID NO: 17567 - protein, 145 aa, Aquimarina sp.
  REGION 1..145: note = tr|A0A3A9VI95|A0A3A9VI95_9FLAO 6-carboxytetrahydropterin synthase OS=Aquimarina sp. BL5; OX = 1714860 GN=D1818_09925 PE=4 SV=1
MNDKVEDSLNRKVAITRREHFNAAHRLHNPDWTEEKNKKVFGKCNNPNYHGHNYELEVKVIGYVQPETGYVIDTKILSDVIKDQITGRFDHKNLNLDVAEFKNLNPTAENIAMVTYDILREHLDQKLELKIKLYETPRNYVEFPL

SEQ ID NO: 17568 - protein, 150 aa, Aquimarina spongiae
  REGION 1..150: note = tr|A0A1M6FJ67|A0A1M6FJ67_9FLAO 6-pyruvoyltetrahydropterin/6-carboxytetrahydropterin synthase OS=Aquimarina spongiae OX=570521; GN = SAMN04488508_104315 PE=4 SV=1
MNKIRITKQFSFETAHALYGYDGKCRNLHGHSYKLSVTVMGTPIADTSHVKLGMVIDFGDLKKIVKEDIEDVFDHATVFNKNTPHVELARELEQRGHDVILVDYQPTTENMILDFAERIKKKLPNTIELHSLRLQETETSYAEWYASDNE

SEQ ID NO: 17569 - protein, 136 aa, Aquimarina spongiae
  REGION 1..136: note = tr|A0A1M6D9U6|A0A1M6D9U6_9FLAO 6-pyruvoyltetrahydropterin/6-carboxytetrahydropterin synthase OS=Aquimarina spongiae OX=570521; GN = SAMN04488508_102509 PE=4 SV=1
MRIKACRKAHFNAAHRLYRKDWSAEKNQVVFGKCNNPRYHGHNYELVVGVIGEIDPETGYLIDLKILKDYIKSEVEDYMDHKNLNEEVEEFASLNPTVENIAVVIWNRLRKKIDEKFDLEITLYETPRNFVIYTGQ

SEQ ID NO: 17570 - protein, 118 aa, Aquimonas voraii
  REGION 1..118: note = tr|A0A1G6VPW4|A0A1G6VPW4_9GAMM 6-carboxy-5,6,7,8-tetrahydropterin synthase OS=Aquimonas voraii OX=265719 GN=SAMN04488509_103207 PE=3 SV=1
MEIFKVFTLEAAHRLPKVPPGHKCARLHGHSFRVEIHVEGEPDPETGWLMDFADIKTAFKPIYDRLDHHYLNDVPGLENPTSERLAIWIWEQLKPSLPELSTVVVHETCTSGCRYRGP

SEQ ID NO: 17571 - protein, 280 aa, Aquisalimonas asiatica
  REGION 1..280: note = tr|A0A1H8QV90|A0A1H8QV90_9GAMM 6-pyruvoyl tetrahydropterin synthase OS=Aquisalimonas asiatica; OX = 406100 GN=SAMN04488052_101815 PE=4 SV=1
MARLFVEQLTVIDSSRLDPVDGLVGESWIVDVEIGGSLDAQGMVFDFGDVKRELKAAIDDTVDHRLLVPEQGTGITHTEDGVAVAFASRRGPIHMSGPAHTVVVVPGARVDAAALERLLQASLLPRLPGNVTDLTVHLRHEAIDGAWYAYSHGLQAHGGACQRIAHGHRSRLIVQRDGEPARDWEQYWARRWRNVYLGTRDHLVTTTERDGVSCYGFRYTSGEGVFTLELPAAACELLETETTVEQIAAHLHGEMKDREPAVRITVRAFEGVGKGALADG

SEQ ID NO: 17572 - protein, 140 aa, Aquisalimonas asiatica
  REGION 1..140: note = tr|A0A1H8TKH7|A0A1H8TKH7_9GAMM 6-pyruvoyl-tetrahydropterin synthase OS=Aquisalimonas asiatica OX=406100 GN=SAMN04488052_104246 PE=4 SV=1
MYSLTVREHIMIAHSFRGETFGPAQQLHGATYLVDVTFRRPQLDDDNLVVDIGLASEQLRAVLAPLNYSNLDDDPALAGQNTTTEFLAGLIFRRMAEAVQAGRLGPQAHGLSHMAVVLHESHVAWASYEGRLIADSGAVG

SEQ ID NO: 17573 - protein, 134 aa, Aquisphaera giovannonii
  REGION 1..134: note = tr|A0A5B9VY68|A0A5B9VY68_9BACT 6-carboxy-5,6,7,8-tetrahydropterin synthase OS=Aquisphaera giovannonii OX=406548 GN=queD PE=3 SV=1
MFQVSREIHFCYGHRLLDYEGKCRHLHGHNGRAVITLEGLQLDERGMLLDFGDIKRTVQRWIDENLDHNMLLRRDDPILPLLRERGERVFVMEHNPTAENIARLIYERAAEHGLPVVQVVLWETENCSASYGGP

SEQ ID NO: 17574 - protein, 164 aa, Aquisphaera giovannonii
  REGION 1..164: note = tr|A0A5B9WBF3|A0A5B9WBF3_9BACT 6-pyruvoyl tetrahydropterin synthase OS=Aquisphaera giovannonii; OX = 406548 GN=OJF2_59310 PE=4 SV=1
MPSSRYKVRVTKDYLVFSSGHFITFNGDTCEPIHGHNYRTAVEVEGDLDENHYVFDFIALRDMTRAIVDELDHRMLLPTQSPHIRLSEDGPNVRATYRDRYWSFPRDECVLLPVANTTSERLAEYIAGRLREAMAGRGLAVSRVIRVEVEECFGQSAEIEWRAD

SEQ ID NO: 17575 - protein, 343 aa, Aquitalea magnusonii
  REGION 1..343: note = tr|A0A318JI65|A0A318JI65_9NEIS 6-pyruvoyltetrahydropterin/6-carboxytetrahydropterin synthase OS=Aquitalea magnusonii OX=332411 GN=DFR38_11516; PE = 4 SV=1
MHASCLLAGGRFEAARRVPGDEQRLNGLHGHSFRALARADVTHIAQNELHAALERVLAPLDYADLNQQLAQCDDLSLAQHIKDALPCPAALLLQSTPERGVMLENGTALYWIAARFEAAHHLPNVPAGHKCGRLHGHGFGVRIVANAQYCSQRQLEAAWAPLFLRLHQRYLNDIPGLENPTSEVIAAWLYHALQDAGLTGLAWVEVRETHTAGSQFDGKRFRIWKEQRFESAVPFDCHGNYSGHSYLVRLMLTGSLDRTMGWLLDFGDVKDRFKPLYRQLDHNPLDKLAGVRDGHSQSVAEWIHAHLSPLVPELARIDLMDDEHSGVSLLFHDDMRWPLLQGE

SEQ ID NO: 17576 - protein, 343 aa, Aquitalea magnusonii
  REGION 1..343: note = tr|A0A0F3K9C6|A0A0F3K9C6_9NEIS 6-pyruvoyl tetrahydrobiopterin synthase OS=Aquitalea magnusonii; OX = 332411 GN=VI06_14405 PE=4 SV=1
MHASCLLAGGRFEAARRVAGDEHRLNGLHGHSFRVLARADVTHIEQAELHTALAQVLAPLDYADLNQQLPQCDDLSLARHIKDALNCPAALLLQSAPERGVMLENGTALHWIAASFEAAHHLPHVPAGHKCGRLHGHGFGVRIVAEARQHSQAQLEAAWAPLFLRLNHHYLNDIAGLENPTSEVIAAWLYHALQDAGLTGLAWVEVRETHTAGSQFDGKRFRIWKEQRFESAVPFDSNGNYTGHSYLVRLMLTGSLDRTMGWLLDFGDVKDRFKPIYRQLDHNPLDKLAGVRDGHSQSVAEWVHAHLSPLVPELARIDLMENAHQGVSLLFHDDMRWPLLQGE

SEQ ID NO: 17577 - protein, 343 aa, Aquitalea sp.
  REGION 1..343: note = tr|A0A4P6TKW3|A0A4P6TKW3_9NEIS 6-pyruvoyl tetrahydrobiopterin synthase OS=Aquitalea sp. USM4; OX = 1590041 GN=DKK66_12095 PE=4 SV=1
MHASCLLAGGRFEAARRVAGDEHRLNGLHGHSFRVLARADVTHIEQAELHTALAQVLAPLDYADLNQQLPQCDDLSLARHIKDALNCPAALLLQSAPERGVMLENGTALHWIAASFEAAHHLPHVPAGHKCGRLHGHGFGVRIVADARQHSQAQLEAAWAPLFLRLNHRYLNDIAGLENPTSEVIAAWLYHALQDAGLTGLAWVEVRETHTAGSQFDGKRFRIWKEQRFESAVPFDSNGNYTGHSYLVRLMLTGSLDRTMGWLLDFGDVKDRFKPIYRQLDHNPLDKLAGVRDGHSQSVAEWVHAHLSPLVPELARIDLMENAHQGVSLLFHDDMRWPLLQGE

SEQ ID NO: 17578 - protein, 343 aa, Aquitalea sp.
  REGION 1..343: note = tr|A0A3N7DBG6|A0A3N7DBG6_9NEIS 6-pyruvoyl tetrahydrobiopterin synthase OS=Aquitalea sp. FJL05; OX = 2153366 GN=DBR44_14815 PE=4 SV=1
MHASCLLAGGRFEAARRVPGDEDRLNGLHGHSFRALARADLTHIEQNELHAALDRVLAPLDYADLNQQLAQCDDLSLAQHIKDALPCPAALLLQSTPQRGVMLENGTALYWIAARFEAAHHLPHVPAGHKCGRLHGHGFGVRIVANAQHCSQRQLEAAWAPLFLRLHQRYLNDIPGLENPTSEVIAAWLYGELQAAGLQGLAWVEVRETHTAGSQFDGKRFRIWKEQRFESAVPFDAAGNYSGHSYLVRLMLTGSLDRTMGWLLDFGDVKDRFKPLYRQLDHNPLDKLAGVRDGHSQSVAEWIHAHLSPLVPELARIDLMDDEHSGVSLLFHDDMRWPLLQGE

SEQ ID NO: 17579 - protein, 136 aa, unidentified
  source 1..136: note = Arachidicoccus ginsenosidivorans
  REGION 1..136: note = tr|A0A5B8VJT5|A0A5B8VJT5_9BACT 6-carboxytetrahydropterin synthase OS=Arachidicoccus ginsenosidivorans OX=496057 GN=FSB73_09145 PE=4 SV=1
MVYLTRLEHFNAAHKLYNPNWTKAHNEAVFGLCANENWHGHNFELFVTVKGNPDPDTGFLMDVKVLSQIVNDRVIEALDHKNLNIEVPFLQGKMCTTENLAMAIWDQIVPHLPDKVHLHCIKLYETPRIYVEYFGE

SEQ ID NO: 17580 - protein, 139 aa, unidentified
  source 1..139: note = Arachidicoccus ginsenosidivorans
  REGION 1..139: note = tr|A0A5B8VMI7|A0A5B8VMI7_9BACT 6-carboxytetrahydropterin synthase OS=Arachidicoccus ginsenosidivorans OX=496057 GN=FSB73_09140 PE=4 SV=1
MGQEKVAVFRKAHFNAAHRLHVESWDEQHNNEVFGKCNNPHFHGHNYELIVKVTGPVDPVTGFVVDLKLLNDVIQAEIIQRFDHKNLNLDTQEFKNLIPTAENIAIVIYQILRQKLDLALELQIRLYETERNFVEFPVA

SEQ ID NO: 17581 - protein, 137 aa, unidentified
  source 1..137: note = Arachidicoccus rhizosphaerae
  REGION 1..137: note = tr|A0A1H3VKR3|A0A1H3VKR3_9BACT 6-pyruvoyltetrahydropterin/6-carboxytetrahydropterin synthase OS=Arachidicoccus rhizosphaerae OX=551991; GN = SAMN05192529_101239 PE=4 SV =1
MVYLTRLEHFNAAHKLYNPDWTKEHNEAVFGLCANENWHGHNFELFVTVKGNPDPDTGFLMDVKALSRIVNEKVIEFLDHKNLNIEVPFLQGKMCTTENLAIAIWEQIVPHLPENVQLHRIKLYETPRIYVEYFGEN

SEQ ID NO: 17582 - protein, 139 aa, unidentified
  source 1..139: note = Arachidicoccus rhizosphaerae
  REGION 1..139: note = tr|A0A1H3VKY7|A0A1H3VKY7_9BACT 6-pyruvoyltetrahydropterin/6-carboxytetrahydropterin synthase OS=Arachidicoccus rhizosphaerae OX=551991; GN = SAMN05192529_101238 PE=4 SV =1
MGLEKVAVYRKAHFNAAHRLHVAAWDEPKNNQVFGKCNNPHFHGHNYELIVRVTGPVDPVTGFVVDLKWLNDVIQQEVILRFDHKNLNLDTQEFKTLIPTAENIAIVIYRLLRPKIDLALDLQVRLYETERNFVEFPAS

SEQ ID NO: 17583 - protein, 140 aa, unidentified
  source 1..140: note = Arachidicoccus sp.
  REGION 1..140: note = tr|A0A386HUI6|A0A386HUI6_9BACT 6-carboxy-5,6,7,8-tetrahydropterin synthase; OS = Arachidicoccus sp. KIS59-12 OX=2341117 GN=D6B99_16835; PE = 3 SV=1
MSRELVSVFRKAHFNAAHRLHVPSWSEAENTRIFDKCNNPHFHGHNYELVVKITGEVDTITGFVIDLKILNEIIQQEIIARFDHRNLNLDTQEFKTLNPTAENIAIVIYRLIRAKIDRSLDLQIRLYETERNFVEYPVSR

SEQ ID NO: 17584 - protein, 136 aa, unidentified
  source 1..136: note = Arachidicoccus sp.
  REGION 1..136: note = tr|A0A191TPX1|A0A191TPX1_9BACT 6-pyruvoyl tetrahydrobiopterin synthase OS=Arachidicoccus sp. BS20; OX = 1850526 GN=A9P82_12340 PE=4 SV=1
MVYLTRLEHFNAAHKLYNPNWSREQNDEVFGLCANENWHGHNFELYVTVKGNPNPDTGFVMDVKKLSKIIIDNVIEKLDHKNLNLDVDFMQGKLCSTENLAIGIWQQLEPHLPKDVHLHKIKLYETPRIFVEYFGE

SEQ ID NO: 17585 - protein, 133 aa, unidentified
  source 1..133: note = Arboricoccus pini
  REGION 1..133: note = tr|A0A212Q7E0|A0A212Q7E0_9PROT 6-pyruvoyl-tetrahydropterin synthase OS=Arboricoccus pini; OX = 1963835 GN=SAMN07250955_101465 PE=4 SV=1
MFNVRVRDHIMIAHSFKGDVFGPAQALHGATFVVDVTFRRKELDRHNIVVDIGLATMTLKAILAEINYRNLDDVPAFAGENTTTEFVARWIHGQMAEAIKAGKLGPDANAVDALGVELGESHTAWAGFEGPLS

SEQ ID NO: 17586 - protein, 118 aa, unidentified
  source 1..118: note = Arboricoccus pini
  REGION 1..118: note = tr|A0A212RNJ4|A0A212RNJ4_9PROT 6-carboxy-5,6,7,8-tetrahydropterin synthase; OS = Arboricoccus pini OX=1963835 GN=SAMN07250955_11157 PE=3; SV = 1
MRIVQAFTFEAAHRLPNVPASHRCSRMHGHSYRVELALEGKVDPGTGFVVDFFDVEAAFGPVLARLDHHTLNEVEGLSNPTAELIAIWIWDQVKPGLPQLASVKVFETPFCWAEHDGT

SEQ ID NO: 17587 - protein, 126 aa, Archangium gephyra
  REGION 1..126: note = tr|A0A2W5TPD9|A0A2W5TPD9_9DELT 6-pyruvoyl tetrahydropterin synthase OS=Archangium gephyra OX=48; GN = DI536_03700 PE=4 SV=1
MFEVAVRRSFTSFHHLFGGDWGAENQHHSHDYLLEVVCQGAQVDQHQYLFDISVLEKHLEAFIDTVRGKSLNELPGFEGKNPSIELFARVAAERLKPALATQKSLSGFKVVIWEHAQAWASFHQSL

SEQ ID NO: 17588 - protein, 120 aa, Archangium gephyra
  REGION 1..120: note = tr|A0A0G2ZUV9|A0A0G2ZUV9_9DELT 6-carboxy-5,6,7,8-tetrahydropterin synthase OS=Archangium gephyra OX=48 GN=AA314_05488 PE=3 SV=1
MEIFKEFTFEAAHRLPNVPAGHKCARLHGHSYRVTLHVQGPVGADSGWVMDFADLTEAFKPVHAQLDHYYLNELEGLSNPTSENLARWIWQRVRPRLPLLSQVMVRETCTSGCIYRGEND

SEQ ID NO: 17589 - protein, 120 aa, Archangium sp.
  REGION 1..120: note = tr|A0A1Q3HQE1|A0A1Q3HQE1_9DELT 6-carboxy-5,6,7,8-tetrahydropterin synthase OS=Archangium sp. Cb G35 OX=1920190 GN=BO221_13935 PE=3 SV=1
MEIFKEFTFEAAHRLPNVPPGHKCARLHGHSYRVTLHVQGPVGADSGWVMDFADLTEAFKPLHAQLDHYYLNEIEGLSNPTSENLARWIWQRMRPLLPQLSQVMVRETCTSGCIYRGEAE

SEQ ID NO: 17590 - protein, 120 aa, unidentified
  source 1..120: note = Archangium violaceum
  REGION 1..120: note = tr|A0A084SZM6|A0A084SZM6_9DELT 6-carboxy-5,6,7,8-tetrahydropterin synthase OS=Archangium violaceum Cb vi76 OX=1406225 GN=Q664_06480 PE=3 SV=1
MEIFKEFTFEAAHRLPNVPPGHKCARLHGHSYRVTLHVQGPVGADSGWVMDFADLTEAFKPLHAQLDHYYLNEIEGLSNPTSENLARWIWQRMRPLLPQLSQVMVRETCTSGCIYRGEAD

SEQ ID NO: 17591 - protein, 140 aa, Arcicella aurantiaca
  REGION 1..140: note = tr|A0A316DHB1|A0A316DHB1_9BACT 6-pyruvoyltetrahydropterin/6-carboxytetrahydropterin synthase OS=Arcicella aurantiaca OX=591202 GN=LV89_04664; PE = 4 SV=1
MVYVTRKEHFNAAHRLYNPNWTEEKNQEVFGPCANINWHGHNFELIVTVKGNPDPDTGFVIDLKLLGDIIKREIIEKVDHKNINLDVDFMQGKMASCEIFVIEIWKILAPQVESASKTAKLHCLKLVETQKNYVEYFGGQ

SEQ ID NO: 17592 - protein, 139 aa, Arcicella aurantiaca
  REGION 1..139: note = tr|A0A316EBK7|A0A316EBK7_9BACT 6-carboxy-5,6,7,8-tetrahydropterin synthase OS=Arcicella aurantiaca OX=591202 GN=LV89_01878 PE=3 SV=1
MTQKKVAVFRKEHFNAAHRLNNPNWSDEKNERVYGKCNNYNFHGHNYDLIVQVTGEIDPETGYVMDMKILSELIKCEVLDNFDHKNLNLDTEEFKDLNPSAENIAIVIYDKLRDKINKNFDLKIRLYETERNFVEYPIG

SEQ ID NO: 17593 - protein, 177 aa, unidentified
  source 1..177: note = Arcobacter anaerophilus
  REGION 1..177: note = tr|A0A4Q0XXK1|A0A4Q0XXK1_9PROT 6-carboxytetrahydropterin synthase OS=Arcobacter anaerophilus OX=877500 GN=CRV06_12385 PE=4 SV=1
MTWKISKSFDFCYGHRVWSQELNPDYSLDPCLKCRHLHGHQGKVVVFLEATKLKNGMVTDFKHLNWFKQFLDDVLDHKFIIDINDPLFETLLPHYSKEELMEFEEGYKLVDLTKIKDEPLHIKEMYEGYVLVDFVPTSENLSAWFLKITSEKMQDLGIKVASVEFAETPKSKSHVYA

SEQ ID NO: 17594 - protein, 181 aa, unidentified
  source 1..181: note = Arcobacter aquimarinus
  REGION 1..181: note = tr|A0A4V1LBR6|A0A4V1LBR6_9PROT 6-carboxytetrahydropterin synthase QueD OS=Arcobacter aquimarinus OX=1315211 GN=CP986_10780 PE=4 SV=1
MIIRKKFKFEGAHIVRNCSTKRCKTSIHGHSYKVELFFTSNKLDNGYMILDFGLTKKHIKNIIDSFDHAYSLWAEESEEFKNFFKTNSLRWIEMPVSPSAESYSLMFLKFIDHILKNTKFSNGEGDVKVTSVRVHETKTGYAEAFLSDINLIELDIKKVVFSDEIINEWKNKDELLKILSV

SEQ ID NO: 17595 - protein, 177 aa, unidentified
  source 1..177: note = Arcobacter aquimarinus
  REGION 1..177: note = tr|A0A4Q0UTB9|A0A4Q0UTB9_9PROT 6-pyruvoyl tetrahydrobiopterin synthase OS=Arcobacter aquimarinus; OX = 1315211 GN=CP986_03965 PE=4 SV=1
MHWKISKEFEFCYGHRVWSQTLNTEFSLDGCLKCRHLHGHQGKILVYLEASELKDGMVTDFKHLNWFKQFIDDVLDHKFILDINDPLFNTLLPNVKKDELIKFDENYYLVDLTKFKDDEIHIKELYEGYVLVDFVPTSENLSAWFLKIVQKKMDKLNIKVSHIEFLETPKSKSTFYA

SEQ ID NO: 17596 - protein, 177 aa, unidentified
  source 1..177: note = Arcobacter bivalviorum
  REGION 1..177: note = tr|A0A345J047|A0A345J047_9PROT 6-carboxy-5,6,7,8-tetrahydropterin synthase OS=Arcobacter bivalviorum OX=663364 GN=queD PE=4 SV=1
MTWKISKSFDFCYGHRVWSQTLNSEYSLDPCLKCRHLHGHQGQIVIFLEANELKDGMVTDFKHLNWFKQFLDDVLDHKFIIDINDPLYPTLLPHFKKEDLIYFEQGYYIPDMNKIKEEALHIKEMYEGYVIVDFVPTSENLSAWFLKIASEKMKNLGIKVSSVEFAETPKSKSHVFA

SEQ ID NO: 17597 - protein, 174 aa, Arcobacter butzleri
  REGION 1..174: note = tr|A0A2W5JTJ2|A0A2W5JTJ2_9PROT 6-carboxytetrahydropterin synthase OS=Arcobacter butzleri; OX = 28197 GN=DI567_06405 PE=4 SV=1
MKWEISKEFDFCYGHRVWSQTLNIDFSLDACLKCRHLHGHQGKVIVYLESNELNNSMVTDFKHLNWFKAFLDDVLDHKFILDINDPLFSTLVPNIKKEGLIKFDEGYFSINLTNFKNEELELYESYVVVDFVPTSENLSAWFLKIVQEKMNGLNIKVSKIEFLETPKSKSTFYA

SEQ ID NO: 17598 - protein, 174 aa, Arcobacter butzleri
  REGION 1..174: note = tr|A0A0M1UQA8|A0A0M1UQA8_9PROT Uncharacterized protein OS=Arcobacter butzleri ED-1 OX=944546 GN=ABED_1867; PE = 4 SV=1
MKWEISKEFDFCYGHRVWSQTLNIDFSLDACLKCRHLHGHQGKVIVYLESNELNNSMVTDFKHLNWFKAFLDDVLDHKFILDINDPLFSTLVPNIKKEDLIKFDEGYFSINLTNFKNEELELYESYVVVDFVPTSENLSAWFLKIVQEKMNGLNIKVSKIEFLETPKSKSTFYA

SEQ ID NO: 17599 - protein, 177 aa, unidentified
  source 1..177: note = Arcobacter canalis
  REGION 1..177: note = tr|A0A2G1CVV6|A0A2G1CVV6_9PROT 6-pyruvoyl tetrahydrobiopterin synthase OS=Arcobacter canalis; OX = 1912871 GN=CPG37_03245 PE=4 SV=1
MHWKISKEFDFCYGHRVWSQTLNTDFSLDGCLKCRHLHGHQGKILVYLEAKELKDGMVTDFKHLNWFKSFIDDVLDHKFILDINDPLFETLLPKVNKENLVKFTEGYYLVDLTKLQDEENYIIELYEGYVLVDFVPTSENLSAWFLKIVQEKMNDLGIKVSHVEFLETPKSKSTFYA

SEQ ID NO: 17600 - protein, 175 aa, Arcobacter cibarius
  REGION 1..175: note = tr|A0A5J6RGP2|A0A5J6RGP2_9PROT 6-carboxy-5,6,7,8-tetrahydropterin synthase OS=Arcobacter cibarius OX=255507 GN=queD PE=4 SV=1
MWEISKEFDFCYGHRVWSQSLNIEFSLDGCLMCRHLHGHQGKVIVYLKSDKVKDGMVTDFKHLNWFKKFLDDILDHKFIIDINDPLFSTLLPMIDKKDLIDFEEGYKTVNLKGFQNELLELYESYIIVNFVPTSENISEWLLKIVQEKMNKIDVKVSKIEFLETPKSKSTFYARS

SEQ ID NO: 17601 - protein, 181 aa, unidentified
  source 1..181: note = Arcobacter cloacae
  REGION 1..181: note = tr|A0A4Q0V6R3|A0A4Q0V6R3_9PROT 6-carboxytetrahydropterin synthase QueD OS=Arcobacter cloacae OX=1054034 GN=CP963_05245 PE=4 SV=1
MIIRKKFKFEGAHIVRNCSTKRCKTSIHGHSYKVELFFTSNKLDNGYMILDFGLTKKHIKNIIDSFDHAYSLWGEESEEFKNFFKTNSLRWVEMPVSPSAESYSLMFLKFIDHILKNTKFSNGEGDVKISSVRVHETKTGYAEAFVSDMDLIELDIKKVIFSDEIINEWKNKDELLKILST

SEQ ID NO: 17602 - protein, 177 aa, unidentified
  source 1..177: note = Arcobacter cloacae
  REGION 1..177: note = tr|A0A4V1LV79|A0A4V1LV79_9PROT 6-pyruvoyl tetrahydrobiopterin synthase OS=Arcobacter cloacae; OX = 1054034 GN=CP963_01115 PE=4 SV=1
MHWKISKEFEFCYGHRVWSQTLNTEFSLDGCLKCRHLHGHQGKILVYLEASELKDGMVTDFKHLNWFKQFIDDVLDHKFILDINDPLFDTLLPNVKKNELIKFDENYYLVDLTKFKDDEIHIKELYEGYVLVDFVPTSENLSAWFLRIVQKKMDKLNIKVSHIEFLETPKSKSTFYA

SEQ ID NO: 17603 - protein, 175 aa, Arcobacter cryaerophilus
  REGION 1..175: note = tr|A0A2S9SNC5|A0A2S9SNC5_9PROT 6-pyruvoyl tetrahydrobiopterin synthase OS=Arcobacter cryaerophilus; OX = 28198 GN=CJ669_04810 PE=4 SV=1
MWEISKEFDFCYGHRVWSQALNVEFSLDSCLMCRHLHGHQGKAIVYLKSDTLKSGMVTDFKHLNWFKKFLDDVIDHKFIIDINDPLFKTLLPNIDKKDLISFKEGYKTVDLTNFKNELLELYESYIIVDFVPTSENISAWLLKIVQNKMDKLNIKVSKVEFLETPKSKSTFYARS

SEQ ID NO: 17604 - protein, 175 aa, Arcobacter cryaerophilus
  REGION 1..175: note = tr|A0A494T2I0|A0A494T2I0_9PROT 6-carboxy-5,6,7,8-tetrahydropterin synthase OS=Arcobacter cryaerophilus D2610 OX=1032071 GN=queD PE=4 SV=1
MWEISKEFDFCYGHRVWSQSLNVEFSLDSCLMCRHLHGHQGKVIVYLKSDTLKSGMVTDFKHLNWFKKFLDDVIDHKFIIDINDPLFSTLLPNIDKKDLISFKEGYKTVDLTNFKNELLELYESYIIVDFVPTSENISAWLLKIVQNKMDKLNIKVSKVEFLETPKSKSTFYARS

SEQ ID NO: 17605 - protein, 177 aa, Arcobacter defluvii
  REGION 1..177: note = tr|A0A4Q0UNT7|A0A4Q0UNT7_9PROT 6-carboxytetrahydropterin synthase OS=Arcobacter defluvii; OX = 873191 GN=CP964_04235 PE=4 SV=1
MMWKISKEFDFCYGHRVWSQTLDVEFSLDGCLKCRHLHGHQGKILVYLEATKLNDGMVTDFKHLNWFKAFLDDVLDHKFILDINDPLFSTLLPHIDKNELIKYDENYYLVNLTKFQNLESHIKELYEGYVIVNFVPTSENLSAWFLNIVQNKMEKLGIKVSHVEFLETPKSKSTFYA

SEQ ID NO: 17606 - protein, 181 aa, Arcobacter defluvii
  REGION 1..181: note = tr|A0A4Q0UJC3|A0A4Q0UJC3_9PROT 6-carboxytetrahydropterin synthase QueD OS=Arcobacter defluvii OX=873191 GN=CP964_12460 PE=4 SV=1
MIIRKKFKFEGAHIVRNCSTNRCKKSIHGHSYIVEVFFTSNKLDNGYMILDFGLTKKHIENIIDSFDHAYSMWSEEKEEFKNFFKTNSERWIEMPVSPSAESYSLMFLKFIDHILKHTTFSNAEGDVLVTSVRVHETKTGYAEAFREDMELIELDIKKVVFSKEVINEWKEKDELIKILSF

SEQ ID NO: 17607 - protein, 177 aa, unidentified
  source 1..177: note = Arcobacter ebronensis
  REGION 1..177: note = tr|A0A4Q1AVP8|A0A4Q1AVP8_9PROT 6-pyruvoyl tetrahydrobiopterin synthase OS=Arcobacter ebronensis; OX = 1462615 GN=CRV07_06125 PE=4 SV=1
MTWKISKSFDFCYGHRVWSQELNAEFSMDSCLKCRHLHGHQGKVIIYLESNKLNNGMVTDFKHLNWFKHFLDDVLDHKFIIDINDPLFQTLLPHYNKEELLKFPQGYMLVDLTKIKDEPQHIKEMYEGYVLVDFVPTSENLSAWFLKIAAEKMSKLGIKVSSVEFEETPKSKSHVYA

SEQ ID NO: 17608 - protein, 177 aa, unidentified
  source 1..177: note = Arcobacter ebronensis
  REGION 1..177: note = tr|A0A4Q0YEJ2|A0A4Q0YEJ2_9PROT 6-pyruvoyl tetrahydrobiopterin synthase OS=Arcobacter ebronensis; OX = 1462615 GN=CRV08_05335 PE=4 SV=1
MTWKISKSFDFCYGHRVWSQELNAEFSMDSCLKCRHLHGHQGKVIIYLESNKLNNGMVTDFKHLTWFKHFLDDVLDHKFIIDINDPLFQTLLPHYNKEELVKFPQGYMLVDLTKIEDEPQHIKEMYEGYVLVDFVPTSENLSAWFLKIAAEKMSKLGIKVASVEFEETPKSKSHVYA

SEQ ID NO: 17609 - protein, 177 aa, Arcobacter ellisii
  REGION 1..177: note = tr|A0A347UBB1|A0A347UBB1_9PROT 6-carboxy-5,6,7,8-tetrahydropterin synthase OS=Arcobacter ellisii OX=913109 GN=queD PE=4 SV=1
MHWKISKEFEFCYGHRVWSQTLNTEFSLDGCLKCRHLHGHQGKILVYLEASELKDGMVTDFKHLNWFKQFIDDVLDHKFILDLNDPLFNTLLPHINKDELIKFEENYYLVDLTKFKDDEVHIKELYEGYVLVDFVPTSENLSAWFLKIVQKKMDKLNIKVSHVEFLETPKSKSTFYA

SEQ ID NO: 17610 - protein, 177 aa, Arcobacter halophilus
  REGION 1..177: note = tr|A0A2N1J3W9|A0A2N1J3W9_9PROT 6-pyruvoyl tetrahydrobiopterin synthase OS=Arcobacter halophilus; OX = 197482 GN=CP960_05215 PE=4 SV=1
MHWKISKEFDFCYGHRVWSQTLNTDFSLDGCLKCRHLHGHQGKILVYLESKELKDGMVTDFKHLNWFKSFIDNVLDHKFILDINDPLFDTLLPKVKKSELIKFEQGYYLVDLTKFSNDEHYIKELYEGYVLVDFVPTSENLSAWFLQIVQNKMHNLGIKVSHIEFLETPKSKSTFYA

SEQ ID NO: 17611 - protein, 177 aa, Arcobacter marinus
  REGION 1..177: note = tr|A0A347THS5|A0A347THS5_9PROT 6-carboxy-5,6,7,8-tetrahydropterin synthase OS=Arcobacter marinus OX=505249 GN=queD PE=4 SV=1
MHWKISKEFDFCYGHRVWSQTLNTDFSLDGCLKCRHLHGHQGKILVYLEAKKLKDGMVTDFKHLNWFKSFIDDVLDHKFILDINDPLFETLLPKVNKKNLIKFNEGYYLVDLSKLQDEENHIIELYEGYVLVDFVPTSENLSAWFLEIVQEKMNNLGIKVSHVEFLETPKSKSTFYA

SEQ ID NO: 17612 - protein, 177 aa, Arcobacter molluscorum
  REGION 1..177: note = tr|A0A2G1DK46|A0A2G1DK46_9PROT 6-pyruvoyl tetrahydrobiopterin synthase OS=Arcobacter molluscorum LMG 25693 OX=870501 GN=CPU12_03285 PE=4 SV=1
MHWKISKEFDFCYGHRVWSQSLNTEFSLDGCLKCRHLHGHQGKIIVYLEANELDNGMVTDFKHLNWFKKFIDDILDHKFIIDINDPLFQTLLPNIKKESLVKYEQGYYLVDLTKLENNQPHIIELYEGYVIVDFVPTSENLSAWFLKIVQNKMNKLNIKVSHIEFLETPKSKSTFYA

SEQ ID NO: 17613 - protein, 177 aa, Arcobacter mytili
  REGION 1..177: note = tr|A0A345J2E1|A0A345J2E1_9PROT 6-carboxy-5,6,7,8-tetrahydropterin synthase OS=Arcobacter mytili LMG 24559 OX=1032238 GN=queD PE=4 SV=1
MHWKISKEFEFCYGHRVWSQTLNTDFSLDGCLKCRHLHGHQGKILVYLEASKLQDGMVTDFKHLNWFKAFIDDVLDHKFILDINDPLFQTLLPKVKKEELINFEQGYYLVDLTKFSNDEHYIKELYEGYVLVDFVPTSENLSAWFLKIVQEKMNHLGIKVSHVEFLETPKSKSTFYA

SEQ ID NO: 17614 - protein, 178 aa, Arcobacter nitrofigilis
  REGION 1..178: note = tr|D5UZC7|D5UZC7_ARCNC Uncharacterized protein; OS = Arcobacter nitrofigilis (strain ATCC 33309 / DSM 7299 / LMG 7604 / NCTC 12251 / CI) OX=572480 GN=Arnit_0499 PE=4; SV = 1
MKWNISKEFDFCYGHRVWSQELNPDFSLDTCLMCRHLHGHQGKVIVHLESSSLKNGMVTDFKHLNWFKKFLDDTLDHKFVLDLNDPLFETLLPHFKNKEELFFHEEGFYTFDLNSIKDEPIHIRELYEGYVLVDFVPTSENLSAWLLEIIQTKMNELPIEVSHVEFLETPKSKSTVYA

SEQ ID NO: 17615 - protein, 177 aa, unidentified
  source 1..177: note = Arcobacter pacificus
  REGION 1..177: note = tr|A0A5C2H9E3|A0A5C2H9E3_9PROT 6-carboxy-5,6,7,8-tetrahydropterin synthase OS=Arcobacter pacificus OX=1080223 GN=queD PE=4 SV=1
MHWKISKEFDFCYGHRVWSQTLNSEFSIDSCLKCRHLHGHQGKVIVYLQAEELKDGMVTDFKHLNWFKLFLDDVLDHKFILDINDPLFSKLLPDIKKDELVKFDEGYSLVDLTKFKDEESYITELYEGYVIVDFVPTSENISAWLLKIVAKKMAKLNVEVSHIEFLETPKSKSTFYA

SEQ ID NO: 17616 - protein, 175 aa, Arcobacter skirrowii
  REGION 1..175: note = tr|A0A2U2C2W5|A0A2U2C2W5_9PROT 6-carboxytetrahydropterin synthase OS=Arcobacter skirrowii; OX = 28200 GN=DF188_01455 PE=4 SV=1
MWEISKEFDFCYGHRVWSQALNVEFSLDSCLMCRHLHGHQGKAIVYLKSDSLKSGMVTDFKHLNWFKKFLDDVIDHKFIIDINDPLFKTLLPNIDKKDLISFKEGYKTVNLNNFENELLELYESYIIVDFVPTSENISAWLLKIVQNKMDKLNIKVSKIEFLETPKSKSTFYARS

SEQ ID NO: 17617 - protein, 175 aa, Arcobacter skirrowii
  REGION 1..175: note = tr|A0A4Q0UG80|A0A4Q0UG80_9PROT 6-carboxytetrahydropterin synthase OS=Arcobacter skirrowii CCUG 10374 OX=1032239 GN=CP959_02290 PE=4 SV=1
MWEISKEFDFCYGHRVWSQALNVEFSLDSCLMCRHLHGHQGKAIVYLKSDNLKSGMVTDFKHLNWFKKFLDDVIDHKFIIDINDPLFKTLLPNIDKKDLISFKEGYKTVDLTNFKNELLELYESYIIVDFVPTSENISAWLLKIVQNKMDKLNIKVSKIEFLETPKSKSTFYARS

SEQ ID NO: 17618 - protein, 178 aa, Arcobacter sp.
  REGION 1..178: note = tr|A0A2G2HDK0|A0A2G2HDK0_9PROT 6-pyruvoyl tetrahydrobiopterin synthase OS=Arcobacter sp. OX=1872629; GN = COA66_08305 PE=4 SV=1
MKWNISKEFDFCYGHRVWSQELDIEFALDDCLVCRHLHGHQGKIIIHLESDKLKGGMVTDFKHLNWFKVFLDKTLDHKFIIDINDPLFPTLLPHYTNKENLISFEENYKRPDMDFIKNEEDHIKEMYEGYIIVDYVPTSENISTWLLKIIEKKMKRLDVKVSHLEFLETPKSKSTVYA

SEQ ID NO: 17619 - protein, 178 aa, Arcobacter sp.
  REGION 1..178: note = tr|A0A1Y5E1V0|A0A1Y5E1V0_9PROT 6-pyruvoyl tetrahydrobiopterin synthase OS=Arcobacter sp. 31_11_sub10_T18 OX=1856277 GN=A9Q76_00095 PE=4 SV=1
MKWEISKEFDFCYGHRVWSQELNVEFALDDCLMCRHMHGHQGKIKVSLESETLKAGMVTDFKHLNWFKKFLDDVLDHRFIIDSNDPLYDTLLPLYKNKENLLSYEQGYKTPDMELLKNEPLHIKELYEGFVIVDFVPTSENLSAWLLEIVQKKMSKINVHVPKLEFWETPKSKSTVYA

SEQ ID NO: 17620 - protein, 177 aa, unidentified
  source 1..177: note = Arcobacter suis
  REGION 1..177: note = tr|A0A443TJY2|A0A443TJY2_9PROT 6-pyruvoyl tetrahydrobiopterin synthase OS=Arcobacter suis OX=1278212; GN = CKA55_10750 PE=4 SV=1
MHWKISKEFEFCYGHRVWSQTLDTEFSLDGCLKCRHLHGHQGKILVYLEANELKDGMVTDFKHLNWFKQFIDDVLDHKFILDINDPLFSTLLPNVNKDELIKFDENYHLVDLTKFKDDEVHIKELYEGYVLVDFVPTSENLSAWFLKIVQKKMDKINIKVSHVEFLETPKSKSTFYA

SEQ ID NO: 17621 - protein, 175 aa, Arcobacter trophiarum
  REGION 1..175: note = tr|A0A4Q0ZX67|A0A4Q0ZX67_9PROT 6-pyruvoyl tetrahydrobiopterin synthase OS=Arcobacter trophiarum LMG 25534 OX=1032241 GN=CRU87_03820 PE=4 SV=1
MWEISKEFDFCYGHRVWSQSLNIEFSLDSCLMCRHLHGHQGKVIVYLKSDSLQSGMVTDFKHLNWFKKFLDDIIDHKFILDINDPLFSTLLPNIDKKYLIKFKEGYKTVNLKDYKNELLELYESYIIVDFVPTSENISAWLLKIVQEKMSKLDIKVSKVEFLETPKSKSTFYAGN

SEQ ID NO: 17622 - protein, 177 aa, unidentified
  source 1..177: note = Arcobacter venerupis
  REGION 1..177: note = tr|A0A443TSQ3|A0A443TSQ3_9PROT 6-pyruvoyl tetrahydrobiopterin synthase OS=Arcobacter venerupis; OX = 1054033 GN=CKA56_13290 PE=4 SV=1
MHWKISKEFEFCYGHRVWSQTLDAEFSLDSCLKCRHLHGHQGKILVYLEAHELKDGMVTDFKHLNWFKQFIDDVLDHKFILDLNDPLFSTLLPKIEKSELIKFDENFYLVDLTKFKDEENHIKELYEGYVIVDFVPTSENLSAWFLKIVQKKMDKLNIKVSHVEFLETPKSKSTFYA

SEQ ID NO: 17623 - protein, 181 aa, unidentified
  source 1..181: note = Arcobacter venerupis
  REGION 1..181: note = tr|A0A443TZL6|A0A443TZL6_9PROT 6-carboxytetrahydropterin synthase QueD OS=Arcobacter venerupis OX=1054033 GN=CKA56_01420 PE=4 SV=1
MIIRKKFKFEGAHIVRNCSTKRCKTSIHGHSYEVEVFFTSNKLDNGYMVLDFGLTKKHIKNIIDSFDHAYSLWSQETDEFKNFFKTNSLRWIEMPVSPSAEIYSLMFLKFIDHILKNTSFFNGEGDVKVSSVRVHETKTGYAEAFRDDMDSIELDIKKVVFSDEVVNEWKNKNELLKILSM

SEQ ID NO: 17624 - protein, 137 aa, unidentified
  source 1..137: note = Arcticibacter pallidicorallinus
  REGION 1..137: note = tr|A0A2T0U7K6|A0A2T0U7K6_9SPHI 6-carboxy-5,6,7,8-tetrahydropterin synthase; OS = Arcticibacter pallidicorallinus OX=1259464; GN = B0I27_103367 PE=3 SV=1
MIYITRRERFNAAHKLFREEWSAEKNLEIFGKCANPNWHGHNYELFVTVKGDVNPETGYVLDLKILKHIVQKYVVDKLDHKNVNLDVDFMSGKMASTEVLCIEIFNQLDPHIKDAGVVLHRVKLVETENNYVEYYGR

SEQ ID NO: 17625 - protein, 91 aa, unidentified
  source 1..91: note = Arcticibacter pallidicorallinus
  REGION 1..91: note = tr|A0A2T0U3C4|A0A2T0U3C4_9SPHI PreQ(0) biosynthesis protein QueD OS=Arcticibacter pallidicorallinus OX=1259464; GN = B0I27_106175 PE=4 SV=1
MHGHTYTLTVFLEGDVDPATGWLVDFTDLKEAVDPLVKSLDHRLLNEIPGLENPTSERLAEWFWIKIKPLMPLLSKIEISETPTSGVVYTG

SEQ ID NO: 17626 - protein, 141 aa, unidentified
  source 1..141: note = Arcticibacter svalbardensis
  REGION 1..141: note = tr|R9GSA6|R9GSA6_9SPHI 6-carboxy-5,6,7,8-tetrahydropterin synthase; OS = Arcticibacter svalbardensis MN12-7 OX=1150600; GN = ADIARSV_2434 PE=3 SV=1
MIYITRREQFNAAHKLFREEWSDEKNLEVFGKCANPNWHGHNYELFVTVKGAVAPETGYVIDLKVLKDIIKSHVTDKLDHKNVNLDVDFMQGKMASTEVICVEIFNQLQPHIEAKGVFLHKVKLVETENNYVEYYGHQPIS

SEQ ID NO: 17627 - protein, 92 aa, unidentified
  source 1..92: note = Arcticibacter svalbardensis
  REGION 1..92: note = tr|R9GWM9|R9GWM9_9SPHI Queuosine biosynthesis QueD, PTPS-I OS=Arcticibacter svalbardensis MN12-7 OX=1150600; GN = ADIARSV_0712 PE=4 SV=1
MHGHTYTLTVSLEGEVDSYTGWLIDFTDLKEAVDPLVKALDHRLLNEIPGLDNPTSERLAEWFWDKIKPVMPLLSKIEINETPSSGVIYIGK

SEQ ID NO: 17628 - protein, 136 aa, unidentified
  source 1..136: note = Arcticibacterium luteifluviistationis
  REGION 1..136: note = tr|A0A2Z4GA28|A0A2Z4GA28_9BACT 6-carboxy-5,6,7,8-tetrahydropterin synthase; OS = Arcticibacterium luteifluviistationis OX=1784714; GN = DJ013_07895 PE=3 SV=1
MIRITRRENFNAAHRLFNPKWSEEKNYEVFGPCSRLHGHNWTLYVTVAGEIDEETGFVMDLKKLKDLVREVIIDKVDHTYLNEDVDFLRGKLPSTEIFSREIWRLLSPILKDRYGVELFEIKLHETENHFAQYFGE

SEQ ID NO: 17629 - protein, 138 aa, unidentified
  source 1..138: note = Arcticibacterium luteifluviistationis
  REGION 1..138: note = tr|A0A2Z4G720|A0A2Z4G720_9BACT 6-carboxy-5,6,7,8-tetrahydropterin synthase; OS = Arcticibacterium luteifluviistationis OX=1784714; GN = DJ013_01675 PE=3 SV=1
MNKKVAVFRKEHFNAAHRLHRADWSDEKNNAVFGKCNNPNFHGHNYNLDIKVVGEVNPETGYVIDIKILSDLIKEHVLDAFDHKNLNLDVPEFKELNPTAENIAIVIYEKLERALNNHELDLKVRLYETERNYVEYPG

SEQ ID NO: 17630 - protein, 215 aa, unidentified
  source 1..215: note = Ardenticatena maritima
  REGION 1..215: note = tr|A0A0M8K5B9|A0A0M8K5B9_9CHLR 6-pyruvoyltetrahydropterin/6-carboxytetrahydropterin synthase OS=Ardenticatena maritima OX=872965 GN=queD PE=4; SV = 1
MQMAFFSRNNEKKIEETSLPEGFWDVDIERILKAPEGFVYEITLDMFFNARHFVVMNGVPGEVHTHSYRLQVRCRSRQLEQDSHVVVGYTAIRERMNQVVSAYNNQLLNDLPPFQRLQPTTENLAAVLFQQLERLLADLPVELVGVTVWESPTESVAFRLEPVEQERFQQEEASRALRRPDTRKRFYALMRAQQAASLKALQHGDDDEHRAQQAS

SEQ ID NO: 17631 - protein, 213 aa, unidentified
  source 1..213: note = Ardenticatena maritima
  REGION 1..213: note = tr|A0A0P6YE74|A0A0P6YE74_9CHLR Uncharacterized protein OS=Ardenticatena maritima OX=872965 GN=SE16_07810; PE = 4 SV=1
MAFFSRNNEKKIEETSLPEGFWDVDIERILKAPEGFVYEITLDMFFNARHFVVMNGVPGEVHTHSYRLQVRCRSRQLEQDSHVVVGYTAIRERMNQVVSAYNNQLLNDLPPFQRLQPTTENLAAVLFQQLERLLADLPVELVGVTVWESPTESVAFRLEPVEQERFQQEEASRALRRPDTRKRFYALMRAQQAASLKALQHGDDDEHRAQQAS

SEQ ID NO: 17632 - protein, 418 aa, unidentified
  source 1..418: note = Ardenticatenia bacterium
  REGION 1..418: note = tr|A0A3M1BUF0|A0A3M1BUF0_9CHLR Uncharacterized protein OS=Ardenticatenia bacterium OX=2099665; GN = D6802_05445 PE=4 SV=1
MTVQPRIWTTKRFEFCASRQLWRTDWSAEQNRRIFGRLASPHGYASNFTLFVTVSGAVNPDTGMTMNVVDLKQTVNTVLEAFDHRHLNIETPYFTTRPATLEAIADALADAIAPHLPPDIRLERLRLHEDEHRFAEWLRGDIRIGRRTLFSAAHRTASPHVSADENRARFGVCTRTHGHNYVLTTTFGGARHPEFGWLAHPDHLDTLVETVRREFDHCHLNDDLPYFRNQAATTETIVGVLFDRLREEAATLVPDVAVLRAELAELPDFRAATEGERWRDFIREYTFSAAHRMANPNLSEAENRRLYGKCANPHGHGHSYRVVLTLRAPLDERWGIAADLVETDRAAQAVIEQVAFKRLDADIPFFQTHVATTENLLTYLWNAFARAFGERLHHIAIWETPNNLFEYGRAPHFQGAEN

SEQ ID NO: 17633 - protein, 212 aa, unidentified
  source 1..212: note = Ardenticatenia bacterium
  REGION 1..212: note = tr|A0A3M1BU03|A0A3M1BU03_9CHLR 6-carboxytetrahydropterin synthase OS=Ardenticatenia bacterium OX=2099665 GN=D6802_05780 PE=4 SV=1
MAFFSRNDEKKIEEPSVPEGFWDVDIERILKAPEGFVYEITLDMFFNARHFVVMNGVPGEVHTHSYRLQVRCRSRQLEKDSHVVVGYTAIRERMNQVVSAYNNQLLNDLPPFQRLQPTTENLAAVLFQQLERLFADLPVELVGVTVWESPTESVAFRLEPVEQERFQEEASRALQRPDTRKRFYALMRTQQAASLKALQYGDDDEHRAQQAS

SEQ ID NO: 17634 - protein, 135 aa, unidentified
  source 1..135: note = Arenibacter algicola
  REGION 1..135: note = tr|A0A221V5I4|A0A221V5I4_9FLAO 6-carboxy-5,6,7,8-tetrahydropterin synthase OS=Arenibacter algicola OX=616991 GN=queD PE=3 SV=1
MKVKVSRKAHFNAAHRLYRPDWSFEKNDNVFGLCNNPNFHGHNYELIVSVTGEIDEETGFVIDMKVLKDLIREKIEKQLDHKNLNVEVEWFKTVNPTAENIVVYIWNQLRPFIKASNELEVVLYETPRNYVTFSG

SEQ ID NO: 17635 - protein, 149 aa, unidentified
  source 1..149: note = Arenibacter algicola
  REGION 1..149: note = tr|A0A221UTY8|A0A221UTY8_9FLAO 6-carboxy-5,6,7,8-tetrahydropterin synthase OS=Arenibacter algicola OX=616991 GN=AREALGSMS7_01080 PE=3 SV=1
MGNIRITKQFNFETGHALFGYDGKCRNVHGHSYKLSVTVIGKPITDTAHVKLGMVIDFGDLKRIVKEEIVDQFDHATVFNKNTPHVELAQELTDRGHNVILANYQPTSENMVLDFADRIKARLPKNISLHSLKLQETDTSFAEWYASDN

SEQ ID NO: 17636 - protein, 149 aa, Arenibacter echinorum; identical to SEQ ID NO: 17635
  REGION 1..149: note = tr|A0A327RAX2|A0A327RAX2_9FLAO 6-carboxy-5,6,7,8-tetrahydropterin synthase OS=Arenibacter echinorum OX=440515 GN=LV92_01064 PE=3 SV=1

SEQ ID NO: 17637 - protein, 135 aa, Arenibacter echinorum
  REGION 1..135: note = tr|A0A327QPN1|A0A327QPN1_9FLAO 6-carboxy-5,6,7,8-tetrahydropterin synthase OS=Arenibacter echinorum OX=440515 GN=LV92_04320 PE=3 SV=1
MKVKVSRKAHFNAAHRLYRPEWSFEKNDNVFGLCNNPNFHGHNYELIVSVTGEIDEETGFVIDMKVLKDLIREKIEKQLDHKNLNVEVEWFKTVNPTAENIVVYIWNQLRPFIKASNELEVVLYETPRNYVTFSG

SEQ ID NO: 17638 - protein, 149 aa, Arenibacter nanhaiticus
  REGION 1..149: note = tr|A0A1M6CVV8|A0A1M6CVV8_9FLAO 6-carboxy-5,6,7,8-tetrahydropterin synthase OS=Arenibacter nanhaiticus OX=558155 GN=SAMN04487911_10471 PE=3 SV=1
MGNIRITKQFNFETGHALYGYDGKCRNVHGHSYKLSVTVIGTPITDTTHVKLGMVIDFGDLKKIVKEEIVDVFDHATVFNKHTPHVELAKELTDRGHSVILADYQPTSENMVLSFADKIKARLPENIKLHSLRLQETDTSFAEWYASDN

SEQ ID NO: 17639 - protein, 138 aa, Arenibacter nanhaiticus
  REGION 1..138: note = tr|A0A1M6IAQ8|A0A1M6IAQ8_9FLAO 6-carboxy-5,6,7,8-tetrahydropterin synthase OS=Arenibacter nanhaiticus OX=558155 GN=SAMN04487911_1175 PE=3 SV=1
MRVKVSRKAHFNAAHRLFRPDWSFEKNEEVFGLCNNPNFHGHNYELIVSVTGKIDPETGFVIDMKVLKDLIKTEIEDSLDHKNLNIEIEEFKTVNPTAENIAVFIWNKLRPFIDASNDLEVVLYETPRNFVTYTGPEA

SEQ ID NO: 17640 - protein, 135 aa, Arenibacter palladensis
  REGION 1..135: note = tr|A0A543W2I4|A0A543W2I4_9FLAO 6-carboxy-5,6,7,8-tetrahydropterin synthase OS=Arenibacter palladensis OX=237373 GN=GQ41_0441 PE=3 SV=1
MKVKVSRKAHFNAAHRLYRPDWSFEKNDNVFGLCNNPNFHGHNYELIVSVTGEIDEETGFVIDMKVLKDLIREKIEKQLDHKNLNVEVEWFKTVNPTAENIVVYIWNQLRPFIAASNELEVVLYETPRNYVTFSG

SEQ ID NO: 17641 - protein, 135 aa, Arenibacter palladensis
  REGION 1..135: note = tr|A0A1M5H6A6|A0A1M5H6A6_9FLAO 6-carboxy-5,6,7,8-tetrahydropterin synthase OS=Arenibacter palladensis OX=237373 GN=SAMN03080594_1137 PE=3 SV=1
MKVKVSRKAHFNAAHRLYRPEWSYEKNDSVFGLCNNPNFHGHNYELIVSVTGEIDEETGFVIDMKDLKELIREKIENQLDHKNLNVEVEWFKTVNPTAENIVVYIWNQLRPFIKASNELEVVLYETPRNFVTYSG

SEQ ID NO: 17642 - protein, 135 aa, Arenibacter sp.
  REGION 1..135: note = tr|A0A2I9ECL9|A0A2I9ECL9_9FLAO 6-carboxy-5,6,7,8-tetrahydropterin synthase OS=Arenibacter sp. C-21 OX=1883406 GN=queD PE=3 SV=1
MKVKVSRKAHFNAAHRLYRPDWSFEKNDNVFGLCNNPNFHGHNYELIVSVTGEIDEETGFVIDMKVLKDLIREKIEKQLDHKNLNVEVEWFKAVNPTAENIVVYIWNQLRPFIKASNELEVVLYETPRNYVTFSG

SEQ ID NO: 17643 - protein, 135 aa, Arenibacter sp.
  REGION 1..135: note = tr|A0A318I748|A0A318I748_9FLAO 6-carboxy-5,6,7,8-tetrahydropterin synthase OS=Arenibacter sp. ARW7G5Y1 OX=2135619 GN=C7972_12076 PE=3 SV=1
MKVKVSRKAHFNAAHRLYRPDWSFEKNDSVFGLCNNPNFHGHNYELVVSVTGEIDPETGFVMDMKILKDLIKDKIEKHLDHKNLNVEVEWFKKVNPTAENIAVYIWNLLRPFVEASHELEVILYETPRNYVTFSG

SEQ ID NO: 17644 - protein, 149 aa, Arenibacter troitsensis
  REGION 1..149: note = tr|A0A1X7JWX4|A0A1X7JWX4_9FLAO 6-carboxy-5,6,7,8-tetrahydropterin synthase OS=Arenibacter troitsensis OX=188872 GN=SAMN03080602_02352 PE=3 SV=1
MGNIRITKQFNFETGHALFGYDGKCRNVHGHSYKLSVTVIGKPITDTTHVKLGMVIDFGDLKRIVKEEIVDQFDHATVFNKNTPHVELAQELTDRGHNVILANYQPTSENMVLDFADRIKARLPKNISLHSLKLQETDTSFAEWYASDN

SEQ ID NO: 17645 - protein, 135 aa, Arenibacter troitsensis; identical to SEQ ID NO: 17641
  REGION 1..135: note = tr|A0A1X7LET2|A0A1X7LET2_9FLAO 6-carboxy-5,6,7,8-tetrahydropterin synthase OS=Arenibacter troitsensis OX=188872 GN=SAMN03080602_04204 PE=3 SV=1

SEQ ID NO: 17646 - protein, 169 aa, Arenicella xantha
  REGION 1..169: note = tr|A0A395JNB6|A0A395JNB6_9GAMM 6-pyruvoyltetrahydropterin/6-carboxytetrahydropterin synthase OS=Arenicella xantha OX=644221 GN=DFR28_101444; PE = 4 SV=1
MPRLSSIEIRKQYLHFSAAHFTIFSATERERLHGHNWRLGVEITGEIDANGLCFDYAIYKKILKDLCHQYDEYTLIADHSPYLQISEDEEFYFVTHNHRTQPLLKTDTLLLPVKNITIEELANYFLKLLTDDRERLEELKIYRFEVRVSSGPDQWGIARWDRLAEANDV

SEQ ID NO: 17647 - protein, 289 aa, Arenicella xantha
  REGION 1..289: note = tr|A0A395JS46|A0A395JS46_9GAMM 6-pyruvoyl tetrahydropterin synthase-like protein OS=Arenicella xantha OX=644221 GN=DFR28_101547 PE=4 SV=1
MPRLFVNNLTVIDCSVLDPKRGLIGASWEVDVELHGKLDAQSMVFDFAKVKKAIKQLIDAEVDHKLLVPLNYQQLSIDGQLSDDDTGTLALSFTTNDDLSIKHSSPASAICAIATARVSRKRVEKYLKARLQEILPSNVEKIQIKLRKESRAGSYYTYSHGLKKHDGNCQRIAHGHRSTIRIWKNGKRKRGLEKALASRWQDIYLGSNADIVSYQHDDISFRYQAPQGVFEISLPADRVHIMHCDSTVECIAEHIVELLNEASPNAHFKVQAFEGVGKGAIAESLPAIP

SEQ ID NO: 17648 - protein, 119 aa, unidentified
  source 1..119: note = Arenimonas caeni
  REGION 1..119: note = tr|A0A2P6M6Q1|A0A2P6M6Q1_9GAMM 6-carboxy-5,6,7,8-tetrahydropterin synthase OS=Arenimonas caeni OX=2058085 GN=queD PE=3 SV=1
MDIFKSFTLEAAHRLPNVPEGHKCARVHGHSFRVELHVSGEVGERTGWVMDFGDIKAAFKPLYDQLDHHYLNDIAGLDNPTSENLAIWIWDHLKPALPLLSAVVVHETCTSGCRYTGPR

SEQ ID NO: 17649 - protein, 119 aa, Arenimonas composti
  REGION 1..119: note = tr|A0A091BWT7|A0A091BWT7_9GAMM 6-carboxy-5,6,7,8-tetrahydropterin synthase OS=Arenimonas composti TR7-09 = DSM 18010 OX=1121013 GN=P873_13440 PE=3; SV = 1
MDIFKVFRIEAAHRLPNVPPGHKCARLHGHSFAVELHVAGEPDPHSGWIMDFGDIKAVFAPLYEQLDHHYLNEVEGLDNPTSENLARWIWDRLKPDLPALSEVVVHETCTSGCRYRGPR

SEQ ID NO: 17650 - protein, 119 aa, Arenimonas donghaensis
  REGION 1..119: note = tr|A0A087MK61|A0A087MK61_9GAMM 6-carboxy-5,6,7,8-tetrahydropterin synthase OS=Arenimonas donghaensis DSM 18148 = HO3-R19 OX=1121014 GN=N788_10515; PE = 3 SV=1
MDIFKCFTLEAAHRLPNVPAGHKCARVHGHSFRIELHVSGEVGADTGWVMDFSDIKAAFQPLYDQLDHHYLNDVDGLDNPTSENLAIWIWDKLKPALPGLSAVVVHETCTSGCRYTGPG

SEQ ID NO: 17651 - protein, 119 aa, Arenimonas malthae
  REGION 1..119: note = tr|A0A091BWX3|A0A091BWX3_9GAMM 6-carboxy-5,6,7,8-tetrahydropterin synthase OS=Arenimonas malthae CC-JY-1 OX=1384054 GN=N790_05590 PE=3 SV=1
MDIFKSFTLEAAHRLPNVPEGHKCARVHGHSFRVELHVSGEVGERTGWVMDFGDIKAAFKPLYDRLDHYYLNDIPGLENPTSENLAIWIWDHLKPALPLLSAVVVHETCTSGCRYTGPR

SEQ ID NO: 17652 - protein, 118 aa, unidentified
  source 1..118: note = Arenimonas metalli
  REGION 1..118: note = tr|A0A091B4M2|A0A091B4M2_9GAMM 6-carboxy-5,6,7,8-tetrahydropterin synthase OS=Arenimonas metalli CF5-1 OX=1384056 GN=N787_10580 PE=3 SV=1
MDIFKVFRIEAAHRLPNVPPGHKCARLHGHSFAVELHVGGTPDPHTGWIMDFGDIKAVFAPIYDRLDHHYLNDIPGLENPTSENLARWIWDELKPALPALSLVVVHETCTSGCRYAGH

SEQ ID NO: 17653 - protein, 118 aa, Arenimonas oryziterrae
  REGION 1..118: note = tr|A0A091ATT6|A0A091ATT6_9GAMM 6-carboxy-5,6,7,8-tetrahydropterin synthase OS=Arenimonas oryziterrae DSM 21050 = YC6267 OX=1121015 GN=N789_13685; PE = 3 SV=1
MDIFKIFRIEAAHRLPNVPAGHKCARLHGHSFAIELQVGGVPDARSGWIMDFGDVKKIFQPIYDQLDHHYLNDIPGLENPTSEMLAIWIWDRLKPALPALSEVIVHETCTSGCRYRGA

SEQ ID NO: 17654 - protein, 119 aa, Arenimonas sp.; identical to SEQ ID NO: 17651
  REGION 1..119: note = tr|A0A352QRM0|A0A352QRM0_9GAMM 6-carboxy-5,6,7,8-tetrahydropterin synthase OS=Arenimonas sp. OX=1872635 GN=queD PE=3 SV=1

SEQ ID NO: 17655 - protein, 119 aa, Arenimonas sp.
  REGION 1..119: note = tr|A0A5B2Z7Z5|A0A5B2Z7Z5_9GAMM 6-carboxy-5,6,7,8-tetrahydropterin synthase OS=Arenimonas sp. 3729k OX=2608255 GN=queD PE=3 SV=1
MDIFKTFTLEAAHRLPNVPPGHKCARLHGHSFRVELHVSGEVGADTGWVMDFADIKAAFQPLYERLDHHYLNDIPGLENPTSENLAIWIWRELKPSLPLLSAVVVHETCTSGCRYTGPD

SEQ ID NO: 17656 - protein, 136 aa, unidentified
  source 1..136: note = Arenitalea lutea
  REGION 1..136: note = tr|A0A1M6CJT1|A0A1M6CJT1_9FLAO 6-carboxy-5,6,7,8-tetrahydropterin synthase OS=Arenitalea lutea OX=1178825 GN=SAMN05216261_1276 PE=3 SV=1
MIVTVSRKAHFNAAHRLYRKDWSFEKNDEIFGKCNNPNFHGHNYELIVSVTGEIDKETGYVIDMKVLKDIIKSEVEDAFDHKNLNEEVPEFRDLNPTAENISVIIYNKIKPKLSPNLKLEITLYETPRNFVVYSGH

SEQ ID NO: 17657 - protein, 151 aa, unidentified
  source 1..151: note = Arenitalea lutea
  REGION 1..151: note = tr|A0A1M6DHR1|A0A1M6DHR1_9FLAO 6-pyruvoyltetrahydropterin/6-carboxytetrahydropterin synthase OS=Arenitalea lutea OX=1178825; GN = SAMN05216261_1572 PE=4 SV=1
MGNNIRITKQFSFETGHALYGYDGKCKNVHGHSYKLSVTVIGKPITDNTNVKYGMVIDFGDLKKIVKEEIVNVFDHATVFNKNTPHVELAKELQDRGHNVLLVDYQPTSEMMVLDFAKKISKRLPKHISLHSLKLQETESSFAEWFQYDNI

SEQ ID NO: 17658 - protein, 127 aa, unidentified
  source 1..127: note = Armatimonadetes bacterium
  REGION 1..127: note = tr|A0A0T6APC8|A0A0T6APC8_9BACT 6-carboxy-5,6,7,8-tetrahydropterin synthase; OS = Armatimonadetes bacterium CSP1-3 OX=1640515; GN = XU14_C0039G0011 PE=3 SV=1
MNAELYALTVRTSFAAAHRLLEYDGNCERLHGHNWQVEVTVESPTLDERGIALDFRIIKASLNGLLSRFDHRYMNEVPPFDGLNPSSENLARHLYEEMGKSVPPPARVSRVTVWESDDARAEYSRPA

SEQ ID NO: 17659 - protein, 145 aa, unidentified
  source 1..145: note = Armatimonadetes bacterium
  REGION 1..145: note = tr|A0A1Y0GZ34|A0A1Y0GZ34_9BACT Uncharacterized protein OS=Armatimonadetes bacterium Uphvl-Ar1 OX=2004467; GN = CCB80_07685 PE=4 SV=1
MSELQPIRITKEYRWEMGHRLSYHTEGCQNLHGHSYRIIVGLTGQTNDGGMIFDFGDISRIIKPIIDELDHSTMLHQEDQPLVNFLQSQSMKLTLVPFHPTTEELARWLIQKVIGQLPTAPNIHSLDLTVFETATSTVTLTHNFS

SEQ ID NO: 17660 - protein, 149 aa, unidentified
  source 1..149: note = Aromatoleum aromaticum
  REGION 1..149: note = tr|Q5P8A3|Q5P8A3_AROAE 6-carboxy-5,6,7,8-tetrahydropterin synthase OS=Aromatoleum aromaticum (strain EbN1) OX=76114 GN=queD PE=3 SV=1
MRITRRLEFDAGHRIPDHASQCRHLHGHRYAIEITLSGDIIDAAGEAVNGMVMDFGDIKLIARTHVIDRWDHAFLVYRGDSAVVDFLATMPAHKTVVLDTVPTAENLASEAFRILDSCYRDLYGNHLRLERVRLYETPNCWADALRPGE

SEQ ID NO: 17661 - protein, 138 aa, unidentified
  source 1..138: note = Arsenicibacter rosenii
  REGION 1..138: note = tr|A0A1S2VM81|A0A1S2VM81_9BACT 6-carboxytetrahydropterin synthase QueD OS=Arsenicibacter rosenii OX=1750698 GN=BLX24_08510 PE=4 SV=1
MVYVNRIEHFNAAHRLFNPNWSEEKNKEVFGPCANAYFHGHNFELIVTVKGEPNPDTGFVIDMKKLGQIIKQEVIEKLDHKNLNMDVDFLQGKLASCEVLVMEIWKILERALHDITEARLHQIRLYETPKNFVDYYGE

SEQ ID NO: 17662 - protein, 154 aa, unidentified
  source 1..154: note = Arsenicibacter rosenii
  REGION 1..154: note = tr|A0A1S2VF95|A0A1S2VF95_9BACT 6-pyruvoyl tetrahydrobiopterin synthase OS=Arsenicibacter rosenii; OX = 1750698 GN=BLX24_20290 PE=4 SV=1
MKPFADAAEHTPFAADSRPRVAVFRKEHFNAAHRLNNPNWSDEKNERVYGKCNNYNYHGHNYDLILQVTGPVDPETGYVIDMKVLSDISKTFVLDRFDHKNLNLDTEEFKDLNPSAENIAIVIYQILREQLDPSLDLKIRLYETERNFVEYPAA

SEQ ID NO: 17663 - protein, 126 aa, Arsenicicoccus sp.
  REGION 1..126: note = tr|A0A2W6V9T1|A0A2W6V9T1_9MICO 6-pyruvoyl tetrahydrobiopterin synthase OS=Arsenicicoccus sp.; OX = 1872639 GN=DI571_07215 PE=4 SV=1
MFGLTVTDHVMIAHSLPDPFFGPAQGLHGATLVVEATWRRRELDEHGVVVDIGEAGGHLAAVLDPLRYQNLDEHPDFAGRLSTTESVAAHVAHALADHADPAVDGIGVVVREHPQAWVTYDLDLRA

SEQ ID NO: 17664 - protein, 127 aa, Arsenicicoccus sp.
  REGION 1..127: note = tr|A0A0K1F6J7|A0A0K1F6J7_9MICO Uncharacterized protein OS=Arsenicicoccus sp. oral taxon 190 OX=1658671; GN = ADJ73_01570 PE=4 SV=1
MFSVTVGSRFMCAHSLPDPFFGPAQQLHGVTYVVEATFERRELDEHNVVVDIGAATEQLRAILAPLDYRNLDDVEELSGLLTTTERMAQHIAERLTETMDLTGLHALQVLLREHADAWASYRIDLSA

SEQ ID NO: 17665 - protein, 120 aa, unidentified
  source 1..120: note = Arsenophonus endosymbiont
  REGION 1..120: note = tr|A0A4Q1B6Y4|A0A4Q1B6Y4_9GAMM 6-carboxy-5,6,7,8-tetrahydropterin synthase; OS = Arsenophonus endosymbiont of Bemisia tabaci Asia II 3; OX = 1868623 GN=BBD39_03380 PE=3 SV =1
MSATIFKDFQFEAAHRLPHVPVGHKCGRLHGHSFMVRLELIGEIDQQTGWIVDFSDISKAFKPLWQQLDHHYLNDIEGLENPTSEVIARWIWHKMKPIFPQLSSIMIKETCNVGCIYRGK

SEQ ID NO: 17666 - protein, 120 aa, Arsenophonus nasoniae
  REGION 1..120: note = tr|A0A4P7L4I2|A0A4P7L4I2_9GAMM 6-carboxy-5,6,7,8-tetrahydropterin synthase; OS = Arsenophonus nasoniae OX=638 GN=queD PE=3 SV=1
MSATIFKDFQFEAAHRLPHVPAGHKCGRLHGHSFMVRLELTGEIDPQTGWVVDFSDISKAFKPLWQQLDHHYLNDIEGLENPTSEVIARWIWHKMKPMLPQLSSIMIKETCNAGCIYRGK

SEQ ID NO: 17667 - protein, 131 aa, Arsenophonus nasoniae
  REGION 1..131: note = tr|D2U3T3|D2U3T3_9GAMM 6-carboxy-5,6,7,8-tetrahydropterin synthase; OS = Arsenophonus nasoniae OX=638 GN=ptpS PE=3 SV=1
MFALIQLIGAIMSATIFKDFQFEAAHRLPHVPAGHKCGRLHGHSFMVRLELTGEIDPQTGWVVDFSDISKAFKPLWQQLDHHYLNDIEGLENPTSEVIARWIWHKMKPMLPQLSSIMIKETCNAGCIYRGK

SEQ ID NO: 17668 - protein, 120 aa, Arsenophonus sp.
  REGION 1..120: note = tr|A0A2A2GZX3|A0A2A2GZX3_9GAMM 6-carboxy-5,6,7,8-tetrahydropterin synthase; OS = Arsenophonus sp. ENCA OX=1987579 GN=CBG25_09990 PE=3; SV = 1
MSATIFKDFQFEAAHRLPHVPTGHKCGRLHGHSFMVRLELTGEIDQQTGWIVDFSDISKAFKPLWQQLDHHYLNDIEGLENPTSEVIARWIWHKMKPILPQLSSIMIKETCNAGCIYRGE

SEQ ID NO: 17669 - protein, 216 aa, unidentified
  source 1..216: note = Arsukibacterium ikkense
  REGION 1..216: note = tr|A0A0M2V229|A0A0M2V229_9GAMM QueD like protein; OS = Arsukibacterium ikkense OX=336831 GN=WG68_14200 PE=4; SV = 1
MEFIMVLLVALVVLVAMVASRFIDNSNPFQVQRRSSLFSPVERSFQNLLEKAVAGEYKILNRIKLADLIEVKENANEKARRSTLVKLNAKYLDFVLCSADDLRVIAVLDLVNNSNKDGHKAAPDWFVSGALEAAGVPYLRIKIKAGYTAADLQQALAQRLGKPTVKAEPMYKGLVKKGPTRPVRSFKPAPAPGTELTPVLSHSQIKAQQTALIQAS

SEQ ID NO: 17670 - protein, 285 aa, unidentified
  source 1..285: note = Arsukibacterium ikkense
  REGION 1..285: note = tr|A0A0M2V7Z6|A0A0M2V7Z6_9GAMM 6-pyruvoyl tetrahydropterin synthase OS=Arsukibacterium ikkense; OX = 336831 GN=WG68_04360 PE=4 SV=1
MILFVNSLTVIDFSYLDLKRGMVGESYIVDTELHGSLDDTAMVFDFAKVKKVIKQAIDQLVDHKLALPALCPALTTTVQAANTLVRYQSQRGVISLASPAEAFALIPSQQINEQSVADYLEQQIKPLLPANVERLKLTLRPEASTGFYYHYSHGLKKHDGNCQRIAHGHRSTIQIYVDGMLSPRLNKLWSERWQDRYLGSAVDRVDSTALQHISSEADDYCFRYQASQGWFELVMPKSHCDIVPCDTTVECLAEYIAGELKGLDQSKTYKVVAYEGVAKGAIAQL

SEQ ID NO: 17671 - protein, 219 aa, unidentified
  source 1..219: note = Arsukibacterium sp.
  REGION 1..219: note = tr|A0A0M2VIL8|A0A0M2VIL8_9GAMM QueD like protein; OS = Arsukibacterium sp. MJ3 OX=1632859 GN=VT06_09205 PE=4; SV = 1
MEFIMLLLVALVVLVAMVASRFIDNNNPFQVQKRSSLFSPVERSFQNLLEKAVVGEYKILNRVKLADLIEVKGNATEKSRRSTLLKLNAKYLDFVLCAADDLRVIAVLDLVNNSNKDGHKAAPDWFVSGALEAAGLPYLRIKIKAGYTATDLQQALATRLGKPTVKAEPMYKGLVKKGPTRPVRSFKPVQTLQSAGTGLTPALSHSQIKAQQTALIQAS

SEQ ID NO: 17672 - protein, 285 aa, unidentified
  source 1..285: note = Arsukibacterium sp.
  REGION 1..285: note = tr|A0A0M2VLS8|A0A0M2VLS8_9GAMM 6-pyruvoyl tetrahydropterin synthase OS=Arsukibacterium sp. MJ3; OX = 1632859 GN=VT06_00600 PE=4 SV=1
MILFVNSLTVIDFSYLDLKRGMVGESYIVDAELHGSLDDTAMVFDFAKVKKVIKQAIDQLVDHKLAIPTACQAVTLCATDTATVVHYNSDRGTISLASPADAFACIATTQINEQSVSEFLQENIKPLLPANVERLVLTLRPEASNGFYYHYSHGLKKHDGNCQRIAHGHRSTIQLYVDGMLSPRLNKQWSERWHDIYLGSATDLCDSSALQQLAGQADAYCFRYQASQGWFELVIPQRHCEIVPCDSTVECLADYIASELKAMDNSKTYKVVAYEGVAKGAIAQQ

SEQ ID NO: 17673 - protein, 132 aa, Arthrobacter alpinus
  REGION 1..132: note = tr|A0A0U3P684|A0A0U3P684_9MICC 6-pyruvoyl tetrahydropterin synthase OS=Arthrobacter alpinus; OX = 656366 GN=MB46_03335 PE=4 SV=1
MFSVSVRDHMMIAHSFNGEAFGPAQRLHGATYIIDATFTREELDANSTVVDIGTAAAELRSIVEALGYRNLDDDTDFAGINTTTEVLAKTVADRLAVRIHAGAFGPGASGLSGITVTLRESHISWASYERAL

SEQ ID NO: 17674 - protein, 132 aa, Arthrobacter alpinus
  REGION 1..132: note = tr|A0A1H5K2V6|A0A1H5K2V6_9MICC 6-pyruvoyl-tetrahydropterin synthase OS=Arthrobacter alpinus OX=656366 GN=SAMN04489740_1852 PE=4 SV=1
MFSVSVRDHMMIAHSFNGEAFGPAQRLHGATYIIDATFTREELDANSTVVDIGTAAAELRSIVEALGYRNLDDDGDFAGINTTTEVLAKTVADRLAVRIHAGAFGPGASGLAGVTVTLRESHIAWASYERAL

SEQ ID NO: 17675 - protein, 66 aa, unidentified
  source 1..66: note = Arthrobacter bacterium
  REGION 1..66: note = tr|A0A353ZXL6|A0A353ZXL6_9MICC 6-pyruvoyl tetrahydrobiopterin synthase (Fragment) OS=Arthrobacter bacterium OX=2053508 GN=DDY41_18125 PE=4 SV=1
MFSLTVRRHFMIAHSLPREVFGPAQALHGATFVAEVTFRRRALNQDSIVLDIGAAGGIVEHVLSGL

SEQ ID NO: 17676 - protein, 131 aa, unidentified
  source 1..131: note = Arthrobacter bacterium
  REGION 1..131: note = tr|A0A3D3KTG6|A0A3D3KTG6_9MICC 6-pyruvoyl tetrahydrobiopterin synthase OS=Arthrobacter bacterium; OX = 2053508 GN=DEP82_01380 PE=4 SV=1
MFSLTVRRHFMIAHSLPREVFGPAQALHGATFVAEVTFRRRALNQDSIVLDIGAAGGIVEHVLSGLTYKNLDEHPDFEGRLSTTEALAEYIAHAVAGKLKDHDDGRELAGIDVTLRENPDAWATCTLDLSA

SEQ ID NO: 17677 - protein, 132 aa, unidentified
  source 1..132: note = Arthrobacter cupressi
  REGION 1..132: note = tr|A0A1G8V3E6|A0A1G8V3E6_9MICC 6-pyruvoyltetrahydropterin/6-carboxytetrahydropterin synthase OS=Arthrobacter cupressi OX=1045773; GN = SAMN05216555_11335 PE=4 SV=1
MFSLTVRRHFMIAHSLPRESFGPAQGLHGATFVAEVSFRRVELNQDAVVIDIGAAGELLQQVLDQLNYKNLDELPEFAGQLTTTEVLARYIAERLAEKLPDAAAIAGLDVVLRENPDAWAGYSLELPGPSQV

SEQ ID NO: 17678 - protein, 131 aa, unidentified
  source 1..131: note = Arthrobacter enclensis
  REGION 1..131: note = tr|A0A0V8IGG8|A0A0V8IGG8_9MICC 6-pyruvoyl tetrahydrobiopterin synthase OS=Arthrobacter enclensis; OX = 993070 GN=AS031_14330 PE=4 SV=1
MFSLTVRRHFMIAHSLPREAFGPAQGLHGATFVAEVAFRRRALNENAIVLDIGAAGTVIEEVLDGLNYKNLDEHPDFEGKLSTTEALAQYIAQAVAAKISNDDDGRHLDGIDVTLRENPDAWATFSLDLRA

SEQ ID NO: 17679 - protein, 132 aa, unidentified
  source 1..132: note = Arthrobacter glacialis
  REGION 1..132: note = tr|A0A2S3ZRH9|A0A2S3ZRH9_ARTGL Uncharacterized protein OS=Arthrobacter glacialis OX=1664 GN=CVS27_18960; PE = 4 SV=1
MFSVNVRDHMMVAHSFSGAAFGPAQRLHGATYIIDATFKRDALDENNTVLDIGVAAAELRTIAAALGYSNLDDDPEFAGINTTTEVLAKAIADRLADRVRAGAFGPAALQLASIAVTLHESHVAWASYERPL

SEQ ID NO: 17680 - protein, 132 aa, Arthrobacter globiformis
  REGION 1..132: note = tr|A0A328HPL7|A0A328HPL7_ARTGO 6-carboxytetrahydropterin synthase OS=Arthrobacter globiformis OX=1665 GN=DBZ45_00405 PE=4 SV=1
MFSLTVRRHFMIAHSLPREAFGPAQGLHGATFVAEVTFRRRALNDDAIVLDIGAAGNMIEEVLAGLNYRNLDEHPDFAGKLSTTEALAQYIADAVAKRLREDKDGRELAGLDVTLRENPDAWASYALEFDRS

SEQ ID NO: 17681 - protein, 132 aa, Arthrobacter globiformis
  REGION 1..132: note = tr|H0QLN4|H0QLN4_ARTGO Uncharacterized protein; OS = Arthrobacter globiformis NBRC 12137 OX=1077972; GN = ARGLB_047_00850 PE=4 SV=1
MFSLTVRRHFMIAHSLPREAFGPAQGLHGATFVAEVTFRRRALNEDAIVLDIGAAGSMIEEVLAGLNYRNLDDHPDFAGKLSTTEALAQYIAGAVADRLREDTDGRELAGLDVTLRENPDAWASYALEFDRD

SEQ ID NO: 17682 - protein, 132 aa, Arthrobacter humicola
  REGION 1..132: note = tr|A0A315TKU0|A0A315TKU0_9MICC 6-pyruvoyl tetrahydrobiopterin synthase OS=Arthrobacter humicola; OX = 409291 GN=C9424_18760 PE=4 SV=1
MFSLTVRRNFMIAHSLPREVFGPAQGLHGATFVTEVTFRRRELNDDAIVLDIGAAGVVVDEVLDELNYKNLDEHPDFAGKLSTTEALARYIGDGVAAQIRIGRDGRALTGLDVTLRETPDAWASYSLDFDAS

SEQ ID NO: 17683 - protein, 131 aa, unidentified
  source 1..131: note = Arthrobacter nitrophenolicus
  REGION 1..131: note = tr|L8TV30|L8TV30_9MICC 6-carboxytetrahydropterin synthase OS=Arthrobacter nitrophenolicus OX=683150; GN = E2R57_09920 PE=4 SV=1
MFSLTVRRHFMIAHSLPREAFGPAQALHGATFVAEVSFRRHTLNDDEIVLDIGAAGTVIEEVLAGLNYRNLDEHPDFAGRLSTTEALAQYIAQEVAGKIENHDDGRHLQGIDVTLRENPDAWATYSLDLSA

SEQ ID NO: 17684 - protein, 132 aa, Arthrobacter oryzae
  REGION 1..132: note = tr|A0A495EPK9|A0A495EPK9_9MICC 6-pyruvoyltetrahydropterin/6-carboxytetrahydropterin synthase OS=Arthrobacter oryzae OX=409290 GN=C8D78_2657; PE = 4 SV=1
MFSLTVRRNFMIAHSLPREAFGPAQGLHGATFVTEVTFRRRELNDDAIVLDIGAAGDVLDEVLAGLNYKNLDEHPDFAGKLSTTEALARYVADAVAAQIRVGEDGRGLAGLDVTLRETPDAWAGYSLDFEAR

SEQ ID NO: 17685 - protein, 126 aa, Arthrobacter rhombi
  REGION 1..126: note = tr|A0A1R4GQR1|A0A1R4GQR1_9MICC PTPS-like type 4; OS = Arthrobacter rhombi OX=71253 GN=FM101_12510 PE=4 SV=1
MYSLTVRDHIMIAHSLPDPFFGPAQALHGATLVVEVTWRRAELGPHGVVMDIGAATSMLSDVLQSLRYANLDEHPAFAGRLSTTETIAGHISEELCRNFDTNEFAGLGVLLREHPDAWACHDIDFD

SEQ ID NO: 17686 - protein, 132 aa, Arthrobacter sp.
  REGION 1..132: note = tr|J7LMI2|J7LMI2_9MICC Uncharacterized protein; OS = Arthrobacter sp. Rue61a OX=1118963 GN=ARUE_c07410 PE=4; SV = 1
MFSLTVRRHFMIAHSLPREAFGPAQGLHGATFVAEVTFRRPNVNDDAIVLDIGAAGGILEEVLADLNYKNLDEHPAFKGKLSTTEALAKHIADAMAARIQDTADGPALTGIDVVLRENPDAWAGYSLELPVK

SEQ ID NO: 17687 - protein, 132 aa, Arthrobacter sp.
  REGION 1..132: note = tr|A0A1G5QKF7|A0A1G5QKF7_9MICC 6-pyruvoyltetrahydropterin/6-carboxytetrahydropterin synthase OS=Arthrobacter sp. UNCCL28 OX=1502752; GN = SAMN02799638_03328 PE=4 SV=1
MFSLTVRRHFMIAHSLPREAFGPAQGLHGATFVAEVSFRRPDLNDDAIVLDIGAAGGILEEILEDLNYKNLDEHPAFKGKLSTTEALAKHIADAMATRIQDTADGPALSGIDVVLRENPDAWAGYSLELPVK

SEQ ID NO: 17688 - protein, 130 aa, Arthrobacter woluwensis
  REGION 1..130: note = tr|A0A1H4LJA4|A0A1H4LJA4_9MICC 6-pyruvoyltetrahydropterin/6-carboxytetrahydropterin synthase OS=Arthrobacter woluwensis OX=156980; GN = SAMN04489745_1026 PE=4 SV=1
MFSLTVRRSFMIAHSLPRESFGPAQGLHGATFVAEVGFRRAELNDDSVVIDIGAAGDLLQEILDRLNYKNLDELPEFAGRLTTTEFLARHIAERLAEKLPDDAGLAGLDVTLRENPDAWAGYSLDLSRGR

SEQ ID NO: 17689 - protein, 130 aa, Arthrobacter woluwensis
  REGION 1..130: note = tr|A0A2T3BZI1|A0A2T3BZI1_9MICC 6-pyruvoyl tetrahydrobiopterin synthase OS=Arthrobacter woluwensis; OX = 156980 GN=C6401_07675 PE=4 SV=1
MFSLTVRRSFMIAHSLPRESFGPAQGLHGATFVAEVGFRRAELNEDSVVIDIGAAGDLLQEILDRLNYKNLDELPEFAGRLTTTEFLARHIAERLAEKLPDDAGLAGLDVTLRENPDAWAGYSLDLSRGR

SEQ ID NO: 17690 - protein, 130 aa, unidentified
  source 1..130: note = Arthrospira maxima
  REGION 1..130: note = tr|B5W8I5|B5W8I5_LIMMA 6-carboxy-5,6,7,8-tetrahydropterin synthase OS=Arthrospira maxima CS-328 OX=513049 GN=AmaxDRAFT_5085 PE=3 SV=1
MSKWKLTTEFTFDSAHYIKDYNGPCGRLHGHTYKVRVEATSNQLHGSEFCPHPVMVADFRSLRWAKKDVSKGGLDHGLLNEILPPNYETTAEMIAKFIYDETKKRVPEGVQLKVMVSETANSWVEYEDET

SEQ ID NO: 17691 - protein, 290 aa, unidentified
  source 1..290: note = Arthrospira maxima
  REGION 1..290: note = tr|B5W6A8|B5W6A8_LIMMA Uncharacterized protein; OS = Arthrospira maxima CS-328 OX=513049 GN=AmaxDRAFT_4307; PE = 4 SV=1
MQCLITRRAQFSASHRYWLPELSEAENFAKFGQTARAPGHGHNYVLYVSMVGELDEYGMVLNLSNVKHTIRSEVTEPLDFSFLNEAWLEFQDTLPTTEFLAYLIWHRLAPHLPLTNIQLFEHPQLWADYQGNSMEAYLTISTHFSAAHRLAHPLLSDEDNSKIYGKCARPHGHGHNYHLEVTIRGQIDPRTGMIADLGAVQKAIDDYVVEPFDHTFLNKDIPYFAKVVPTAENIAVYIRDLLQNPIDELGAHLHKIKLIESPNNSCEVYCTTSEHQPHLAANREPVAVGV

SEQ ID NO: 17692 - protein, 290 aa, unidentified; identical to SEQ ID NO: 17691
  source 1..290: note = Arthrospira platensis
  REGION 1..290: note = tr|K1WL63|K1WL63_ARTPT Uncharacterized protein; OS = Arthrospira platensis C1 OX=459495 GN=SPLC1_S207250; PE = 4 SV=1

SEQ ID NO: 17693 - protein, 290 aa, unidentified
  source 1..290: note = Arthrospira platensis
  REGION 1..290: note = tr|D4ZVX7|D4ZVX7_ARTPN 6-pyruvoyl tetrahydropterin synthase homolog OS=Arthrospira platensis (strain NIES-39 / IAM M-135) OX=696747 GN=NIES39_K02950 PE=4 SV=1
MQCLITRRAQFSASHRYWLPELSEAENFAKFGQTARAPGHGHNYVLYVSMVGELDEYGMVLNLSNVKHTIRSEVTEPLDFSFLNEAWPEFQHTLPTTEFLAYLIWHRLAPHLPLTNIQLFEHPQLWADYQGNAMEAYLTISTHFSAAHRLAHPLLNDEDNSKIYGKCARPHGHGHNYHLEVTIRGQIDPRTGMIADLGAVQKAIDDYVVEPFDHTFLNKDIPYFAKVVPTAENIAVYIRELLQNPIDELGANLHKIKLIESPNNSCEVYCTPSEHQTPLASHREPVAVGA

SEQ ID NO: 17694 - protein, 51 aa, Arthrospira sp.
  REGION 1..51: note = tr|A0A328V4D6|A0A328V4D6_9CYAN 6-pyruvoyl tetrahydropterin synthase (Fragment) OS=Arthrospira sp. O9.13F OX=1982223 GN=B9S53_12295 PE=4 SV=1
MQCLITRRAQFSASHRYWLPELSEAENFAKFGQTARAPGHGHNYVLYVSMV

SEQ ID NO: 17695 - protein, 130 aa, Arthrospira sp.
  REGION 1..130: note = tr|A0A328V5K9|A0A328V5K9_9CYAN 6-carboxy-5,6,7,8-tetrahydropterin synthase OS=Arthrospira sp. O9.13F OX=1982223 GN=B9S53_10045 PE=3 SV=1
MSKWKLTTEFTFDSAHYIKDYNGPCGRLHGHTYKVRVEATSNPLHGSEFCPHPVMVADFRSLRWAKKDVSKGGLDHGLLNEILPPNYETTAEMIAKFIYDETKKRVPEGVQLKVMVSETANSWVEYEDET

SEQ ID NO: 17696 - protein, 141 aa, Asaccharobacter celatus
  REGION 1..141: note = tr|A0A3N0ATH4|A0A3N0ATH4_9ACTN 6-carboxy-5,6,7,8-tetrahydropterin synthase; OS = Asaccharobacter celatus DSM 18785 OX=1121021; GN = DMP10_06105 PE=3 SV=1
MYGLKTESSFDASHFLTDYHGKCENLHGHRWRVVAYLEVEHLQTEGTCKDMVVDFGEFKTELRALTERLDHHFIVEEGSLAPDTLACLEREGFALFIVPFRTTAENLAKWFFDALAERGLPVARVEVYETPSNCAYYREQR

SEQ ID NO: 17697 - protein, 141 aa, Asaccharobacter celatus
  REGION 1..141: note = tr|A0A369NWS3|A0A369NWS3_9ACTN 6-carboxy-5,6,7,8-tetrahydropterin synthase; OS = Asaccharobacter celatus OX=394340 GN=CQJ32_11530 PE=3; SV = 1
MYGLKTESSFDASHFLTDYHGKCENLHGHRWRVVAYLEVEHLQKEGTCKDMVVDFGEFKAELRALTERLDHHFIVEEGSLAPDTLTCLEREGFALFIVPFRTTAENLAKWFFDALAERGLPVAQVEVYETPNNCAYYREQR

SEQ ID NO: 17698 - protein, 142 aa, unidentified
  source 1..142: note = Asaccharospora irregularis
  REGION 1..142: note = tr|A0A1M5QLD1|A0A1M5QLD1_9FIRM 6-carboxy-5,6,7,8-tetrahydropterin synthase; OS = Asaccharospora irregularis DSM 2635 OX=1121321; GN = SAMN04488530_12224 PE=3 SV=1
MFILKNEIQFDMAHYLSGYEGKCKNIHGHRYRLIVKVASKTLHEGGQLRGMVDDFGNIKKVLKEIKEYFDHKLVLEDNEEGRKLADKLSELPNAFSILMLPYRTTAEEMSRHIYHMIKEKGINVREVELFETPTNSCIYMED

SEQ ID NO: 17699 - protein, 182 aa, Asaia bogorensis
  REGION 1..182: note = tr|A0A0P0YDQ0|A0A0P0YDQ0_9PROT 6-pyruvoyl tetrahydropterin synthase domain protein OS=Asaia bogorensis NBRC 16594 OX=1231624 GN=Asbog_00303 PE=4 SV=1
MSALELSFTRRFSMGHRLIAGSSERCAIPHGHNEFVTVTLQAREPARLDGAQNMVIPFADAKRRWHDFIDTRLDHAFQISSSDPLLSWFLTNEPARADRLVVTPGDPTTEMMAALLYAKLQAFLRADGDVLCCTSLSLEETPTNTVCLTGGPEFYLPVTEAPPESCWWNRADDTISDLLTQN

SEQ ID NO: 17700 - protein, 169 aa, Asaia platycodi
  REGION 1..169: note = tr|A0A060QCD6|A0A060QCD6_9PROT Queuosine biosynthesis QueD, PTPS-I OS=Asaia platycodi SF2.1; OX = 1382230 GN=ASAP_0739 PE=4 SV=1
MGHRLIADSSERCAIPHGHNEFVTVTLQAREPARLDGAQNMVIPFADAKRRWHDFIDTRLDHAFQISSSDPLLSWFLTNEPARADRLVVTPGDPTTEMMAALLYAKLQAFLRADGDVLCCTSLSVEETPTNTVCLTGGPEFYLPVTDAPPESCWWNRADDTISDLLTQS

SEQ ID NO: 17701 - protein, 182 aa, Asaia sp.
  REGION 1..182: note = tr|A0A433WSM1|A0A433WSM1_9PROT 6-pyruvoyl tetrahydropterin synthase OS=Asaia sp. W19 OX=2067395; GN = C0V97_14680 PE=4 SV=1
MSAPELSFTRRFSMGHRLIDGSSERCAIPHGHNEFVTVTLQARLPHRLDGGRNMVVPFAEAKVRWHAFVDTRLDHAFQISAADPLLDWFRDHEPHRLDRLVVTPGDPTTELLAALLYAKLEAFLIADGDMLRCTSLTLQETPTNTVILRDGPDACLPLMPKAPSEYWWHRADHTISDLGVSR

SEQ ID NO: 17702 - protein, 139 aa, Asaia sp.
  REGION 1..139: note = tr|A0A433WQW5|A0A433WQW5_9PROT 6-pyruvoyl tetrahydropterin synthase (Fragment) OS=Asaia sp. W19; OX = 2067395 GN=C0V97_17850 PE=4 SV=1
LPHRLDGGRNMVVPFAEAKVRWHAFVDTRLDHAFQISAADPLLDWFRDHEPHRLDRLVVTPGDPTTELLAALLYAKLEAFLIADGDMLRCTSLTLQETPTNTVILRDGPDACLPLMPKAPSEYWWHRADHTISDLGVSR

SEQ ID NO: 17703 - protein, 132 aa, Asanoa ferruginea
  REGION 1..132: note = tr|A0A3D9ZKH2|A0A3D9ZKH2_9ACTN 6-pyruvoyl-tetrahydropterin synthase OS=Asanoa ferruginea; OX = 53367 GN=DFJ67_3705 PE=4 SV=1
MFSVTVRDHMMIAHSFRGEVFGPAQQLHGATFLVDATFRRAELDADGIVVDIARASDELKAIVGQFNLHNLDDDPTLAGVNTTTEVLAKVIADRLAERATAGDLGEGGRELAGITVTLHESHIAWASYERSL

SEQ ID NO: 17704 - protein, 132 aa, Asanoa hainanensis
  REGION 1..132: note = tr|A0A239JLR1|A0A239JLR1_9ACTN 6-pyruvoyl-tetrahydropterin synthase OS=Asanoa hainanensis; OX = 560556 GN=SAMN05421812_10318 PE=4 SV=1
MFSVTVRDHMMIAHSFRGEVFGPAQQLHGATFLVDATFRRAELDADGIVVDIALASEELKAIVGQFNLRNLDEDPTLAGMNTTTEVLAKVIADRLAERATSGALGAGGPELAGITVTLHESHIAWASYERSL

SEQ ID NO: 17705 - protein, 132 aa, Asanoa ishikariensis
  REGION 1..132: note = tr|A0A1H3RGX6|A0A1H3RGX6_9ACTN 6-pyruvoyl-tetrahydropterin synthase OS=Asanoa ishikariensis OX=137265 GN=SAMN05421684_3787 PE=4 SV=1
MFSVTVRDHMMIAHSFRGEVFGPAQQLHGATFLVDATFRRAELDADGIVVDIALASEELKAIVGQFNLRNLDDDPTLAGMNTTTEVLAKVIADRLAERASSGALGAGGPELAGITVTLHESHIAWASYERSL

SEQ ID NO: 17706 - protein, 118 aa, Asanoa ishikariensis
  REGION 1..118: note = tr|A0A1H3UDB3|A0A1H3UDB3_9ACTN 6-carboxy-5,6,7,8-tetrahydropterin synthase OS=Asanoa ishikariensis OX=137265 GN=SAMN05421684_6913 PE=3 SV=1
MEIFREFTFEAAHRLPNVPEGHKCARLHGHSYRVQVHVSGEVDAQTGWVMDFGDLKKAFQPLHAQLDHYYLNEVAGLENPTSEVLARWIWDRLIGQLPVSAVMVRETCTSGCVYRGEQ

SEQ ID NO: 17707 - protein, 185 aa, Asticcacaulis benevestitus
  REGION 1..185: note = tr|V4PQR8|V4PQR8_9CAUL Uncharacterized protein; OS = Asticcacaulis benevestitus DSM 16100 = ATCC BAA-896; OX = 1121022 GN=ABENE_16625 PE=4 SV=1
MQLQFKRRFSMAHRLRFDHNSKCMTPHGHNEFVVVNLQSKGGRQIDWGNANYAASFADLKRHWHGFVDDSLDHAFQLGHDDPMLGYFQQHEPELLTRLLVIEGDPTTEAVATALYMKLNAILAAHLPDFECVRFEIEETPTNSVVLGPDDIAACPIRLGDWCHRADMSLNDLLPPSSWPQIGSAS

SEQ ID NO: 17708 - protein, 311 aa, unidentified
  source 1..311: note = Asticcacaulis biprosthecum
  REGION 1..311: note = tr|F4QPH6|F4QPH6_9CAUL Dihydroneopterin aldolase; OS = Asticcacaulis biprosthecum C19 OX=715226 GN=folB PE=4; SV = 1
MLIQFKRRFSMAHRLRFDSVSKCMTPHGHNEFVAVSLQPKASAKGMDWGNANYAASFADLKRHWHSFVDDALDHAFQLGVDDPMLGYFRDHESELLPRLLVIQGDPTTEAVATALFMKLNAILAKFRPDFECVRFEIEETPTNSIILTPEDVTGCPIRLGEWCHRADLSLNDLMPVESWGQFAAALKQRSGRATKMMTSRRVFVQGLRIEAAIGIYDHEHGRTQPLIIDAVIDLSLHEIHGLKDTLNYELVGKIARQFVARGHIRLVETLAEDVASELLNLPHVQRVELSIAKPEALSDADRAGVTVVYTH

SEQ ID NO: 17709 - protein, 185 aa, Asticcacaulis excentricus
  REGION 1..185: note = tr|A0A3G9G8Y0|A0A3G9G8Y0_9CAUL 6-carboxytetrahydropterin synthase OS=Asticcacaulis excentricus OX=78587 GN=EM6_2176 PE=4 SV=1
MQIQFTRRFSMAHRLRADRSSKCATPHGHNEFVRVTLKAKSPDTVKWGQSNYAQSFDALKRDWHRFVDEALDHAFQLGADDPLIGFFQAHEPDLLPRLLIIPGDPTTEAVALALYHKLNAILSAHVPDFACVRFEIEETPTNTVILTPEDLSHGPRLADWCHRADLSINDLLPPEDWQKKSDPCL

SEQ ID NO: 17710 - protein, 185 aa, Asticcacaulis excentricus
  REGION 1..185: note = tr|E8RRP2|E8RRP2_ASTEC Uncharacterized protein; OS = Asticcacaulis excentricus (strain ATCC 15261 / DSM 4724 / VKM B-1370 / CB 48) OX=573065 GN=Astex_0677 PE=4 SV=1
MQIQFTRRFSMAHRLRADRSSKCATPHGHNEFVRVSLKAKSPDTVKWGQSNYAQSFDALKRDWHRFVDEALDHAFQLGADDPLIGFFQAHEPDLLPRLLIIPGDPTTEAVALALYHKLNAILSAQVPDFECVRFEIEETPTNTVILTPEDLIHGPRLADWCHRADLSINDLLPPEDWQKKSDPCL

SEQ ID NO: 17711 - protein, 186 aa, Asticcacaulis sp.
  REGION 1..186: note = tr|V4NXL9|V4NXL9_9CAUL 6-pyruvoyl tetrahydropterin synthase OS=Asticcacaulis sp. YBE204 OX=1282363; GN = AEYBE204_07625 PE=4 SV=1
MQIQFTRRFSMAHRLRADRSSKCATPHGHNEFVRVTLKAKSPDTVKWGQSNYAQSFDLLKRDWHRFVDDALDHAFQLGHDDPMIGFFRAHEPDLLPRLLIISGDPTTEAVALALYYKLNAILTAHVPDFECVRFEIEETPTNSVILTPDDLIGAPRLAEWCHRPDMSLNDLLTPEQWARPKGDTCT

SEQ ID NO: 17712 - protein, 185 aa, Asticcacaulis sp.
  REGION 1..185: note = tr|A0A2T5XFF4|A0A2T5XFF4_9CAUL 6-pyruvoyltetrahydropterin/6-carboxytetrahydropterin synthase OS=Asticcacaulis sp. CF398 OX=2135738; GN = C8K45_3693 PE=4 SV=1
MQIQFTRRFSMAHRLLADRASKCATPHGHNEFVRVTLKARSADTVKWGQANYAQSFDALKRDWHRFVDDSLDHAFQLGEADPMIGFFRENEPDLLPRLLVIPGDPTTEAVALALYHKLNAILAASVPDFECVRFEIEETPTNTVILTPEDLVHGPRLADWCHRADMSLNDLLPPEAWTRKDSTCN

SEQ ID NO: 17713 - protein, 182 aa, Asticcacaulis taihuensis
  REGION 1..182: note = tr|A0A1G4QZ93|A0A1G4QZ93_9CAUL 6-pyruvoyltetrahydropterin/6-carboxytetrahydropterin synthase OS=Asticcacaulis taihuensis OX=260084; GN = SAMN02927928_1598 PE=4 SV=1
MQLQFKRRFSMAHRLRFDANSKCLTPHGHNEFVVVSLQARDAGAMRWGNANYAASFADLKRHWHRFVDDSLDHAFQLGHDDPMIGYFRQHEPDLLPRLLVIEGDPTTEAVSAALYMKLNAILAAHLPDFECVRFEIEETPTNSVVLGPADIAACPIRLGEWCHRADMSLNDLLSPEAWDHLT

SEQ ID NO: 17714 - protein, 131 aa, unidentified
  source 1..131: note = Atelocyanobacterium thalassa
  REGION 1..131: note = tr|D3EQA0|D3EQA0_ATETH 6-carboxy-5,6,7,8-tetrahydropterin synthase; OS = Atelocyanobacterium thalassa (isolate ALOHA) OX=1453429; GN = UCYN_09710 PE=3 SV=1
MNLKSSWTIYKEFRFEAAHKLPHHKGKCSRLHGHSWVGRVYITQNNLHDEGSQKGMVMDFGDINNYLNPLIENFLDHYYLNETTGLESPTSEAVAQWIFEQLEKAKLPGLTMVEVKETCTSSASYVKGSNS

SEQ ID NO: 17715 - protein, 271 aa, unidentified
  source 1..271: note = Atelocyanobacterium thalassa
  REGION 1..271: note = tr|D3EQ95|D3EQ95_ATETH 6-pyruvoyl-tetrahydropterin synthase OS=Atelocyanobacterium thalassa (isolate ALOHA); OX = 1453429 GN=UCYN_09660 PE=4 SV=1
MKCTVNRRAEFSASHRYYLPEWSITKNEEEFGANSFSPGHGHNYVLFISLEGEINKYGMVENLSFIKKIIKQRVIDELNYSCLNNIWQEFSDTLPTTENIARIIWEHLYPHLPITGIKLFEHPKLWAEYRGNDMQATLTTQVHFSAAHRLALPNLSLEENTNIYGKCARVHGHGHNYHLDISVSGNIDVRTGMIVNLVDLQNIINDYVIEPFDHTFLNKDIPYFVQTIPTAENITLYIAQLLEEPIRNLGVVLHKVKLTESPNNSCEIYCS

SEQ ID NO: 17716 - protein, 120 aa, unidentified
  source 1..120: note = Atlantibacter hermannii
  REGION 1..120: note = tr|A0A447LSV1|A0A447LSV1_ATLHE 6-carboxy-5,6,7,8-tetrahydropterin synthase; OS = Atlantibacter hermannii OX=565 GN=ygcM PE=3 SV=1
MPTTIYKDFVFEAAHRLPHVPEGHKCGRLHGHSFMVRLEITGEVDPHTGWIVDFADLKAAFKPTYDRLDHYYLNDIPGLENPTSEVLARWIWQQMKPKMPLLSAVTIKETCTAGCVYRGE

SEQ ID NO: 17717 - protein, 120 aa, unidentified; identical to SEQ ID NO: 17716
  source 1..120: note = Atlantibacter hermannii
  REGION 1..120: note = tr|H5V0G3|H5V0G3_ATLHE 6-carboxy-5,6,7,8-tetrahydropterin synthase; OS = Atlantibacter hermannii NBRC 105704 OX=1115512 GN=queD; PE = 3 SV=1

SEQ ID NO: 17718 - protein, 120 aa, unidentified
  source 1..120: note = Atlantibacter subterranea
  REGION 1..120: note = tr|A0A3R9EYK6|A0A3R9EYK6_9ENTR 6-carboxy-5,6,7,8-tetrahydropterin synthase; OS = Atlantibacter subterranea OX=255519 GN=queD PE=3 SV=1
MPTTIFKEFIFEAAHRLPHVPEGHKCGRLHGHSFLVRLEITGEVDPHTGWIVDFADLKAAFKPIYDRLDHYYLNDIPGLENPTSEVLARWIWQQMKPKMPLLSAVMIKETCTAGCVYRGE

SEQ ID NO: 17719 - protein, 174 aa, unidentified
  source 1..174: note = Atopobium deltae
  REGION 1..174: note = tr|A0A133XPS6|A0A133XPS6_9ACTN Putative queuosine biosynthesis protein QueD OS=Atopobium deltae OX=1393034; GN = HMPREF3192_01303 PE=4 SV=1
MYSLKTESAFDSAHFLTDYYGKCENLHGHRWRVVVYLRCDELQQAGTMKDMVMDFGVFKREVRALAKTLDHTLLLEKNSLSPATVACLEAEGFSITTLPFRTTAENLARYFAEKLIEKKLPVAQVDMYETPLNCATYTCDNNSGASGADGVSSAHDAACGADATSAATNEKGTR

SEQ ID NO: 17720 - protein, 140 aa, Atopobium minutum
  REGION 1..140: note = tr|A0A1H4KBQ9|A0A1H4KBQ9_9ACTN 6-carboxy-5,6,7,8-tetrahydropterin synthase OS=Atopobium minutum OX=1381 GN=SAMN04489746_0603 PE=3 SV=1
MYALKTEAAFDSAHFLTDYYGKCENLHGHRWRVVVYIQQESLQQEGTMKDMVVDFGVFKKEVRALADSLDHTFLIEEGSLKQKTLDCLVDEGFSLTLLPFRTTAENLARYFAQQLQQKGLPVSQVDMYETPLNCASYYSA

SEQ ID NO: 17721 - protein, 140 aa, Atopobium minutum; identical to SEQ ID NO: 17720
  REGION 1..140: note = tr|N2BSL7|N2BSL7_9ACTN 6-carboxy-5,6,7,8-tetrahydropterin synthase OS=Atopobium minutum 10063974 OX=997872 GN=HMPREF1091_00522 PE=3 SV=1

SEQ ID NO: 17722 - protein, 142 aa, Atopobium parvulum
  REGION 1..142: note = tr|C8W7S6|C8W7S6_ATOPD 6-carboxy-5,6,7,8-tetrahydropterin synthase OS=Atopobium parvulum (strain ATCC 33793 / DSM 20469 / JCM 10300 / VPI 0546) OX=521095 GN=Apar_108 9 PE=3 SV=1
MYTLKTEYAFDSAHFLTNYYGKCENLHGHRWHVTACISTAELGESGTEKDMVMDFGVFKRKVGALCDSLDHTFLIEEGSLSEKTLNCLTEEGFSLTVLPFRTTAENLAKYLFEQLEAEGLPVSSVEVDETPNNCAIYSKNMN

SEQ ID NO: 17723 - protein, 146 aa, Atopobium rimae
  REGION 1..146: note = tr|B9CNU3|B9CNU3_9ACTN 6-carboxy-5,6,7,8-tetrahydropterin synthase OS=Atopobium rimae ATCC 49626 OX=553184 GN=queD PE=3 SV=1
MVKTVTMYSLKTESSFDASHFLTDYYGKCENLHGHRWRVVAYISQSYLGSEGTTKDMVMDFGVFKKRLRELTDELDHTFLVEEGSLMEKTIECLHEEGFTLSILPFRTTAENLAKYFFDRLAAQGVPVSQIEVYETPLNCAIYTRE

SEQ ID NO: 17724 - protein, 140 aa, Atopobium sp.
  REGION 1..140: note = tr|U1Y5S5|U1Y5S5_9ACTN 6-pyruvoyl tetrahydropterin synthase/QueD family protein OS=Atopobium sp. oral taxon 810 str. F0209 OX=1321773 GN=HMPREF9069_00348 PE=4 SV=1
MFGLKTEACFDSAHFLADYHGKCENLHGHRWRVVVYIKQNQLGAEGTERDMVLDFGEFKRVVREEVAAFDHMFLVEEGTLKQTTIDALRNEGFKLKILPYRTTAENLAKNFAELFGKRCLPISQVDVYETPLNCASYFVD

SEQ ID NO: 17725 - protein, 142 aa, Atopobium sp.
  REGION 1..142: note = tr|Z4WV87|Z4WV87_9ACTN 6-carboxy-5,6,7,8-tetrahydropterin synthase OS=Atopobium sp. BS2 OX=936550 GN=HMPREF1492_0419 PE=3 SV=1
MYTLKTEYAFDSAHFLTNYYGKCENLHGHRWHVTACISTAELGESGTEKDMVMDFGVFKRKVRALCDSLDHTFLIEEGSLSEKTLTCLKEEGFSLTILPFRTTAENLAKYLFEQLESEGLPVSSVEVDETPNNCAIYSKNMK

SEQ ID NO: 17726 - protein, 177 aa, Atopobium vaginae
  REGION 1..177: note = tr|E1L2S6|E1L2S6_9ACTN Putative queuosine biosynthesis protein QueD OS=Atopobium vaginae PB189-T1-4; OX = 866774 GN=HMPREF9248_0485 PE=4 SV=1
MTLAICSRAAFARPQLEGTTMGFGLKTEAHFNAAHFLTDFQGKCENIHGHRWRVVVYLYADTLDTSGENRDMLIDFGVFKKAVREEVAKFDHQFIVERGSLANDTIACLERETFSLLMVDFRTTAENFARYFYTRLTSRGFGVSRVDVYETPNNCAIYYGPCGGPHDGSDASVVHMA

SEQ ID NO: 17727 - protein, 140 aa, Atopobium vaginae
  REGION 1..140: note = tr|A0A135PAI2|A0A135PAI2_9ACTN Putative queuosine biosynthesis protein QueD OS=Atopobium vaginae OX=82135; GN = HMPREF3232_01184 PE=4 SV=1
MGFSLKTQSYFNAAHFLTNYKGKCENLHGHRWQVIVYLYKENLSSQGEDKDMLIDFGEFKQIVRAEVKKFDHTFIVEENSLRPETVRALEQETFTLTFVPFRTTSENFARYFYQRFCALGLPVVRVEVDETPHNCAIYEA

SEQ ID NO: 17728 - protein, 290 aa, Aulosira laxa
  REGION 1..290: note = tr|A0A1Z4U5Z9|A0A1Z4U5Z9_9CYAN Putative 6-pyruvoyl tetrahydropterin synthase OS=Aulosira laxa NIES-50; OX = 1541988 GN=NIES50_31980 PE=4 SV=1
MQCIVNRRAQFSASHRYWLPELSEAENTQQFGACSRFPGHGHNYVLFISLIGELDEYGMVLNLSDVKQVIKREVTSQLDFSYLNDVWPDFQETLPTTENIARVIWQRLAPHLPLVRVQLFEHPELWADYMGNSMEAYLTVSTHFSAAHRLAHPNLSNEENAEIYGKCARTHGHGHNYHLEVTVKGEIDQRTGMIVDLGALNQVIEDYVVEPFDHTFLNKDIPYFGEVVPTAENIALYISNLLRSPVQKLGAKLHKVKLIESPNNSCEIYCTDAESNSVSANANQPMLAGV

SEQ ID NO: 17729 - protein, 128 aa, Aulosira laxa
  REGION 1..128: note = tr|A0A1Z4U527|A0A1Z4U527_9CYAN 6-carboxy-5,6,7,8-tetrahydropterin synthase OS=Aulosira laxa NIES-50 OX=1541988 GN=NIES50_28730 PE=3 SV=1
MPEWKLVTEFTFDSAHYIKDYDGPCGRMHGHTYKVRMEAKSSQLHSSEFCPHPVMVADFRTLRWAKQDVTKGGLDHCVLNEVLPPEYETTAEMIAKYIYDRTKQQLPPNVELKVRVSETANSWVEYHE

SEQ ID NO: 17730 - protein, 132 aa, Aurantimonas coralicida
  REGION 1..132: note = tr|A0A0P0YYV8|A0A0P0YYV8_9RHIZ 6-pyruvoyl-tetrahydropterin synthase OS=Aurantimonas coralicida OX=182270 PE=4 SV=1
MFAVEVRDHMMIAHSLLRPVFGPAQGMHGATFVVDAAFFTDSLDADGLAIDIGLATEILAGVVKPLNYQNLDELEIFAGKVTTTEFLAKHLFDAIAEKIAAGELGDGGARVKRLKIQLHESHVARAWYEADL

SEQ ID NO: 17731 - protein, 132 aa, Aurantimonas manganoxydans
  REGION 1..132: note = tr|A0A0P0Z4Z9|A0A0P0Z4Z9_9RHIZ 6-pyruvoyl-tetrahydropterin synthase OS=Aurantimonas manganoxydans OX=651183 PE=4 SV=1
MFAVEVRDHMMIAHSLPRPVFGPAQGMHGATFVVDAAFFTDSLDEDGLAIDIGLATEILAGVVKPLNYQNLDELEIFAGKVTTTEFLAKHLFDAIAEKIAAGELGDGGARVKRLKIQLHESHVARAWYEADL

SEQ ID NO: 17732 - protein, 132 aa, Aurantimonas sp.
  REGION 1..132: note = tr|A0A1X0SYL3|A0A1X0SYL3_9RHIZ Uncharacterized protein OS=Aurantimonas sp. 22II-16-19i OX=1317114; GN = ATO4_19464 PE=4 SV=1
MFAVEVRDHMMIAHSLPRPVFGPAQGMHGATFVVDAAFFTEDLDADGLAVDIGLASTLLKAVLEPLNYQNLDAIEAFRGKVTTTEFLAKHLFDRLADEIAAGALGDGGGRIRRLKVSLEESHVARAWYEGAL

SEQ ID NO: 17733 - protein, 132 aa, Aurantimonas sp.
  REGION 1..132: note = tr|A0A0Q6F7W4|A0A0Q6F7W4_9RHIZ 6-pyruvoyl tetrahydropterin synthase OS=Aurantimonas sp. Leaf443; OX = 1736378 GN=ASG48_07675 PE=4 SV=1
MYCVEVRDHVMIAHSLPRPVFGPAQGLHGATYVVDAGFFSRDLDADGLCVDIGLATSVLKDVLAPLNYANLDDLAVFEGRVTTTEVVARHVFDEIAAAIASGRLGEGGGRIRRLRVTLHESHVARAFYEADL

SEQ ID NO: 17734 - protein, 158 aa, unidentified
  source 1..158: note = Aureibacillus halotolerans
  REGION 1..158: note = tr|A0A4R6U8F2|A0A4R6U8F2_9BACI 6-pyruvoyltetrahydropterin/6-carboxytetrahydropterin synthase OS=Aureibacillus halotolerans OX=1508390; GN = EV213_10456 PE=4 SV=1
MEAYGFRIVDQLQKIDVDIKKDQLRYHQKRVLVSKEFTFDAAHHLHHYEGKCKNLHGHTYKVIFGVSGFVDERGLMMDFADIKQIWKDEIEVHLDHRYLNETLPPMNTTAENMVVWIYEKMADALSHAVCEEQQARVEFVRLFETPTSFAEARREWME

SEQ ID NO: 17735 - protein, 136 aa, unidentified
  source 1..136: note = Aureicoccus marinus
  REGION 1..136: note = tr|A0A2S7T494|A0A2S7T494_9FLAO 6-pyruvoyl tetrahydrobiopterin synthase OS=Aureicoccus marinus; OX = 754435 GN=BST99_00135 PE=4 SV=1
MRATICRKAHFNAAHRLFNPAWSEEKNREVFGKCFSPHYHGHNFDLEVRIRGEVDPDTGFIMDLAVLGDLIKTEVEERFDHKNLNIECPEFEGIMPSTEYFVKIIYDLLKPHLKGDQQLHITLHETKKNSAEYGDW

SEQ ID NO: 17736 - protein, 140 aa, unidentified
  source 1..140: note = Aureicoccus marinus
  REGION 1..140: note = tr|A0A2S7T7T2|A0A2S7T7T2_9FLAO 6-carboxy-5,6,7,8-tetrahydropterin synthase OS=Aureicoccus marinus OX=754435 GN=BST99_09885 PE=3 SV=1
MTKKNKTAIIRKEHFNAAHRLHNEHWSDEKNKQVFGKCNNPHFHGHNYDLEVRVVGFCDQDTGYVMDAKLLSDLIKEKVLNDFDHKNLNLEVDDFKTLNPTAENIARVIYERIRPHLDEELELKITLYETQRNVVEYPAR

SEQ ID NO: 17737 - protein, 122 aa, Aureimonas altamirensis
  REGION 1..122: note = tr|A0A1M6K2F6|A0A1M6K2F6_9RHIZ 6-carboxy-5,6,7,8-tetrahydropterin synthase OS=Aureimonas altamirensis DSM 21988 OX=1121026 GN=SAMN02745911_2786; PE = 3 SV=1
MFKITKRFEFSASHRLAGLPEDHPCTRLHGHNYIVEIELQASELNAFGFVRDYRDLSAFKRYVDETFDHRHINDVLGHDSPTAEALALHFYNWCSERFPETSAVRVSETPKTWAEYRPLARA

SEQ ID NO: 17738 - protein, 132 aa, Aureimonas altamirensis
  REGION 1..132: note = tr|A0A0B1Q876|A0A0B1Q876_9RHIZ 6-pyruvoyl tetrahydropterin synthase OS=Aureimonas altamirensis; OX = 370622 GN=LA66_02715 PE=4 SV=1
MYAVEVRDHIMIAHSLPRPVFGPAQAMHGATFVVDAAFFTDDLDEDGLAVDIGRATQLLASVLKPLNYANLDASPAFAGKVSTTEAIARHIFDALAGAISAGGLGGAGAPVRKLRITLHESHVARAWYEAAL

SEQ ID NO: 17739 - protein, 132 aa, unidentified
  source 1..132: note = Aureimonas flava
  REGION 1..132: note = tr|A0A3A1WL43|A0A3A1WL43_9RHIZ 6-carboxytetrahydropterin synthase OS=Aureimonas flava; OX = 2320271 GN=D3218_06830 PE=4 SV=1
MFAVEVRDRIMIAHSLPRPVFGPAQGMHGATLEVDAAFFTQDLDEDGLGVDIGLAAAVLGEVLAPLNYQNLDALEVFRGRVTTTEVLARHVFDALAGRIAAGAFGPGGARIRRLRVTLHESQAARAWYEAEL

SEQ ID NO: 17740 - protein, 118 aa, unidentified
  source 1..118: note = Aureimonas flava
  REGION 1..118: note = tr|A0A3A1WGK7|A0A3A1WGK7_9RHIZ 6-carboxy-5,6,7,8-tetrahydropterin synthase OS=Aureimonas flava OX=2320271 GN=queD PE=3 SV=1
MKITQSFFFEAAHRLPNVPPSHKCFRMHGHSYRIDLELEGPVDPHTGFVVDFFDVEHAFAPLMERLDHHTLNEVEGLENPTAEHIAVWIFDHAKPALPLLARVRVFETPHSFAEYEGR

SEQ ID NO: 17741 - protein, 132 aa, unidentified
  source 1..132: note = Aureimonas jatrophae
  REGION 1..132: note = tr|A0A1H0FG34|A0A1H0FG34_9RHIZ 6-pyruvoyl-tetrahydropterin synthase OS=Aureimonas jatrophae OX=1166073 GN=SAMN05192530_102500 PE=4 SV=1
MYAVEVRDHMMIAHSLARPVFGPAQGMHGATFVVDAAFFTADVDEDGLGVDIGLATTVLREVIAPLNYQNLDELPVFRGRVTTTEVLARHVFDALAERIAKGDFGPGGRRIERVRVTLHESHVARAWYEAAL

SEQ ID NO: 17742 - protein, 132 aa, unidentified
  source 1..132: note = Aureimonas phyllosphaerae
  REGION 1..132: note = tr|A0A1I2GAJ9|A0A1I2GAJ9_9RHIZ 6-pyruvoyl-tetrahydropterin synthase OS=Aureimonas phyllosphaerae OX=1166078 GN=SAMN05216566_103249 PE=4 SV=1
MYAVEVRDHIMIAHSLPRPVFGPAQGMHGATFEVDAAFFTREVDADGLGVDMGLAIGLLKEVLAPLNYQNLDELEIFRGRVTTTEVLSRHVFDALAAKIREGAFGPGNGRIERIRVTLHESHVARAWYEGEL

SEQ ID NO: 17743 - protein, 132 aa, Aureimonas sp.
  REGION 1..132: note = tr|A0A0Q5H1N7|A0A0Q5H1N7_9RHIZ 6-pyruvoyl tetrahydropterin synthase OS=Aureimonas sp. Leaf324; OX = 1736336 GN=ASF65_07940 PE=4 SV=1
MYAVEVRDHIMIAHSLPRAVFGPAQGMHGATFEVDAAFFTRDVDADGLGVDMGLAITVLKEVLAPLNYQNLDELEVFRGRVTTTEVLARHVFDALAARIRDGAFGPGSGRIERIRVTLHESHVARAWYEGDL

SEQ ID NO: 17744 - protein, 118 aa, Aureimonas sp.
  REGION 1..118: note = tr|A0A0S2EUC2|A0A0S2EUC2_9RHIZ 6-carboxy-5,6,7,8-tetrahydropterin synthase OS=Aureimonas sp. AU20 OX=1349819 GN=M673_19300 PE=3 SV=1
MYRITKRFDFSASHQLTGLPDDHPCARLHGHNYIVEIELSAEALNAHGFVRDYRDLSELKRYIDERFDHRHLNAVLGHDHVTAETLARHFFEWCRVRFPEVSAARVSETPKTWAEYRP

SEQ ID NO: 17745 - protein, 118 aa, Aureimonas ureilytica
  REGION 1..118: note = tr|A0A175RKT2|A0A175RKT2_9RHIZ 6-carboxy-5,6,7,8-tetrahydropterin synthase OS=Aureimonas ureilytica OX=401562 GN=NS365_15695 PE=3 SV=1
MYRITKMFDFSASHQLAGLSEDHPCSRLHGHNYVVEIELSGETLNPHGFVRDYRELSELKRYIDERFDHRHLNDVLGHDHVTAETLARHFFEWCSERFPETSAARVSETPKTWAEYRP

SEQ ID NO: 17746 - protein, 118 aa, Aureimonas ureilytica
  REGION 1..118: note = tr|A0A175RCA8|A0A175RCA8_9RHIZ 6-carboxy-5,6,7,8-tetrahydropterin synthase OS=Aureimonas ureilytica OX=401562 GN=NS226_02525 PE=3 SV=1
MYRITKTFDFSASHQLAGLSEDHPCSRLHGHNYVVEIELSGETLNPHGFVRDYRELSELKRYIDERFDHRHLNDVLGHDHVTAETLARHFFEWCSERFPETSAARVSETPKTWAEYRP

SEQ ID NO: 17747 - protein, 151 aa, Aureitalea marina
  REGION 1..151: note = tr|A0A2S7KS01|A0A2S7KS01_9FLAO 6-carboxytetrahydropterin synthase QueD OS=Aureitalea marina OX=930804 GN=BST85_11270 PE=4 SV=1
MSQIRLTKKFSFETGHALYGHDGKCRNLHGHSYKLSVTVIGTPIDDSTNPKYGMVIDFSDLKKIVKEEIVDVFDHATVFNGNSPHDELANELIKRGHHVLLVDYQPTSEMMVIDFANKIQKHLPNHIKLHSLKLYETATSYAEWFASDNPS

SEQ ID NO: 17748 - protein, 136 aa, Aureitalea marina
  REGION 1..136: note = tr|A0A2S7KQA3|A0A2S7KQA3_9FLAO 6-carboxy-5,6,7,8-tetrahydropterin synthase OS=Aureitalea marina OX=930804 GN=BST85_07755 PE=3 SV=1
MSLTVYRKAHFNAAHRLYRPDWSDEKNYEVFGKCSNPNFHGHNYNLEVGLTGEVDPETGYLIDLKILKDYIKEEVEERFDHKNLSLEVDDFANLNPTVENIAIVIYNRLRNRLDPKYKITVKLYETDRNYVIYTGN

SEQ ID NO: 17749 - protein, 135 aa, Aureitalea sp.
  REGION 1..135: note = tr|A0A2S0HTC0|A0A2S0HTC0_9FLAO 6-carboxy-5,6,7,8-tetrahydropterin synthase OS=Aureitalea sp. RR4-38 OX=2094025 GN=C5O00_01335 PE=3 SV=1
MSLTVYRKAHFNAAHRLYRKDWSDEKNEEIFGKCNNPHYHGHNYELEVGVTGEVDPETGYLIDIKVLKDLIREEIEDAFDHKNLNLEVPEFANLNPTAENIAKVIWEKLRPRLDSKFDLSVKLYETPRNFVLYTG

SEQ ID NO: 17750 - protein, 149 aa, Aureitalea sp.
  REGION 1..149: note = tr|A0A2S0HV54|A0A2S0HV54_9FLAO 6-carboxy-5,6,7,8-tetrahydropterin synthase OS=Aureitalea sp. RR4-38 OX=2094025 GN=C5O00_04950 PE=3 SV=1
MNNIQITKMFTFETGHALYGYDGKCRNVHGHSYKLSVTVIGTPISDKNHVKYGMVIDFGDLKKIVKEEIVDVFDHATVFNKNTPHVELAKELETRGHNVLLVDYQPTSEMMVIDFAGKIKKRLPDSVQLHSLKLQETDTSYAAWYASEN

SEQ ID NO: 17751 - protein, 137 aa, unidentified; identical to SEQ ID NO: 16765
  source 1..137: note = Auricoccus indicus
  REGION 1..137: note = tr|A0A1Q1G2Y6|A0A1Q1G2Y6_9STAP 6-carboxy-5,6,7,8-tetrahydropterin synthase OS=Auricoccus indicus OX=1849491 GN=BVH56_07255 PE=3 SV=1

SEQ ID NO: 17752 - protein, 145 aa, Avibacterium avium
  REGION 1..145: note = tr|A0A379AQD8|A0A379AQD8_AVIAV 6-carboxy-5,6,7,8-tetrahydropterin synthase; OS = Avibacterium avium OX=751 GN=queD PE=3 SV=1
MFKVSKEFSFDMAHLLDGHDGKCQNLHGHTYKLQVEVQGELHASGAKKGMVMDFSDLKQIVKEQILTPMDHAFIYDETSERESQIARLLQDLNSKTFAMPTRTTAEEMARFIFQRLSAHLPISAIRLWETPTSFCEYRENKWRED

SEQ ID NO: 17753 - protein, 140 aa, Avibacterium endocarditidis
  REGION 1..140: note = tr|A0A2S5AI02|A0A2S5AI02_9PAST 6-carboxy-5,6,7,8-tetrahydropterin synthase; OS = Avibacterium endocarditidis OX=380674 GN=queD PE=3 SV=1
MFKVSKEFSFDMAHLLDGHDGKCQNLHGHTYKLQVEVQGELHASGAKKGMVMDFSDLKQIVKEQILTPMDHAFIYDETSGRESKIARLLQDLNSKTFAMPTRTTAEEMARFIFQRLSEHLQISAIRLWETPTSFCEYREN

SEQ ID NO: 17754 - protein, 140 aa, Avibacterium gallinarum
  REGION 1..140: note = tr|A0A379AXG3|A0A379AXG3_AVIGA 6-carboxy-5,6,7,8-tetrahydropterin synthase; OS = Avibacterium gallinarum OX=755 GN=queD PE=3 SV=1
MFKVSKEFSFDMAHLLDGHDGKCQNLHGHTYKLQVEVQGELHASGAKKGMVMDFSDLKQIVKEQILTPMDHAFIYDETSERESKIARLLQDLNSKTFAMPTRTTAEEMARFIFQRLSAHLPISAIRLWETPTSFCEYREN

SEQ ID NO: 17755 - protein, 141 aa, Avibacterium paragallinarum
  REGION 1..141: note = tr|A0A2S5AY57|A0A2S5AY57_AVIPA 6-carboxy-5,6,7,8-tetrahydropterin synthase; OS = Avibacterium paragallinarum OX=728 GN=queD PE=3 SV=1
MFKVSKEFSFDMAHLLDGHDGKCQNLHGHTYKLQVEVQGELHPSGAKKGMVMDFSDLKKIVKEQILAPMDHAFIYDETSERECKIARLLQELNSKTFAMPTRTTAEEMARFIFQRLEQQGLPLSAIRLWETPTSFCEYRKS

SEQ ID NO: 17756 - protein, 141 aa, Avibacterium paragallinarum
  REGION 1..141: note = tr|A0A4Q7GDZ4|A0A4Q7GDZ4_AVIPA 6-carboxy-5,6,7,8-tetrahydropterin synthase; OS = Avibacterium paragallinarum OX=728 GN=queD PE=3 SV=1
MFKVSKEFSFDMAHLLDGHDGKCQNLHGHTYKLQVELQGELHPSGAKKGMVMDFSDLKKIVKEQILAPMDHAFIYDETSERECKIARVLQELNSKTFAMPTRTTAEEMARFIFQRLEQQGLPLSAIRLWETPTSFCEYRKS

SEQ ID NO: 17757 - protein, 140 aa, Avibacterium volantium
  REGION 1..140: note = tr|A0A447SST7|A0A447SST7_AVIVO 6-carboxy-5,6,7,8-tetrahydropterin synthase; OS = Avibacterium volantium OX=762 GN=queD PE=3 SV=1
MFKVSKEFSFDMAHLLDGHDGKCQNLHGHTYKLQVEVQGELHASGAKKGMVIDFSDLKQIVKEQILTPMDHAFIYDETSERESQIARLLQDLNSKTFAMPTRTTAEEMARFIFQRLSEHLPISAIRLWETPTSFCEYRED

SEQ ID NO: 17758 - protein, 149 aa, Azoarcus communis
  REGION 1..149: note = tr|A0A2U8H7P0|A0A2U8H7P0_9RHOO 6-carboxy-5,6,7,8-tetrahydropterin synthase OS=Azoarcus communis OX=41977 GN=queD PE=3 SV=1
MRITRRLEFDAGHRIPDHASQCRHLHGHRYALEVTLSGNIIDAAGQAVNGMVMDFADVKKVANEMIVDRWDHAFLVYRDDTQVAAFLASMPGHKTVTLDVVPTAENLAAEAFRVLDGAYQDVYGNQLQLERVRLYETPNCWADAVRGER

SEQ ID NO: 17759 - protein, 195 aa, Azoarcus communis
  REGION 1..195: note = tr|A0A323UQT7|A0A323UQT7_9RHOO 6-carboxytetrahydropterin synthase QueD OS=Azoarcus communis SWub3 = DSM 12120 OX=1121029 GN=DNK49_22065 PE=4; SV = 1
MLIRKLFKFENAHIVRGCSTRRCSHSIHGHSYKVELLLEAHALDDGQMVYDFGLLKGYVSDLIDAFDHAVTLWSGDEPDYVSAMRRHTERWVLIPVSPSAEQFSRLFFRLVDTTLSLTAMCNGEDGVRLHSIIVHETETGYAQCFREDADNLRMGHIDLNAIEFAQAITKKWHDPHLFERLKHGQRLPVPIEGPV

SEQ ID NO: 17760 - protein, 195 aa, Azoarcus indigens
  REGION 1..195: note = tr|A0A4R6E0U2|A0A4R6E0U2_9RHOO 6-pyruvoyltetrahydropterin/6-carboxytetrahydropterin synthase OS=Azoarcus indigens OX=29545 GN=C7389_10760 PE=4; SV = 1
MLIRKLFKFENAHIVRGCSTRRCSHSIHGHSYKVELLLEAHAFDNGQMIYDFGLLKGAVRELIDAFDHAVTLWSGDNLDYLAAMCRHSERWVLIPVSPSAEQFSRLFFCLVDAVLALSDMANGEADVQLHSVIVHETDTGYAQCFREDALNPRMGLIDLHAIEFAPAITAPWRDPELFERIKHGQQIPACLEELA

SEQ ID NO: 17761 - protein, 151 aa, Azoarcus indigens
  REGION 1..151: note = tr|A0A4R6DSL8|A0A4R6DSL8_9RHOO 6-pyruvoyltetrahydropterin/6-carboxytetrahydropterin synthase OS=Azoarcus indigens OX=29545 GN=C7389_11630 PE=4; SV = 1
MRITRRLEFDAGHRIPDHASQCRHLHGHRYVLEVTLSGDIIKADGQPVNGMVMDFADVKRIANEQVVSRWDHAFLVYRGDSLVVDFLATVPGHKTVVLDVVPTAENLAAVAFRILDAAYQDIYGNHLRLERVRLYETPNCWADALRDESRS

SEQ ID NO: 17762 - protein, 149 aa, Azoarcus sp.
  REGION 1..149: note = tr|A0A4S4ATN7|A0A4S4ATN7_9RHOO 6-carboxytetrahydropterin synthase QueD OS=Azoarcus sp. CC-YHH848 OX=2565932 GN=queD PE=4 SV=1
MRITRRLEFDAGHRIPDHASQCRHIHGHRYAIEVTLSGRIIDAAGQPVNGMVMDFADVKAIAKHHLVDLWDHAFLVYRGDTVVVELLARIPGHKTVVLDVIPTAENLAHLAFRILDPLYRDTYGNDLRLEQVRLYETPNCWADAIRGAE

SEQ ID NO: 17763 - protein, 132 aa, Azoarcus sp.
  REGION 1..132: note = tr|A0A558D242|A0A558D242_9RHOO 6-carboxytetrahydropterin synthase OS=Azoarcus sp. PHD; OX = 1628740 GN=FHK80_15625 PE=4 SV=1
MYSLNVRDHIMIAHSFQGEIFGPAQRMHGATYVIDACFQREELDADGLVVDIGLASTVLHAKLAELNFRNLNEEAAFKGRNTTTEFMARVIFERMAVAIRDGELGEGGRGLTGLKVTLHESHIAWASYEGRL

SEQ ID NO: 17764 - protein, 151 aa, Azoarcus tolulyticus
  REGION 1..151: note = tr|A0A1N6RSI3|A0A1N6RSI3_9RHOO 6-pyruvoyltetrahydropterin/6-carboxytetrahydropterin synthase OS=Azoarcus tolulyticus OX=34027; GN = SAMN05421829_103351 PE=4 SV=1
MRITRRLEFDAGHRIPDHASQCRHLHGHRYAIEITLSGGIIEAAGQPVNGMVMDFGEVKSIAKAHVVDIWDHAFLVFRGDAQVMQFLASMPGHKTVVLDCVPTAENLAHEAFRILDPRYHDSYGNHLRLERVRLYETPNCWADAVRGDAGL

SEQ ID NO: 17765 - protein, 119 aa, Azomonas agilis
  REGION 1..119: note = tr|A0A562J0W1|A0A562J0W1_9GAMM 6-carboxy-5,6,7,8-tetrahydropterin synthase OS=Azomonas agilis OX=116849 GN=LX59_00837 PE=3 SV=1
MEIFKEFTFESAHRLPFVPLGHKCGRLHGHSFRVAIYIKGEVNPATGWIRDFGELKEIFKPIYEQLDHHYLNEIPGLENPTSENIAKWIWQRLKPILPELSRIRIHETCTSGCEYTGGD

SEQ ID NO: 17766 - protein, 193 aa, Azonexus fungiphilus
  REGION 1..193: note = tr|A0A495WCW2|A0A495WCW2_9RHOO 6-pyruvoyltetrahydropterin/6-carboxytetrahydropterin synthase OS=Azonexus fungiphilus OX=146940 GN=DFR40_1429; PE = 4 SV=1
MLIRKLFKFENAHIVRGCSTRRCSHSLHGHSYKVELILEAHAFDNGQMLYDFGLLKGGPRDLIDAFDHAVAIWDGDDADYVAACQRFSERWISLPVSPSAEQFSRLFFRLVDTLLRLTDTVNGEQDVRLHSVIVHETETGYAQCFREDAENPRMGLIELDRIVFSEAITQAWRDPQLFEKLKRGERLRNPSAV

SEQ ID NO: 17767 - protein, 193 aa, Azonexus hydrophilus
  REGION 1..193: note = tr|A0A1R1I4V9|A0A1R1I4V9_9RHOO 6-carboxytetrahydropterin synthase QueD OS=Azonexus hydrophilus OX=418702 GN=BJN45_09595 PE=4 SV=1
MLIRKLFKFENAHIVRGCSTRRCSHSIHGHSYKVELILEAHAFDNGQMLYDFGLLKGGPRDLIDAFDHAVAIWDGDDADYVAACKRFSERWISLPVSPSAEQFSRLFFRLVDTLLGLTDTVNGEQDVRLHSVIVHETETGYAQCFREDADNPRMGLIALDRIVFSDAITQAWRDPQLFEKLKRGERLSNPASV

SEQ ID NO: 17768 - protein, 139 aa, Azorhizobium caulinodans
  REGION 1..139: note = tr|A8HSC6|A8HSC6_AZOC5 Uncharacterized protein; OS = Azorhizobium caulinodans (strain ATCC 43989 / DSM 5975 / JCM 20966 / NBRC 14845 / NCIMB 13405 / ORS 571); OX = 438753GN=AZC_4167 PE=4 SV=1
MSSPASLFAVEVRDHIMIAHSFKGDLFGPAQALHGATFVVDVAFMSERLTEEGVVVDIGRATEALKAVLGPLNYRNLDEVPAFADINSTTEVLAKHIFDAMAEAARTGALGTGGDRLCRLRVTLHESHAARAWFEGPIA

SEQ ID NO: 17769 - protein, 118 aa, Azorhizobium caulinodans
  REGION 1..118: note = tr|A8HQX0|A8HQX0_AZOC5 6-carboxy-5,6,7,8-tetrahydropterin synthase; OS = Azorhizobium caulinodans (strain ATCC 43989 / DSM 5975 / JCM 20966 / NBRC 14845 / NCIMB 13405 /ORS 571) OX=438753; GN = AZC_1071 PE=3 SV=1
MKITQAFTFEAAHRLPNVPQTHRCFRMHGHSYRVELVLDGDVDPHTGFVVDFFDVEAAFGPVLKRLDHYCLNEIEGLENPTAEHIAIWIWERTKPLLAQLATVRVFETPLSWAEYEGR

SEQ ID NO: 17770 - protein, 131 aa, Azorhizobium sp.
  REGION 1..131: note = tr|A0A258K6I8|A0A258K6I8_9RHIZ Uncharacterized protein OS=Azorhizobium sp. 32-67-21 OX=1970319; GN = B7Y84_06820 PE=4 SV=1
MYAVEVRDHIMIAHSFRGDMFGPAQALHGATFVVDVAFFSADLTEEGVVVDIGKAHEVLKQVLAPLSYRNLDDLPEFAGRNTTTEVLCRHIFDAMADAARAGQLGAGQLVRLKVTLHESHVARAWFEADLS

SEQ ID NO: 17771 - protein, 124 aa, Azorhizobium sp.
  REGION 1..124: note = tr|A0A258N5Q3|A0A258N5Q3_9RHIZ Uncharacterized protein OS=Azorhizobium sp. 35-67-15 OX=1970320; GN = B7Y65_02640 PE=4 SV=1
MIAHSFKGDLFGPAQALHGATFVVDVAFFARELTAEGVVVDIGRALDALKAVLGPLTYRNLDDLPDFAGRNTTTEVLCRHIFDRMADAARTGALGAGGDALAKLRVTLHESHVARAWYEGDIAA

SEQ ID NO: 17772 - protein, 148 aa, Azospira oryzae
  REGION 1..148: note = tr|G8QJ86|G8QJ86_AZOOP 6-carboxy-5,6,7,8-tetrahydropterin synthase OS=Azospira oryzae (strain ATCC BAA-33 / DSM 13638 / PS) OX=640081; GN = Dsui_2137 PE=3 SV=1
MLITRRLEFDAGHRIPDHRSQCRHLHGHRYVLEITLAGDIISKDGDPANGMVMDFSDVKALAKAHVVDVWDHAFLVYAGDKAVVEFLQTLPDHKTVVLDCIPTAENLSETAFRILDAVYQDSYGNHLRLQQVRLYETPNCWADAVRRD

SEQ ID NO: 17773 - protein, 120 aa, Azospira oryzae
  REGION 1..120: note = tr|A0A2W5FHR9|A0A2W5FHR9_9RHOO 6-carboxytetrahydropterin synthase QueD (Fragment); OS = Azospira oryzae OX=146939 GN=queD PE=4 SV=1
MLITRRLEFDAGHRIPNHSSNCRHLHGHRYALEVTLSGNIITSEGAPEQGMVMDFAEVKAIAQRHVVDAWDHAFLVYAQDTVVVEFLRSLPGHKTVVLAAPPTAENLALEAFRILDAAYR

SEQ ID NO: 17774 - protein, 151 aa, Azospira sp.
  REGION 1..151: note = tr|A0A2R5E7U0|A0A2R5E7U0_9RHOO 6-carboxytetrahydropterin synthase QueD OS=Azospira sp. I13 OX=1765050 GN=AZSI13_08770 PE=4 SV=1
MLITRRLEFDAGHRIPDHRSQCRHLHGHRYVLEITLAGDIISKDGDPANGMVMDFSDVKALAKAHVVDVWDHAFLVYAGDRAVVDFLQTLPGHKTVVLDCIPTAENLSQTAFRILDAVYRDTYGNHLRLEQVRLYETPNCWADALRQEVSA

SEQ ID NO: 17775 - protein, 148 aa, Azospira sp.; identical to SEQ ID NO: 17772
  REGION 1..148: note = tr|A0A5H2YA37|A0A5H2YA37_9RHOO 6-carboxytetrahydropterin synthase QueD OS=Azospira sp. I09 OX=1765049 GN=AZSP09_11030 PE=4 SV=1

SEQ ID NO: 17776 - protein, 132 aa, Azospirillum brasilense
  REGION 1..132: note = tr|A0A2W5ELU0|A0A2W5ELU0_AZOBR 6-carboxy-5,6,7,8-tetrahydropterin synthase; OS = Azospirillum brasilense OX=192 GN=DI601_12945 PE=3 SV=1
MIETLKEFTFEAAHQLPPFSGLHGHSFLVQVFLRGEPDPVYGWSHNLYEVEKVVEKVRLKIDHTYLNDIEGLEHPSLENVARWIWNQLSGDLDGLDRVMVRRGPDGLAEGCTYSGHTGGEKREAGEIYNLGG

SEQ ID NO: 17777 - protein, 181 aa, Azospirillum brasilense
  REGION 1..181: note = tr|A0A060D9V0|A0A060D9V0_AZOBR 6-pyruvoyl tetrahydropterin synthase OS=Azospirillum brasilense; OX = 192 GN=ABAZ39_02260 PE=4 SV=1
MTTNEFTLLFRRRFSMAHRLIAGDSVKCAVPHGHNETVSVKLEAVDPAPLDGAANMVESFARAKATWHRWIDGHVDHALQLSHRDPLIGYFREHEPEKLPMLLITPGDPTTEALAACMMAKANALFATETSPLRCVEVEIEETPTNTVIFRGVPEHHLDAGYLGLPGAPWWLRGDMSINDL

SEQ ID NO: 17778 - protein, 137 aa, Azospirillum sp.
  REGION 1..137: note = tr|A0A239FM12|A0A239FM12_9PROT 6-pyruvoyl-tetrahydropterin synthase OS=Azospirillum sp. RU38E OX=1907313 GN=SAMN05880556_107148 PE=4 SV=1
MYSLTVRDHIMIAHSFKGAIFGPAQQLHGATFVVDAEFRRPALSADGLVVDIGQAADLLKQVLAPLNYRNLDDVPELAGRNTTTEFLAGEIHRRLSDGIRAGALGADGQQVASLKISLHESHTAWAAFEAPVAGEVA

SEQ ID NO: 17779 - protein, 179 aa, Azospirillum sp.
  REGION 1..179: note = tr|A0A2U1YLN7|A0A2U1YLN7_9PROT 6-pyruvoyl tetrahydropterin synthase OS=Azospirillum sp. TSO5; OX = 716760 GN=TSO5_18630 PE=4 SV=1
MSEGFTITRQIGIDAGHRIPDHGSKCRHLHGHRYVVEATCRSVDGTLQAAGEENGMVLDFGFLKEEMMEHVDAPCDHGLILSFHDEEVLAMLAPPGIDAGAWLEELRGTVRAKGYAATEETRLGQKLYVIPFPPTAECLARHWYERLGPAVSARSRGKAKLVKVTVWETPNCRADYGVN

SEQ ID NO: 17780 - protein, 118 aa, Azotobacter beijerinckii
  REGION 1..118: note = tr|A0A1I4E1L0|A0A1I4E1L0_9GAMM 6-carboxy-5,6,7,8-tetrahydropterin synthase OS=Azotobacter beijerinckii OX=170623 GN=SAMN04244574_02642 PE=3 SV=1
MELFKEFVFEAAHRLPHVPAGHKCGRLHGHSFRAAIYIEGEVDPYTGWIRDFSEIKEIFKPIYERLDHNYLNEIEGLENPTSEILAQWIWRQLKPLLPELSRVRIHETCTSGCEYRGD

SEQ ID NO: 17781 - protein, 118 aa, Azotobacter beijerinckii
  REGION 1..118: note = tr|A0A1H6RVA1|A0A1H6RVA1_9GAMM 6-carboxy-5,6,7,8-tetrahydropterin synthase OS=Azotobacter beijerinckii OX=170623 GN=SAMN04244572_02667 PE=3 SV=1
MELFKEFVFEAAHRLPHVPAGHKCGRLHGHSFRAAIYIEGEVDPYTGWIRDFSEIKEIFKPIYERLDHNYLNEIEGLENPTSEILAKWIWRQLKPLLPELSRVRIHETCTSGCEYRGD

SEQ ID NO: 17782 - protein, 118 aa, Azotobacter chroococcum
  REGION 1..118: note = tr|A0A0C4WHW4|A0A0C4WHW4_9GAMM 6-carboxy-5,6,7,8-tetrahydropterin synthase OS=Azotobacter chroococcum NCIMB 8003 OX=1328314 GN=Achr_19180 PE=3 SV=1
MELFKEFVFEAAHRLPHVPAGHKCGRLHGHSFRVAIYIEGEVDPYTGWIRDFSEIKEIFKPIYERLDHNYLNEIEGLENPTSEILAKWIWQQLKPRLPELSRVRIHETCTSGCEYRGD

SEQ ID NO: 17783 - protein, 118 aa, Azotobacter chroococcum; identical to SEQ ID NO: 17782
  REGION 1..118: note = tr|A0A4R1PJI3|A0A4R1PJI3_9GAMM 6-carboxy-5,6,7,8-tetrahydropterin synthase OS=Azotobacter chroococcum OX=353 GN=queD PE=3 SV=1

SEQ ID NO: 17784 - protein, 194 aa, Azotobacter vinelandii
  REGION 1..194: note = tr|C1DM00|C1DM00_AZOVD 6-pyruvoyl-tetrahydropterin synthase OS=Azotobacter vinelandii (strain DJ / ATCC BAA-1303) OX=322710 GN=Avin_29180 PE=4 SV=1
MLIRKLFKFESAHIVRHCTTRRCSRSLHGHSYRVEVLIEADALDRGQMVYDFALLKGAVADFIDAFDHAVVFWSGDDPAYIEQCKRFSERWVMLPVSPSAEQLSRVFFRLIDAVLANTEMVNGESGVRLYSVIVHETDTGYAQCFREDAGNPRMGIIRLEEIGFSARVEEDWANPRMFAELLAREPFVNRSPGS

SEQ ID NO: 17785 - protein, 118 aa, Azotobacter vinelandii
  REGION 1..118: note = tr|M9YJA2|M9YJA2_AZOVI 6-carboxy-5,6,7,8-tetrahydropterin synthase OS=Azotobacter vinelandii CA6 OX=1283331 GN=AvCA6_28600 PE=3 SV=1
MELFKEFVFEAAHRLPRVPAGHKCGRLHGHSFRVAIYIEGEVDPHTGWIRDFSEIKEIFKPIYERLDHHYLNEIEGLENPTSEILAKWIWRQLKPLLPELSRVRIHETCTSGCEYRGD

SEQ ID NO: 17786 - protein, 145 aa, unidentified; identical to SEQ ID NO: 17081
  source 1..145: note = Bacillaceae bacterium
  REGION 1..145: note = tr|A0A3E0JR94|A0A3E0JR94_9BACI 6-carboxy-5,6,7,8-tetrahydropterin synthase OS=Bacillaceae bacterium OX=1889774 GN=queD PE=3 SV=1

SEQ ID NO: 17787 - protein, 145 aa, unidentified
  source 1..145: note = Bacillaceae bacterium
  REGION 1..145: note = tr|A0A271M2X7|A0A271M2X7_9BACI 6-carboxy-5,6,7,8-tetrahydropterin synthase OS=Bacillaceae bacterium SAOS 7 OX=2015052 GN=queD PE=3 SV=1
MIQQIYPAPVHSYRYELNKDFQFAAAHYIPHEDAGACRRLHGHTYFVNVTVVGNELNESGFLVNFQEIKHLIHKRFDHRLLNEDTLFNEENPNYFPTTEVVARTIWEVMQQSLNKMANKPRCIQVFLRETPTSYVVYRPQEEDFQ

SEQ ID NO: 17788 - protein, 144 aa, unidentified
  source 1..144: note = Bacilli bacterium
  REGION 1..144: note = tr|A0A0K0GE91|A0A0K0GE91_9FIRM 6-carboxy-5,6,7,8-tetrahydropterin synthase OS=Bacilli bacterium VT-13-104 OX=1637974 GN=WH51_02355 PE=3 SV=1
MMQQIYPVTEHPYAYELNKDFQFAAAHYVPHEDAGKCQNMHGHTYFTNITIAGNELDHTGFLVNFKKIKDLIHKRFDHHVMNEDTKFSDQDAEYFPTTEVVARTIYEIIQEYLNTLQNKPTCVQVYLRETPTSYCIYRPKEKTL

SEQ ID NO: 17789 - protein, 146 aa, Bacillus aerius
  REGION 1..146: note = tr|A0A3A9DQI7|A0A3A9DQI7_9BACI 6-carboxy-5,6,7,8-tetrahydropterin synthase OS=Bacillus aerius OX=293388 GN=queD PE=3 SV=1
MLTQIYPQPSHPYSFELNKDMQMSAAHFIPREDAGACSRVHGHTYTINITIAGDELNESGFLVNFSTIKKLIHGEYDHTLLNDHQEFSGESADQIPSTEVVAKTIYDKTEAYLKDLKNRPHCVQVFVRETPTSYVVYRPKPGVHNG

SEQ ID NO: 17790 - protein, 146 aa, Bacillus aerophilus
  REGION 1..146: note = tr|A0A410KUG6|A0A410KUG6_9BACI 6-carboxy-5,6,7,8-tetrahydropterin synthase OS=Bacillus aerophilus OX=293389 GN=queD PE=3 SV=1
MLSQIYPQTNHPFLFELNKDMHVSAAHFIPREDAGACSRVHGHTYTINITIAGDHLDDSGFLVNFSTLKKLIHGQYDHTLLNDHEEFSSNDPYAMPTTEVVAKTVYDKVAAYLTTLANKPVCVQVFVRETPTSYCIYRPKRVELND

SEQ ID NO: 17791 - protein, 141 aa, Bacillus akibai
  REGION 1..141: note = tr|W4QWP1|W4QWP1_BACA3 6-carboxy-5,6,7,8-tetrahydropterin synthase OS=Bacillus akibai (strain ATCC 43226 / DSM 21942 / JCM 9157 / 1139); OX = 1236973 GN=JCM9157_3693 PE =3 SV=1
MMQQFYPQVQHSYRFELNKDMHLAAAHLIPDAAAGQCQYMHGHTYFINITIAGDALDDLGFLINFKRIKEIVHKRYDHSVLNDHPEYKDVYPTTERVAEQIWKAITQELEMLAHQPKCLQVVVRETPTSYVVYRPKPEELA

SEQ ID NO: 17792 - protein, 163 aa, unidentified
  source 1..163: note = Bacillus albus
  REGION 1..163: note = tr|A0A1J9U3N4|A0A1J9U3N4_9BACI 6-carboxytetrahydropterin synthase QueD OS=Bacillus albus; OX = 2026189 GN=queD PE=4 SV=1
MDNFFGFRIVENLQKMDKDIQRKQLKYHNKRVMVSKEFTFDAAHHLHCYEGKCKNLHGHTYKVVFGISGYVNEIGLAIDFGDIKEIWKNEIEIYLDHRYLNETLPAMNTTAENMVVWIYEKMAEALIKDNRVNEYKGARVEFVRLFETPTSYAEVRREWMLDE

SEQ ID NO: 17793 - protein, 141 aa, Bacillus alcalophilus
  REGION 1..141: note = tr|A0A094WLZ5|A0A094WLZ5_BACAO 6-carboxy-5,6,7,8-tetrahydropterin synthase OS=Bacillus alcalophilus ATCC 27647 = CGMCC 1.3604 OX=1218173; GN = AJ85_17785 PE=3 SV=1
MIYNYYPQVPHSYRYELNKDMHLSAAHYIDNDLAGKCQKVHGHTYTINVTIVGDALDKLGFLIDFKLIKDQIHKKYDHSILNDHPDFKGKHPTTEVVAETITTEINRFLKQQTNQPKCIQTIVRETPTSYVVYRPKASELE

SEQ ID NO: 17794 - protein, 146 aa, Bacillus altitudinis
  REGION 1..146: note = tr|A0A5D4PW93|A0A5D4PW93_9BACI 6-carboxy-5,6,7,8-tetrahydropterin synthase OS=Bacillus altitudinis OX=293387 GN=queD PE=3 SV=1
MLSQIYPQTDHPFSFELNKDMHLSAAHFIPREDAGACSRIHGHTYTINITIAGDHLDESGFLVNFSTLKKLIHGQYDHTLLNDHEEFSSNDPYAMPTTEVVAKTVYDKVAAYLTTLANKPVCVQVFVRETPTSYCIYRPKRVELND

SEQ ID NO: 17795 - protein, 146 aa, Bacillus altitudinis
  REGION 1..146: note = tr|A0A5C2CC60|A0A5C2CC60_9BACI 6-carboxytetrahydropterin synthase QueD OS=Bacillus altitudinis OX=293387 GN=queD PE=4 SV=1
MLSQIYPQTNHPFSFELNKDMHVSAAHFIPREDAGACSRVHGHTYTINITIAGDHLDDSGFLVNFSTLKKLIHGQYDHTLLNDHEEFSSNDPYAMPTTEVVAKTVYDKVAAYLTTLANKPVCVQVFVRETPTSYCIYRPKRVELND

SEQ ID NO: 17796 - protein, 146 aa, Bacillus amyloliquefaciens
  REGION 1..146: note = tr|A0A4V7TMF2|A0A4V7TMF2_BACAM 6-carboxy-5,6,7,8-tetrahydropterin synthase OS=Bacillus amyloliquefaciens OX=1390 GN=queD PE=3 SV=1
MLSQIYPQVQHPYSFELNKDMHISAAHFIPRESAGACSRVHGHTYTVNITVAGDELDDSGFLVNFSVLKKLVHGAYDHTLLNDHDEFSDDDRYSLPTTEVVAKTIYDKVQSYLETLENQPVCVQIFVRETPTSYCVYRPKKGDMNG

SEQ ID NO: 17797 - protein, 146 aa, Bacillus amyloliquefaciens
  REGION 1..146: note = tr|A0A5C2Q299|A0A5C2Q299_BACAM 6-carboxy-5,6,7,8-tetrahydropterin synthase OS=Bacillus amyloliquefaciens OX=1390 GN=queD PE=3 SV=1
MLSQIYPQVQHPYSFELNKDMHISAAHFIPRESAGACSRVHGHTYTVNITVAGDELDDSGFLVNFSVLKKLVHGAYDHTLLNDHEEFSDDDRYSLPTTEVVAKTIYDKVQSYLETLENQPVCVQVFVRETPTSYCVYRPKKGDRNG

SEQ ID NO: 17798 - protein, 163 aa, Bacillus anthracis
  REGION 1..163: note = tr|A0A5K1VL02|A0A5K1VL02_BACAN 6-carboxytetrahydropterin synthase QueD OS=Bacillus anthracis OX=1392 GN=queD PE=4 SV=1
MDNFFGFRIVENLQKMDKDIQRKQLKYHNKRVMVSKEFTFDAAHHLHCYEGKCKNLHGHTYKVVFGISGYVNEIGLAIDFGDIKEIWKNEIEIYLDHRYLNETLPAMNTTAENMVVWIYEKMAEALTKDNRVNEYKGARVEFVRLFETPTSYAEVRREWMLDE

SEQ ID NO: 17799 - protein, 163 aa, Bacillus anthracis
  REGION 1..163: note = tr|A0A3P1UCM9|A0A3P1UCM9_BACAN 6-carboxytetrahydropterin synthase QueD OS=Bacillus anthracis OX=1392 GN=queD PE=4 SV=1
MDNFFGFRIVENLQKMDKDIQRKQLKYHNKRVMVSKEFTFDAAHHLHCYEGKCKNLHGHTYKVVFGISGYVNEIGLAIDFGDIKEIWKNEIEIYLDHRYLNETLPAMNTTAENMVVWIYEKMAEALTKDNRANEYKGARVEFVRLFETPTSYAEVRREWMLDE

SEQ ID NO: 17800 - protein, 144 aa, Bacillus aquimaris
  REGION 1..144: note = tr|A0A366EX98|A0A366EX98_9BACI 6-carboxy-5,6,7,8-tetrahydropterin synthase OS=Bacillus aquimaris OX=189382 GN=DET59_102408 PE=3 SV=1
MIQQIYPTPDHTYEFELNKDMHFAAAHYIPHVDAGSCQEIHGHTYFANITIGGDQLDDSGFLINFQHIKKLIHKRFDHKVMNEDELFSAENSNVFPTTEVVAKVMWEIIQAHLDTLPHQPECLQVFLRETPTSYVIYRPKVRQS

SEQ ID NO: 17801 - protein, 144 aa, Bacillus aquimaris
  REGION 1..144: note = tr|A0A5D4TZ96|A0A5D4TZ96_9BACI 6-carboxy-5,6,7,8-tetrahydropterin synthase OS=Bacillus aquimaris OX=189382 GN=FZC85_12110 PE=3 SV=1
MIQQIYPTPDHTYEFELNKDMHFAAAHYIPHADAGSCQDIHGHTYFANITIGGDQLDDSGFLINFQHIKKLIHKRFDHKVMNEDELFSAEKSNMFPTTEVVAKVMWEIIQAHLDTLPHQPKCLQVFLRETPTSYVIYRPKGRKS

SEQ ID NO: 17802 - protein, 147 aa, Bacillus aryabhattai
  REGION 1..147: note = tr|A0A264YWH8|A0A264YWH8_9BACI 6-carboxy-5,6,7,8-tetrahydropterin synthase OS=Bacillus aryabhattai OX=412384 GN=queD PE=3 SV=1
MLQQIYPQVVHPYSYELNKDMNFAAAHFVPHESAGKCQQVHGHTYFVNLTIAGDELDSSGFLVNFATLKKIVSGQFDHTLLNNHKHLFNEEDANDFPTSEVIARKIYELVQAHLDALENKPVCVQVFVRETPTSYVIYRPKKVKRDE

SEQ ID NO: 17803 - protein, 146 aa, Bacillus aryabhattai
  REGION 1..146: note = tr|A0A1G6Q7K2|A0A1G6Q7K2_9BACI 6-carboxy-5,6,7,8-tetrahydropterin synthase OS=Bacillus aryabhattai B8W22 OX=1358420 GN=SAMN04487777_102397 PE=3; SV = 1
MLQQMYPQVFHDYEYELNKDMQFAAAHFVPHTEAGKCRQVHGHTYFVNLTVAGDTLDEAGFLVNFALLKKIVSGQFDHTLLNDHSIFNEENPNDFPTTEVVARKIYELVQEYLDTLPNKPSCVQVFVRETPTSYVVYRPKKVKKRG

SEQ ID NO: 17804 - protein, 157 aa, Bacillus asahii
  REGION 1..157: note = tr|A0A3T0KPR2|A0A3T0KPR2_9BACI 6-pyruvoyl tetrahydrobiopterin synthase OS=Bacillus asahii OX=228899; GN = queD PE=4 SV=1
MYGFRIVDKLQKLDQDIQRNQLNYHKKRVLVSKEFTFDAAHHLHCYEGKCKNLHGHTYRVVFGLSGFTDARGLMMDFGDIKQIWKDKIEIYLDHRYLNETLPLMNTTAENMVVWIYEKMADALREEPQYKGARVEFVRLFETPTSYAEARREWMEDE

SEQ ID NO: 17805 - protein, 157 aa, Bacillus asahii
  REGION 1..157: note = tr|A0A398BHU5|A0A398BHU5_9BACI 6-carboxytetrahydropterin synthase QueD OS=Bacillus asahii; OX = 228899 GN=queD PE=4 SV=1
MYGFRIVDKLQKLDQDIQRNQLNYHKKRVLVSKEFTFDAAHHLHCYEGKCKNLHGHTYRVVFGLSGFTDDRGLMIDFGDIKQIWKDKIEIYLDHRYLNETLPLMNTTAENMVVWIYEKMADALREGPQYKGARVEFVRLFETPTSYAEARREWMEDE

SEQ ID NO: 17806 - protein, 146 aa, Bacillus atrophaeus
  REGION 1..146: note = tr|A0A0H3E287|A0A0H3E287_BACA1 6-carboxy-5,6,7,8-tetrahydropterin synthase OS=Bacillus atrophaeus (strain 1942) OX=720555 GN=BATR1942_04625 PE=3; SV = 1
MISQIYPQAQHPYSFELNKDMHISAAHFIPRESAGACSRVHGHTYTVNITVAGDELDDSGFLVNFSVLKKLVHGSYDHTLLNDHDEFSNDDPYSLPTTEVVAKTIYNKVQSYLETLANKPACVQVFVRETPTSYCVYRPKKGGLNG

SEQ ID NO: 17807 - protein, 146 aa, Bacillus atrophaeus
  REGION 1..146: note = tr|A0A384IA57|A0A384IA57_BACAT 6-carboxy-5,6,7,8-tetrahydropterin synthase OS=Bacillus atrophaeus OX=1452 GN=queD PE=3 SV=1
MISQIYPQAQHPYSFELNKDMHISAAHFIPRESAGACSRVHGHTYTVNITVAGDELDDSGFLVNFSVLKKLVHGSYDHTLLNDHDEFSNDDPYSLPTTEVVAKTIYDKVQSYLETLENKPACVQVFVRETPTSYCVYRPKKGGLNG

SEQ ID NO: 17808 - protein, 146 aa, unidentified
  source 1..146: note = Bacillus australimaris
  REGION 1..146: note = tr|A0A0P7F4K4|A0A0P7F4K4_9BACI 6-carboxy-5,6,7,8-tetrahydropterin synthase OS=Bacillus australimaris OX=1326968 GN=AKG37_11270 PE=3 SV=1
MLSQIYPQTNHPFSFELNKDMHVSAAHFIPREDAGACSRVHGHTYTINITIAGDELDESGFLVNFSTLKKLIHGQYDHTLLNDHEEFSSNDPYAMPTTEVVAKTVHDKVAAYLSTLANKPTCVQVFVRETPTSYCIYRPKRVEING

SEQ ID NO: 17809 - protein, 162 aa, Bacillus azotoformans
  REGION 1..162: note = tr|A0A072NID9|A0A072NID9_BACAZ Queuosine biosynthesis protein QueD OS=Bacillus azotoformans MEV2011; OX = 1348973 GN=M670_03518 PE=4 SV=1
MENKIFGFRIVEDLQKIDKDINRNQLKYHNKRVLVSKEFTFDAAHHLHCYDGKCKNLHGHTYKVVFGISGFVNEIGLAIDFGDIKDIWKAEIEIYLDHRYLNETLPNMNTTAENMVVWIYEKMKESLEKRQNQYDGARVEFVRLYETPTSYAEAKREWMELE

SEQ ID NO: 17810 - protein, 162 aa, Bacillus azotoformans
  REGION 1..162: note = tr|K6E4X0|K6E4X0_BACAZ 6-pyruvoyl tetrahydrobiopterin synthase OS=Bacillus azotoformans LMG 9581 OX=1131731 GN=BAZO_04670 PE=4 SV=1
MENKIFGFRIVEDLQKIDKDINRNQLKYHNKRVLVSKEFTFDAAHHLHCYDGKCKNLHGHTYKVVFGISGFVNEIGLAIDFGDIKDIWKAEIEIYLDHRYLNETLPKMNTTAENMVVWIYEKMKESLEKRQNQYDGARVEFVRLYETPTSYAEAKREWMELE

SEQ ID NO: 17811 - protein, 162 aa, unidentified
  source 1..162: note = Bacillus bacterium
  REGION 1..162: note = tr|A0A3D0E5U3|A0A3D0E5U3_9BACI 6-carboxytetrahydropterin synthase QueD OS=Bacillus bacterium OX=2053512 GN=queD PE=4 SV=1
MEKDFFGFRIVEDLQKLDRDIKKDELKYHHKRVLVSKEFTFDAAHHLHCYEGKCKNLHGHTYKVIFGISGFVDEIGLVIDFGDIKEIWKEEIEIYLDHRYINETLPNMNTTAENMVVWIYEKMKESLSNRPEKNNGVQVEFVRLYETPTSYAETRREWMEIE

SEQ ID NO: 17812 - protein, 163 aa, unidentified
  source 1..163: note = Bacillus bacterium
  REGION 1..163: note = tr|A0A506QKC4|A0A506QKC4_9BACI 6-carboxytetrahydropterin synthase QueD OS=Bacillus bacterium OX=2053512 GN=queD PE=4 SV=1
MDNFFGFRIVENLQKMDKDIQRKQLKYHNKRVMVSKEFTFDAAHHLHCYEGKCKNLHGHTYKVVFGISGYVNEIGLAIDFGDIKEIWKNEIEIYLDHRYLNETLPAMNTTAENMVVWIYEKMAEALIKDDRANEYKGARVEFVRLFETPTSYAEVRREWMFDE

SEQ ID NO: 17813 - protein, 145 aa, Bacillus badius
  REGION 1..145: note = tr|A0A0C2XZ10|A0A0C2XZ10_BACBA 6-carboxy-5,6,7,8-tetrahydropterin synthase OS=Bacillus badius OX=1455 GN=A3781_10960 PE=3 SV=1
MMQQIYPAPAHSYRYELNKDFQFAAAHYVPHEEAGACRRLHGHTYFANITVVGDELNESGFLVNFQDIKNLIHKRFDHTVLNEDSLFDDMDPNHFPTTEAVARKFWEVIQESLNKLPNQPRCLQVFLRETPTSYVVFRPRKEDFQ

SEQ ID NO: 17814 - protein, 160 aa, Bacillus bataviensis
  REGION 1..160: note = tr|A0A561DEI3|A0A561DEI3_9BACI 6-pyruvoyltetrahydropterin/6-carboxytetrahydropterin synthase OS=Bacillus bataviensis OX=220685 GN=FB550_105155; PE = 4 SV=1
MYGFRIVDKLQKINEDIQPNQLKYHHKRVMVSKEFTFDAAHHLHCYEGKCKNLHGHTYKVIFGLSGFVDERGLMMDFGDIKEIWKNEIEIHLDHRYLNETLPPMNTTAENMVVWIYEKMAEVLKQAERQEKYAGARVEFVRLFETPTSYAEARREWMENE

SEQ ID NO: 17815 - protein, 163 aa, unidentified
  source 1..163: note = Bacillus bombysepticus
  REGION 1..163: note = tr|A0A023P3J8|A0A023P3J8_9BACI 6-pyruvoyl tetrahydrobiopterin synthase OS=Bacillus bombysepticus str. Wang OX=1330043 GN=CY96_05885 PE=4 SV=1
MDNFFGFRIVENLQKMDKDIQRKQLKYHNKRVMVSKEFTFDAAHHLHCYEGKCKNLHGHTYKVVFGISGYVNEIGLAIDFGDIKEIWKNEIEIYLDHRYLNETLPAMNTTAENMVVWIYEKMAEALTKENRVNEYKGARVEFVRLFETPTSYAEVRREWMLDE

SEQ ID NO: 17816 - protein, 158 aa, Bacillus boroniphilus
  REGION 1..158: note = tr|W4RTQ4|W4RTQ4_9BACI Queuosine biosynthesis QueD; OS = Bacillus boroniphilus JCM 21738 OX=1294265; GN = JCM21738_4454 PE=4 SV=1
MYEFRIVDQLQKIDKDIKREQLKYHSKRVLVSKEFTFDAAHHLHEYEGKCKNLHGHTYKVIFGLSGFVDARGLMIDFGDIKDIWKSDIEIYLDHRYLNETLPPMNTTAENMVAWIYEKMAEALANRQHLYDGARVEFVKLYETPTSYAEARREWMEIE

SEQ ID NO: 17817 - protein, 156 aa, Bacillus butanolivorans
  REGION 1..156: note = tr|A0A0M0EZ49|A0A0M0EZ49_9BACI 6-carboxytetrahydropterin synthase QueD OS=Bacillus butanolivorans OX=421767 GN=queD PE=4 SV=1
MYGFTIVDKLQKIDKDIQRNQLNYSSKRVMVSKEFTFDAAHHLHDYEGKCKNLHGHTYRVIFGLSGYTDSRGLMIDFGDIKEIWKNEIEIHLDHRYLNETLPLMNTTAENMVVWIYEKMAEALLTKNYEGARVEFVRLYETPTSYAEARREWMESE

SEQ ID NO: 17818 - protein, 273 aa, unidentified
  source 1..273: note = Bacillus caldolyticus
  REGION 1..273: note = tr|A0A2H5KEQ5|A0A2H5KEQ5_BACCL 6-pyruvoyl tetrahydropterin synthase OS=Bacillus caldolyticus OX=1394; GN = CWI35_02825 PE=4 SV=1
MLYLTRTIAFSAAHRYWIEDWSVEKNKAVFGLCSNLNGHGHDYQLDVTVKGLVNPLTGIVVNITQVDAIMKEVVSAELDGKFLNQEHPYFQTHIPTTEMMVTYIWDVLQGKFSCCQLCKVKLQENETLYAVKEEQELVQLTRRYYFSSAHRLHSDQLTNEENQRLFGKCNNRYGHGHNYCLEVTVIGKPDPITGMVVNLAELDEIVNREVLVKFDHKHLNLDTDEFKQINPTAENIVIVIWELLAPYLSSLYKIGLWETQKNYFEYFGPHKEK

SEQ ID NO: 17819 - protein, 145 aa, unidentified
  source 1..145: note = Bacillus caldolyticus
  REGION 1..145: note = tr|A0A2H5KFX2|A0A2H5KFX2_BACCL 6-carboxy-5,6,7,8-tetrahydropterin synthase OS=Bacillus caldolyticus OX=1394 GN=queD PE=3 SV=1
MMHQLYPQVAHHYRYELNKDMHIAAAHFIPHEAAGSCANVHGHTYIVNVTVAGDELDESGFLVNFQTLKQLVHRKLDHTLLNDHSDWFDGHDPNRFPTSEVVARTIYETIQRYLDTLPHKPKCLQVFVRETPTSYVVYRPKAGER

SEQ ID NO: 17820 - protein, 145 aa, unidentified
  source 1..145: note = Bacillus camelliae
  REGION 1..145: note = tr|A0A2N3LM31|A0A2N3LM31_9BACI 6-carboxy-5,6,7,8-tetrahydropterin synthase OS=Bacillus camelliae OX=1707093 GN=queD PE=3 SV=1
MIQQFYPQPAPHPYRFELNKDMNFSTAHFIPNEKAGKCSFTHGHTYFVNLTIAGDDLDEMGMLVNFSDLKKLVHGRYDHKLLNDFPEFEKLPPSTEAVAQTIYELVANYLDTLPNLPKCIQVLVRETPTSYVIYRPRNEGNDRHE

SEQ ID NO: 17821 - protein, 160 aa, unidentified
  source 1..160: note = Bacillus campisalis
  REGION 1..160: note = tr|A0A0M2SWC0|A0A0M2SWC0_9BACI 6-pyruvoyl tetrahydrobiopterin synthase OS=Bacillus campisalis; OX = 1408103 GN=WQ57_07565 PE=4 SV=1
MYGFRIVDKLQKMDEDIKRNQLKYHHKRVLVSKEFTFDSAHHLHAYEGKCKNLHGHTYRVIFGLSGFVDDRGLLIDFGDIKEIWKTEIEIHLDHKYLNETLPPMNTTAENMVVWIYEKMAEALEKEERKRVYDGARVEFVRLYETPTSYAEARREWMEVE

SEQ ID NO: 17822 - protein, 160 aa, Bacillus canaveralius
  REGION 1..160: note = tr|A0A2N5GG91|A0A2N5GG91_9BACI 6-carboxytetrahydropterin synthase QueD OS=Bacillus canaveralius OX=1403243 GN=queD PE=4 SV=1
MYGFRIVDKLQKIDEDINRDQLKYHAKRVLVSKEFTFDAAHHLHCYEGKCKNLHGHTYKVIFGLSGFVDHRGLLIDFADIKEIWKNEIEIHLDHKYLNETLPPMNTTAENIVVWIYEQMAEALKRQDRQQKYDGARVEFVRLYETPTSYAEARREWMEVE

SEQ ID NO: 17823 - protein, 272 aa, Bacillus canaveralius
  REGION 1..272: note = tr|A0A2N5GN87|A0A2N5GN87_9BACI 6-pyruvoyl tetrahydropterin synthase OS=Bacillus canaveralius; OX = 1403243 GN=CU635_08985 PE=4 SV=1
MLYLSRKLYFSAAHSYRIDDWTEEQNRKMFGPCSNSNGHGHDYTMEVMVKGELNDKSGIVVNITDIDTAVKSFIQIELDGKFLNKENNYFQKHIPTTENIVSYIWDSLIDKIDNCDLHKIRLYENDFLYSEKEDNEMVRLTRKYHFCTAHRLHSDQLSEEKNLSLFGKCNNPYGHGHNYYLEVTVSGVPDPITGMIANIADIDKTVEEEIINRFDHKHLNLDTEEFKELNPTSENVAVVTWNLLAPKMNNLYKIGLYETEKNYFEYFGTEKG

SEQ ID NO: 17824 - protein, 160 aa, unidentified
  source 1..160: note = Bacillus caseinilyticus
  REGION 1..160: note = tr|A0A1H3IK90|A0A1H3IK90_9BACI 6-pyruvoyltetrahydropterin/6-carboxytetrahydropterin synthase OS=Bacillus caseinilyticus OX=1503961; GN = SAMN05421736_101833 PE=4 SV=1
MFGFKIVDKLQKLGVDIKKSELKYHAKRVLVSKEFTFDAAHHLHCYEGKCKNLHGHTYKVVFGISGYVDEIGLVIDFGDIKNIWKKEIEVFLDHRYLNEMLPPMNTTAENMVVWIYEKMSQALLAGESSDNGQGIRVEFVRLYETPTSYAEARREWMEVE

SEQ ID NO: 17825 - protein, 158 aa, unidentified
  source 1..158: note = Bacillus cavernae
  REGION 1..158: note = tr|A0A433HS88|A0A433HS88_9BACI 6-carboxytetrahydropterin synthase QueD OS=Bacillus cavernae OX=1674310 GN=queD PE=4 SV=1
MYGFRIVDKLQKIDEDIKQDQLKYHSKRVLVSKEFTFDAAHHLHFYDGKCKNLHGHTYRVIFGISGFVDDLGLMIDFGDLKEIWKNEIEIFLDHKYLNETLPAMNTTAENMVVWIYEKMLEALATRAQHYDGARVEFVRLYETPTSYAEARREWMEVE

SEQ ID NO: 17826 - protein, 155 aa, Bacillus cellulosilyticus
  REGION 1..155: note = tr|E6TRB9|E6TRB9_BACCJ Uncharacterized protein; OS = Bacillus cellulosilyticus (strain ATCC 21833 / DSM 2522 / FERM P-1141 / JCM 9156 / N-4) OX=649639 GN=Bcell_2373; PE = 4 SV=1
MFGFKIVENLQKMDKDIVRKDLKYHNKRVLVSKEFTFDAAHHLHSYEGKCKNLHGHTYKVIFGISGHVDEIGLVIDFSDIKQIWKEQIEIYLDHRYLNETLPKMNTTAENMVVWIFERMEHALQAFPNKCRVEFVKLFETPTSYAEVKREWMIDV

SEQ ID NO: 17827 - protein, 163 aa, Bacillus cereus
  REGION 1..163: note = tr|R8CV70|R8CV70_BACCE Queuosine biosynthesis protein QueD OS=Bacillus cereus HuA2-9 OX=1053204; GN = IG9_03690 PE=4 SV=1
MDNFFGFRIVENLQKMDKDIQREQLKYHNKRVMVSKEFTFDAAHHLHCYEGKCKNLHGHTYKVVFGISGYVNEIGLAIDFGDIKEIWKNEIEIYLDHRYLNETLPEMNTTAENMVVWIYEKMAEALTKDNRANEYKGARVEFVRLFETPTSYAEVRREWMLDE

SEQ ID NO: 17828 - protein, 163 aa, Bacillus cereus; identical to SEQ ID NO: 17827
  REGION 1..163: note = tr|C2SH78|C2SH78_BACCE 6-pyruvoyl tetrahydrobiopterin synthase OS=Bacillus cereus BDRD-ST196; OX = 526976 GN=bcere0014_11760 PE=4 SV=1

SEQ ID NO: 17829 - protein, 160 aa, Bacillus circulans
  REGION 1..160: note = tr|A0A0J1LDL0|A0A0J1LDL0_BACCI 6-pyruvoyl tetrahydrobiopterin synthase OS=Bacillus circulans OX=1397; GN = ABW02_08535 PE=4 SV=1
MHDFRIVDRLQKFGEDISSKQLKYHCKRVMVSKEFTFDAAHHLHAYEGKCMNLHGHTYKVVFGISGYLDNRGLMIDFGDIKKIWKTEIEIYLDHRYLNETLPPMNTTAENIVYWIFEKMEEALNKDEVKQADNGARVEFVRLYETPTSYAEMRREWMESE

SEQ ID NO: 17830 - protein, 160 aa, Bacillus circulans
  REGION 1..160: note = tr|A0A561HA63|A0A561HA63_BACCI 6-pyruvoyltetrahydropterin/6-carboxytetrahydropterin synthase OS=Bacillus circulans OX=1397 GN=FHW50_111138; PE = 4 SV=1
MHDFRIVDRLQKFGEDISSKQLKYHCKRVMVSKEFTFDAAHHLHAYEGKCMNLHGHTYKVVFGISGYLDNRGLMIDFGDIKKIWKTEIEIYLDHRYLNETLPPMNTTAENIVYWIFEKMEEALNKDEITQADNGARVEFVRLYETPTSYAEMRREWMESE

SEQ ID NO: 17831 - protein, 141 aa, Bacillus clausii
  REGION 1..141: note = tr|Q5WG42|Q5WG42_BACSK 6-carboxy-5,6,7,8-tetrahydropterin synthase OS=Bacillus clausii (strain KSM-K16) OX=66692 GN=ABC2128 PE=3 SV=1
MIQQIYPAPIHSYRYELNKDMHVAAAHYIDDERAGRCQRVHGHTYFINLTIVGDALDETGFLVNFSKLKQAVHGRFDHRLLNEDTLFETAPPSTEKMAETIYKVVQEQLDTCPNRPLCIQVYVRETPTSYVVYRPKEHARG

SEQ ID NO: 17832 - protein, 141 aa, Bacillus clausii
  REGION 1..141: note = tr|A0A268RVK5|A0A268RVK5_BACCS 6-carboxy-5,6,7,8-tetrahydropterin synthase OS=Bacillus clausii OX=79880 GN=queD PE=3 SV=1
MIQQIYPTPIHSYRYELNKDMHVAAAHYIDDERAGQCQRVHGHTYFINLTIVGDDLDETGFLVNFSKLKQAVHGRFDHRLLNEDALFETAPPSTEKMAETIYKVVQEQLDTCPNRPLCIQVYVRETPTSYVVYRPKEHARG

SEQ ID NO: 17833 - protein, 163 aa, Bacillus coagulans
  REGION 1..163: note = tr|A0A150JVA9|A0A150JVA9_BACCO Uncharacterized protein OS=Bacillus coagulans OX=1398 GN=B4100_0030 PE=4; SV = 1
MSEYHIPEKVQIFGKDIRKEQLKYHHKRTAVTKAFTFDAAHHLHLYEGKCKSLHGHTYKVKITCSAYLNEIGISIDFGDLKKIFQEAVEEKLDHQYLNNVLPPMNTTAENMVVWMWEEIENRLNQQKDYKDRGARLEELVLYETPKSYATMKREWMEEETDGK

SEQ ID NO: 17834 - protein, 163 aa, Bacillus coagulans
  REGION 1..163: note = tr|A0A150JSA8|A0A150JSA8_BACCO Uncharacterized protein OS=Bacillus coagulans OX=1398 GN=B4098_0184 PE=4; SV = 1
MSEYHTPEKVQIFGKDIRKEELKYHRKRTAVTKEFTFDAAHHLHLYEGKCKRLHGHTYKVKITCSAYLNEIGISIDFGDLKKIFQEAVEEKLDHQYLNNVLPPMNTTAENMVVWMWEEIENRLNRQKDYKDRGARLEELVLYETPKSYATMKREWMEEETDGK

SEQ ID NO: 17835 - protein, 148 aa, Bacillus cohnii
  REGION 1..148: note = tr|A0A223KPM3|A0A223KPM3_9BACI 6-carboxy-5,6,7,8-tetrahydropterin synthase OS=Bacillus cohnii OX=33932 GN=BC6307_09240 PE=3 SV=1
MLQQIYPQVPHSYQYELNKDMQIAAAHYIPTVSAGKCRQVHGHTYFINVTVAGNELDDSGFLVNFQILKKLLHDKYDHTVLNDHKEVFSDEDSNHFPTTEVVARKMWETIEQHLQTLPNSPTCLQIFVRETPTSYCIYRPKRDCSKNE

SEQ ID NO: 17836 - protein, 160 aa, unidentified
  source 1..160: note = Bacillus cucumis
  REGION 1..160: note = tr|A0A2N5HSM6|A0A2N5HSM6_9BACI 6-carboxytetrahydropterin synthase QueD OS=Bacillus cucumis OX=1740721 GN=queD PE=4 SV=1
MYGFRIVDKLQKIEEDIKPSQLKYHHKRVLVSKEFTFDAAHHLHCYEGKCKNLHGHTYKVIFGLSGFVDERGLMMDFGDIKEIWKNEIEIFLDHRYLNETLPPMNTTAENMVVWIYEKMDEALKQPERQEQYVGARVEFVRLFETPTSYAEARREWMENE

SEQ ID NO: 17837 - protein, 164 aa, unidentified
  source 1..164: note = Bacillus cytotoxicus
  REGION 1..164: note = tr|A7GMN3|A7GMN3_BACCN Uncharacterized protein; OS = Bacillus cytotoxicus (strain DSM 22905 / CIP 110041 / 391-98 / NVH 391-98) OX=315749 GN=Bcer98_1065 PE=4 SV=1
MEQSFFGFRVVENLQKIDKDIQRQQLKYHNKRVMVSKEFTFDAAHHLHCYDGKCKNLHGHTYKVVFGISGYVNEIGIAIDFGDIKEIWKNEIEIYLDHRYLNETLPAMNTTAENMVVWIYEKMAEALTKGGRAEEYKGARVEFVRLFETPTSYTEVRREWMLDE

SEQ ID NO: 17838 - protein, 164 aa, unidentified; identical to SEQ ID NO: 17837
  source 1..164: note = Bacillus cytotoxicus
  REGION 1..164: note = tr|A0A2S1A8P5|A0A2S1A8P5_9BACI 6-carboxytetrahydropterin synthase QueD OS=Bacillus cytotoxicus OX=580165 GN=queD PE=4 SV=1

SEQ ID NO: 17839 - protein, 159 aa, Bacillus daliensis
  REGION 1..159: note = tr|A0A1G9ZJ63|A0A1G9ZJ63_9BACI 6-pyruvoyltetrahydropterin/6-carboxytetrahydropterin synthase OS=Bacillus daliensis OX=745820; GN = SAMN04488053_101117 PE=4 SV=1
MFGFRIVEKLQKIGQDIQKEDLKYHQKRVMVSKEFTFDAAHHLHEYEGKCKNLHGHTYTVVFGISGFVDEIGIMIDFGDIKEIWKEYIEPSLDHRYLNEMLPLMNTTAENMVVWIYEQMNEALQHRNQSGSQQFRVEFVRLFETPTSYAEVKREWMEDE

SEQ ID NO: 17840 - protein, 158 aa, unidentified
  source 1..158: note = Bacillus deserti
  REGION 1..158: note = tr|A0A2N5M843|A0A2N5M843_9BACI 6-carboxytetrahydropterin synthase QueD OS=Bacillus deserti OX=673318 GN=queD PE=4 SV=1
MYGFRIVDKLQKLHEDIKLEQLKYHSKRVMVSKEFTFDAAHHLHHYEGKCKNLHGHTYKVIFGISGYLDERGLLIDFGDIKEIWKNEIEIFLDHRYINETLPSMNTTAENMVAWIYEKMKDALGNRKEQYDGARVEFVRLYETQTSFAEARREWMELG

SEQ ID NO: 17841 - protein, 146 aa, unidentified
  source 1..146: note = Bacillus enclensis
  REGION 1..146: note = tr|A0A1C4B7J4|A0A1C4B7J4_9BACI 6-carboxy-5,6,7,8-tetrahydropterin synthase OS=Bacillus enclensis OX=1402860 GN=GA0061094_1951 PE=3 SV=1
MMLQQIYPSPTHEYEFELNKDMHFAASHYIPHEDAGDCQKVHGHTYYANITIGGNQLDDSGFLINFKHIKKLIHKRFDHTLLNEDSLFSDEDPLKFPTTEVVAKTVCEIIQGHLDTLEHRPVCLQVFLRETPTSYVIYRPKRGKVS

SEQ ID NO: 17842 - protein, 147 aa, Bacillus endophyticus
  REGION 1..147: note = tr|A0A329ENA8|A0A329ENA8_9BACI 6-carboxy-5,6,7,8-tetrahydropterin synthase OS=Bacillus endophyticus OX=135735 GN=A4R27_10980 PE=3 SV=1
MLQQIYPSVAHDFSYELNKDMHFASAHFVPHESAGACQNMHGHTYFANVTIAGDELDETGFLVNFQSLKKLVAKEFDHTLLNDHEAFDDRDPNFFPTTEVVARTIYERIQKHLDTLKNKPVCLQVFLRETPTSYVVYRPKRGKKSES

SEQ ID NO: 17843 - protein, 147 aa, Bacillus endophyticus
  REGION 1..147: note = tr|A0A3N6BNG1|A0A3N6BNG1_9BACI 6-carboxy-5,6,7,8-tetrahydropterin synthase OS=Bacillus endophyticus OX=135735 GN=FH5_02952 PE=3 SV=1
MLQQIYPSVAHDFSYELNKDMHFAAAHFVPHESAGACQNMHGHTYFANVTIAGDELDETGFLVNFQSLKKLVAKEFDHTLLNDHEAFDDRDPNFFPTTEVVARTIYERIQKHLDTLENKPVCLQVFLRETPTSYVVYRPKRGKKSES

SEQ ID NO: 17844 - protein, 160 aa, unidentified
  source 1..160: note = Bacillus endozanthoxylicus
  REGION 1..160: note = tr|A0A5J5HTG2|A0A5J5HTG2_9BACI 6-carboxytetrahydropterin synthase QueD OS=Bacillus endozanthoxylicus OX=2036016 GN=queD PE=4 SV=1
MYGFRIVDKLQKMDIDIKSQQLKYHTKRVLVSKEFTFDAAHHLHQYEGKCKNLHGHTYKVIFGISGFVDERGILIDFGDIKEIWKSEIEIHLDHRYLNETLPLMNTTAENIVVWIYEKMTEALQKENRQQLYSGARVEFVRLYETPTSYAEARREWMENE

SEQ ID NO: 17845 - protein, 147 aa, unidentified
  source 1..147: note = Bacillus filamentosus
  REGION 1..147: note = tr|A0A1X7F0C9|A0A1X7F0C9_9BACI 6-carboxy-5,6,7,8-tetrahydropterin synthase OS=Bacillus filamentosus OX=1402861 GN=queD PE=3 SV=1
MLQQIYPSVAHDFSYELNKDMHFASAHFVPHESAGACQNMHGHTYFANVTIAGDELDETGFLVNFQSLKKLVAKEFDHTLLNDHEAFDDRDPNFFPTTEVVARTIYERIQKHLDTLENKPVCLQVFLRETPTSYVVYRPKRGKKSES

SEQ ID NO: 17846 - protein, 158 aa, Bacillus firmus
  REGION 1..158: note = tr|W7KVG8|W7KVG8_BACFI 6-pyruvoyl tetrahydrobiopterin synthase OS=Bacillus firmus DS1; OX = 1307436 GN=PBF_15859 PE=4 SV=1
MYGFRIVDKLQKINEDIKPDQLKYHHKRVMVSKEFTFDSAHHLHCYEGKCKNLHGHTYKVIFGISGFVDDRGLMIDFGDIKEIWKNEIEIYLDHKYLNETLPPMNTTAENMVVWIYEKMAESLQNRVEQYDGARVEFVRLFETPTSYAEARREWMEVE

SEQ ID NO: 17847 - protein, 158 aa, Bacillus firmus
  REGION 1..158: note = tr|A0A380XQ03|A0A380XQ03_BACFI Putative 6-pyruvoyl tetrahydropterin synthase OS=Bacillus firmus OX=1399; GN = queD PE=4 SV=1
MYGFRIVDKLQKINEDIQPDQLKYHHKRVMVSKEFTFDSAHHLHCYEGKCKNLHGHTYKVIFGISGFVDDRGLMIDFGDIKEIWKNEIEIYLDHKYLNETLPPMNTTAENMVVWIYEKMAESLQNRKEQYDGARVEFVRLFETPTSYAEARREWMEVE

SEQ ID NO: 17848 - protein, 147 aa, Bacillus flexus
  REGION 1..147: note = tr|A0A4P8XA73|A0A4P8XA73_9BACI 6-carboxy-5,6,7,8-tetrahydropterin synthase OS=Bacillus flexus OX=86664 GN=queD PE=3 SV=1
MLQQIYPQVAHPYSYELNKDMNFAAAHFVPHESAGKCQQVHGHTYFVNLTIAGDELDSSGFLVNFATLKKIVSGQFDHTLLNDHKELFNEEDANDFPTSEVIARKIYELVQAHLDELENKPACVQVFVRETPTSYVVYRPKKVKRDE

SEQ ID NO: 17849 - protein, 160 aa, Bacillus foraminis
  REGION 1..160: note = tr|A0A4R2BJS6|A0A4R2BJS6_9BACI 6-pyruvoyltetrahydropterin/6-carboxytetrahydropterin synthase OS=Bacillus foraminis OX=279826 GN=EV146_102399; PE = 4 SV=1
MYGFRIVEKLQKIDEDIQRDQLKYHHKRVLVSKEFTFDSAHHLHAYEGKCKNLHGHTYRVIFGLSGFVDDRGLMIDFGEIKEIWKSEIEIYLDHRYLNETLPPMNTTAENMVVWIYEKMAEALRSGDRRQKYDGARVEFVRLYETPTSYAEARREWMEVE

SEQ ID NO: 17850 - protein, 162 aa, unidentified
  source 1..162: note = Bacillus freudenreichii
  REGION 1..162: note = tr|A0A448FGA2|A0A448FGA2_9BACI Putative 6-pyruvoyl tetrahydropterin synthase OS=Bacillus freudenreichii; OX = 1783501 GN=queD PE=4 SV=1
MGKDFFGFRIVEDLQKMDRDIKKDELKYHKKRVLVSKEFTFDAAHHLHCYEGKCKNLHGHTYKVIFGISGFVDEIGLVIDFGDIKEIWKQEIEIYLDHRYLNETLPKMNTTAENMVVWIYEKMRESLNNRQDQYDGVQVEFVRLYETPTSYAEARREWMEIE

SEQ ID NO: 17851 - protein, 164 aa, unidentified
  source 1..164: note = Bacillus gaemokensis
  REGION 1..164: note = tr|A0A073KAX7|A0A073KAX7_9BACI 6-pyruvoyl tetrahydrobiopterin synthase OS=Bacillus gaemokensis; OX = 574375 GN=BAGA_07750 PE=4 SV=1
MEQNFFGFRIVENLQKVDKDIQREQLKYHNKRVMVSKEFTFDAAHHLHCYEGKCKNLHGHTYKVVFGISGYVNEIGLAIDFGDIKEIWKNEIEIYLDHRYLNETLPAMNTTAENMVVWIYEKMAEALTKENRSDAYKGARVEFVRLFETPTSYAEVRREWMLGE

SEQ ID NO: 17852 - protein, 145 aa, Bacillus galactosidilyticus
  REGION 1..145: note = tr|A0A177ZI02|A0A177ZI02_9BACI 6-carboxy-5,6,7,8-tetrahydropterin synthase OS=Bacillus galactosidilyticus OX=217031 GN=ABB05_20110 PE=3 SV=1
MMQQIYPVGSHSYAYELNKDFHFAAAHYIPHEDAGKCQQVHGHTYFANITIVGDELDHTGFLVNFKIIKDLIHKRFDHAALNNDQAFSDYVADQFPSTEVVARTIYEIVQQYLDSQSNCPVCLQVFLRETPTSYCIYRPKRKDRI

SEQ ID NO: 17853 - protein, 272 aa, Bacillus ginsengihumi
  REGION 1..272: note = tr|A0A0A6XZV7|A0A0A6XZV7_9BACI 6-pyruvoyl tetrahydropterin synthase OS=Bacillus ginsengihumi; OX = 363870 GN=NG54_08275 PE=4 SV=1
MLYLSRKLFFSAAHFYRVDQWSEEKNADTFGLCSNAHGHGHDYVLEVMVKGKVNPKSGIVVNITDVDKVVKTFVCNELDGKFLNKEVPYFQTNLPTTENIVKFLWESLHGELPNCELHKIRLKENDFLYAEKEGAASMVRLTRRYHFSTAHRLHSNDLSVEENKALFGKCNNRYGHGHNYYLEVTVKGIPDPITGMIIDLTELDEIVDQEIMSRFDHKHLNLDTEEFKTLNPTSENVAVVIWDLLSLKVPNLFKIGLFETEKNYFEYFGPEE

SEQ ID NO: 17854 - protein, 147 aa, Bacillus ginsengihumi
  REGION 1..147: note = tr|A0A0A6VH56|A0A0A6VH56_9BACI 6-carboxy-5,6,7,8-tetrahydropterin synthase OS=Bacillus ginsengihumi OX=363870 GN=NG54_00620 PE=3 SV=1
MLQQFYPQPPTHQYCYELNKDMNFSAAHFIPNEKAGKCANVHGHTYFVNVTIAGNQLDEMGMLVNFSDLKKLVHGKYDHQLLNNFQEFKHTAPSTEVVAKTVYDIIQEYLDTLANQPKCIQVLVRETPTAYVIYRPSNTGKEQSFNE

SEQ ID NO: 17855 - protein, 146 aa, unidentified
  source 1..146: note = Bacillus glycinifermentans
  REGION 1..146: note = tr|A0A1C3SC64|A0A1C3SC64_9BACI 6-carboxy-5,6,7,8-tetrahydropterin synthase OS=Bacillus glycinifermentans OX=1664069 GN=queD PE=3 SV=1
MLTQIYPQTSHPYAFELNKDMQVSAAHFIPREDAGACSRVHGHTYTINITIAGDHLNESGFLANFSTIKKLIHGEYDHTLLNDHKEFSGESREQIPSTEAVAKAIFDKVEAYLEGLENRPHCVQVFVRETPTSYVVYRPKQGDHHG

SEQ ID NO: 17856 - protein, 146 aa, unidentified
  source 1..146: note = Bacillus glycinifermentans
  REGION 1..146: note = tr|A0A0J6EKM3|A0A0J6EKM3_9BACI 6-carboxy-5,6,7,8-tetrahydropterin synthase OS=Bacillus glycinifermentans OX=1664069 GN=queD PE=3 SV=1
MLTQIYPQTSHPYAFELNKDMQVSAAHFIPREDAGACSRVHGHTYTINITIAGDHLNESGFLANFSTIKKLIHGEYDHTLLNDHKEFSGESREQIPSTEAVAKAIYDKVEAYLEGLENRPHCVQVFVRETPTSYVVYRPKQGDHHG

SEQ ID NO: 17857 - protein, 146 aa, unidentified
  source 1..146: note = Bacillus gobiensis
  REGION 1..146: note = tr|A0A0M4G777|A0A0M4G777_9BACI 6-carboxy-5,6,7,8-tetrahydropterin synthase OS=Bacillus gobiensis OX=1441095 GN=AM592_04105 PE=3 SV=1
MLSQTYPQAFHPYSFELNKDMQISAAHFIPREEAGACSRVHGHTYTVNLTIAGDTLDSCGFLVNFSTLKKIVHGKYDHTLLNDHLEFSGEDAYSFPTTEVVAKSIYDAVETYLNTLSNRPVCVQVFVRETPTSYCVYRPKKEQAHE

SEQ ID NO: 17858 - protein, 140 aa, Bacillus halodurans
  REGION 1..140: note = tr|A0A4Y7X1M5|A0A4Y7X1M5_BACHO 6-carboxy-5,6,7,8-tetrahydropterin synthase OS=Bacillus halodurans OX=86665 GN=queD PE=3 SV=1
MMQQFYPQTHHPYSFELNKDMHLAAAHFIPAKDAGKCQDVHGHTYFINVTIAGDELDKTGFLVDFKQLKTIVHKRYDHTLLNDHDEFKGTFPTTEMVAKTIYERIQAYLDNRPNKPVCVQVVVRETPTSYVVYRPKKVAE

SEQ ID NO: 17859 - protein, 140 aa, Bacillus halodurans; identical to SEQ ID NO: 17858
  REGION 1..140: note = tr|Q9KAP4|Q9KAP4_BACHD 6-carboxy-5,6,7,8-tetrahydropterin synthase OS=Bacillus halodurans (strain ATCC BAA-125 / DSM 18197 / FERM 7344 / JCM 9153 / C-125) OX=272558GN=BH2243 PE=3 SV=1

SEQ ID NO: 17860 - protein, 146 aa, unidentified
  source 1..146: note = Bacillus halotolerans
  REGION 1..146: note = tr|A0A2S9WEN9|A0A2S9WEN9_9BACI 6-carboxy-5,6,7,8-tetrahydropterin synthase OS=Bacillus halotolerans OX=260554 GN=queD PE=3 SV=1
MLSQIYPQVQHPYSFELNKDMQISAAHFIPRESAGACSRVHGHTYTVNITVAGDELDNSGFLVNFSVLKKLVHGSYDHTLLNDHEEFSKEDRYSLPTTEVVAKTIYDKVQAYLNTLENKPSCVQVFVRETPTSYCVYRPKKGGLNG

SEQ ID NO: 17861 - protein, 146 aa, unidentified
  source 1..146: note = Bacillus halotolerans
  REGION 1..146: note = tr|A0A3T0L5Y6|A0A3T0L5Y6_9BACI 6-carboxy-5,6,7,8-tetrahydropterin synthase OS=Bacillus halotolerans OX=260554 GN=queD PE=3 SV=1
MLSQIYPQVQHPYSFELNKDMQISAAHFIPRESAGACSRVHGHTYTVNITVAGDELDNSGFLVNFSVLKKLVHGSYDHTLLNDHEEFSKDDRYSLPTTEVVAKTIYDKVQAYLNTLENKPSCVQVFVRETPTSYCVYRPKKGGLNG

SEQ ID NO: 17862 - protein, 146 aa, unidentified
  source 1..146: note = Bacillus haynesii
  REGION 1..146: note = tr|W7RJS1|W7RJS1_9BACI 6-carboxy-5,6,7,8-tetrahydropterin synthase OS=Bacillus haynesii OX=1925021 GN=BTA31_08765 PE=3 SV=1
MLTQIYPQPSHPYSFELNKDMQMSAAHFIPREDAGACSRVHGHTYTINITIAGDELNESGFLVNFSTIKKLIHGEYDHTLLNDHQEFSGESADRIPSTEVVAKTIYDKVDAYLKDLKNRPHCVQVFVRETPTSYVVYRPKPGVQHG

SEQ ID NO: 17863 - protein, 141 aa, Bacillus hemicellulosilyticus
  REGION 1..141: note = tr|W4QGB4|W4QGB4_9BACI 6-carboxy-5,6,7,8-tetrahydropterin synthase OS=Bacillus hemicellulosilyticus JCM 9152 OX=1236971 GN=JCM9152_2375; PE = 3 SV=1
MLQQFYPQVPHSYRYELNKDMNLSAAHFIPDEKAGVCKNMHGHTYFINVTIAGDQLDELGFLIDFKQIKDLVHKRYDHTLLNDHNEYKEIFPTTERVAEQIWKTIHEKLQSLPHQPKCLQVLVRETPTSYVVYRPKPEELL

SEQ ID NO: 17864 - protein, 145 aa, Bacillus horikoshii
  REGION 1..145: note = tr|A0A1Y0CLL2|A0A1Y0CLL2_9BACI 6-carboxy-5,6,7,8-tetrahydropterin synthase OS=Bacillus horikoshii OX=79883 GN=B4U37_07945 PE=3 SV=1
MMQQIYPQVQHDFCYELNKDMQIAAAHFVPTDAAGKCRQLHGHTYFVNVTVAGDDLDEAGFLVNFQVLKKLLHDKFDHTVLNDHKDVFNDQDPNFFPTTEVVARTMWETIEMHLETLPSKPTCLQVYVRETPTSYCIYRPKKGKK

SEQ ID NO: 17865 - protein, 145 aa, Bacillus horikoshii
  REGION 1..145: note = tr|A0A5D4TE73|A0A5D4TE73_9BACI 6-carboxy-5,6,7,8-tetrahydropterin synthase OS=Bacillus horikoshii OX=79883 GN=queD PE=3 SV=1
MMQQIYPQVQHDFCYELNKDMQIAAAHFVPTDAAGKCRQLHGHTYFVNVTVAGDNLDEAGFLVNFQVLKKLLHDKFDHTVLNDHKDVFNDQDPNFFPTTEVVARTMWETIEKHLETLPSKPTCLQVYVRETPTSYCIYRPKKGKK

SEQ ID NO: 17866 - protein, 160 aa, Bacillus horneckiae
  REGION 1..160: note = tr|A0A2N0ZEY9|A0A2N0ZEY9_9BACI 6-carboxytetrahydropterin synthase QueD OS=Bacillus horneckiae OX=549687 GN=queD PE=4 SV=1
MKDLFGFRIVDQLQKIDIDIKRENLKYHHKRVLVSKEFTFDAAHHLHDYEGKCKNLHGHTYKVIFGISGYTDNRGLMIDFGDIKKIWKREIEIYLDHKYLNETLPAMNTTAENMVIWIFEKMDEALSSLDKSLAARVEFVKLYETPTSYAEARREWMIDE

SEQ ID NO: 17867 - protein, 158 aa, Bacillus hwajinpoensis
  REGION 1..158: note = tr|A0A4U1MPD0|A0A4U1MPD0_9BACI 6-carboxytetrahydropterin synthase QueD OS=Bacillus hwajinpoensis OX=208199 GN=queD PE=4 SV=1
MSYMIPKKVEVLGEDIQKSELKYHNKRVAVTKEFTFDAAHHLHCYEGKCKSMHGHTYKVVITISGFVNEIGISVDFGEIKTLFKEVIDSKLDHHYLNEVLPNMNTTAENMIVWMWEQLDQALIERNMKDNGQRLEELVLYETPTSYATLKREWMEDNE

SEQ ID NO: 17868 - protein, 145 aa, Bacillus indicus
  REGION 1..145: note = tr|A0A084H2U1|A0A084H2U1_BACID 6-carboxy-5,6,7,8-tetrahydropterin synthase OS=Bacillus indicus OX=246786 GN=GS18_0202885 PE=3 SV=1
MIQQMYPQTLHPYTFELNKDMQLSAAHYVPKEEAGKCRRLHGHTYFINVTVAGDELDESGFLINFAHIKQLVHDRFDHTILNEHDVFNDEDPNKFPTTEVVARTICEMIQQHLDSLSHKPKCVGVFVRETPTSYVMYRPKLVKKG

SEQ ID NO: 17869 - protein, 165 aa, Bacillus infantis
  REGION 1..165: note = tr|U5LCN8|U5LCN8_9BACI 6-pyruvoyl tetrahydrobiopterin synthase OS=Bacillus infantis NRRL B-14911 OX=1367477 GN=N288_12915 PE=4 SV=1
MLKGRESDMYGFRIVDKLQKINEDIKQNQLKYHRKRVLVSKEFTFDAAHHLHCYEGKCKNLHGHTYKVIFGISGYVDEIGLLIDFGDIKEIWKKQIEVHLDHKYLNETLPPMNTTAENMVVWIYEQMSACLKDYSPQQDAKVEFVRLFETPTSYAEARREWMENE

SEQ ID NO: 17870 - protein, 157 aa, Bacillus infantis
  REGION 1..157: note = tr|A0A4Q4CAX2|A0A4Q4CAX2_9BACI 6-carboxytetrahydropterin synthase QueD OS=Bacillus infantis OX=324767 GN=queD PE=4 SV=1
MYGFRIVDKLQKINEDIKQNQLRYHRKRVLVSKEFTFDAAHHLHCYEGKCKNLHGHTYKVIFGISGYVDEIGLLIDFGDIKEIWKKQIEVHLDHKYLNETLPPMNTTAENMVVWIYEQMSACLKDYSPQQDAKVEFVRLFETPTSYAEARREWMENE

SEQ ID NO: 17871 - protein, 146 aa, unidentified
  source 1..146: note = Bacillus intestinalis
  REGION 1..146: note = tr|A0A0F0A8X1|A0A0F0A8X1_9BACI 6-carboxy-5,6,7,8-tetrahydropterin synthase OS=Bacillus intestinalis OX=1963032 GN=AX282_02550 PE=3 SV=1
MLSQIYPQAQHPYSFELNKDMHISAAHFIPRESAGACSRVHGHTYTVNITVAGDELDDSGFLVNFSVLKKLVHGNYDHTLLNDHEDFSQDDRYSLPTTEVVAKTIYDNVQAYLDTLENKPSCVQVFVRETPTSYCVYRPKKGGLNG

SEQ ID NO: 17872 - protein, 147 aa, Bacillus koreensis
  REGION 1..147: note = tr|A0A0M0LHH0|A0A0M0LHH0_9BACI 6-carboxy-5,6,7,8-tetrahydropterin synthase OS=Bacillus koreensis OX=284581 GN=AMD01_01815 PE=3 SV=1
MIQQIYPQVQHSYSYELNKDMHFAAAHFVPHEAAGKCQNIHGHTYFVNVTIGGDELDESGFLVNFQVLKKLVSGQFDHTLLNDHDQLFNEQNANDFPTTEVIARKIYELIQAHLDVLPNKPSCLQVFVRETPTSYVVYRPKQVRNHG

SEQ ID NO: 17873 - protein, 140 aa, Bacillus krulwichiae
  REGION 1..140: note = tr|A0A1X9MDV2|A0A1X9MDV2_9BACI 6-carboxy-5,6,7,8-tetrahydropterin synthase OS=Bacillus krulwichiae OX=199441 GN=queD PE=4 SV=1
MMQQFYPQIHHHYRYELNKDMHLAAAHFISDDAAGQCQHTHGHTYFINITVVGDALDELGFLINFKRIKDIVHKRYDHSVLNDHPEYKEVYPTTERVAEQIWTAIQTELKQLPHQPKCLQVVVRETPTSYVVYRPKPEEL

SEQ ID NO: 17874 - protein, 157 aa, unidentified
  source 1..157: note = Bacillus kyonggiensis
  REGION 1..157: note = tr|A0A4U1D997|A0A4U1D997_9BACI 6-carboxytetrahydropterin synthase QueD OS=Bacillus kyonggiensis OX=1037680 GN=queD PE=4 SV=1
MMEFFGFRVVENLQKIDQDIQKSELQYHKKRVLVSKEFMFDAAHHLHCYEGKCKNLHGHTYKVIVGVSGFVNEIGLVVDFGDLKKMWKDEIEIYLDHRYLNETLPKMNTTAENMVVWIYEKFKESLAKYPDARVEFIRLYETPTSYAEARREWMEGE

SEQ ID NO: 17875 - protein, 276 aa, unidentified
  source 1..276: note = Bacillus kyonggiensis
  REGION 1..276: note = tr|A0A4U1D2E2|A0A4U1D2E2_9BACI 6-pyruvoyl tetrahydropterin synthase OS=Bacillus kyonggiensis; OX = 1037680 GN=FA727_18130 PE=4 SV=1
MLYLSRKLSFSAMHSYRIEHWTEEQNEAIFGPCANKNGHGHDYTLEVMVKGNLDSHSGIVVNITDIDKVAKAFVEENLNGKFLNKENDFFKENIPTTENLVSYIWNALDGKLENCQLHKIRLRESDFLYSEKENSPMVRLTRKYHFSTAHRLHSNQLTDEENLDIFGKCNNPYGHGHNYYLEVTLSGEQDPVTGMIADLAKMDQIVDREILQKFDHKHLNLDTEEFKELNPTSENVAVVIWQLLAPKLPKLFKIGLYETEKNYFEYYGPGVEEDGE

SEQ ID NO: 17876 - protein, 141 aa, Bacillus lehensis
  REGION 1..141: note = tr|A0A4Y7WPG4|A0A4Y7WPG4_9BACI 6-carboxy-5,6,7,8-tetrahydropterin synthase OS=Bacillus lehensis OX=300825 GN=queD PE=3 SV=1
MIQQIYPTTPHSYAFELNKDMQLATAHYIDHEEAGKCQRVHGHTYTINITIAGDHLNDTGFLVDFKQLKQLVHDRFDHQLLNEDPLFHNVLPSTENVAKIVYMIIEDLLKTMANAPTCIQVFVRETPTSYVVYRPKRAHHE

SEQ ID NO: 17877 - protein, 141 aa, Bacillus lehensis
  REGION 1..141: note = tr|A0A060LY40|A0A060LY40_9BACI 6-carboxy-5,6,7,8-tetrahydropterin synthase OS=Bacillus lehensis G1 OX=1246626 GN=BleG1_2117 PE=3 SV=1
MIQQIYPTTPHSYAFELNKDMQLATAHYIDHEGAGKCQRVHGHTYTINITIAGDHLNDTGFLVDFKQLKQLVHDRFDHQLLNEDPLFHNVLPSTENVAKIVYMIIEDLLKTMANAPTCIQVFVRETPTSYVVYRPKRVHHE

SEQ ID NO: 17878 - protein, 160 aa, Bacillus lentus
  REGION 1..160: note = tr|A0A2X4VNL4|A0A2X4VNL4_BACLE Putative 6-pyruvoyl tetrahydropterin synthase OS=Bacillus lentus OX=1467; GN = queD PE=4 SV=1
MYGFKIVDKLQKIDKDIKRDQLKYHSKRVLVSKEFTFDSAHHLHCYEGKCKNLHGHTYKVIFGISGYVDHHGLVIDFGDIKNIWKSEIEVHLDHKYLNESLPPMNTTAENIVVWIYEKMVAALQEEKRQKQYSGLEVEFVRLYETPTSYAEARREWMEIE

SEQ ID NO: 17879 - protein, 146 aa, Bacillus licheniformis
  REGION 1..146: note = tr|Q65KI5|Q65KI5_BACLD 6-carboxy-5,6,7,8-tetrahydropterin synthase OS=Bacillus licheniformis (strain ATCC 14580 / DSM 13 / JCM 2505 / NBRC 12200 / NCIMB 9375 / NRRLNRS-1264 / Gibson 46); OX = 279010 GN=queD PE=3 SV=
MLTQIYPQPSHPYSFELNKDMQMSAAHFIPREDAGACSRVHGHTYTINITIAGDELNASGFLVNFSTIKKLIHGEYDHTLLNDHQEFSGESADRIPSTEVVAKTIYDKVEAYLKDLNNRPHCVQVFVRETPTSYVVYRPKPGVQHG

SEQ ID NO: 17880 - protein, 146 aa, Bacillus licheniformis; identical to SEQ ID NO: 17879
  REGION 1..146: note = tr|A0A1Y0YMN5|A0A1Y0YMN5_BACLI 6-carboxy-5,6,7,8-tetrahydropterin synthase OS=Bacillus licheniformis OX=1402 GN=queD PE=3 SV=1

SEQ ID NO: 17881 - protein, 147 aa, Bacillus litoralis
  REGION 1..147: note = tr|A0A5C6W2C4|A0A5C6W2C4_9BACI 6-carboxy-5,6,7,8-tetrahydropterin synthase OS=Bacillus litoralis OX=152268 GN=queD PE=3 SV=1
MIQQIYPQVQHDYQFELNKDMHISAAHYIPHEDAGKCQKVHGHTYFVNVTIAGDELDDSGFLVNFASLKKLIHNRFDHSILNDHSDLFSEVDPNYFPTTEGVARAIWELVQSDLDTKDNKPKCVQVFVRETPTSYVVFRPKKKEGQE

SEQ ID NO: 17882 - protein, 147 aa, Bacillus litoralis
  REGION 1..147: note = tr|A0A179SY57|A0A179SY57_9BACI 6-carboxy-5,6,7,8-tetrahydropterin synthase OS=Bacillus litoralis OX=152268 GN=A6K24_04030 PE=3 SV=1
MIQQIYPQVQHNYQFELNKDMHIAAAHYIPHEDAGKCQKVHGHTYFVNVTIAGDDLDDSGFLVNFSGIKKLIHDRFDHTILNDHTELFSDKDPNFFPTTEGMARAVWEVIQRELDTKVNKPKCVQVFVRETPTSYVVFRPKQKEEQQ

SEQ ID NO: 17883 - protein, 158 aa, unidentified
  source 1..158: note = Bacillus loiseleuriae
  REGION 1..158: note = tr|A0A0K9GR41|A0A0K9GR41_9BACI 6-pyruvoyl tetrahydrobiopterin synthase OS=Bacillus loiseleuriae; OX = 1679170 GN=AC625_03810 PE=4 SV=1
MYGFRVVDKLQKINEDIKSDQLKYHAKRVLVSKEFTFDAAHHLHCYEGKCKNLHGHTYRVIFGLSGFIDDRGLLIDFGDIKEIWKNEIEIFLDHKYLNETLPLMNTTAENMVVWIYEKMADALNKRQEQYDGARVEFVRLYETPTSYAEAKREWMEHE

SEQ ID NO: 17884 - protein, 140 aa, unidentified
  source 1..140: note = Bacillus lonarensis
  REGION 1..140: note = tr|A0A1G6H6S0|A0A1G6H6S0_9BACI 6-carboxy-5,6,7,8-tetrahydropterin synthase OS=Bacillus lonarensis OX=1464122 GN=SAMN05421737_1038 PE=3 SV=1
MMQQFYPTVTHPYQFELHKDMHLATAHYIDNERAGNCARVHGHTYVINITIAGNELDETGFLINFKHLKEAVHGRFDHTLLNDDPLFAQTPPSTEKVAETIYTIVNDLLTPLAHKPVCIQVIVRETPTSYVVYQPKQVQS

SEQ ID NO: 17885 - protein, 158 aa, Bacillus luciferensis
  REGION 1..158: note = tr|A0A1E2W0E9|A0A1E2W0E9_9BACI 6-carboxytetrahydropterin synthase QueD OS=Bacillus luciferensis OX=178774 GN=BED47_05050 PE=4 SV=1
MFDFRIVERLHKIDEHIKKEDLKYHNRRVLVNKEFTFDAAHHLHCYEGKCKNLHGHTYKVIFGISGFVDEIGLVIDFGDIKQIWKEKIEIYLDHRYLNEMLPPMNTTAENMVVWIYEQMENALKDHTNPAQDIRVEFVRLFETPTCYAEARREWMINE

SEQ ID NO: 17886 - protein, 163 aa, unidentified; identical to SEQ ID NO: 17799
  source 1..163: note = Bacillus luti
  REGION 1..163: note = tr|A0A1K0BRC4|A0A1K0BRC4_9BACI 6-carboxytetrahydropterin synthase QueD OS=Bacillus luti; OX = 2026191 GN=BAQ48_06430 PE=4 SV=1

SEQ ID NO: 17887 - protein, 164 aa, unidentified
  source 1..164: note = Bacillus manliponensis
  REGION 1..164: note = tr|A0A073KDK5|A0A073KDK5_9BACI 6-pyruvoyl tetrahydrobiopterin synthase OS=Bacillus manliponensis; OX = 574376 GN=BAMA_13240 PE=4 SV=1
MENNFFGFRVVENLQKIDTDIGREQLKYHNKRVMVSKEFTFDAAHHLHCYEGKCKNLHGHTYKVVFGISGYVNEIGLTIDFGDIKDIWKNEIEIYLDHRYLNETLPAMNTTAENMVVWIFEKMEEALLTEERQNEYKGARVEFVRLFETPTSYAEVRREWMLGE

SEQ ID NO: 17888 - protein, 142 aa, Bacillus marisflavi
  REGION 1..142: note = tr|A0A161TFJ9|A0A161TFJ9_9BACI 6-carboxy-5,6,7,8-tetrahydropterin synthase OS=Bacillus marisflavi OX=189381 GN=AV649_00965 PE=3 SV=1
MIQQIYPVPSHPYEYELNKDMHFAAAHYIPAESAGSCSEMHGHTYFANITIAGDALDETGFLVNFQQIKKLIHKRFDHTVINDDEKFQGDLKFPTTEVMAKVIYDIIQEHLDTLTHAPRCLQVFLRETPTSYCIYRPKGELS

SEQ ID NO: 17889 - protein, 142 aa, Bacillus marisflavi
  REGION 1..142: note = tr|A0A5D4RRS2|A0A5D4RRS2_9BACI 6-carboxy-5,6,7,8-tetrahydropterin synthase OS=Bacillus marisflavi OX=189381 GN=queD PE=3 SV=1
MIQQIYPVPNHPYEYELNKDMHFAAAHYIPAESAGSCSEMHGHTYFANITIAGDALDETGFLVNFQQIKKLIHKRFDHTVINDDERFQGDLKFPTTEVMAKVMYDIIQEHLDTLPHSPKCLQVFLRETPTSYCIYRPKGGRS

SEQ ID NO: 17890 - protein, 141 aa, Bacillus marmarensis
  REGION 1..141: note = tr|U6SS57|U6SS57_9BACI 6-carboxy-5,6,7,8-tetrahydropterin synthase OS=Bacillus marmarensis DSM 21297 OX=1188261 GN=A33I_11425 PE=3 SV=1
MIQQFYPQVPHSYRFELNKDMHLAAAHFINNESAGACQNMHGHTYFINVTIAGDELDSTGFLINFKDIKTLVHKRYDHSLLNDHKEYEDLDPTTEVVAMQIWQTIQSHLDTLSNQPKCIQVLVRETPTSYVVYRPKPEELA

SEQ ID NO: 17891 - protein, 146 aa, Bacillus megaterium; identical to SEQ ID NO: 17803
  REGION 1..146: note = tr|D5DZE4|D5DZE4_BACMQ 6-carboxy-5,6,7,8-tetrahydropterin synthase OS=Bacillus megaterium (strain ATCC 12872 / QMB1551) OX=545693 GN=queD; PE = 3 SV=1

SEQ ID NO: 17892 - protein, 146 aa, Bacillus megaterium; identical to SEQ ID NO: 17803
  REGION 1..146: note = tr|A0A109G0N4|A0A109G0N4_BACME 6-carboxy-5,6,7,8-tetrahydropterin synthase OS=Bacillus megaterium OX=1404 GN=queD PE=3 SV=1

SEQ ID NO: 17893 - protein, 158 aa, unidentified
  source 1..158: note = Bacillus mesonae
  REGION 1..158: note = tr|A0A3Q9R2M2|A0A3Q9R2M2_9BACI 6-carboxytetrahydropterin synthase QueD OS=Bacillus mesonae OX=1193713 GN=queD PE=4 SV=1
MYGFRIVDKLQKIDEDISRQQLKYHTKRVLVSKEFTFDAAHHLHCYDGKCKNLHGHTYKVIFGISGFVDNRGIMMDFGDIKEIWKNQIEIFLDHKYLNETLPPMNTTAENMVVWIYQKMTEALEAAGPKYDGARVEFVRLYETPTSYAEARREWMGNE

SEQ ID NO: 17894 - protein, 160 aa, Bacillus methanolicus
  REGION 1..160: note = tr|I3E8Y1|I3E8Y1_BACMM 6-pyruvoyl tetrahydrobiopterin synthase OS=Bacillus methanolicus (strain MGA3 / ATCC 53907) OX=796606 GN=BMMGA3_09075 PE=4; SV = 1
MYGFRIVDKLQKLDEDIRRDQLKYHSKRVLVSKEFTFDSAHHLHCYEGKCKNLHGHTYKVIFGLSGYVDDRGLLIDFSDIKDIWKKEIEIYLDYKYLNETLPPMNTTAENMVVWIYEKMKEALEKEDRQQKYQGARVEFVRLYETPSSYAEARREWMEVE

SEQ ID NO: 17895 - protein, 160 aa, Bacillus methanolicus
  REGION 1..160: note = tr|I3DVL4|I3DVL4_BACMT 6-pyruvoyl tetrahydrobiopterin synthase OS=Bacillus methanolicus PB1; OX = 997296 GN=PB1_12014 PE=4 SV=1
MYGFRIVDKLQKIDEDIRRDQLKYHSKRVLVSKEFTFDSAHHLHCYEGKCKNLHGHTYKVIFGLSGYVDDRGLLIDFSDIKDIWKKEIEIFLDHKYLNETLPPMNTTAENMVVWIYEKMKEALEKEDRQQKYLGARVEFVRLYETPTSYAEARREWMEVE

SEQ ID NO: 17896 - protein, 163 aa, unidentified
  source 1..163: note = Bacillus mobilis
  REGION 1..163: note = tr|A0A1K0AXP9|A0A1K0AXP9_9BACI 6-carboxytetrahydropterin synthase QueD OS=Bacillus mobilis OX=2026190 GN=queD PE=4 SV=1
MDNFFGFRIVENLQKMDKDIQRKQLKYHNKRVMVSKEFTFDAAHHLHCYEGKCKNLHGHTYKVVFGISGYVNEIGLAIDFGDIKEIWKNEIEIYLDHRYLNETLPAMNTTAENMVVWIYEKMAEALIKDNRANEYKGARVEFVRLFETPTSYAEVRREWMLDE

SEQ ID NO: 17897 - protein, 157 aa, Bacillus muralis
  REGION 1..157: note = tr|A0A1B3XSN0|A0A1B3XSN0_9BACI 6-carboxytetrahydropterin synthase QueD OS=Bacillus muralis OX=264697 GN=ABE28_017805 PE=4 SV=1
MMYGFTIVDKLQKIDEDIQRSQLNYTKKRVLVSKEFTFDAAHHLHDYEGKCKNLHGHTYKVIFGVSGYTDSRGLMMDFGDMKEIWKNEIEIHLDHRYLNETLPPMNTTAENMVVWIYEKMAEALSLKDYQGARVEFVRLYETPTSYAEARREWMESE

SEQ ID NO: 17898 - protein, 163 aa, Bacillus mycoides; identical to SEQ ID NO: 17827
  REGION 1..163: note = tr|A9VKR9|A9VKR9_BACMK Uncharacterized protein; OS = Bacillus mycoides (strain KBAB4) OX=315730; GN = BcerKBAB4_1257 PE=4 SV=1

SEQ ID NO: 17899 - protein, 163 aa, Bacillus mycoides; identical to SEQ ID NO: 17799
  REGION 1..163: note = tr|A0A1X6QIA2|A0A1X6QIA2_BACMY Uncharacterized protein OS=Bacillus mycoides OX=1405 GN=BTJ45_00482 PE=4; SV = 1

SEQ ID NO: 17900 - protein, 146 aa, unidentified
  source 1..146: note = Bacillus nakamurai
  REGION 1..146: note = tr|A0A150F2K8|A0A150F2K8_9BACI 6-carboxy-5,6,7,8-tetrahydropterin synthase OS=Bacillus nakamurai OX=1793963 GN=AXI58_06505 PE=3 SV=1
MLSQIYPQAQHSYSFELNKDMHISAAHFIPRESAGACSRVHGHTYTVNITVAGDELDDSGFLVNFSVLKKLVHGAYDHTLLNDHDEFSDDDRYSLPTTEVVAKTIYDKVQAYLETLENKPVCVQIFVRETPTSYCVYRPKKGDVNG

SEQ ID NO: 17901 - protein, 141 aa, Bacillus nanhaiisediminis
  REGION 1..141: note = tr|A0A562QRA4|A0A562QRA4_9BACI 6-carboxy-5,6,7,8-tetrahydropterin synthase OS=Bacillus nanhaiisediminis OX=688079 GN=IQ10_00951 PE=3 SV=1
MMQQFYPQVQHSYRYELNKDMHLAAAHFIPSEDAGQCQHMHGHTYFINITIGGDTLDGLGFLVDFKKIKDIVHKRYDHSVLNDHPEYKAVFPTTERVAEQIWSAIQKELNTQANKPKCLQVVVRETPTSYVVYRPKPEELK

SEQ ID NO: 17902 - protein, 161 aa, Bacillus nealsonii
  REGION 1..161: note = tr|A0A2N0Z2Y8|A0A2N0Z2Y8_9BACI 6-carboxytetrahydropterin synthase QueD OS=Bacillus nealsonii OX=115979 GN=queD PE=4 SV=1
MQKDLFGFRIVEGLQKLDVDIKKNELNYHKKRVLVSKEFTFDASHHLHAYEGKCKNLHGHTYKVVFGISGFTDEIGLVIDFGDIKKIWKEEIEIYLDHRYLNETLPNMNTTAENMVVWIYEKMQLALTKHSIKEGTRMEFVRLFETPTSYAEAKREWMEVE

SEQ ID NO: 17903 - protein, 160 aa, Bacillus nealsonii
  REGION 1..160: note = tr|R9CD29|R9CD29_9BACI 6-pyruvoyl tetrahydrobiopterin synthase OS=Bacillus nealsonii AAU1; OX = 1202533 GN=A499_00165 PE=4 SV=1
MHDFRVVDKLQKFGEDIFSKQLKYHHKRVMVSKEFTFDAAHHLHAYEGKCMNLHGHTYKVVFGISGYLDDRGLMIDFGDIKKIWKSDIEIYLDHRYLNETLPPMNTTAENIVYWIFEKMEEALKKAEMKQADNGARVEFVRLYETPTSFAEMKREWMEYE

SEQ ID NO: 17904 - protein, 158 aa, unidentified
  source 1..158: note = Bacillus notoginsengisoli
  REGION 1..158: note = tr|A0A417YWQ5|A0A417YWQ5_9BACI 6-carboxytetrahydropterin synthase QueD OS=Bacillus notoginsengisoli OX=1578198 GN=queD PE=4 SV=1
MYGFRIVEKLQKIDEDIERDQLKYHSKRVLVSKEFTFDAAHHLHDYEGKCKNLHGHTYKVIFGISGFVDERGLVIDFGDIKEIWKSEIEVFLDHRYLNETLPPMNTTAENMVVWIYEKMAESLENRAEQFNGARVEFVRLYETPTSFAEARREWMDVE

SEQ ID NO: 17905 - protein, 158 aa, Bacillus oceanisediminis
  REGION 1..158: note = tr|A0A1S1YE02|A0A1S1YE02_9BACI 6-carboxytetrahydropterin synthase QueD OS=Bacillus oceanisediminis OX=665099 GN=BBV17_26285 PE=4 SV=1
MYGFRIVDKLQKINEDIKPDQLKYHHKRVMVSKEFTFDSAHHLHCYEGKCKNLHGHTYKVIFGISGFVNDRGLMIDFGDIKEIWKKEIEIFLDHKYLNETLPPMNTTAENMVVWIYEKMAECLQDRKEQYVGARVEFVRLFETPTSYAEARREWMEVE

SEQ ID NO: 17906 - protein, 158 aa, Bacillus oceanisediminis
  REGION 1..158: note = tr|A0A160MCD6|A0A160MCD6_9BACI 6-pyruvoyl tetrahydrobiopterin synthase OS=Bacillus oceanisediminis 2691 OX=1196031 GN=A361_13245 PE=4 SV=1
MYGFRIVDKLQKINEDIKPDQLKYHHKRVMVSKEFTFDSAHHLHCYEGKCKNLHGHTYKVIFGISGFVDDRGLMIDFGDIKKIWKNEIEIFLDHKYLNETLPPMNTTAENMVVWIYEKMAQSLQNRKEQYVGARVEFVRLFETPTSYAEARREWMEVE

SEQ ID NO: 17907 - protein, 141 aa, Bacillus okhensis
  REGION 1..141: note = tr|A0A0B0IK93|A0A0B0IK93_9BACI 6-carboxy-5,6,7,8-tetrahydropterin synthase OS=Bacillus okhensis OX=333138 GN=LQ50_09320 PE=3 SV=1
MMQQFYPQVPHSYRYELNKDMHVAAAHFIPNDAAGQCKNMHGHTYFINITIGGDTLDDLGFLINFKQIKDIVHKRFDHSVLNDHPEFKEVFPTTERVAEQIWKAIQAKLQTQDNKPNCLQVVVRETPTSYVVYRPKPEELA

SEQ ID NO: 17908 - protein, 140 aa, Bacillus okuhidensis; identical to SEQ ID NO: 17858
  REGION 1..140: note = tr|A0A0M0KJ85|A0A0M0KJ85_9BACI 6-carboxy-5,6,7,8-tetrahydropterin synthase OS=Bacillus okuhidensis OX=136160 GN=AMD02_08645 PE=3 SV=1

SEQ ID NO: 17909 - protein, 145 aa, unidentified
  source 1..145: note = Bacillus oleivorans
  REGION 1..145: note = tr|A0A285CMN6|A0A285CMN6_9BACI 6-carboxy-5,6,7,8-tetrahydropterin synthase OS=Bacillus oleivorans OX=1448271 GN=SAMN05877753_102739 PE=3 SV=1
MIQQIYPSVTHNFSYELNKDLQIAAAHFIPHNQAGVCQRIHGHTYFVNITVAGNQLDESGFLVNFKQLKKIIHDRFDHSLLNDDTQLFSSKVAEDFPTSEVMARKIYELVQAHLHTLPNKPTCLQVFLRETPTSYVIYRPKAGEC

SEQ ID NO: 17910 - protein, 163 aa, unidentified
  source 1..163: note = Bacillus pacificus
  REGION 1..163: note = tr|A0A1J9Y767|A0A1J9Y767_9BACI 6-carboxytetrahydropterin synthase QueD OS=Bacillus pacificus OX=2026187 GN=BAQ45_12470 PE=4 SV=1
MDNFFGFRIVESLQKMDKDIQRKQLKYHNKRVMVSKEFTFDAAHHLHCYEGKCKNLHGHTYKVVFGISGYVNEIGLAIDFGDIKEIWKNEIEIYLDHRYLNETLPAMNTTAENMVVWIYEKMAEALTKDNRANEYKGARVEFVRLFETPTSYAEVRREWMLDE

SEQ ID NO: 17911 - protein, 163 aa, unidentified; identical to SEQ ID NO: 17798
  source 1..163: note = Bacillus pacificus
  REGION 1..163: note = tr|A0A5C4ZGX5|A0A5C4ZGX5_9BACI 6-carboxytetrahydropterin synthase QueD OS=Bacillus pacificus OX=2026187 GN=queD PE=4 SV=1

SEQ ID NO: 17912 - protein, 146 aa, unidentified
  source 1..146: note = Bacillus paralicheniformis
  REGION 1..146: note = tr|A0A1Q8GGI9|A0A1Q8GGI9_9BACI 6-carboxy-5,6,7,8-tetrahydropterin synthase OS=Bacillus paralicheniformis OX=1648923 GN=B4121_3883 PE=3 SV=1
MLTQIYPQPSHPYSFELNKDMQMSAAHFIPREDAGACSRVHGHTYTINITIAGDELNESGFLVNFSTIKKLIHGEYDHTLLNDHQEFSGESADRIPSTEVVAKTIYDRTEAYLKDLKNRPHCVQVFVRETPTSYVVYRPKPGVHNG

SEQ ID NO: 17913 - protein, 146 aa, unidentified
  source 1..146: note = Bacillus paralicheniformis
  REGION 1..146: note = tr|A0A5A9T8Y9|A0A5A9T8Y9_9BACI 6-carboxy-5,6,7,8-tetrahydropterin synthase OS=Bacillus paralicheniformis OX=1648923 GN=queD PE=3 SV=1
MLTQIYPQPSHPYSFELNKDMQMSAAHFIPREDAGACSRVHGHTYTINITIAGDELNESGFLVNFSTIKKLIHGEYDHTLLNDHQEFSGESADRIPSTEVVAKTIYDKTEAYLKDLKNRPHCVQVFVRETPTSYVVYRPKPGVHNG

SEQ ID NO: 17914 - protein, 163 aa, unidentified
  source 1..163: note = Bacillus paramycoides
  REGION 1..163: note = tr|A0A1J9U8C6|A0A1J9U8C6_9BACI 6-carboxytetrahydropterin synthase QueD OS=Bacillus paramycoides OX=2026194 GN=BAU28_17880 PE=4 SV=1
MDNFFGFRIVENLQKMDKDIQREQLKYHNKRVMVSKEFTFDAAHHLHCYEGKCKNLHGHTYKVVFGISGYVNEIGLAIDFGDIKEIWKNEIEIYLDHRYLNETLPAMNTTAENMVVWIYEKMAEALTKDNRVNEYKRARVEFVRLFETPTSYAEVRREWMLDE

SEQ ID NO: 17915 - protein, 163 aa, unidentified; identical to SEQ ID NO: 17799
  source 1..163: note = Bacillus paranthracis
  REGION 1..163: note = tr|A0A4P9F658|A0A4P9F658_9BACI 6-carboxytetrahydropterin synthase QueD OS=Bacillus paranthracis OX=2026186 GN=queD PE=4 SV=1

SEQ ID NO: 17916 - protein, 163 aa, unidentified; identical to SEQ ID NO: 17798
  source 1..163: note = Bacillus paranthracis
  REGION 1..163: note = tr|A0A1J9ZUU1|A0A1J9ZUU1_9BACI 6-carboxytetrahydropterin synthase QueD OS=Bacillus paranthracis OX=2026186 GN=BAQ46_04770 PE=4 SV=1

SEQ ID NO: 17917 - protein, 160 aa, unidentified
  source 1..160: note = Bacillus persicus
  REGION 1..160: note = tr|A0A1H8AG34|A0A1H8AG34_9BACI 6-pyruvoyltetrahydropterin/6-carboxytetrahydropterin synthase OS=Bacillus persicus OX=930146; GN = SAMN05192533_1052 PE=4 SV=1
MYGFRIVEKLQKIDEDIKRDQLKYHNKRVMVSKEFTFDSAHHLHAYEGKCKNLHGHTYRVIFGLSGFVDDRGLMIDFGDIKEIWKTEIEIYLDHKYLNETLPPMNTTAENMVVWIYEKMAAALQAEERKQQYKGARVEFVRLFETPTSYAEARREWMEVE

SEQ ID NO: 17918 - protein, 141 aa, Bacillus pseudofirmus
  REGION 1..141: note = tr|D3FSX6|D3FSX6_BACPE 6-carboxy-5,6,7,8-tetrahydropterin synthase OS=Bacillus pseudofirmus (strain OF4) OX=398511 GN=queD PE=3 SV=1
MIQQFYPQVPHSYRFELNKDMHLAAAHFINDESAGACQNIHGHTYFINVTIAGDELDSTGFLINFKNIKTLVHKRYDHSLLNEHKEYEDLDPTTEVVAMQIWETIQSHLDTLSNQPKCIQVLVRETPTSYVVYRPKPEELA

SEQ ID NO: 17919 - protein, 141 aa, Bacillus pseudofirmus
  REGION 1..141: note = tr|A0A1Q9PTE8|A0A1Q9PTE8_BACPF 6-carboxy-5,6,7,8-tetrahydropterin synthase OS=Bacillus pseudofirmus OX=79885 GN=BTR22_09280 PE=3 SV=1
MIQQFYPQVPHSYRFELNKDMHLAAAHFINDESAGACQNIHGHTYFINVTIAGDELDSTGFLINFKDIKTLVHKRYDHSLLNEHKEYEDLDPTTEVVAMQIWETIQSHLDTLSNQPKCIQVLVRETPTSYVVYRPKPEELA

SEQ ID NO: 17920 - protein, 163 aa, Bacillus pseudomycoides
  REGION 1..163: note = tr|C3BW10|C3BW10_9BACI 6-pyruvoyl tetrahydrobiopterin synthase OS=Bacillus pseudomycoides DSM 12442 OX=527000 GN=bpmyx0001_59570 PE=4 SV=1
MENFFGFRIVENLQKMDKDIQREQLKYHNKRVMVSKEFTFDAAHHLHCYEGKCKNLHGHTYKVVFGISGYVNDIGLAIDFGDIKEIWKNEIEIYLDHRYLNETLPVMNTTAENMVVWIYEKMAEALTKGNRAEEYKGARVEFIRLFETPTSYAEVRREWILDE

SEQ ID NO: 17921 - protein, 164 aa, Bacillus pseudomycoides
  REGION 1..164: note = tr|A0A1Y3MGL8|A0A1Y3MGL8_9BACI 6-carboxytetrahydropterin synthase QueD OS=Bacillus pseudomycoides OX=64104 GN=queD PE=4 SV=1
MEQNFFGFRIVENLQKVDKDIQREQLKYHNKRVMVSKEFTFDAAHHLHCYEGKCKNLHGHTYKVVFGISGYVNEIGLAIDFGDIKEIWKNEIEIYLDHRYLNETLPAMNTTAENMVVWIYEKMVEALTKEDRANEYKGARVEFVRLFETPTSYAEVRREWMIGE

SEQ ID NO: 17922 - protein, 146 aa, Bacillus pumilus
  REGION 1..146: note = tr|A8FCI0|A8FCI0_BACP2 6-carboxy-5,6,7,8-tetrahydropterin synthase OS=Bacillus pumilus (strain SAFR-032) OX=315750 GN=BPUM_1264 PE=3 SV=1
MLSQIYPQTNHPYSFELNKDMHISAAHFIPREDAGACSRVHGHTYTINITIAGDELDDSGFLVNFSTLKKLIHGQYDHTLLNDHEEFSSTNPYAMPTTEVVAKTVHDKVADYLSTLANKPVCVQVFVRETPTSYCIYRPKRVEHNG

SEQ ID NO: 17923 - protein, 146 aa, Bacillus pumilus
  REGION 1..146: note = tr|A0A5D4PUG8|A0A5D4PUG8_BACPU 6-carboxy-5,6,7,8-tetrahydropterin synthase OS=Bacillus pumilus OX=1408 GN=queD PE=3 SV=1
MLSQIYPQANHPFSFELNKDMHISAAHFIPREDAGACSRVHGHTYTINLTIAGDDLDESGFLVNFSTLKKLIHGEYDHTLLNDHEEFSGADRYEMPTTEVVAKTVHDKVAAYLSTLANQPVCVQVFVRETPTSYCIYRPKRVEDNG

SEQ ID NO: 17924 - protein, 146 aa, Bacillus safensis
  REGION 1..146: note = tr|A0A5C0WE51|A0A5C0WE51_9BACI 6-carboxy-5,6,7,8-tetrahydropterin synthase OS=Bacillus safensis OX=561879 GN=queD PE=3 SV=1
MLSQIYPQTDHPFSFELNKDMHVSAAHFIPREDAGACSRVHGHTYTINITIAGDELDESGFLVNFSTLKKLIHGQYDHTLLNDHEEFSSNDRYAMPTTEVVAKTVHDKVAAYLSTLANKPTCVQVFVRETPTSYCVYRPKRVEING

SEQ ID NO: 17925 - protein, 146 aa, Bacillus safensis
  REGION 1..146: note = tr|A0A561S153|A0A561S153_9BACI 6-carboxy-5,6,7,8-tetrahydropterin synthase OS=Bacillus safensis OX=561879 GN=FHW57_2115 PE=3 SV=1
MLSQIYPQTNHPFSFELNKDMHVSAAHFIPREDAGACSRVHGHTYTINITIAGDDLDDSGFLVNFSTLKKLIHGQYDHTLLNDHEEFSSNDPYAMPTTEVVAKTVHDKVAAYLSTLANKPTCVQVFVRETPTSYCIYRPKRVEING

SEQ ID NO: 17926 - protein, 144 aa, unidentified
  source 1..144: note = Bacillus salacetis
  REGION 1..144: note = tr|A0A3A1R1Y4|A0A3A1R1Y4_9BACI 6-carboxy-5,6,7,8-tetrahydropterin synthase OS=Bacillus salacetis OX=2315464 GN=queD PE=3 SV=1
MIGQIYPVPEHPFSYELNKDFQFAAAHFIPSESAGKCRKIHGHTYFANVTIGGDELDDSGFLFNFAEIKKLIHDRFDHTILNEDPLFSEHPERYPTTEVMAEIIYGIIQDCLNEQGNHAQCLQVFLRETPTSYCIFRPGKDKFQ

SEQ ID NO: 17927 - protein, 149 aa, Bacillus salarius
  REGION 1..149: note = tr|A0A428MYE6|A0A428MYE6_9BACI 6-carboxy-5,6,7,8-tetrahydropterin synthase OS=Bacillus salarius OX=284579 GN=queD PE=3 SV=1
MIHQFYPQVPHEYRYELNKDMQLAAAHFIPAPTAGKCANVHGHTYVINVTIAGDHLNETGFLVDFKTIKNIVHDRFDHSLLNEDEAFGDTPQNDSDTFPTTEVVARTIWQLIQRELDECVNKPRCLQVLVRETPTSYVVYRAKEGDFDR

SEQ ID NO: 17928 - protein, 149 aa, Bacillus salarius
  REGION 1..149: note = tr|A0A3R9NZ74|A0A3R9NZ74_9BACI 6-carboxy-5,6,7,8-tetrahydropterin synthase OS=Bacillus salarius OX=284579 GN=queD PE=3 SV=1
MIHQFYPQVPHDYRYELNKDMQLAAAHFIPAESAGKCANVHGHTYVINVTIAGDKLNETGFLVDFKTIKNIVHDRFDHSLLNEDEVFGDAKQSDPDSFPTTEVVARTIWQLIQRELDECVNQPRCLQVLVRETPTSYVVYRAKEGDFEE

SEQ ID NO: 17929 - protein, 160 aa, unidentified
  source 1..160: note = Bacillus salsus
  REGION 1..160: note = tr|A0A1H0Q4V3|A0A1H0Q4V3_9BACI 6-pyruvoyltetrahydropterin/6-carboxytetrahydropterin synthase OS=Bacillus salsus OX=930152; GN = SAMN05216565_101602 PE=4 SV=1
MYGFRIVDKLQKMDEDIRHNQLKYHNKRVMVSKEFTFDAAHHLHEYDGKCMNLHGHTYKVIFGISGYVDERGLMIDFGDIKDIWKNEIEIFLDHKYLNETLPPMNTTAENMVVWIYEKMKEALNKDDRQKQYLGARVEFVRLYETPTSFGEARREWMEGE

SEQ ID NO: 17930 - protein, 158 aa, Bacillus selenatarsenatis
  REGION 1..158: note = tr|A0A0A8X0L0|A0A0A8X0L0_9BACI Queuosine biosynthesis QueD, PTPS-I OS=Bacillus selenatarsenatis SF-1 OX=1321606 GN=SAMD00020551_1665 PE=4 SV=1
MYDFRIVDQLQKIDKDIKREQLKYHSNRVLVSKEFTFDAAHHLHEYEGKCKNLHGHTYKVIFGLSGFVDAQGLVIDFGDIKSIWKSDIEIYLDHRYLNETLPPMNTTAENMVVWIYEKMAEALANRQHLYDGAKVEFVKLYETPTSYAEVRREWMEIE

SEQ ID NO: 17931 - protein, 160 aa, Bacillus selenitireducens
  REGION 1..160: note = tr|D6XXU3|D6XXU3_BACIE Uncharacterized protein; OS = Bacillus selenitireducens (strain ATCC 700615 / DSM 15326 / MLS10) OX=439292 GN=Bsel_2636 PE=4 SV=1
MYGFEIVQNLEKIGEDIQKDELKYHSKRVMVSKEFSFDAAHHLHCYDGKCKNLHGHTYRVVFGISGYVDEIGLMMDFGDIKEIWKEDIEVHLDHRYVNQTLPKMNTTAENMVVWIFEQMAGAIEERPKLSKDQGARVEFVRLFETQTSYAEARREWMDLD

SEQ ID NO: 17932 - protein, 146 aa, Bacillus shackletonii
  REGION 1..146: note = tr|A0A0Q3TKN1|A0A0Q3TKN1_9BACI 6-carboxy-5,6,7,8-tetrahydropterin synthase OS=Bacillus shackletonii OX=157838 GN=AN964_11985 PE=3 SV=1
MLQQFYPQPAPHPYRFELNKDMNFSTAHFISNEKAGKCSFTHGHTYFVNLTIAGDELDEMGMLVNFSDLKKLVHGRYDHQLLNDFPEFEKLTPSTEVVAQTIYELVANYLDTLSNKPICLQVLVRETPTSYVIYRPQFNEGNEKHE

SEQ ID NO: 17933 - protein, 146 aa, Bacillus siamensis
  REGION 1..146: note = tr|A0A268DYA9|A0A268DYA9_9BACI 6-carboxy-5,6,7,8-tetrahydropterin synthase OS=Bacillus siamensis OX=659243 GN=queD PE=3 SV=1
MLSQIYPQVQHPYSFELNKDMHISAAHFIPRESAGACSRVHGHTYTVNITVAGDELDDSGFLVNFSVLKKLVHGAYDHTLLNDHDEFSDDDRYSLPTTEVVAKTIYDKVQSYLETLENQPVCVQVFVRETPTSYCVYRPKKGDLNG

SEQ ID NO: 17934 - protein, 146 aa, Bacillus siamensis
  REGION 1..146: note = tr|A0A2K9KCZ9|A0A2K9KCZ9_9BACI 6-carboxy-5,6,7,8-tetrahydropterin synthase OS=Bacillus siamensis OX=659243 GN=queD PE=3 SV=1
MLSQIYPQVQHPYSFELNKDMHISAAHFIPRESAGACSRVHGHTYTVNITVAGDELDDSGFLVNFSVLKKLVHGAYDHTLLNDHDEFSEDDRYSLPTTEVVAKTIYDKVQSYLETLENQPVCVQVFVRETPTSYCVYRPKKGDLNG

SEQ ID NO: 17935 - protein, 157 aa, Bacillus simplex
  REGION 1..157: note = tr|A0A109MWN9|A0A109MWN9_9BACI 6-pyruvoyl tetrahydrobiopterin synthase OS=Bacillus simplex OX=1478; GN = AS888_22820 PE=4 SV=1
MMYGFKIVDKLQKIDVDIKRSQLNYTKKRVLVSKEFTFDAAHHLHDYEGKCKNLHGHTYKVVFGLSGYTDSRGLMIDFGDMKEIWKNEIEIHLDHRYLNETLPPMNTTAENMVVWIYEKMAEALSMKDYQGARVEFVRLYETPTSYAEARREWMESE

SEQ ID NO: 17936 - protein, 156 aa, Bacillus simplex
  REGION 1..156: note = tr|A0A270AH25|A0A270AH25_9BACI 6-carboxytetrahydropterin synthase QueD OS=Bacillus simplex OX=1478 GN=queD PE=4 SV=1
MYGFKIVDKLQKIDEDIQRSQLKYTNKRVLVSKEFTFDAAHHLHDYEGKCKNLHGHTYKVIFGLSGYTDSRGLMIDFGDIKDIWKNEIEIHLDHRYLNETLPLMNTTAENMVVWIYEKMAEALSLKEYEGARVEFVRLYETPTSYAEARREWMESE

SEQ ID NO: 17937 - protein, 143 aa, Bacillus smithii
  REGION 1..143: note = tr|G9QLM0|G9QLM0_9BACI 6-carboxy-5,6,7,8-tetrahydropterin synthase OS=Bacillus smithii 7_3_47FAA OX=665952 GN=HMPREF1015_02675 PE=3 SV=1
MLQQIYPQVQHDYTYELNKDLQFAAAHFIPHPDAGQCRNVHGHTYFVNITVAGDELDDSGFLVNFQALKKIVSDPFDHTLLNDHQMFSEKQPENFPSTEVVARKIYEMIQAYLDTLPNKPKCLQVFLRETPTSYVVYRPKRGK

SEQ ID NO: 17938 - protein, 143 aa, Bacillus smithii
  REGION 1..143: note = tr|A0A0H4NXI0|A0A0H4NXI0_9BACI 6-carboxy-5,6,7,8-tetrahydropterin synthase OS=Bacillus smithii OX=1479 GN=BSM4216_1305 PE=3 SV=1
MLQQIYPQVQHDYTYELNKDLQFAAAHFIPHPDAGQCRNVHGHTYFVNITVAGDELDDSGFLVNFQALKKIVSYPFDHTLLNDHQMFSEKQPENFPSTEVVARKIYEMIQAYLDTLPNKPKCLQVFLRETPTSYVVYRPKRGK

SEQ ID NO: 17939 - protein, 145 aa, unidentified
  source 1..145: note = Bacillus solimangrovi
  REGION 1..145: note = tr|A0A1E5LF94|A0A1E5LF94_9BACI 6-carboxy-5,6,7,8-tetrahydropterin synthase OS=Bacillus solimangrovi OX=1305675 GN=BFG57_01780 PE=3 SV=1
MIQQFYPQVQHDYHYELNKDMQFAAAHFIPHSDAGKCQQVHGHTYFVNVTIVGDELDKTGFLVNFQTLKKIVHGRFDHSLLNDHDDFNEDDPNHFPTTEVVARKLWERIQQHLDKMENQPKCLQILVRETPTSYCIYRPKKGDFK

SEQ ID NO: 17940 - protein, 162 aa, unidentified
  source 1..162: note = Bacillus solimangrovi
  REGION 1..162: note = tr|A0A1E5LIE4|A0A1E5LIE4_9BACI 6-carboxytetrahydropterin synthase QueD OS=Bacillus solimangrovi OX=1305675 GN=BFG57_11035 PE=4 SV=1
MTDKLFGFRIVDNLQKIDKDIKRNELKYHQKRVLVSKEFTFDAAHHLHQYEGKCKNLHGHTYKVVFGISGFVDEIGLVVDFTDIKQIWKEDIEVYLDHRYLNETLPKMNTTAENMVVWIYEQMKTSLEKRQEQYNEARVEFVRLYETPTSYAEVKREWMEDE

SEQ ID NO: 17941 - protein, 146 aa, Bacillus sonorensis
  REGION 1..146: note = tr|M5P3F3|M5P3F3_9BACI 6-carboxy-5,6,7,8-tetrahydropterin synthase OS=Bacillus sonorensis L12 OX=1274524 GN=BSONL12_12291 PE=3 SV=1
MLTQVYPQTNHLYAFELNKDMQVSAAHFIPREDAGACSRIHGHTYTINITIAGDQLNESGFLVNFSTIKKLVHGEYDHTLLNDHSEFSGESREQIPSTEVVAKTIYEKVDAYLKGLENRPHCVQVFVRETPTSYVVYRPKQGEPNG

SEQ ID NO: 17942 - protein, 133 aa, Bacillus sonorensis
  REGION 1..133: note = tr|M5P8K2|M5P8K2_9BACI 6-carboxy-5,6,7,8-tetrahydropterin synthase OS=Bacillus sonorensis L12 OX=1274524 GN=BSONL12_01012 PE=3 SV=1
MSDQYVYTLTKHFWISCAHKVAGAGKCERLHGHNYKVTFCITGSALDEKDMLIDFREVKHHLEKKYDHYVLNDFDEFNKEKGGYEPSTERVAQVFFEIIESLCKTKRNKPNVKWVDVLETNEASARYEKFERR

SEQ ID NO: 17943 - protein, 146 aa, Bacillus sp.
  REGION 1..146: note = tr|A0A0Q9IE47|A0A0Q9IE47_9BACI 6-carboxy-5,6,7,8-tetrahydropterin synthase OS=Bacillus sp. Root239 OX=1736499 GN=ASE46_03340 PE=3 SV=1
MLQQMYPQVFHDYEYELNKDMQFAAAHFVPHIEAGKCRQVHGHTYFVNLTVAGDKLDEAGFLVNFALLKKIVSGQFDHTLLNDHSIFNEENPNDFPTTEVVARKIYELVQEYLDTLPNKPSCVQVFVRETPTSYVVYRPKKVKKRG

SEQ ID NO: 17944 - protein, 163 aa, Bacillus sp.; identical to SEQ ID NO: 17799
  REGION 1..163: note = tr|A0A2B4NNY0|A0A2B4NNY0_9BACI 6-carboxytetrahydropterin synthase QueD OS=Bacillus sp. AFS075960 OX=2034282 GN=queD PE=4 SV=1

SEQ ID NO: 17945 - protein, 72 aa, Bacillus sporothermodurans
  REGION 1..72: note = tr|A0A150KKC7|A0A150KKC7_9BACI Uncharacterized protein OS=Bacillus sporothermodurans OX=46224; GN = B4102_3933 PE=4 SV=1
MLQQFYPQPTPHPFRFELNKDMDFSTAHFIPNEKAGKCSFTHGHTYFVNVTIAGDELDEMGMLVNFGDLKKL

SEQ ID NO: 17946 - protein, 146 aa, Bacillus stratosphericus
  REGION 1..146: note = tr|M5R272|M5R272_9BACI 6-carboxy-5,6,7,8-tetrahydropterin synthase OS=Bacillus stratosphericus LAMA 585 OX=1236481 GN=C883_1536 PE=3 SV=1
MLSQIYPQTDHPFSFELNKDMHVSAAHFIPREDAGACSRVHGHTYTINITIAGDDLDESGFLVNFSTLKKLIHGKYDHTLLNDHEEFSSTDPYAMPTTEVVAKTVYDKVAAYLTTLANKPTCVQVFVRETPTSYCIYRPKRVELND

SEQ ID NO: 17947 - protein, 146 aa, Bacillus stratosphericus
  REGION 1..146: note = tr|A0A4Y9K2E7|A0A4Y9K2E7_9BACI 6-carboxy-5,6,7,8-tetrahydropterin synthase OS=Bacillus stratosphericus OX=293386 GN=queD PE=3 SV=1
MLSQIYPQTDHPFSFELNKDMHVSAAHFIPREDAGACSRVHGHTYTINITIAGDELDESGFLVNFSTLKKLIHGQYDHTLLNDHEEFSSNDRYAMPTTEVVAKTVHDKVAAYLSTLANKPTCVQVFVRETPTSYCIYRPKRVEING

SEQ ID NO: 17948 - protein, 158 aa, Bacillus subterraneus
  REGION 1..158: note = tr|A0A427TM27|A0A427TM27_9BACI 6-carboxytetrahydropterin synthase QueD OS=Bacillus subterraneus OX=285983 GN=queD PE=4 SV=1
MYDFRIVEQLQKIDKDIKREQLKYHAKRVLVSKEFTFDAAHHLHEYEGKCKNLHGHTYKVIFGISGYVDSRGLMIDFGDIKDIWKSEIEVHLDHRYLNETLPPMNTTAENMVVWIFEKMSEALSRRENLYIGVQVEFVRLYETPTSYAEARREWMEID

SEQ ID NO: 17949 - protein, 146 aa, Bacillus subtilis
  REGION 1..146: note = sp|O31676|QUED_BACSU 6-carboxy-5,6,7,8-tetrahydropterin synthase OS=Bacillus subtilis (strain 168) OX=224308 GN=queD PE=1 SV=2
MLSQIYPQAQHPYSFELNKDMHISAAHFIPRESAGACSRVHGHTYTVNITVAGDELDDSGFLVNFSVLKKLVHGNYDHTLLNDHEDFSQDDRYSLPTTEVVAKTIYDNVQAYLDTLENKPTCVQVFVRETPTSYCVYRPKKGGLNG

SEQ ID NO: 17950 - protein, 149 aa, Bacillus subtilis
  REGION 1..149: note = tr|A0A5F2KP98|A0A5F2KP98_BACIU 6-carboxy-5,6,7,8-tetrahydropterin synthase OS=Bacillus subtilis OX=1423 GN=queD PE=3 SV=1
MHKLLSQIYPQAQHPYSFELNKDMHISAAHFIPRESAGACSRVHGHTYTVNITVAGDELDDSGFLVNFSVLKKLVHGNYDHTLLNDHEDFSQDDRYSLPTTEVVAKTIYDNVQAYLDTLENKPNCVQVFVRETPTSYCVYRPKKGGLNG

SEQ ID NO: 17951 - protein, 146 aa, unidentified
  source 1..146: note = Bacillus swezeyi
  REGION 1..146: note = tr|A0A5D4QJC4|A0A5D4QJC4_9BACI 6-carboxy-5,6,7,8-tetrahydropterin synthase OS=Bacillus swezeyi OX=1925020 GN=queD PE=3 SV=1
MLTQVYPQTSHPYAFELNKDMQMSAAHFIPREDAGACSRVHGHTYTINITIAGDVLNESGFLVNFSTLKKLIHGEYDHTLLNDHKEFSGESAEQIPSTEVVAKTIYDKVEAYLKGLENRPRCVQVFVRETPTSYVVYRPKPGDQHG

SEQ ID NO: 17952 - protein, 146 aa, unidentified
  source 1..146: note = Bacillus swezeyi
  REGION 1..146: note = tr|A0A1R1RGQ3|A0A1R1RGQ3_9BACI 6-carboxy-5,6,7,8-tetrahydropterin synthase OS=Bacillus swezeyi OX=1925020 GN=BTA30_21125 PE=3 SV=1
MLTQVYPQTSHPYAFELNKDMQMSAAHFIPREDAGACSMVHGHTYTINITIAGDVLNESGFLVNFSTLKKLIHGEYDHTLLNDHKEFSGESAEQIPSTEVVAKTIYDKVEAYLKGLENRPCCVQVFVRETPTSYVVYRPKPGDQHG

SEQ ID NO: 17953 - protein, 158 aa, Bacillus taeanensis
  REGION 1..158: note = tr|A0A366Y347|A0A366Y347_9BACI 6-carboxytetrahydropterin synthase QueD OS=Bacillus taeanensis OX=273032 GN=queD PE=4 SV=1
MNFEIPKKVQKIDEDIKRNQLKYHHKRVAVTKEFTFDSAHHLHCYEGKCKSLHGHTYKLIITISGYVNEIGIAVDFSDIKRIYKETIEARLDHRYLNDVLPPMNTTAENMIVWIWEELNTHFEAEGLKAQGHRLEELVLYETPTSYATMKREWMEENE

SEQ ID NO: 17954 - protein, 146 aa, Bacillus tequilensis
  REGION 1..146: note = tr|A0A2X0X447|A0A2X0X447_9BACI 6-carboxy-5,6,7,8-tetrahydropterin synthase OS=Bacillus tequilensis OX=227866 GN=queD PE=3 SV=1
MLSQIYPQAQHPYSFELNKDMHISAAHFIPRESAGACSRVHGHTYTVNITVAGDELDDSGFLVNFSVLKKLVHGNYDHTLLNDHEDFSQDDRYSLPTTEVVAKTIYDNVQAYLDTLENKPACVQVFVRETPTSYCVYRPKKGGLNG

SEQ ID NO: 17955 - protein, 160 aa, unidentified
  source 1..160: note = Bacillus terrae
  REGION 1..160: note = tr|A0A429X5I5|A0A429X5I5_9BACI 6-carboxytetrahydropterin synthase QueD OS=Bacillus terrae; OX = 1914933 GN=queD PE=4 SV=1
MGKDFFGFRIVEELQMMDRDIQKNELKYHNKRVLVSKEFTFDAAHHLHCYEGKCKNLHGHTYKVIFGISGFVDEIGLVIDFGDIKEIWKQEIEVHLDHRYLNETLPKMNTTAENMVVWIYEKMRESLNNRSEKYNDMRVEFVRLYETPTSYSEARREWMN

SEQ ID NO: 17956 - protein, 145 aa, unidentified
  source 1..145: note = Bacillus thermocopriae
  REGION 1..145: note = tr|A0A410XI41|A0A410XI41_9BACI 6-carboxytetrahydropterin synthase QueD OS=Bacillus thermocopriae OX=1215031 GN=queD PE=4 SV=1
MIQQIYPQVIHPFRYELNKDMQIAAAHFIPHEAAGQCANMHGHTYFVNITVAGDELDDSGFLINFQQLKKLIHNRFDHTLMNDHTDVFSNTSAEHFPTTEVVARKIAEIVQAHLDTLPNRPTCVQVFVRESPTSYVVYRPKAGKQ

SEQ ID NO: 17957 - protein, 163 aa, Bacillus thuringiensis; identical to SEQ ID NO: 17799
  REGION 1..163: note = tr|C3G069|C3G069_BACTU 6-pyruvoyl tetrahydrobiopterin synthase OS=Bacillus thuringiensis serovar andalousiensis BGSC 4AW1 OX=527032; GN = bthur0009_11990 PE=4 SV=1

SEQ ID NO: 17958 - protein, 163 aa, Bacillus thuringiensis; identical to SEQ ID NO: 17815
  REGION 1..163: note = tr|W8XZV5|W8XZV5_BACTU Uncharacterized protein; OS = Bacillus thuringiensis DB27 OX=1431339 GN=BTDB27_001046; PE = 4 SV=1

SEQ ID NO: 17959 - protein, 272 aa, unidentified
  source 1..272: note = Bacillus timonensis
  REGION 1..272: note = tr|A0A4S3PN16|A0A4S3PN16_9BACI 6-pyruvoyl tetrahydropterin synthase OS=Bacillus timonensis; OX = 1033734 GN=E1I69_18230 PE=4 SV=1
MLYLSRKMYFSAAHYYRIEEWSEEENQKVFGLCSNPHGHGHDYTLEVMVKGQLDRESGIVVNITDIDKVVKSFIYREVDGKFLNKENPYFTSHLPTTENMVSYIWSSLDGKIDNCQLHKIRLRENDFLFAEKEDQEMVRLTRKYHFSTAHRLHSYQLSHEENLAIFGKCNNPYGHGHNYYLEVTVSGKPDPVTGMIANLSEMDEIVEREIMKKFDHKHLNLDTEEFKELNPTSENVAVVVWDLLAPKLKNLFKIGLYETEKNYFEYYGPEME

SEQ ID NO: 17960 - protein, 167 aa, unidentified
  source 1..167: note = Bacillus timonensis
  REGION 1..167: note = tr|A0A4S3PJ58|A0A4S3PJ58_9BACI 6-carboxytetrahydropterin synthase QueD OS=Bacillus timonensis OX=1033734 GN=queD PE=4 SV=1
MADKKVQHDFFGFRIVENLQKINQDIKRSELKYHRKRVLVSKEFTFDAAHHLHCYEGKCKNLHGHTYKVVFGISGFVNEIGLVIDFGDIKEFWKQEIETYLDHRYLNETLPKMNTTAENMVVWIYEKMKESLNKRSEKYNDLRVEFVRLYETPTSYAEVRREWMEVE

SEQ ID NO: 17961 - protein, 163 aa, unidentified
  source 1..163: note = Bacillus toyonensis
  REGION 1..163: note = tr|A0A2A8HGP5|A0A2A8HGP5_9BACI 6-carboxytetrahydropterin synthase QueD OS=Bacillus toyonensis OX=155322 GN=queD PE=4 SV=1
MDNFFGFRIVENLQKMDKDIQRKQLKYHNKRVMVSKEFTFDAAHHLHCYEGKCKNLHGHTYKVVFGISGYVNEIGLAIDFGDIKEIWKNEIEIYLDHRYLNETLPAMNTTAENMVVWIYEKMAEALTKDNRVKEYKGARVEFVRLFETPTSYAEVRREWMLDE

SEQ ID NO: 17962 - protein, 163 aa, unidentified
  source 1..163: note = Bacillus toyonensis
  REGION 1..163: note = tr|A0A2B6GU02|A0A2B6GU02_9BACI 6-carboxytetrahydropterin synthase QueD OS=Bacillus toyonensis OX=155322 GN=queD PE=4 SV=1
MENFFGFRIVENLQKMDKDIQLEQLKYHNKRVMVSKEFTFDAAHHLHCYEGKCKNLHGHTYKVVFGISGYVNDIGLAIDFGDIKEIWKNEIEIYLDHRYLNETLPVMNTTAENMVVWIYEKMAEALIKGNRTEEYKGARVEFVRLFETPTSYAEVRREWILDE

SEQ ID NO: 17963 - protein, 163 aa, unidentified; identical to SEQ ID NO: 17799
  source 1..163: note = Bacillus tropicus
  REGION 1..163: note = tr|A0A4Y6F859|A0A4Y6F859_9BACI 6-carboxytetrahydropterin synthase QueD OS=Bacillus tropicus OX=2026188 GN=queD PE=4 SV=1

SEQ ID NO: 17964 - protein, 156 aa, unidentified
  source 1..156: note = Bacillus urumqiensis
  REGION 1..156: note = tr|A0A2P6MES5|A0A2P6MES5_9BACI 6-carboxytetrahydropterin synthase QueD OS=Bacillus urumqiensis OX=1548213 GN=queD PE=4 SV=1
MFGFRIVDKLQKLGEDIQKKDLRYHQKRVMVSKEFTFDAAHHLHAYEGKCKNLHGHTYTVVFGISGFVDETGIMMDFGDIKEIWKEKIEIYLDHRYLNEMLPPMNTTAENMVVWIFEQMNEALEKNGEQSMRTEFVRLYETPTSYAEFRREWMINE

SEQ ID NO: 17965 - protein, 146 aa, Bacillus vallismortis
  REGION 1..146: note = tr|A0A1W6HHT3|A0A1W6HHT3_BACVA 6-carboxy-5,6,7,8-tetrahydropterin synthase OS=Bacillus vallismortis OX=72361 GN=B9C48_06910 PE=3 SV=1
MLSQIYPQVQHPYSFELNKDMHISAAHFIPRESAGACSRVHGHTYTVNITVAGDELDDSGFLVNFSVLKKLVHGAYDHTLLNDHDEFSEDDRYSLPTTEVVAKTIYDKVQSYLETLENQPVCVQIFVRETPTSYCVYRPKKGDRNG

SEQ ID NO: 17966 - protein, 149 aa, Bacillus vallismortis
  REGION 1..149: note = tr|A0A410WIA6|A0A410WIA6_BACVA 6-carboxy-5,6,7,8-tetrahydropterin synthase OS=Bacillus vallismortis OX=72361 GN=queD PE=3 SV=1
MHKLLSQIYPQAQHPYSFELNKDMHISAAHFIPRESAGACSRVHGHTYTVNITVAGDELDDSGFLVNFSVLKKLVHGNYDHTLLNDHDDFSQDDRYSLPTTEVVAKTIYDNVQAYLDTLENKPSCVQVFVRETPTSYCVYRPKKGGLNG

SEQ ID NO: 17967 - protein, 147 aa, unidentified
  source 1..147: note = Bacillus velezensis
  REGION 1..147: note = tr|A7Z3Y7|A7Z3Y7_BACVZ 6-carboxy-5,6,7,8-tetrahydropterin synthase OS=Bacillus velezensis (strain DSM 23117 / BGSC 10A6 / FZB42); OX = 326423 GN=queD PE=3 SV=1
MLSQIYPQVQHPYSFELNKDMHISAAHFIPRESAGACSRVHGHTYTVNITVAGDELDDSGFLVNFSVLKKLVHGAYDHTLLNDHDEFSADDDRYSLPTTEVVAKTIYDKVQSYLETLENQPVCVQIFVRETPTSYCVYRPKKGDRNG

SEQ ID NO: 17968 - protein, 147 aa, unidentified; identical to SEQ ID NO: 17967
  source 1..147: note = Bacillus velezensis
  REGION 1..147: note = tr|S6FX97|S6FX97_9BACI 6-carboxy-5,6,7,8-tetrahydropterin synthase OS=Bacillus velezensis UCMB5033 OX=1338518 GN=queD PE=3 SV=1

SEQ ID NO: 17969 - protein, 144 aa, Bacillus vietnamensis
  REGION 1..144: note = tr|A0A0P6W1E6|A0A0P6W1E6_9BACI 6-carboxy-5,6,7,8-tetrahydropterin synthase OS=Bacillus vietnamensis OX=218284 GN=AM506_01380 PE=3 SV=1
MIQQIYPTPDHPYEFELNKDMHFAAAHYIPHADAGSCQEVHGHTYFANITIGGDQLDDSGFLINFQHIKKLIHKRFDHTIINQDERFSSEKGMEFPTTEVVAKVMWEIIQDHLDTLPHRPQCLQVFLRETPTSYCIYRPKGKRS

SEQ ID NO: 17970 - protein, 144 aa, Bacillus vietnamensis
  REGION 1..144: note = tr|A0A5D4NZD4|A0A5D4NZD4_9BACI 6-carboxy-5,6,7,8-tetrahydropterin synthase OS=Bacillus vietnamensis OX=218284 GN=queD PE=3 SV=1
MIGQIYPVPQHSYSYELNKDFQFAAAHRIPSEAAGKCQRIHGHTYFANITVGGDILDESGFLINFATIKKLIHDRFDHTLLNDDPLFKGNSERFPTTEVMAEVMHSIIQEHLDQQGNKAQCLQVFLRETPTSYCIFRPRRGKEL

SEQ ID NO: 17971 - protein, 141 aa, Bacillus wakoensis
  REGION 1..141: note = tr|W4PZD7|W4PZD7_9BACI 6-carboxy-5,6,7,8-tetrahydropterin synthase OS=Bacillus wakoensis JCM 9140 OX=1236970 GN=JCM9140_389 PE=3 SV=1
MIQQFYPQVQHSYRYELNKDMHLAAAHFIPDDAAGQCKNMHGHTYFINITIGGDTLDELGFLINFKRIKEIVHKRYDHSVLNDHLEYKDVFPTTERVAEQIWQAVQAELQTQVNKPNCLQVVVRETPTSYVVYRPKPEELA

SEQ ID NO: 17972 - protein, 148 aa, unidentified
  source 1..148: note = Bacillus weihaiensis
  REGION 1..148: note = tr|A0A1L3MT71|A0A1L3MT71_9BACI 6-carboxy-5,6,7,8-tetrahydropterin synthase OS=Bacillus weihaiensis OX=1547283 GN=A9C19_12705 PE=3 SV=1
MIQQIYPQVQHDYQFELNKDMHIAAAHYIPHEDAGKCQNVHGHTYFVNITIAGDELDETGFLVNFASLKRLIHKRFDHTILNDHKDLFSEKDPTYFPTTEGVARAIYEVVQNDLDQKDNQPKCVQVFVRETPTSYVVYRPKKKKEGHR

SEQ ID NO: 17973 - protein, 163 aa, unidentified
  source 1..163: note = Bacillus wiedmannii
  REGION 1..163: note = tr|A0A2A7XAC8|A0A2A7XAC8_9BACI 6-carboxytetrahydropterin synthase QueD OS=Bacillus wiedmannii OX=1890302 GN=queD PE=4 SV=1
MDNLFGFRIVENLQKMDKDIQRKQLKYHNKRVMVSKEFTFDAAHHLHCYEGKCKNLHGHTYKVVFGISGYVNEIGLAIDFGDIKEIWKNEIEIYLDHRYLNETLPAMNTTAENMVVWIYEKMAEALLKDNRANEYKGARVEFVRLFETPTSYAEVRREWMLDE

SEQ ID NO: 17974 - protein, 163 aa, unidentified
  source 1..163: note = Bacillus wiedmannii
  REGION 1..163: note = tr|A0A2A8DPP8|A0A2A8DPP8_9BACI 6-carboxytetrahydropterin synthase QueD OS=Bacillus wiedmannii OX=1890302 GN=queD PE=4 SV=1
MENFFGFRIVENLQKMDKDIQLEQLKYHNKRVMVSKEFTFDAAHHLHCYEGKCKNLHGHTYKVVFGISGYVNDIGIAIDFGDIKEIWKNEIEIYLDHRYLNETLPVMNTTAENMVVWIYEKMAEALTKGYRAEEYKGARVEFVRLFETPTSYAEVRREWILDE

SEQ ID NO: 17975 - protein, 145 aa, unidentified
  source 1..145: note = Bacillus wudalianchiensis
  REGION 1..145: note = tr|A0A1B9AC59|A0A1B9AC59_9BACI 6-carboxy-5,6,7,8-tetrahydropterin synthase OS=Bacillus wudalianchiensis OX=1743143 GN=A8F95_16765 PE=3 SV=1
MIQQIYPVPMHSYRYELNKDFQFAAAHYVPHEAAGACRRLHGHTYFANVTVVGNDLNESGFLVNFQDIKNLIHKRFDHTILNEDSLFNEMDPNDFPTTEVVARKFWEVIQESLNKLPNKPLCIQVFLRETPTSYVVFRPQKEDFQ

SEQ ID NO: 17976 - protein, 272 aa, unidentified
  source 1..272: note = Bacillus wudalianchiensis
  REGION 1..272: note = tr|A0A1B9B7S8|A0A1B9B7S8_9BACI 6-pyruvoyl tetrahydropterin synthase OS=Bacillus wudalianchiensis; OX = 1743143 GN=A8F95_18530 PE=4 SV=1
MILLTRKVEFSAAHSYRIDTWDEETNRKAFGLCSNPNGHGHDYTLEVTVKGDLNSSSGIVVNITDVDRIVKSVVLEELDGKFLNREHSFFKEHIPTTENIVNYIWNELKDRFNGCKLDRIILHENPFLFSQKGENSMIQLTRKYHFSAAHRLHSDQLSDEENKEIFGKCNNPNGHGHNYVLEVTVEGEIDPVTGMIINLAQLDEIVDETIIQKFDHKHLNLDTEEFNGLNPTAEVMTIVFWELLQSRLPSLSKVGLWETAKNYFEYGGPVEE

SEQ ID NO: 17977 - protein, 145 aa, unidentified
  source 1..145: note = Bacillus xiamenensis
  REGION 1..145: note = tr|K2N7G5|K2N7G5_9BACI 6-carboxy-5,6,7,8-tetrahydropterin synthase OS=Bacillus xiamenensis OX=1178537 GN=BA1_17680 PE=3 SV=1
MLSQIYPQTDHPFSFELNKDMHLSAAHFVPREEAGACSRVHGHTYTINITIAGDDLDESGFLVNFSTLKKLIHGQYDHTLLNDHEEFSSNDPYAMPTTEVVAKTVYDKVAAYLTTLANKPVCVQVFVRETPTSYCIYRPKRVELK

SEQ ID NO: 17978 - protein, 277 aa, unidentified
  source 1..277: note = Bacillus xiamenensis
  REGION 1..277: note = tr|K2N9Y3|K2N9Y3_9BACI Putative 6-pyruvoyl tetrahydropterin synthase OS=Bacillus xiamenensis; OX = 1178537 GN=BA1_14572 PE=4 SV=1
MLYLSRKMYFSSLHSYRVKEWSDEYNQQVFGPCSNPNGHGHDYTLEVMVKGKLNRQSGIVVNITDIDKVVKSFVAENLDGKFLNMENDYFKHHIPTTENIATYLWESLDGKIDHCQIHKIRLHENNFLYSEKEDGQLVRLTRKYHFCTAHRLHSEQLSEEENQELFGKCNNPYGHGHNYYLEVTVNGEPDPVTGMIANLSDIDSVVEKEIMERFDHKHLNLDTEEFKDLNPTSENVAVVIWDLLSPQLTNLFKIGLYETEKNYFEYCGPQEDMKYGA

SEQ ID NO: 17979 - protein, 160 aa, unidentified
  source 1..160: note = Bacillus zeae
  REGION 1..160: note = tr|A0A398AVD5|A0A398AVD5_9BACI 6-carboxytetrahydropterin synthase QueD OS=Bacillus zeae; OX = 1917180 GN=queD PE=4 SV=1
MYGFRIVDKLQKIDEDIKIDQLKYHHKRVLVSKEFTFDSAHHLHHYEGKCKNLHGHTYRVIFGLSGYVDERGIMIDFGDIKEIWKSEIEIFLDHKYLNETLPPMNTTAENMVVWIYEKMSEGLQREDRMSKYAEARVEFVRLFETPTSYAEARREWMEHE

SEQ ID NO: 17980 - protein, 146 aa, unidentified
  source 1..146: note = Bacillus zhangzhouensis
  REGION 1..146: note = tr|A0A081L6Z7|A0A081L6Z7_9BACI 6-carboxy-5,6,7,8-tetrahydropterin synthase OS=Bacillus zhangzhouensis OX=1178540 GN=BA70_12590 PE=3 SV=1
MLSQIYPQTDHPFSFELNKDMHVSAAHFIPREDAGACSRVHGHTYTINITIAGDDLDESGFLVNFSTLKKLIHGQYDHTLLNDHEEFSSNDPYAMPTTEVVAKTVHDKVAAYLSTLANKPTCVQVFVRETPTSYCIYRPKRVEING

SEQ ID NO: 17981 - protein, 121 aa, unidentified
  source 1..121: note = Unknown
  REGION 1..121: note = tr|A0A0J8YRG2|A0A0J8YRG2_9GAMM 6-carboxy-5,6,7,8-tetrahydropterin synthase OS=bacteria symbiont BFo2 of Frankliniella occidentalis OX=1628856; GN = AI29_00610 PE=3 SV=1
MAVTTLFKEFQFEAAHFLPHVPEGHKCGRLHGHSFLVRLEITGEVDAHTGWVMDFAELKAAFKPLYERLDHHYLNDIAGLENPTSEVLAVWIWKQMKPKLPLLSAVMIKETCTAGCTYRGE

SEQ ID NO: 17982 - protein, 119 aa, unidentified
  source 1..119: note = Unknown
  REGION 1..119: note = tr|A0A0J8YGN2|A0A0J8YGN2_9GAMM 6-carboxy-5,6,7,8-tetrahydropterin synthase OS=bacteria symbiont BFo1 of Frankliniella occidentalis OX=1628855; GN = AI28_22630 PE=3 SV=1
MATTLFKDFQFEAAHHLPNVPAGHKCGRLHGHSFMVRLEITGEVDAHTGWVMDFSEIKAAFKPVYDRLDHYNLNDIPGLENPTSEVLAAWIWQQMKPVLPLLSAVMVKETCTAGCVYRG

SEQ ID NO: 17983 - protein, 134 aa, unidentified
  source 1..134: note = Bacteriodetes bacterium
  REGION 1..134: note = tr|A0A521WKT0|A0A521WKT0_9BACT 6-carboxy-5,6,7,8-tetrahydropterin synthase; OS = Bacteriodetes bacterium OX=2507565 GN=EPO24_10450 PE=3; SV = 1
MVLLTRKEHFCASHRLYNPKFSDGQNLRIYGKCAYPNGHGHNYELDVTVAGEVDPETGMILDLKELSDIIKKEITDKVDHKHLNMDIDFLRDVIPTAENLAIVFWNILAPKIPKGKLYSLRVYETPTNYAEYRG

SEQ ID NO: 17984 - protein, 138 aa, unidentified
  source 1..138: note = Bacteriodetes bacterium
  REGION 1..138: note = tr|A0A522FWK5|A0A522FWK5_9BACT 6-carboxy-5,6,7,8-tetrahydropterin synthase; OS = Bacteriodetes bacterium OX=2507565 GN=EPN82_00460 PE=3; SV = 1
MLYITKSVTFSASHRLYNPEFSDEENERIFDKCNNFYGHGHNYTLEVTVAGEPNPKTGYIIDLKILKKIIQDEILSKVDHKHLNHDVEFLKGIIPTVENLAIAFWNRLENNFQDGKLHCIRLYETENSYVEYFGKKRD

SEQ ID NO: 17985 - protein, 277 aa, unidentified
  source 1..277: note = Bacterioplanes sanyensis
  REGION 1..277: note = tr|A0A222FMV2|A0A222FMV2_9GAMM Uncharacterized protein OS=Bacterioplanes sanyensis OX=1249553; GN = CHH28_15550 PE=4 SV=1
MQLFVDQLTNVDFSYLDAERGIVGETWWASARLDGGLDDQGMICDFGLVKKTLRNWLDDEVDHRLLVPVKSPQLTLQSTADSVELSWNCQHGTINMSAPRQAVALIDSDHISADSVARWCRQQLKAFFPVNVEQLTLGFTPEQIDGAFYHYSHGLKKHGGNCQRIAHGHRSRIVIQLDGQRNPALEAQWAQRWQDIYLGSDEDVVGQDDQRIHYAYQAMQGDFRLSMPKVTCYQMDTDTTVEFIAQHLANAIKHEHPDSAVTVQAFEGVNKGAIASA

SEQ ID NO: 17986 - protein, 145 aa, Bacteriovorax sp.
  REGION 1..145: note = tr|T0DK36|T0DK36_9PROT 6-pyruvoyl tetrahydropterin synthase OS=Bacteriovorax sp. BAL6_X OX=1201290; GN = M902_2117 PE=4 SV=1
MATFKSTKHFYGFPCTHRQWKADSHCRFVHGYSRSFHFEFECSELTKEMWVMDFGDLKDVKAWLDDMFDHTFLASQDDPFMEEFKKLDEAGVVQLRVLPNAGMEGTAEFVYEKMSELIKKKTDGRVWISRLEVKENEKNSAIYIP

SEQ ID NO: 17987 - protein, 147 aa, Bacteriovorax sp.
  REGION 1..147: note = tr|T0RFZ3|T0RFZ3_9PROT 6-pyruvoyl tetrahydropterin synthase OS=Bacteriovorax sp. Seq25_V OX=1201288; GN = M900_2058 PE=4 SV=1
MKTFKSTKNFYGYPCTHRQWKADSHCKYVHGYSRSFHFVFECTELSKEMWVMDFGDLKDVKAWLDYMFDHTFLVSEDDPFKAEFVELDKKGVIQMRELPNAGMEGTAIFVYDHVNKMVEEKTNKRVRVYSLEVKENEKNSAIYCPTA

SEQ ID NO: 17988 - protein, 164 aa, Bacteriovorax stolpii
  REGION 1..164: note = tr|A0A2K9NSL7|A0A2K9NSL7_9PROT Uncharacterized protein OS=Bacteriovorax stolpii OX=960 GN=C0V70_10425; PE = 4 SV=1
MKTAFSIRVYKQYFNFASSHFMLFKDGTREPLHGHNYRVQVRGNAPELDDDMVFDFLNIKPIVRKICDSLDHKLLIPKNHPKIIIEDKEKNYNIITPDESVFSIPKTDVLLMPIENTSAERIAAYLAQEIKSAVFAEYKFEFNELEIEVEETPGQSAVYTLLKE

SEQ ID NO: 17989 - protein, 151 aa, Bacteriovorax stolpii
  REGION 1..151: note = tr|A0A2K9NU32|A0A2K9NU32_9PROT 6-pyruvoyl tetrahydropterin synthase OS=Bacteriovorax stolpii OX=960; GN = C0V70_13140 PE=4 SV=1
MYISTKRFTGYPCTHRQWRDEGHCRFVHGYSREFSFWFKAKTLDEKGWVMDFGGFKEFKTFLDDTFDHTFLANADDPELPLFEEMHKKGIVKLRVLESVGMEGTSKFLHQKMNEYLDKKTGGRVYCFRVETRENEKNSGLYEEDKSGFSAV

SEQ ID NO: 17990 - protein, 134 aa, unidentified
  source 1..134: note = Unknown
  REGION 1..134: note = tr|A0A2E0CBB8|A0A2E0CBB8_9BACT 6-pyruvoyl tetrahydrobiopterin synthase OS=bacterium OX=1869227; GN = CL640_04825 PE=4 SV=1
MISVTRKSHFNAAHRLNNPKWSVEKNREFFGLCNNENYHGHNYDLDVTVSGELDEESGYLIDMKELSTLIEIEIESRFDHKNLNLDTKEFKNLNPTAENIAIIIWNILRKKIDEKFSLKICLYETSRNFVEYSG

SEQ ID NO: 17991 - protein, 141 aa, unidentified
  source 1..141: note = Unknown
  REGION 1..141: note = tr|A0A2E4FY48|A0A2E4FY48_9BACT 6-pyruvoyl tetrahydrobiopterin synthase OS=bacterium OX=1869227; GN = CL648_01700 PE=4 SV=1
MLKHPVFLTLRRTFCAAHRLYSDALSPEDNQKIFNKCAHPHGHGHNYVVHVSLRGEPDPTTGMIMNVSILKELLETHVFSDFDHRHLNIDVHEFQAGLLPTVENIAIVIWNRLYPHLPEYLYAIKVEETESISALYYGPES

SEQ ID NO: 17992 - protein, 124 aa, unidentified
  source 1..124: note = Unknown
  REGION 1..124: note = tr|A0A532UMC7|A0A532UMC7_9BACT 6-carboxy-5,6,7,8-tetrahydropterin synthase OS=bacterium (candidate division B38) B3_B38 OX=2012999 GN=queD PE=3; SV = 1
MYEIMIETGFSASHQVKGYPGDCAQPHGHNWKVRVYVRADRTNSLGMVIDFRRLKEITCEFTEQLDHKSLNNLPPFDKENPTSENIAKWLYDNLKRKIDTEDYYLWAVEVFETETSRAFYSESE

SEQ ID NO: 17993 - protein, 168 aa, unidentified
  source 1..168: note = Unknown
  REGION 1..168: note = tr|A0A2M7G0T0|A0A2M7G0T0_9BACT Folate biosynthesis protein OS=bacterium (Candidatus Blackallbacteria) CG17_big_fil_post_rev_8_21_14_2_50_48_46 OX=2014261; GN = COW36_18 030 PE=4 SV=1
MRTVTLELFKENMKFSAGHFTIFSAQERENLHGHNFTVHVTIEACILENGMCFDYALYKRRIEGLCREWNEVVLLPSQSPYLRIEETDDLIFAHFDTERIPFLRRDVLLLPIENATVEEFSRLFLEKLIANPQELSDWGLEAISVKIFSGPGQCAASSWKKPEAHAEP

SEQ ID NO: 17994 - protein, 131 aa, unidentified
  source 1..131: note = Unknown
  REGION 1..131: note = tr|A0A2G9Y9L5|A0A2G9Y9L5_9BACT 6-carboxy-5,6,7,8-tetrahydropterin synthase OS=bacterium (Candidatus Ratteibacteria) CG23_combo_of_CG06-09_8_20_14_all_48_7 OX=2014292GN=queD; PE = 3 SV=1
MGYQVEVTDSFAAAHQLRGYQGKCENLHGHNWKVSVTLFVKQVNKIGMAIDFAEVKRILSAILQEMDHTFLNQHPHFQKNNPTSENIARYIFDQFSSHLRDKKVKVAGVSVWESENCRAIYYSSQDVVRPF

SEQ ID NO: 17995 - protein, 187 aa, unidentified
  source 1..187: note = Unknown
  REGION 1..187: note = tr|A0A3A9EQZ4|A0A3A9EQZ4_9BACT Rubredoxin; OS = bacterium 1XD42-8 OX=2320102 GN=D7X25_26540 PE=4 SV=1
MRSITTLDLQYAHRFYGFKGEAQYLHGHTGVLTIEVEDSIESGVNMVFPCNEIQKTAWEVLKNFDHALVLREDDPLLPAILNVYEEQGIRNGEPNNKMKGPAFKTELATAYPDCRLVVTKETMTVEGMIKIVYDLLKDKLNIAKLTFTSGVNAASEEFQTKNKIDRCPKCGIALNENGVCPKCGYKK

SEQ ID NO: 17996 - protein, 139 aa, unidentified
  source 1..139: note = Unknown
  REGION 1..139: note = tr|A0A3A8YF66|A0A3A8YF66_9BACT 6-carboxy-5,6,7,8-tetrahydropterin synthase OS=bacterium 1xD8-6 OX=2320116 GN=D7V82_17000 PE=3 SV=1
MYQLTIEQSFDSAHFLAGYSGKCGNIHGHRWRVLLQVQSEQLKEDAQQRGMCVDFSTLKDELKKAVDGLDHTLLIERGTLKEKTLEALSEEGFSVIELAFRPTAENFAKHFYGLFVNKGYDVAAVHVYETPNNCASYQE

SEQ ID NO: 17997 - protein, 162 aa, unidentified
  source 1..162: note = Unknown
  REGION 1..162: note = tr|A0A0S4LZB2|A0A0S4LZB2_9BACT 6-carboxy-5,6,7,8-tetrahydropterin synthase OS=bacterium 2013Arg42i OX=1561003 GN=queD PE=4 SV=1
MKEKDCLSPVFEITRRIEFDAGHRIPHHHGLCSNIHGHRYGLEITIAGSLVSGESFSDNGMVVDFQAIQKLACESLIDEWDHAFIVYKDDFILEMLKKIPNHRTFVLDQPPTVENMAAFAFRRLRNVYQSRYGNTLHLNRIRLYETPNCWADVTSGYDSSAT

SEQ ID NO: 17998 - protein, 135 aa, unidentified
  source 1..135: note = Unknown
  REGION 1..135: note = tr|A0A0M9DSK3|A0A0M9DSK3_9BACT 6-carboxy-5,6,7,8-tetrahydropterin synthase OS=bacterium 336/3 OX=1664068 GN=AD998_15260 PE=3 SV=1
MKVKVSRKEHFNAAHRLHNPAWDEQKNMEVFGKCNNQYYHGHNYELIIEVVGEISPETGYVIDMKVLSDIIKEHVTDRFDHKNLNLELNEFKNLNPTAENIAVVIWNILRQHIQPPYELKVKLYETERNFVEYPA

SEQ ID NO: 17999 - protein, 140 aa, unidentified
  source 1..140: note = Unknown
  REGION 1..140: note = tr|A0A0M9DQK9|A0A0M9DQK9_9BACT 6-pyruvoyl tetrahydrobiopterin synthase OS=bacterium 336/3 OX=1664068; GN = AD998_02665 PE=4 SV=1
MVYVCRKEHFNAAHRLYNPAWSKEKNEEVFGICSNEYFHGHNFELIVTVKGIPQSDTGCVIDLKKLSKLIREEVVDKLDHKNINIEVDFMQGKIPSCEILIMEIWNILAPKISGVAYDKQAQLHCIKLFETKNNFVEYYG

SEQ ID NO: 18000 - protein, 137 aa, unidentified
  source 1..137: note = Unknown
  REGION 1..137: note = tr|A0A1H8JJ71|A0A1H8JJ71_9BACT 6-carboxy-5,6,7,8-tetrahydropterin synthase OS=bacterium A37T11 OX=1855384 GN=SAMN05216436_12253 PE=3 SV=1
MIYITRRERFNAAHRLYRTDWSLEENERVFGKCSNPNWHGHNYELYVTIKGEVNPETGFVMDLKVLKDTILHEVIDKLDHRNVNMDVDFMKGKMASTEVLAMEIFKQLQPHIQRHHAQLHSIRLHETENNYVEYLGE

SEQ ID NO: 18001 - protein, 118 aa, unidentified
  source 1..118: note = Unknown
  REGION 1..118: note = tr|A0A1H9P8T5|A0A1H9P8T5_9BACT 6-carboxy-5,6,7,8-tetrahydropterin synthase OS=bacterium A52C2 OX=1855383 GN=SAMN05216548_1193 PE=3 SV=1
MFRITKEFHFSASHQLTHLPADHQCARLHGHNYIVVVELAAKSLNEFGFVRDYHELAPFKRYLDESFDHRHLNDVLGHDDATSERLAQHFYEWCRERLPETTAVKVSETPKTWAEYRP

SEQ ID NO: 18002 - protein, 122 aa, unidentified
  source 1..122: note = Unknown
  REGION 1..122: note = tr|A0A1V5V4N6|A0A1V5V4N6_9BACT 6-carboxy-5,6,7,8-tetrahydropterin synthase OS=bacterium ADurb.Bin236 OX=1866925 GN=queD PE=3 SV=1
MYEVSKETTFSSAHSLREYEGRCEALHGHNWKVKAHVAATELDRLGMVVDFKILKAALEETADRLDHTLINDVPPFDSINPSAENLAKHFYAELSARLNDGRARVSRVDVWESEGSRASYFE

SEQ ID NO: 18003 - protein, 125 aa, unidentified
  source 1..125: note = Unknown
  REGION 1..125: note = tr|A0A1V5UN32|A0A1V5UN32_9BACT 6-carboxy-5,6,7,8-tetrahydropterin synthase OS=bacterium ADurb.Bin243 OX=1866936 GN=queD PE=3 SV=1
MYEISAKFSISSAHYLNNYEGKCKRLHGHNWKVTVYLKGEELDSLGMLVDFTVLKGFFKNIEDQLDHNCLNEIEFFKQKNPTAENISEFIYTRMQELLDQNGIDNARVDRVSVYETENCEAVFYR

SEQ ID NO: 18004 - protein, 134 aa, unidentified
  source 1..134: note = Unknown
  REGION 1..134: note = tr|A0A1V5T626|A0A1V5T626_9BACT 6-carboxy-5,6,7,8-tetrahydropterin synthase OS=bacterium ADurb.Bin270 OX=1866926 GN=queD PE=3 SV=1
MTYSVSKTFRFCYGHRLLNDPGKCKNIHGHTAKVTIHLESDSVDENGMVVHFENLKKTIGEWISENLDHTLIVSARDPIKKYLDENGERYLALESNPTAEMIAHFIFDRTKSMGLPVAKVDLWESESSKATYRV

SEQ ID NO: 18005 - protein, 123 aa, unidentified
  source 1..123: note = Unknown
  REGION 1..123: note = tr|A0A1V5T2I8|A0A1V5T2I8_9BACT 6-pyruvoyl tetrahydropterin synthase OS=bacterium ADurb.Bin270; OX = 1866926 GN=BWY40_00816 PE=4 SV=1
MFEIRVKHKFIARHALTNYRGATEKSHNHEWLCEAFIRSENLDEAGCAVDFIKVDEALSKITSEIEGSDVNAHPFFNGKSPSAENMAFFIFKKLESKIENHGAKLVRVTISEDPDHAASFIRE

SEQ ID NO: 18006 - protein, 118 aa, unidentified
  source 1..118: note = Unknown
  REGION 1..118: note = tr|A0A1V5PTA6|A0A1V5PTA6_9BACT 6-carboxy-5,6,7,8-tetrahydropterin synthase OS=bacterium ADurb.Bin363 OX=1866927 GN=queD PE=3 SV=1
MYTLIIKESFDSAHFLKNYPGKCAKIHGHTWHIELEIEGEKLDEAGMLIDFGEVKEIIKKNLPDHEFLNKVLPFNPTAENLSKYFFITFQEIFSNKPFKIKSVTLWESNTCGCSYSIS

SEQ ID NO: 18007 - protein, 122 aa, unidentified
  source 1..122: note = Unknown
  REGION 1..122: note = tr|A0A1V5NJ27|A0A1V5NJ27_9BACT 6-carboxy-5,6,7,8-tetrahydropterin synthase OS=bacterium ADurb.Bin374 OX=1866937 GN=queD PE=3 SV=1
MYKIMAEASFSAAHQLVRHPGKCRALHGHNWRVQAIVGAETLDDQGMVVDFSVLKKALGELCDRFDHLMVNEVAPFDRIPPTAENFAKLFFDELVIRVGTNRVQVIAVRVWETDRNVAEYSI

SEQ ID NO: 18008 - protein, 166 aa, unidentified
  source 1..166: note = Unknown
  REGION 1..166: note = tr|A0A1V5MBK4|A0A1V5MBK4_9BACT 6-carboxy-5,6,7,8-tetrahydropterin synthase OS=bacterium ADurb.Bin425 OX=1866929 GN=queD PE=4 SV=1
MELISRMQFNESEERLALSTVTASRRLQFCAGHRVYGHESKCANLHGHNYVVFLYARSENELNGDGLDSLGRVVDFGQLKSLFAPWIEDNWDHGFIVSRNDLEAQQALNMIPGQKLFVMDSNPTAENMARYILLELAPRLLKGSGVRLTKVVLWETENCFAEVELV

SEQ ID NO: 18009 - protein, 128 aa, unidentified
  source 1..128: note = Unknown
  REGION 1..128: note = tr|A0A1V5LXG4|A0A1V5LXG4_9BACT 6-carboxy-5,6,7,8-tetrahydropterin synthase OS=bacterium ADurb.Bin429 OX=1866930 GN=queD PE=3 SV=1
MFRMTVEGRFSAAHSLRGYPGPCCQLHGHNYLVQVRLEGEELDELGMLVDYTDVKAALIDALAPFDHQYLNDLPDFVAVNPTSEALARLLYSRVSERLFTREELRRRVRLTEVIVFENERQGVGYGEA

SEQ ID NO: 18010 - protein, 121 aa, unidentified
  source 1..121: note = Unknown
  REGION 1..121: note = tr|A0A1V5LKW2|A0A1V5LKW2_9BACT 6-carboxy-5,6,7,8-tetrahydropterin synthase OS=bacterium ADurb.Bin431 OX=1866931 GN=queD PE=3 SV=1
MYQLVVRSGFSAAHRLAYYPGACERLHGHNWKVTATVAGEELDQLGMVMDLMVLQTILDECLHQFDHRMINEVAPFDQTNPTSENLARYIFGWMKNNLPAKARVVSIEIAENDDFSVIYSE

SEQ ID NO: 18011 - protein, 137 aa, unidentified
  source 1..137: note = Unknown
  REGION 1..137: note = tr|A0A1V5KKF4|A0A1V5KKF4_9BACT 6-carboxy-5,6,7,8-tetrahydropterin synthase OS=bacterium ADurb.Bin478 OX=1866932 GN=BWY83_02031 PE=3 SV=1
MPLVYVTRRMHFSAGHRLHAESLDEETNRGIYGACNNPLGHGHNYDLEVTVRGEPDPVTGMVMDIKTLKDLIQKEVIDPMDHKFLNVEVPFLARQVPTAENIVVAIWRVLQDKLAGVELYRLKLYETERNIVEYYGA

SEQ ID NO: 18012 - protein, 122 aa, unidentified
  source 1..122: note = Unknown
  REGION 1..122: note = tr|A0A1V5KDL6|A0A1V5KDL6_9BACT 6-carboxy-5,6,7,8-tetrahydropterin synthase OS=bacterium ADurb.Bin478 OX=1866932 GN=queD PE=3 SV=1
MYQLNVESEFSAAHFLPDYSGACKRVHGHNWKIRLTVGAKKVDESGMAMDLADVRELLETCLEPLDHQILNEVAPFDQMTPTSENMARYIYEWIKKELPAHARMIQVEVFESDKFSVVYTEE

SEQ ID NO: 18013 - protein, 129 aa, unidentified
  source 1..129: note = Unknown
  REGION 1..129: note = tr|A0A1V5JHC4|A0A1V5JHC4_9BACT 6-carboxy-5,6,7,8-tetrahydropterin synthase OS=bacterium ADurb.BinA028 OX=1866933 GN=queD PE=3 SV=1
MSDIEVTKEFTFDSAHYLPGHPGKCAAIHGHTYRMQVTLACDPACMTGGMVLDFGDLSGYVHDEIIRRVDHKLLNEVLGYMPTAENMAIDFFGRLKSVIDSLPLGGGKRVRLASVRLWETPTSYAEYRG

SEQ ID NO: 18014 - protein, 120 aa, unidentified
  source 1..120: note = Unknown
  REGION 1..120: note = tr|A0A244C101|A0A244C101_9BACT 6-carboxy-5,6,7,8-tetrahydropterin synthase OS=bacterium AM6 OX=1954209 GN=B0X78_19025 PE=3 SV=1
MEIFKVFMLEAAHRLPNVPPGHKCARLHGHSFRVELKVEGEPGAQTGWIMDFGDVKAAFQPIYDRLDHHYLNDIPGLENPTSENLAVWIWNELKPTLPALSEITVHETCTSGCRYRGPAA

SEQ ID NO: 18015 - protein, 147 aa, unidentified
  source 1..147: note = Unknown
  REGION 1..147: note = tr|A0A4Z0JEK5|A0A4Z0JEK5_9BACT 6-pyruvoyl tetrahydropterin synthase OS=bacterium BCRC 81129; OX = 2487722 GN=EGT51_01535 PE=4 SV=1
MQKQRTYKIKSYVNASHAVRWKSGTGKKHNHTWEIVCELHVFEGMVSFFDIEKSLNKAIDALSGKYLNDLPEFKVINPTVENVTEYLFNQIDGILRQNNAVLLRIEVSDSPTRSYCIDVTERQFPTQEEVLAQQAQGDAKPQADDHA

SEQ ID NO: 18016 - protein, 120 aa, unidentified
  source 1..120: note = Unknown
  REGION 1..120: note = tr|A0A2N5ZD13|A0A2N5ZD13_9BACT 6-carboxytetrahydropterin synthase QueD (Fragment); OS = bacterium BM706 OX=2053465 GN=C0601_09985 PE=4 SV=1
MYYLGVRDDFSAAHILKGYDGKCSRLHGHNWKIEAVFRGEELNSIDISEDFKNLKNALKFVLEEFDHNYLNEIEYFETSNPSAENISRILNELLQEKIEEEGYKVEVYEVKVWESDRAWV

SEQ ID NO: 18017 - protein, 140 aa, unidentified
  source 1..140: note = Unknown
  REGION 1..140: note = tr|A0A2H6EF72|A0A2H6EF72_9BACT 6-carboxy-5,6,7,8-tetrahydropterin synthase OS=bacterium BMS3Abin03 OX=2005711 GN=queD_2 PE=3 SV=1
MMGRIIYLTRRETFAAAHRLFKPELSDEENFELFGKCSNPNWHGHNYTLEVVVAGKIDPDTGFVLDIKHLKELIKEHVISKVDHKNLNIDTEFMKGLNTTSENITVAIWNQLVDKIPNGRLYSVKLYETENNYFEYKGEE

SEQ ID NO: 18018 - protein, 138 aa, unidentified
  source 1..138: note = Unknown
  REGION 1..138: note = tr|A0A2H6EC19|A0A2H6EC19_9BACT 6-carboxy-5,6,7,8-tetrahydropterin synthase OS=bacterium BMS3Abin03 OX=2005711 GN=queD_1 PE=4 SV=1
MKVAKEFHWEMGHRLPEHFGLCKNIHGHSYKMIVEFEGELNEQGMVIDFYDVEKIINPEIEKLDHAFMVKDDDELTLEFLEKLNSKKVVVNFFATVENICKYISKKIIKSSLPSNIKNVSVRVYETAEDYAEVFVAAN

SEQ ID NO: 18019 - protein, 134 aa, unidentified
  source 1..134: note = Unknown
  REGION 1..134: note = tr|A0A2H6EJP0|A0A2H6EJP0_9BACT 6-carboxy-5,6,7,8-tetrahydropterin synthase OS=bacterium BMS3Abin04 OX=2005712 GN=queD_1 PE=3 SV=1
MIYVTRREVFSASHRLYNERWSDEKNEEVFGKCNNLYGHGHNYVLEITVAGNIDPETGYVIDTKLLKWIIRKNIIEKVDHKHLNLDVDFMKGIIPTAENIAVAFWNQIINKIPSGKLYSIKLYETENNYFEYKG

SEQ ID NO: 18020 - protein, 137 aa, unidentified
  source 1..137: note = Unknown
  REGION 1..137: note = tr|A0A2H6EQR6|A0A2H6EQR6_9BACT 6-carboxy-5,6,7,8-tetrahydropterin synthase OS=bacterium BMS3Abin04 OX=2005712 GN=queD_2 PE=4 SV=1
MKIAKEFKWEMGHRLPFHKGKCKNLHGHSYKLIVEFEGTLDENGMVLDYYDVKEIVGPIVDNLDHSVMVFNEDKELIEVLEKLNSRYVEVPFQTTAENMCGYFLDQIQSGNLPGNISAIRVWVYETENTYATDLFVL

SEQ ID NO: 18021 - protein, 135 aa, unidentified
  source 1..135: note = Unknown
  REGION 1..135: note = tr|A0A2H6EWA2|A0A2H6EWA2_9BACT 6-carboxy-5,6,7,8-tetrahydropterin synthase OS=bacterium BMS3Abin05 OX=2005713 GN=queD PE=3 SV=1
MTYVTKRVSFSAAHRLYNPNFSDEKNEDIFGLCNNKMGHGHNYDLEVTVRGNVQKETGMVIDLNKLKKILIREIVEKVDHKHLNYDVPFLKGVIPTAENLAVKFWDILKDKIDEGELYEIKLYESRNNFVIYRAE

SEQ ID NO: 18022 - protein, 122 aa, unidentified
  source 1..122: note = Unknown
  REGION 1..122: note = tr|A0A2H6F7C4|A0A2H6F7C4_9BACT 6-carboxy-5,6,7,8-tetrahydropterin synthase OS=bacterium BMS3Abin06 OX=2005714 GN=queD PE=3 SV=1
MFDLTVELQFSAAHQLRGYKGKCEELHGHNWRIQITVSSDKLNDTGMVIDFHELKTIANEVISSLDHSFLNKVFPFTEINPSSENIAKWIYESIRKKISKKNCNISSVTVWENETSSATYYE

SEQ ID NO: 18023 - protein, 123 aa, unidentified
  source 1..123: note = Unknown
  REGION 1..123: note = tr|A0A2H6FD01|A0A2H6FD01_9BACT 6-carboxy-5,6,7,8-tetrahydropterin synthase OS=bacterium BMS3Abin07 OX=2005715 GN=queD PE=3 SV=1
MYDLMIETRFSSAHQLRGYKGKCEALHGHNWKVQVYVTAEKLNEIDLAMDFHEIKTYAEEVVNQLDHGFLNEIFPFTEINPSSENIAKWIYDSLKKKIESENVQLSAVTIWESGTASATYYED

SEQ ID NO: 18024 - protein, 123 aa, unidentified
  source 1..123: note = Unknown
  REGION 1..123: note = tr|A0A2H6FKI4|A0A2H6FKI4_9BACT 6-carboxy-5,6,7,8-tetrahydropterin synthase OS=bacterium BMS3Abin08 OX=2005716 GN=queD PE=3 SV=1
MYELTIESNFSSAHQLRGYKGKCEGLHGHNWKVQVHVVADRLNEIDLVVDFNELKKHTGEVLEQLDHGFLNEIFPFTEINPSSENIARWIFESLKKKVNSDYVKLSAVTVWESDAASATYYED

SEQ ID NO: 18025 - protein, 122 aa, unidentified
  source 1..122: note = Unknown
  REGION 1..122: note = tr|A0A2H6FX15|A0A2H6FX15_9BACT 6-carboxy-5,6,7,8-tetrahydropterin synthase OS=bacterium BMS3Abin10 OX=2005718 GN=queD PE=3 SV=1
MYELMIETQFSAAHQLREYKGKCENMHGHNWKVQIVVAAEKLNEIGLGMDFHDLKRISNEVVSTLDHAVLNEIFPFTEINPSSENIAKWLYDSIGKKTEGGNITMSSVTVWESETASATYYE

SEQ ID NO: 18026 - protein, 123 aa, unidentified
  source 1..123: note = Unknown
  REGION 1..123: note = tr|A0A2H6FZA6|A0A2H6FZA6_9BACT 6-carboxy-5,6,7,8-tetrahydropterin synthase OS=bacterium BMS3Abin11 OX=2005719 GN=queD PE=3 SV=1
MEIYKKFSIEAAHRLIDLPPEHKCSRLHGHSFEVELRVNGDVDEEYGWVQDFAEIKQVFKPIYEQLDHHYLNEVDGLGNPTSENLAKWIWQKLKPDLPLLSTVIVRETCTAGCIYKGPDSHET

SEQ ID NO: 18027 - protein, 123 aa, unidentified
  source 1..123: note = Unknown
  REGION 1..123: note = tr|A0A2H6GM11|A0A2H6GM11_9BACT 6-carboxy-5,6,7,8-tetrahydropterin synthase OS=bacterium BMS3Abin14 OX=2005722 GN=queD PE=3 SV=1
MKYLLAVRDTFSAAHRLAGSGGRCENLHGHNFAVEIKVEGARLDGAGMVVDFTVLKNILRTILIDLDHTDLNSVPAFSGQSPSSERIAGYVFERAEELLSDLDVGVASVTVSESRNASATYLP

SEQ ID NO: 18028 - protein, 130 aa, unidentified
  source 1..130: note = Unknown
  REGION 1..130: note = tr|A0A2H6HU38|A0A2H6HU38_9BACT 6-carboxy-5,6,7,8-tetrahydropterin synthase OS=bacterium BMS3Bbin04 OX=2005727 GN=queD PE=4 SV=1
MYSISIRERFTSFLRLENSADDEGYDLYHNYLMEVVVSGEELDERGYLHNMDDLREELGELVVKWDGALLNDFDEFEDENPTLEIVARTACQLLAETLFNERLSEMQVTVWENELDPQLGPGASYRMSLT

SEQ ID NO: 18029 - protein, 121 aa, unidentified
  source 1..121: note = Unknown
  REGION 1..121: note = tr|A0A2H6IPS6|A0A2H6IPS6_9BACT 6-carboxy-5,6,7,8-tetrahydropterin synthase OS=bacterium BMS3Bbin09 OX=2005732 GN=queD PE=3 SV=1
MYDLSIETQFAAAHQLRGYKGKCENMHGHNWRVQVSISSEKLNDIGIVMDFHDLKKITKDLLSLLDHSNLNVVFPFTEINPSSENIAKWIFDSLKKRLEDSVKVNSITVWESENSSATYYE

SEQ ID NO: 18030 - protein, 122 aa, unidentified
  source 1..122: note = Unknown
  REGION 1..122: note = tr|A0A2H6IXI1|A0A2H6IXI1_9BACT 6-carboxy-5,6,7,8-tetrahydropterin synthase OS=bacterium BMS3Bbin10 OX=2005733 GN=queD PE=3 SV=1
MRIYKEFTFEAAHFLPSAPEGHPNARIHGHSFRVRVSIEGEPDSETGLIMHLDDLKGATEELRTTLDHNFLNKIEGLEVPTLELISKWLWSRLHNRVPGLVEIAISRDTCNEGCVYTGPGPD

SEQ ID NO: 18031 - protein, 127 aa, unidentified
  source 1..127: note = Unknown
  REGION 1..127: note = tr|A0A2H6JBJ6|A0A2H6JBJ6_9BACT 6-carboxy-5,6,7,8-tetrahydropterin synthase OS=bacterium BMS3Bbin12 OX=2005735 GN=queD PE=3 SV=1
MAAHYTLRILTDFASAHTLPGYAGVCARMHGHNWKVEVEVEARALDEVGMGVDFKVIKGAARELAGRLDHRYLNEIEPFDRINPTAENLAAWFYRGLAERLDNERVRVRAVTLWETDRACVRYTEES

SEQ ID NO: 18032 - protein, 123 aa, unidentified
  source 1..123: note = Unknown
  REGION 1..123: note = tr|A0A2H6JP40|A0A2H6JP40_9BACT 6-carboxy-5,6,7,8-tetrahydropterin synthase OS=bacterium BMS3Bbin14 OX=2005737 GN=queD PE=3 SV=1
MIDIFIKTHFSAGHHLRHYPGNCEKPHGHNWKVKVQVRATRLDEMGLGLDFRLLKEQVKLVIDNLDHLDLNEHPAFLDRNPSSEHIAMYIFAELQEKLKTDRYQLFSVTVRETDSSGVIYYGE

SEQ ID NO: 18033 - protein, 135 aa, unidentified
  source 1..135: note = Unknown
  REGION 1..135: note = tr|A0A101VQU2|A0A101VQU2_9BACT 6-carboxy-5,6,7,8-tetrahydropterin synthase OS=bacterium BRH_c32 OX=1734400 GN=APF79_11000 PE=3 SV=1
MIYVTRREVFSSSHRLFNPKYNEEENNLIFGKCNNFNGHGHNYILEVVVAGDINPDTGYVIDLKMLKTIIIENVIKKVDHKNLNMDVDFLSGIIPTAENIAVGIWDQLKDKIPSGNLYAIKLYETENNYVEYKGE

SEQ ID NO: 18034 - protein, 140 aa, unidentified
  source 1..140: note = Unknown
  REGION 1..140: note = tr|A0A117SCD8|A0A117SCD8_9BACT 6-carboxy-5,6,7,8-tetrahydropterin synthase OS=bacterium BRH_c32 OX=1734400 GN=APF79_00515 PE=3 SV=1
MRIAKEFTWEMGHRLPFHEGKCRNLHGHSYKMMVELDGKPDCNGMVLDYYDVKSIINPLVEELDHACLVFSGDIELQELLKKIDSRMVVVDFHSTAENLVGYFLKKINEVGLPNNIEKVTVKVLETENTYAEDTIELISH

SEQ ID NO: 18035 - protein, 117 aa, unidentified
  source 1..117: note = Unknown
  REGION 1..117: note = tr|A0A2M7YT63|A0A2M7YT63_9BACT 6-carboxy-5,6,7,8-tetrahydropterin synthase OS=bacterium CG_4_9_14_3_um_filter_65_15 OX=1975567 GN=queD PE=3 SV=1
MRITKRFRFDAAHWLPMVPETHKCRRLHGHTYEVELALEGNLDRKMGWVEDYGAVSAAFKPLLNELDHNCLNELSGLKNPTAENLAVWVFERLAPALPTLTEVTVRETASTSAVYRP

SEQ ID NO: 18036 - protein, 134 aa, unidentified
  source 1..134: note = Unknown
  REGION 1..134: note = tr|A0A1J5CUR6|A0A1J5CUR6_9BACT 6-carboxy-5,6,7,8-tetrahydropterin synthase OS=bacterium CG2_30_54_10 OX=1805403 GN=AUK22_05930 PE=3 SV=1
MYKVSVDKSISAAHQLPRYPGKCSNLHGHNWRIRVTVVASSLDDQGMVVDFSLLKKALGEVCELLDHKMLNEVPILNGNHPTAENLSKLFYDEVSRRLPNARVRLDRVEVWETPDNRAEYSPDGDGQSAGEEKA

SEQ ID NO: 18037 - protein, 145 aa, unidentified
  source 1..145: note = Unknown
  REGION 1..145: note = tr|A0A3A9AWM5|A0A3A9AWM5_9BACT 6-carboxy-5,6,7,8-tetrahydropterin synthase OS=bacterium D16-34 OX=2320120 GN=D7W09_07195 PE=3 SV=1
MYGLRTESDFDAAHFLTDYHGKCENLHGHRWRVVAYLAQDELQQEGTMKDMVVDFAEFKHALRQLTEQLDHSFVIEEGSLQQKTLDCLYEEGFTLSIMPFRTTAENLAKYFFDQLADQGFPVSQVDVYETPNNCAIYYGEGSRRS

SEQ ID NO: 18038 - protein, 141 aa, unidentified
  source 1..141: note = Unknown
  REGION 1..141: note = tr|A0A3A8WD11|A0A3A8WD11_9BACT 6-carboxy-5,6,7,8-tetrahydropterin synthase OS=bacterium D16-59 OX=2320098 GN=queD PE=3 SV=1
MYQLTIEQSFDSAHFLAGYTGKCGNLHGHRWRVLLQVESEELRTDMQQRGMCVDFSTLKEELKEMVERYDHMLLVEKGSLREKTMEALAEEGFSVVELPFRPTAENFAKHFYDLLKGKGYDVAMVQVYETPNNCASYREGP

SEQ ID NO: 18039 - protein, 141 aa, unidentified
  source 1..141: note = Unknown
  REGION 1..141: note = tr|A0A3A9BD82|A0A3A9BD82_9BACT 6-carboxy-5,6,7,8-tetrahydropterin synthase OS=bacterium D16-63 OX=2320119 GN=D7X10_02150 PE=3 SV=1
MYGLKTESSFDASHFLTDYHGKCENLHGHRWRVVAYLEVEQLQAEGTCKDMVVDFGDFKAALRRLTDQLDHRFLVEEGSLAPDTLACLEREGFKLLAMPFRTTAENLAKWLFDSLADQGLPVAQVDVYETPNNCAFYRKGA

SEQ ID NO: 18040 - protein, 137 aa, unidentified
  source 1..137: note = Unknown
  REGION 1..137: note = tr|A0A497U5S5|A0A497U5S5_9BACT 6-pyruvoyl tetrahydrobiopterin synthase OS=bacterium endosymbiont of Escarpia laminata OX=1221601 GN=DJ030_07915 PE=4 SV=1
MYTVTKEIHFCYGHRLLNHKGKCRYLHGHNATAVIRLESSELDAMGMVCDFSDIGGFAKQWIDSELDHNMLMHQDDPILPTLQAAGERVYVMKNNPTAENIARLIFDQVTKGGFPVVEVAIYETDSALASYRRPSGQ

SEQ ID NO: 18041 - protein, 137 aa, unidentified
  source 1..137: note = Unknown
  REGION 1..137: note = tr|A0A497TYP5|A0A497TYP5_9BACT 6-pyruvoyl tetrahydrobiopterin synthase OS=bacterium endosymbiont of Escarpia laminata OX=1221601 GN=DJ031_07905 PE=4 SV=1
MYTVTKEIHFCYGHRLLNHKGKCRYLHGHNATAVIRLESSELDAMGMVCDFSDIGGFAKQWIDSELDHNMLMHLDDPILPTLQAAGERVYVMKNNPTAENIARLIFDQVTKGGFPVVEVAIYETDSALASYRRPSGQ

SEQ ID NO: 18042 - protein, 112 aa, unidentified
  source 1..112: note = Unknown
  REGION 1..112: note = tr|A0A132HTJ0|A0A132HTJ0_9BACT 6-carboxy-5,6,7,8-tetrahydropterin synthase OS=bacterium F083 OX=1768114 GN=F083_1757 PE=3 SV=1
MYFIKKTFTISAAHQLTLPYESKCRSLHGHNWTVTVYCKAKELNNDGMVVDFSHIKHAVQDRLDHRFLNDVLPSNPTAENLARWICDQIEQCYRVDVAENDESLAIYEKDDC

SEQ ID NO: 18043 - protein, 139 aa, unidentified
  source 1..139: note = Unknown
  REGION 1..139: note = tr|A0A2H5VPH8|A0A2H5VPH8_9BACT 6-carboxy-5,6,7,8-tetrahydropterin synthase OS=bacterium HR08 OX=2035403 GN=queD PE=3 SV=1
MFRATKEIFFCYGHRLLNYAGKCRNLHGHNARAEVELAAERLDDRHMVVDFDEIKAVVKSWIDEHIDHKMVLCKDDPLLPILREHGVACFVLDTNPTAEALAKLIFDVAAERGFPVARVTVWETESSFATYEPSREERS

SEQ ID NO: 18044 - protein, 153 aa, unidentified
  source 1..153: note = Unknown
  REGION 1..153: note = tr|A0A2H5VUK4|A0A2H5VUK4_9BACT Uncharacterized protein OS=bacterium HR09 OX=2035404 GN=HRbin09_01613 PE=4; SV = 1
MGSFRVAKQFTFDAGHRLVSHPELCHHLHGHTYRVEVVLEAPSLDPNAMVCDYKALSLLVRSVLAPLDHAMILWREDPLRGVLEQAGERVVVLDAEPSAEVLAQHLFSEIKKVLAQAAAEPQRVAPYRWRPEIRLVSVRLWETPTTWAEYSEA

SEQ ID NO: 18045 - protein, 139 aa, unidentified
  source 1..139: note = Unknown
  REGION 1..139: note = tr|A0A2H5W3K8|A0A2H5W3K8_9BACT 6-carboxy-5,6,7,8-tetrahydropterin synthase OS=bacterium HR10 OX=2035405 GN=queD PE=3 SV=1
MFRATKEIFFCYGHRLLNYAGKCRNLHGHNARAEVELAAERLDDRHMVVDFDEIKAVVKSWIDEHIDHKMVLCKDDPLLPILREHGVACFVLDTNPTAEALAKLIFDVAAERGFPVARVTVWETESSFATYEPSRGERS

SEQ ID NO: 18046 - protein, 164 aa, unidentified
  source 1..164: note = Unknown
  REGION 1..164: note = tr|A0A2H5W9B0|A0A2H5W9B0_9BACT 6-carboxy-5,6,7,8-tetrahydropterin synthase OS=bacterium HR11 OX=2035406 GN=queD_2 PE=4 SV=1
MERFRITIAKEYLGFCAAHFITYEGHLCEALHGHNYHVRITLEGPIDENYYVMDFIRVKKMMKGICDRLDHRMLLPMHNPHLVLETTEDRVSVRYKHRLFVFPREDVVLLPIPNTTAEMLARYLCEQALAELARMRAPSLQMIEVEVEEAPGQSAIYRRDLAAG

SEQ ID NO: 18047 - protein, 115 aa, unidentified
  source 1..115: note = Unknown
  REGION 1..115: note = tr|A0A2H5W740|A0A2H5W740_9BACT 6-carboxy-5,6,7,8-tetrahydropterin synthase OS=bacterium HR11 OX=2035406 GN=queD_1 PE=3 SV=1
MRLGIIEYIDSAHFLPGHPKCGRLHGHTYRVELVIQGRPDGGMIIDFGDLKKKLREVLRLYDHRSWNEVLEYPSVENICLRLAQDLTQVLDFPFTLRVWEGHGQWAELNAPDDLS

SEQ ID NO: 18048 - protein, 164 aa, unidentified
  source 1..164: note = Unknown
  REGION 1..164: note = tr|A0A2H5WHL6|A0A2H5WHL6_9BACT 6-carboxy-5,6,7,8-tetrahydropterin synthase OS=bacterium HR13 OX=2035408 GN=queD_1 PE=4 SV=1
MKWKITKVFSFEAGHRVWKQNLTHGRGAELTGRDVPLQNKCVNLHGHSYTLEVTLGSDTLSEQDMVMDFYHVKNALKDLIDTMDHSFIIDVNDPMYEELKSVAEKYGAFKIFSVDFCPTAEALARYFYDFLTQKLEQAGLLKDVKVVSVVLWETKTSKAEYRPE

SEQ ID NO: 18049 - protein, 114 aa, unidentified
  source 1..114: note = Unknown
  REGION 1..114: note = tr|A0A2H5WIY8|A0A2H5WIY8_9BACT 6-carboxy-5,6,7,8-tetrahydropterin synthase OS=bacterium HR13 OX=2035408 GN=queD_2 PE=3 SV=1
MPWTVIVKREFQAAHFLTDYHGAPEPLHGHTWKVEVYIRADSLDAGGMGFDFVEIDRFLKEILPDYTLLNDIFDFSPSAENVARWLYHKVKEKYPTVQKVVIWETQHCGAEYWE

SEQ ID NO: 18050 - protein, 268 aa, unidentified
  source 1..268: note = Unknown
  REGION 1..268: note = tr|A0A2H5WLX6|A0A2H5WLX6_9BACT 6-carboxy-5,6,7,8-tetrahydropterin synthase OS=bacterium HR14 OX=2035409 GN=queD PE=4 SV=1
MFAFEASHFYRLPHLSESENAQIFGKAARHHGHNYRVWVEYAASAGAPVQREQIAQQVQNLINSELDHRCLNLEHPYFQQHLPTTENLAIYLWHTLSQQLSVPIEKVEVFESDMLASAYRGESHQLPSGRDAYTVELTRAYTFSAAHRLYQSSLSEEENRALFGKCANPYGHGHDYRLEITVRGQVDPITGMVISLADLDALVQKEVLEVLDHRYLNEEVPPFDQIPPTSENIVMFIVERLRPHFQERVQLSRVRLHETPRSYFEWSA

SEQ ID NO: 18051 - protein, 279 aa, unidentified
  source 1..279: note = Unknown
  REGION 1..279: note = tr|A0A2H5WTF3|A0A2H5WTF3_9BACT 6-carboxy-5,6,7,8-tetrahydropterin synthase OS=bacterium HR15 OX=2035410 GN=queD_1 PE=4 SV=1
MRWRIAQWFAFEASHFYRLPHLSEAENEQLFGKAARHHGHNYRVCACLRLQPNPQSHFCPKELEQRLRERIDPQFDHRCLNLEHPYFRQHLPTTENIAVYLWDDLQAALPCELDEVEVYESDWLWASYRGERQLHSHGEEVPMVYLTRAYHFSASHRLYHPELSEDENRALFGKCSHPYGHGHDYRLEVTVRGEPDPITGMIISLGELDALVQREVLEPLDHRFLNEEVAEFQQIIPTTEHLVQFIYQRLSPHLSGRAHLYRVRLYETPRSYFEVISGE

SEQ ID NO: 18052 - protein, 140 aa, unidentified
  source 1..140: note = Unknown
  REGION 1..140: note = tr|A0A2H5WZ09|A0A2H5WZ09_9BACT 6-carboxy-5,6,7,8-tetrahydropterin synthase OS=bacterium HR15 OX=2035410 GN=queD_2 PE=3 SV=1
MVVEEGYMSYRIGKRFTFCASHQLEELPEGHPCRRLHGHTYQVEVVLAADKLDEAGMVVDFHQVKQWIEPLIQSRFDHRHLNDWLPQPTAERIAQVIYESLQAQLPAHIHCVEVRVWESDTSWASYVADAGIIPPKEVNR

SEQ ID NO: 18053 - protein, 116 aa, unidentified
  source 1..116: note = Unknown
  REGION 1..116: note = tr|A0A2H5XA46|A0A2H5XA46_9BACT 6-carboxy-5,6,7,8-tetrahydropterin synthase OS=bacterium HR17 OX=2035412 GN=queD PE=3 SV=1
MSRVKLSRTEFIDAGHFIPGHPKCGRPHGHTYRVDVTIERELESDMLLEFGEFKRRVWDVLARYDHVMLNEVMDAVPTVENIAIALHRELKRVLPGFKVTVRVFEGVRKWAEYSDD

SEQ ID NO: 18054 - protein, 156 aa, unidentified
  source 1..156: note = Unknown
  REGION 1..156: note = tr|A0A2H5XGK8|A0A2H5XGK8_9BACT 6-carboxy-5,6,7,8-tetrahydropterin synthase OS=bacterium HR18 OX=2035413 GN=queD PE=4 SV=1
MKVAKRFRFEAAHRLPWHPGACRHLHGHSYRLVVGLEGDPDARGILVDFQDLKRLVQPLIDTWDHATLVASDDTALQEALDALGSRYVVLPFDSTAENLCTYVADYLIREAGDWLRARGVWRLWVRLAETETSFAETERALLRDVRPEPAAHAEAR

SEQ ID NO: 18055 - protein, 149 aa, unidentified
  source 1..149: note = Unknown
  REGION 1..149: note = tr|A0A2H5XW29|A0A2H5XW29_9BACT 6-carboxy-5,6,7,8-tetrahydropterin synthase OS=bacterium HR20 OX=2035415 GN=queD_1 PE=3 SV=1
MNTVRIAKEFRWEMGHRLPLHSGQCSNIHGHSYRLRITLDGIPDASGMVMDFYELATLAQPIVDMLDHAFLCSSDDETMQRFFRDHPEFKVVTVPFPTTVENICRWIAEHLAHQLRRYPNITQLRVRLHETATAFAECEVPLSTTPTAP

SEQ ID NO: 18056 - protein, 151 aa, unidentified
  source 1..151: note = Unknown
  REGION 1..151: note = tr|A0A2H5XXU6|A0A2H5XXU6_9BACT 6-carboxy-5,6,7,8-tetrahydropterin synthase OS=bacterium HR20 OX=2035415 GN=queD_2 PE=4 SV=1
MVYITRRATFSASHRLHNPLLSDADNERIYDKCNNPRGHGHNYVLEVTVRGVPDPTTGYVLDLKLLRDIIEEHIIAKVDHRHLNEDVDFLRGIIPTAENLAWAFWRILEPHIPAGTLHSIKVYESENNFVEYRGEPMEVPRYCVEHIEHVQ

SEQ ID NO: 18057 - protein, 156 aa, unidentified
  source 1..156: note = Unknown
  REGION 1..156: note = tr|A0A2H5Y1G1|A0A2H5Y1G1_9BACT 6-carboxy-5,6,7,8-tetrahydropterin synthase OS=bacterium HR21 OX=2035416 GN=queD_2 PE=4 SV=1
MSSLRIAKEFRWEMAHRLPFHTGGCQNIHGHSYRAVITLEGEPDERGMILDYLELARIVEPLLAELDHAFLCSADDTVMLDFFGQHPEFKVVIVPFPTTAENLARYLAERLAESLRCFPQLRRFWVRVQETERTSAEVACELSPVDIRPSRYVSAP

SEQ ID NO: 18058 - protein, 155 aa, unidentified
  source 1..155: note = Unknown
  REGION 1..155: note = tr|A0A2H5XZ16|A0A2H5XZ16_9BACT 6-carboxy-5,6,7,8-tetrahydropterin synthase OS=bacterium HR21 OX=2035416 GN=queD_1 PE=4 SV=1
MVYVTRRVSFSAAHRLYNPQWSEERNQAVFDKCANPHGHGHNYVVEVTVAGIPDPETGYVVDLKLLARVLEEEILSKVDHKHLNYDVDFLRGVNPTVENLAIAFWQILEGKLPAGKLYAVRVYESENNYAEYRGEPVELTGNGVMRHGQLREERP

SEQ ID NO: 18059 - protein, 162 aa, unidentified
  source 1..162: note = Unknown
  REGION 1..162: note = tr|A0A2H5Y999|A0A2H5Y999_9BACT Uncharacterized protein OS=bacterium HR22 OX=2035417 GN=HRbin22_02263 PE=4; SV = 1
MDRVRVSQDHLVFCAAHFMIFPRGSEPLHGHNYRVAVSLEGPLQDDVVMDFVALKRLVKALVDELDHRVLLPAEHPRLRLAIREDAVEATIDSRRYLFPLDDVRILPVPNTSAEWLARYLAAQLRARLPSNLRLHALEVEVEESFGQSAVYREVVDAAAATP

SEQ ID NO: 18060 - protein, 172 aa, unidentified
  source 1..172: note = Unknown
  REGION 1..172: note = tr|A0A2H5YIR7|A0A2H5YIR7_9BACT Uncharacterized protein OS=bacterium HR24 OX=2035419 GN=HRbin24_01393 PE=4; SV = 1
MLHNGHSANQARYRVRVDAPPLRFAAAHFATFGGDAEPLHGHNYQVTIEAEGDLTADAWVIDFGELRALGTALCRELDHRFLLPEANRHIAVAWDEGSVEVRFGDRRYVFPAVDVARLPVENSTAECLARYLAARLAKELRGRGHRHLRSLTVGVEEAPGQSGWCTIALTTE

SEQ ID NO: 18061 - protein, 165 aa, unidentified
  source 1..165: note = Unknown
  REGION 1..165: note = tr|A0A2H5YLN0|A0A2H5YLN0_9BACT 6-carboxy-5,6,7,8-tetrahydropterin synthase OS=bacterium HR25 OX=2035420 GN=queD PE=4 SV=1
MRYRVTVERNTLRFAAAHFTTFGDQCEPLHGHNYDVFVELEGELTEDAWVIDFTELKALVAALCRELDHRFLLPLQSRSLLIREDEEGYEVSFQGRRYLVPREDVAPLPIDNTTAERLAEWLAGRILEGLRQRGARNLHLLTVGVEEAPGQTGWCIIPLTELASP

SEQ ID NO: 18062 - protein, 162 aa, unidentified
  source 1..162: note = Unknown
  REGION 1..162: note = tr|A0A2H5ZAM9|A0A2H5ZAM9_9BACT Uncharacterized protein OS=bacterium HR29 OX=2035424 GN=HRbin29_00403 PE=4; SV = 1
MDGTFRVSVERNRLRFAAAHMATFADDLEPLHGHNYDVFVDVEGELTAESWVWDFGELKRIAKEIADELDHKFLLQLRSPHLDIVEDGSGWEIRYRDRRYRFPRADVAPLPIDNTTAERLAEWFAARLLRALEERGASNVRRLTVGIEEMPGQAGWYTVSVR

SEQ ID NO: 18063 - protein, 162 aa, unidentified
  source 1..162: note = Unknown
  REGION 1..162: note = tr|A0A2H5ZN47|A0A2H5ZN47_9BACT Uncharacterized protein OS=bacterium HR30 OX=2035425 GN=HRbin30_02479 PE=4; SV = 1
MPEAKKFRVYVSKDYLKFNAAHFIAYKGFREALHGHNYRVSVEIEGELGEQGYVLDFSIVKDVTRRVCDRLDERTLLPAQSDCLSIETRGAQVLVRFEDDEFCFPAKDVLLLPIVHTSAEELARYLAGEIRRELARDGIMIQGTIEVGVAETPGQVAYYRDP

SEQ ID NO: 18064 - protein, 127 aa, unidentified
  source 1..127: note = Unknown
  REGION 1..127: note = tr|A0A2H6A1Z7|A0A2H6A1Z7_9BACT 6-carboxy-5,6,7,8-tetrahydropterin synthase OS=bacterium HR33 OX=2035428 GN=queD PE=3 SV=1
MGTYLVSAEASFSAAHTLAGVDRCDRMHGHDWRIRLTVEVPEDKVGATGMAVDFRTVEALAAEAVADFDHRLLNELEAFKGVSPTAERVALEVSRRVRDRLEAALPEARLYEVEVWETPTYRVVYRP

SEQ ID NO: 18065 - protein, 137 aa, unidentified
  source 1..137: note = Unknown
  REGION 1..137: note = tr|A0A2H6AG87|A0A2H6AG87_9BACT Uncharacterized protein OS=bacterium HR36 OX=2035431 GN=HRbin36_02100 PE=4; SV = 1
MYRVSREIYFCYGHRLLNYEGKCRFLHGHNGKAIITLESPDLDARGMVMDFTQIKRVIQGWIDANLDHKMILHRDDPIIPHLRQLGEPFYVLDVNPTAENIARLIYDYARKEGFPIVSVSLWETESCYATYASEQHQ

SEQ ID NO: 18066 - protein, 163 aa, unidentified
  source 1..163: note = Unknown
  REGION 1..163: note = tr|A0A2H6AL14|A0A2H6AL14_9BACT 6-carboxy-5,6,7,8-tetrahydropterin synthase OS=bacterium HR37 OX=2035432 GN=queD_2 PE=4 SV=1
MKLVQGITYDKIIKFSLELVSDMKFKTLLTKRVEFCASHRYWNPNWSEQKNREVFGKCVSPYGHGHNYILEVTIEGEVDPDTGMIINLYDLKPIINEVLRDFDHKFLNEDNPNFKELIPTTENIARVLWDAIDGKLKETGRECRLYRIRLYETPDLYVDYWRE

SEQ ID NO: 18067 - protein, 139 aa, unidentified
  source 1..139: note = Unknown
  REGION 1..139: note = tr|A0A2H6AL27|A0A2H6AL27_9BACT 6-carboxy-5,6,7,8-tetrahydropterin synthase OS=bacterium HR37 OX=2035432 GN=queD_1 PE=4 SV=1
MEKEVCTLTRVYRFSAAHRLHSPRYSDEENRRIFGKCNNPKGHGHDYYIEVTVTGNIDSETGMIVSVDYLDRVVKEIIDELDHKRLDIEVPYFMEFQPSGENIVKYLWLQLEQRIKGVKLFHLKLWETRDNYFEFFKEE

SEQ ID NO: 18068 - protein, 146 aa, unidentified
  source 1..146: note = Unknown
  REGION 1..146: note = tr|A0A2H6B411|A0A2H6B411_9BACT Uncharacterized protein OS=bacterium HR40 OX=2035435 GN=HRbin40_02420 PE=4; SV = 1
MSAVRRPAAAEGTYWVRVRDRVMVAHSLTGELFGPAQGRHGATFVVEVELRGNRLLPEGVLVDIGRARELLATILAGLHLRDLDEHPEFRGRNSTSEVVARWIFDRLAAAIAAGHLGPGGEAITEVAVEIRESDVARAGFCASLRD

SEQ ID NO: 18069 - protein, 121 aa, unidentified
  source 1..121: note = Unknown
  REGION 1..121: note = tr|A0A3L7ZZA0|A0A3L7ZZA0_9BACT 6-carboxy-5,6,7,8-tetrahydropterin synthase OS=bacterium J10(2018) OX=2320122 GN=D7V95_06380 PE=3 SV=1
MYYVIKRLEISASHSLSLSYESKCSGLHGHNWIITVYCKARELNSDGMVCDFSHIKESIHGYLDHGNLNELLPFNPTAENIARWIVEHTPQCFMARVKESEGNEAVYVLDKYDSMAVECIK

SEQ ID NO: 18070 - protein, 135 aa, unidentified
  source 1..135: note = Unknown
  REGION 1..135: note = tr|A0A202DZB2|A0A202DZB2_9BACT 6-carboxy-5,6,7,8-tetrahydropterin synthase OS=bacterium K02(2017) OX=1932696 GN=BVY03_04120 PE=3 SV=1
MPKTTLICSFDICAAHQLYNKNWDAQKNIKIFGKCANIHGHQYKLEAFLSGSIDQDTGMLINGYEVERIIGTFLKEKFDHKFLNEDVEFFKTHQPTAEWIAAWVYNQIKDMFPENINLDKVRLYETPELAVEYVD

SEQ ID NO: 18071 - protein, 120 aa, unidentified
  source 1..120: note = Unknown
  REGION 1..120: note = tr|A0A4S1HV12|A0A4S1HV12_9BACT 6-carboxy-5,6,7,8-tetrahydropterin synthase OS=bacterium M00.F.Ca.ET.141.01.1.1 OX=2563898 GN=queD PE=3 SV=1
MEIFKVFMLEAAHRLPNVPPGHKCARLHGHSFRVELKVEGEPGAQTGWIMDFGDVKAAFQPIYDRLDHHYLNDIPGLENPTSENLAVWIWNELKPSLPALSEITVHETCTSGCRYRGPTP

SEQ ID NO: 18072 - protein, 118 aa, unidentified
  source 1..118: note = Unknown
  REGION 1..118: note = tr|A0A4S1HSI1|A0A4S1HSI1_9BACT 6-carboxy-5,6,7,8-tetrahydropterin synthase OS=bacterium M00.F.Ca.ET.141.01.1.1 OX=2563898 GN=queD PE=3 SV=1
MFHITKEFHFSASHQLTSLPPNHQCARLHGHNYVVVVELSAKELDAHGFVRDYHDLAPLKRYIDESFDHRHLNDVLGHEKVTAECLARHFYEWCKARLPQTAAVRVSETPKTWAEYRP

SEQ ID NO: 18073 - protein, 118 aa, unidentified
  source 1..118: note = Unknown
  REGION 1..118: note = tr|A0A4V3NTK8|A0A4V3NTK8_9BACT 6-carboxy-5,6,7,8-tetrahydropterin synthase OS=bacterium M00.F.Ca.ET.146.01.1.1 OX=2563899 GN=queD PE=3 SV=1
MFHISKEFHFSASHQLTSLPSNHQCARLHGHNYVVVVELSAKELDAHGFVRDYHDLAPLKRYIDESFDHRHLNDVLGHEKVTAECLARHFYEWCKARLPQTAAVRVSETPKTWAEYRP

SEQ ID NO: 18074 - protein, 118 aa, unidentified
  source 1..118: note = Unknown
  REGION 1..118: note = tr|A0A4S1AQV6|A0A4S1AQV6_9BACT 6-carboxy-5,6,7,8-tetrahydropterin synthase OS=bacterium M00.F.Ca.ET.146.01.1.1 OX=2563899 GN=queD PE=3 SV=1
MFRITKEFHFSASHQLTSLPSDHQCARLHGHNYIVVVELSGGELDEHGFVRDYQDLAALKHYIDGTFDHRHLNDVLGHDRVTAECLARHFYDWCKVRLPQTSAVRVSETPKTWAEYRP

SEQ ID NO: 18075 - protein, 118 aa, unidentified; identical to SEQ ID NO: 18072
  source 1..118: note = Unknown
  REGION 1..118: note = tr|A0A4S1AZ64|A0A4S1AZ64_9BACT 6-carboxy-5,6,7,8-tetrahydropterin synthase OS=bacterium M00.F.Ca.ET.152.01.1.1 OX=2563900 GN=queD PE=3 SV=1

SEQ ID NO: 18076 - protein, 147 aa, unidentified
  source 1..147: note = Unknown
  REGION 1..147: note = tr|A0A4S0YJM1|A0A4S0YJM1_9BACT 6-carboxy-5,6,7,8-tetrahydropterin synthase OS=bacterium M00.F.Ca.ET.155.01.1.1 OX=2563901 GN=queD PE=3 SV=1
MTITRKLEFDAGHRIPDHRSQCRNLHGHRYVLEITLQGDLVDTEGAPDRGMVMDFADVKSLAVQHLVDKWDHAFLVYEGDSQVRGFLETMAGHKTVVLDRIPTVENLAAVAFEVLANVYDAHYGVNLRLQKVRLYETPNCWADVVRD

SEQ ID NO: 18077 - protein, 118 aa, unidentified
  source 1..118: note = Unknown
  REGION 1..118: note = tr|A0A4S0Z934|A0A4S0Z934_9BACT 6-carboxy-5,6,7,8-tetrahydropterin synthase OS=bacterium M00.F.Ca.ET.156.01.1.1 OX=2563902 GN=queD PE=3 SV=1
MFHISKEFHFSASHQLTSLPPNHQCARLHGHNYVVVVQLSAKELDAHGFVRDYHDLAPLKRYIDESFDHRHLNDVLGHEKVTAECLARHFYEWCKARLPQTAAVRVSETPKTWAEYRP

SEQ ID NO: 18078 - protein, 118 aa, unidentified; identical to SEQ ID NO: 18074
  source 1..118: note = Unknown
  REGION 1..118: note = tr|A0A4S0ZB33|A0A4S0ZB33_9BACT 6-carboxy-5,6,7,8-tetrahydropterin synthase OS=bacterium M00.F.Ca.ET.156.01.1.1 OX=2563902 GN=queD PE=3 SV=1

SEQ ID NO: 18079 - protein, 118 aa, unidentified; identical to SEQ ID NO: 18072
  source 1..118: note = Unknown
  REGION 1..118: note = tr|A0A4S0WKK0|A0A4S0WKK0_9BACT 6-carboxy-5,6,7,8-tetrahydropterin synthase OS=bacterium M00.F.Ca.ET.157.01.1.1 OX=2563903 GN=queD PE=3 SV=1

SEQ ID NO: 18080 - protein, 118 aa, unidentified; identical to SEQ ID NO: 18074
  source 1..118: note = Unknown
  REGION 1..118: note = tr|A0A4S0WJ30|A0A4S0WJ30_9BACT 6-carboxy-5,6,7,8-tetrahydropterin synthase OS=bacterium M00.F.Ca.ET.157.01.1.1 OX=2563903 GN=queD PE=3 SV=1

SEQ ID NO: 18081 - protein, 118 aa, unidentified; identical to SEQ ID NO: 18072
  source 1..118: note = Unknown
  REGION 1..118: note = tr|A0A4S0VK15|A0A4S0VK15_9BACT 6-carboxy-5,6,7,8-tetrahydropterin synthase OS=bacterium M00.F.Ca.ET.159.01.1.1 OX=2563904 GN=queD PE=3 SV=1

SEQ ID NO: 18082 - protein, 118 aa, unidentified; identical to SEQ ID NO: 18074
  source 1..118: note = Unknown
  REGION 1..118: note = tr|A0A4S0VGE0|A0A4S0VGE0_9BACT 6-carboxy-5,6,7,8-tetrahydropterin synthase OS=bacterium M00.F.Ca.ET.159.01.1.1 OX=2563904 GN=queD PE=3 SV=1

SEQ ID NO: 18083 - protein, 118 aa, unidentified; identical to SEQ ID NO: 18072
  source 1..118: note = Unknown
  REGION 1..118: note = tr|A0A4S2JTH2|A0A4S2JTH2_9BACT 6-carboxy-5,6,7,8-tetrahydropterin synthase OS=bacterium M00.F.Ca.ET.162.01.1.1 OX=2563905 GN=queD PE=3 SV=1

SEQ ID NO: 18084 - protein, 118 aa, unidentified; identical to SEQ ID NO: 18074
  source 1..118: note = Unknown
  REGION 1..118: note = tr|A0A4S0Y7Y2|A0A4S0Y7Y2_9BACT 6-carboxy-5,6,7,8-tetrahydropterin synthase OS=bacterium M00.F.Ca.ET.163.01.1.1 OX=2563906 GN=queD PE=3 SV=1

SEQ ID NO: 18085 - protein, 120 aa, unidentified; identical to SEQ ID NO: 18071
  source 1..120: note = Unknown
  REGION 1..120: note = tr|A0A4S0Z1P8|A0A4S0Z1P8_9BACT 6-carboxy-5,6,7,8-tetrahydropterin synthase OS=bacterium M00.F.Ca.ET.163.01.1.1 OX=2563906 GN=queD PE=3 SV=1

SEQ ID NO: 18086 - protein, 118 aa, unidentified; identical to SEQ ID NO: 17156
  source 1..118: note = Unknown
  REGION 1..118: note = tr|A0A4V3PG83|A0A4V3PG83_9BACT 6-carboxy-5,6,7,8-tetrahydropterin synthase OS=bacterium M00.F.Ca.ET.168.01.1.1 OX=2563907 GN=queD PE=3 SV=1

SEQ ID NO: 18087 - protein, 118 aa, unidentified
  source 1..118: note = Unknown
  REGION 1..118: note = tr|A0A4S1HCX1|A0A4S1HCX1_9BACT 6-carboxy-5,6,7,8-tetrahydropterin synthase OS=bacterium M00.F.Ca.ET.168.01.1.1 OX=2563907 GN=queD PE=3 SV=1
MKITQAFTFEAAHRLPNVPATHKCHRMHGHSYRVELQLDGKVNPDTGFVIDFFDLEKAFGPLLEQLDHHTLNEIEGLENPTAENIATWIWTRVRPLLLELSSVKVFETPMCWAEFDGN

SEQ ID NO: 18088 - protein, 118 aa, unidentified; identical to SEQ ID NO: 18072
  source 1..118: note = Unknown
  REGION 1..118: note = tr|A0A4S0Q4L7|A0A4S0Q4L7_9BACT 6-carboxy-5,6,7,8-tetrahydropterin synthase OS=bacterium M00.F.Ca.ET.177.01.1.1 OX=2563908 GN=queD PE=3 SV=1

SEQ ID NO: 18089 - protein, 118 aa, unidentified
  source 1..118: note = Unknown
  REGION 1..118: note = tr|A0A4S0QII6|A0A4S0QII6_9BACT 6-carboxy-5,6,7,8-tetrahydropterin synthase OS=bacterium M00.F.Ca.ET.177.01.1.1 OX=2563908 GN=queD PE=3 SV=1
MYIIAKRFAFSASHVIGGLPEEHPCARLHGHNYEVEVVLQAAELDPVGFVRDYRELSPLKEFIDENLDHRHLNEVLGHDRTTSEVIAKWIYDWCNARWPEVAAVRVSETPKTWAEYRP

SEQ ID NO: 18090 - protein, 118 aa, unidentified; identical to SEQ ID NO: 18087
  source 1..118: note = Unknown
  REGION 1..118: note = tr|A0A4S0N4X8|A0A4S0N4X8_9BACT 6-carboxy-5,6,7,8-tetrahydropterin synthase OS=bacterium M00.F.Ca.ET.179.01.1.1 OX=2563909 GN=queD PE=3 SV=1

SEQ ID NO: 18091 - protein, 118 aa, unidentified; identical to SEQ ID NO: 17156
  source 1..118: note = Unknown
  REGION 1..118: note = tr|A0A4S0MU82|A0A4S0MU82_9BACT 6-carboxy-5,6,7,8-tetrahydropterin synthase OS=bacterium M00.F.Ca.ET.179.01.1.1 OX=2563909 GN=queD PE=3 SV=1

SEQ ID NO: 18092 - protein, 141 aa, unidentified
  source 1..141: note = Unknown
  REGION 1..141: note = tr|A0A4S0LPG3|A0A4S0LPG3_9BACT 6-carboxy-5,6,7,8-tetrahydropterin synthase OS=bacterium M00.F.Ca.ET.180.01.1.1 OX=2563910 GN=queD PE=3 SV=1
MFQQNYPSVNHNYQFELNKDFNFSAAHYIPSEDAGKCMRTHGHTYFVNLTIGGDTVDHNGFLVNFSELKQLVHGQFDHQLLNELPQFKGKSPSTEIVAQTIYEMVQSSLDQRPNKPQCLQVYVRETPTSYVIYRPKELNHE

SEQ ID NO: 18093 - protein, 143 aa, unidentified
  source 1..143: note = Unknown
  REGION 1..143: note = tr|A0A4S0LS78|A0A4S0LS78_9BACT 6-pyruvoyl tetrahydrobiopterin synthase OS=bacterium M00.F.Ca.ET.180.01.1.1 OX=2563910 GN=EN823_06045 PE=4 SV=1
MTNFNQVQPPEQFKYRSNAVLIKNYYEFTCDNRIYFSQKAHKDLANQHYKFNIEILSKINDAGLALDFNEVDKIYNKQIATYLDGQLVNETLPSMNTTAENIAFWIWEQFEQHLPEKNTLQKLEFFENATQGLVLTRELMEAK

SEQ ID NO: 18094 - protein, 47 aa, unidentified
  source 1..47: note = Unknown
  REGION 1..47: note = tr|A0A4S0IUQ1|A0A4S0IUQ1_9BACT 6-carboxytetrahydropterin synthase QueD (Fragment); OS = bacterium M00.F.Ca.ET.191.01.1.1 OX=2563911; GN = EN834_33400 PE=4 SV=1
LNDVLGHEKVTAECLARHFYEWCKARLPQTAAVRVSETPKTWAEYRP

SEQ ID NO: 18095 - protein, 147 aa, unidentified; identical to SEQ ID NO: 18076
  source 1..147: note = Unknown
  REGION 1..147: note = tr|A0A4S0J184|A0A4S0J184_9BACT 6-carboxy-5,6,7,8-tetrahydropterin synthase OS=bacterium M00.F.Ca.ET.191.01.1.1 OX=2563911 GN=queD PE=3 SV=1

SEQ ID NO: 18096 - protein, 118 aa, unidentified; identical to SEQ ID NO: 17156
  source 1..118: note = Unknown
  REGION 1..118: note = tr|A0A4S0GLW2|A0A4S0GLW2_9BACT 6-carboxy-5,6,7,8-tetrahydropterin synthase OS=bacterium M00.F.Ca.ET.194.01.1.1 OX=2563912 GN=queD PE=3 SV=1

SEQ ID NO: 18097 - protein, 118 aa, unidentified; identical to SEQ ID NO: 18087
  source 1..118: note = Unknown
  REGION 1..118: note = tr|A0A4S0GTS8|A0A4S0GTS8_9BACT 6-carboxy-5,6,7,8-tetrahydropterin synthase OS=bacterium M00.F.Ca.ET.194.01.1.1 OX=2563912 GN=queD PE=3 SV=1

SEQ ID NO: 18098 - protein, 118 aa, unidentified; identical to SEQ ID NO: 18077
  source 1..118: note = Unknown
  REGION 1..118: note = tr|A0A4S0E8N7|A0A4S0E8N7_9BACT 6-carboxy-5,6,7,8-tetrahydropterin synthase OS=bacterium M00.F.Ca.ET.199.01.1.1 OX=2563913 GN=queD PE=3 SV=1

SEQ ID NO: 18099 - protein, 120 aa, unidentified; identical to SEQ ID NO: 18071
  source 1..120: note = Unknown
  REGION 1..120: note = tr|A0A4S0F791|A0A4S0F791_9BACT 6-carboxy-5,6,7,8-tetrahydropterin synthase OS=bacterium M00.F.Ca.ET.199.01.1.1 OX=2563913 GN=queD PE=3 SV=1

SEQ ID NO: 18100 - protein, 118 aa, unidentified; identical to SEQ ID NO: 18072
  source 1..118: note = Unknown
  REGION 1..118: note = tr|A0A4R9YTJ6|A0A4R9YTJ6_9BACT 6-carboxy-5,6,7,8-tetrahydropterin synthase OS=bacterium M00.F.Ca.ET.205.01.1.1 OX=2563914 GN=queD PE=3 SV=1

SEQ ID NO: 18101 - protein, 118 aa, unidentified; identical to SEQ ID NO: 18072
  source 1..118: note = Unknown
  REGION 1..118: note = tr|A0A4R9TXX6|A0A4R9TXX6_9BACT 6-carboxy-5,6,7,8-tetrahydropterin synthase OS=bacterium M00.F.Ca.ET.221.01.1.1 OX=2563915 GN=queD PE=3 SV=1

SEQ ID NO: 18102 - protein, 118 aa, unidentified; identical to SEQ ID NO: 18074
  source 1..118: note = Unknown
  REGION 1..118: note = tr|A0A4R9TYM8|A0A4R9TYM8_9BACT 6-carboxy-5,6,7,8-tetrahydropterin synthase OS=bacterium M00.F.Ca.ET.221.01.1.1 OX=2563915 GN=queD PE=3 SV=1

SEQ ID NO: 18103 - protein, 118 aa, unidentified; identical to SEQ ID NO: 18074
  source 1..118: note = Unknown
  REGION 1..118: note = tr|A0A4R9U2T3|A0A4R9U2T3_9BACT 6-carboxy-5,6,7,8-tetrahydropterin synthase OS=bacterium M00.F.Ca.ET.222.01.1.1 OX=2563916 GN=queD PE=3 SV=1

SEQ ID NO: 18104 - protein, 118 aa, unidentified; identical to SEQ ID NO: 18072
  source 1..118: note = Unknown
  REGION 1..118: note = tr|A0A4R9U959|A0A4R9U959_9BACT 6-carboxy-5,6,7,8-tetrahydropterin synthase OS=bacterium M00.F.Ca.ET.222.01.1.1 OX=2563916 GN=queD PE=3 SV=1

SEQ ID NO: 18105 - protein, 118 aa, unidentified; identical to SEQ ID NO: 18074
  source 1..118: note = Unknown
  REGION 1..118: note = tr|A0A4R9T2M3|A0A4R9T2M3_9BACT 6-carboxy-5,6,7,8-tetrahydropterin synthase OS=bacterium M00.F.Ca.ET.227.01.1.1 OX=2563917 GN=queD PE=3 SV=1

SEQ ID NO: 18106 - protein, 118 aa, unidentified; identical to SEQ ID NO: 18073
  source 1..118: note = Unknown
  REGION 1..118: note = tr|A0A4R9T402|A0A4R9T402_9BACT 6-carboxy-5,6,7,8-tetrahydropterin synthase OS=bacterium M00.F.Ca.ET.227.01.1.1 OX=2563917 GN=queD PE=3 SV=1

SEQ ID NO: 18107 - protein, 147 aa, unidentified; identical to SEQ ID NO: 18076
  source 1..147: note = Unknown
  REGION 1..147: note = tr|A0A4R9RKW3|A0A4R9RKW3_9BACT 6-carboxy-5,6,7,8-tetrahydropterin synthase OS=bacterium M00.F.Ca.ET.228.01.1.1 OX=2563918 GN=queD PE=3 SV=1

SEQ ID NO: 18108 - protein, 143 aa, unidentified; identical to SEQ ID NO: 18093
  source 1..143: note = Unknown
  REGION 1..143: note = tr|A0A4R9SET8|A0A4R9SET8_9BACT 6-pyruvoyl tetrahydrobiopterin synthase OS=bacterium M00.F.Ca.ET.229.01.1.1 OX=2563919 GN=EN872_06050 PE=4 SV=1

SEQ ID NO: 18109 - protein, 141 aa, unidentified; identical to SEQ ID NO: 18092
  source 1..141: note = Unknown
  REGION 1..141: note = tr|A0A4R9SF29|A0A4R9SF29_9BACT 6-carboxy-5,6,7,8-tetrahydropterin synthase OS=bacterium M00.F.Ca.ET.229.01.1.1 OX=2563919 GN=queD PE=3 SV=1

SEQ ID NO: 18110 - protein, 197 aa, unidentified
  source 1..197: note = Unknown
  REGION 1..197: note = tr|A0A4R9RNQ1|A0A4R9RNQ1_9BACT 6-carboxytetrahydropterin synthase OS=bacterium M00.F.Ca.ET.230.01.1.1 OX=2563920 GN=EN873_36510 PE=4 SV=1
MRIRKLFKFENAHIVRNCSSDRCKYSIHGHSYQIELILEAHRLDHGQMVYDFGLLKSSIKDIIDSFDHAICFWDKDDPDYIDACKKFSARWISLPVSPSAEQFSRVVFFWAREILKQTQMQNGETDVKVYSVIAHETATGYAQCFEDDVDNAQMGALTLGDFEFSEQVKAEWHDPNMYDKLKKGEKFVNPTVVLQVD

SEQ ID NO: 18111 - protein, 118 aa, unidentified; identical to SEQ ID NO: 18074
  source 1..118: note = Unknown
  REGION 1..118: note = tr|A0A4R9REW6|A0A4R9REW6_9BACT 6-carboxy-5,6,7,8-tetrahydropterin synthase OS=bacterium M00.F.Ca.ET.230.01.1.1 OX=2563920 GN=queD PE=3 SV=1

SEQ ID NO: 18112 - protein, 121 aa, unidentified
  source 1..121: note = Unknown
  REGION 1..121: note = tr|A0A5J4E1W5|A0A5J4E1W5_9BACT 6-carboxy-5,6,7,8-tetrahydropterin synthase OS=bacterium MnTg02 OX=2080452 GN=queD PE=4 SV=1
MQIYKEFHLEAAHKLPGAPPGHPNSRVHGHSFRVRVTVEGEPDPETGLIVHFDDMSEVLQGLRDELDHNYLNEIDGLENPTLENISTWIWNRLSQNFPGLAEVEIARDSCKEGCVYRGPKR

SEQ ID NO: 18113 - protein, 117 aa, unidentified
  source 1..117: note = Unknown
  REGION 1..117: note = tr|A0A132GVQ5|A0A132GVQ5_9BACT 6-carboxy-5,6,7,8-tetrahydropterin synthase OS=bacterium P201 OX=1768112 GN=AUK64_1897 PE=3 SV=1
MYYVRKTLEISACHQLYLDYESKCENLHGHNWKINVYCRAEKLDSNGMVCDFTEIKRLIHGKIDHTNINEVLDFNPTAENLAKWIVDTVPNCYRADVWESRDNKASYIKDDAPQNFD

SEQ ID NO: 18114 - protein, 155 aa, unidentified
  source 1..155: note = Unknown
  REGION 1..155: note = tr|A0A4Q2RGJ6|A0A4Q2RGJ6_9BACT 6-pyruvoyl tetrahydrobiopterin synthase OS=bacterium RmlP001; OX = 2316527 GN=D3272_00235 PE=4 SV=1
MVAQAPGLYRSTKFYDHSEGLSCCFRQWRAGHSHCRLLHGYALAFRFTFATRELDERNWCFDFGGLKPVRRWLHEMFDHTLVVAEDDPERDRLEALGAAGLADIRVLPAVGCEATARFVYLHVSGMVYGETDGRVWLESVEVAEHGGNSALYSPA

SEQ ID NO: 18115 - protein, 148 aa, unidentified
  source 1..148: note = Unknown
  REGION 1..148: note = tr|A0A4V1RIK2|A0A4V1RIK2_9BACT 6-pyruvoyl tetrahydrobiopterin synthase OS=bacterium RmlP001; OX = 2316527 GN=D3272_14225 PE=4 SV=1
MYRSTKTYDHNEGLSCTFRQWRAGHSHCRLLHGYALAFKFVFAARELDDRHWCFDFGGLKPVRQWLHEMFDHTLLVSEDDPERARLEALGAAGLADVRIVPAVGCEATARIVHAKVGEMVRSATQGRVWLESVEVREHGGNSALFSPA

SEQ ID NO: 18116 - protein, 165 aa, unidentified
  source 1..165: note = Unknown
  REGION 1..165: note = tr|A0A4Q2UAT4|A0A4Q2UAT4_9BACT 6-pyruvoyl tetrahydrobiopterin synthase OS=bacterium RmlP026; OX = 2316528 GN=D3273_01335 PE=4 SV=1
MDHILDPVRLKSESGGGTYRSTKTYDHNEGLSCTFRQWRAGQSHCRLLHGYALAFKFVFVARELDERHWCFDFGGLKPVRQWLHEMFDHTLLVAADDPERDRLEELGRLGLADVRVLPAVGCEATARLVYARVNDMVQTSTDGRVWLESVEVREHGGNSALYTCD

SEQ ID NO: 18117 - protein, 162 aa, unidentified
  source 1..162: note = Unknown
  REGION 1..162: note = tr|A0A177Q825|A0A177Q825_9BACT Uncharacterized protein OS=bacterium SCGC AG-212-C10 OX=1799370; GN = AYO38_02545 PE=4 SV=1
MPNPTRRVSVERNRLRFAAAHMATFAGTCEPLHGHNYDIIVELEGELTDDSWVWDFGDLKRTVKAIADELDHKFLLQRDSRMLEIEERPFAWAVRFEEREYVFPKSDVAVLPIDNTTSERIAEWMAGELLATLTARGAVNVRSLTVGIEEMPGQTGWYTVTM

SEQ ID NO: 18118 - protein, 122 aa, unidentified
  source 1..122: note = Unknown
  REGION 1..122: note = tr|A0A3R7WDC6|A0A3R7WDC6_9BACT 6-carboxy-5,6,7,8-tetrahydropterin synthase OS=bacterium TMED144 OX=1986778 GN=queD PE=3 SV=1
MIMEIYKDITFEAAHLLPNLPDGHKCSRLHGHSFKLRISVVGDIDKKVGWVKDFSDIKEVFDPIYDQLDHRYLNDIKGLENPTSENIVIWIWNKLKPSLPILSSLELKETCTTGCIYIGENA

SEQ ID NO: 18119 - protein, 289 aa, unidentified
  source 1..289: note = Unknown
  REGION 1..289: note = tr|A0A1Z8MYT7|A0A1Z8MYT7_9BACT Uncharacterized protein OS=bacterium TMED15 OX=1986651 GN=CBB75_02460 PE=4; SV = 1
MVIQHSLDMIHLTRYIDFEASHYYYLPELSEEENYQIFGNKVNQHGHNYSVHLTVGGKIQSSDGMVINIKDVDELIRSYINQYYDHKQINQQHPVFSADPCIQPTPENIAIELWRATSQDLVALGVNMRAIRLTEEERTYVQYYGVESMIHLTRTYEFSAAHRLHSSELSDDENTEIFGKCNNPNGHGHNYVLEVTLSGEVDQRTGLLVRIVDLDQVINKKVFGRFDHKHLNLDTVEFQNLNPTSENFVRVLWELIESDILSLSPSRSVRLHRLRLKETPKSFFDYYGD

SEQ ID NO: 18120 - protein, 134 aa, unidentified
  source 1..134: note = Unknown
  REGION 1..134: note = tr|A0A1Z9ISS5|A0A1Z9ISS5_9BACT Uncharacterized protein OS=bacterium TMED161 OX=1986652 GN=CBD21_01280; PE = 4 SV=1
  VARIANT 74: note = Xaa can be any naturally occurring amino acid
  VARIANT 77: note = Xaa can be any naturally occurring amino acid
  VARIANT 90..91: note = Xaa can be any naturally occurring amino acid
  VARIANT 103: note = Xaa can be any naturally occurring amino acid
  VARIANT 106: note = Xaa can be any naturally occurring amino acid
  VARIANT 111: note = Xaa can be any naturally occurring amino acid
  VARIANT 119: note = Xaa can be any naturally occurring amino acid
MPQITKQYKFCAAHRYWNDDWDEAKNIEVFHDDVRLHGHNYDLYITIKGPIDNSSGFVVNLKELNEVVNKKVIXVLXHNLIQDVEWFNDXXPSTENLVVFIWXQIXSEIAXPAKLFCVXLRETGTIFTEYYGDE

SEQ ID NO: 18121 - protein, 119 aa, unidentified
  source 1..119: note = Unknown
  REGION 1..119: note = tr|A0A1Z9IQA5|A0A1Z9IQA5_9BACT 6-carboxy-5,6,7,8-tetrahydropterin synthase OS=bacterium TMED161 OX=1986652 GN=CBD21_03310 PE=3 SV=1
MIINRTYRAHCARYIPNLDDSHICKQMHGHTFNITIFLDGPINNKSGFVMDFYELDKIINEEIISLIDHKVLNDIDGLQNPSSELLSIFIWDKLKEKLKYLHKVSVSEDYGTGVEYSGK

SEQ ID NO: 18122 - protein, 122 aa, unidentified
  source 1..122: note = Unknown
  REGION 1..122: note = tr|A0A1Z9KSD7|A0A1Z9KSD7_9BACT 6-carboxy-5,6,7,8-tetrahydropterin synthase OS=bacterium TMED181 OX=1986654 GN=CBD41_03430 PE=3 SV=1
MELLRKFSFDSAHSLPNVPADHKCHRLHGHTFHVEVRVTGPIGETSGWVMDFADLKQVVNPIIEDLDHRYLNEIDGLENPTSEHIAVWIWERIEGNLPGLSSVTVHETCNTGCTYRGTQKKD

SEQ ID NO: 18123 - protein, 120 aa, unidentified
  source 1..120: note = Unknown
  REGION 1..120: note = tr|A0A1Z9RVE7|A0A1Z9RVE7_9BACT 6-carboxy-5,6,7,8-tetrahydropterin synthase OS=bacterium TMED250 OX=1986657 GN=CBE10_03090 PE=3 SV=1
MEIYKDITFEAAHLLPNLPAGHKCSRLHGHSFLVRITLDGPIDKETGWVEDFADIKKAFQPIYDELDHNYLNNISGLENPTSENLAKWIWDKLENDLDNLTAIEVKETCSSGCIYRGKNG

SEQ ID NO: 18124 - protein, 136 aa, unidentified
  source 1..136: note = Unknown
  REGION 1..136: note = tr|A0A1Z9RVQ4|A0A1Z9RVQ4_9BACT 6-carboxy-5,6,7,8-tetrahydropterin synthase OS=bacterium TMED250 OX=1986657 GN=CBE10_02600 PE=3 SV=1
MSNPYLTKVFYFNAAHQYGHKDWSDEKNWEVFGPDSKIHGHNYTLEVMVTGEIKEETGFLVDLGHLKKIVNTHVIDVLDHSQFDVEVDWFKNRQPSSENLVIFIWNEIQSRLLDVKLHRIRLHETPTIFTDYYGEE

SEQ ID NO: 18125 - protein, 120 aa, unidentified
  source 1..120: note = Unknown
  REGION 1..120: note = tr|A0A3R7VEU4|A0A3R7VEU4_9BACT 6-carboxy-5,6,7,8-tetrahydropterin synthase OS=bacterium TMED46 OX=1986782 GN=queD PE=3 SV=1
MSMEVYKTFAIESARSLTKLPDEHPCSKVHGHSFKITLTVEGEIDQTTGFVMDFSDIDSAFRPIHEIIDHAYLNDIKGLENPSSENLCRWIWKQLSPSLKGLKQIEIKETESTGCIYKGK

SEQ ID NO: 18126 - protein, 142 aa, unidentified
  source 1..142: note = Unknown
  REGION 1..142: note = tr|A0A424SRE7|A0A424SRE7_9BACT 6-carboxytetrahydropterin synthase OS=bacterium TMED46; OX = 1986782 GN=CBC06_002270 PE=4 SV=1
MDKKLKNPIITKKYHFSASHKYGNDYWSEEKNLEVFGKDYNTHGHNYILEVSVAGPIDPDSGWLVDLSTLNQIVKTKIVNVLDHSQIEVDVDWFKGKQPSSENILIWIWDQIVADLEQGSLYRLRLVETHSIHTDYYGPGKP

SEQ ID NO: 18127 - protein, 134 aa, unidentified
  source 1..134: note = Unknown
  REGION 1..134: note = tr|A0A1Z8KVG8|A0A1Z8KVG8_9BACT Uncharacterized protein OS=bacterium TMED6 OX=1986783 GN=CBB66_00695 PE=4; SV = 1
  VARIANT 39: note = Xaa can be any naturally occurring amino acid
  VARIANT 45: note = Xaa can be any naturally occurring amino acid
  VARIANT 59: note = Xaa can be any naturally occurring amino acid
  VARIANT 89: note = Xaa can be any naturally occurring amino acid
  VARIANT 110: note = Xaa can be any naturally occurring amino acid
MVNLTKQYKFCAAHRYWNDNWTEEKNLEVFGDDVRIHGXNYILSXTLKGNINEESGFIXDLQKLNDIVKEKIINVFDHSQIEKDIPWFXNKQPSTENMVVYIWNQLVNIXPSNAQLHCIKLRETPTIFSEYYGS

SEQ ID NO: 18128 - protein, 119 aa, unidentified
  source 1..119: note = Unknown
  REGION 1..119: note = tr|A0A1Z8KQ79|A0A1Z8KQ79_9BACT 6-carboxy-5,6,7,8-tetrahydropterin synthase OS=bacterium TMED6 OX=1986783 GN=CBB66_04240 PE=3 SV=1
MILVRKYTFQAARKLTKIDPSHICANLHGHTFHVTIKIEGDMNNENDFVMDFYDIDKIFNDTIYKSLDHKYLNEIKGLESPTTENLSKWIWSHLIKKLDILSEVRVFENDVYGCIYKGD

SEQ ID NO: 18129 - protein, 118 aa, unidentified
  source 1..118: note = Unknown
  REGION 1..118: note = tr|A0A1Z8YZT9|A0A1Z8YZT9_9BACT 6-carboxy-5,6,7,8-tetrahydropterin synthase OS=bacterium TMED80 OX=1986784 GN=CBC40_08090 PE=3 SV=1
MIVYKKFHIESARSLPNLPNEHPCSQVHGHSFEIILKVSGELNEKTGFIIDFQEIEDSFDPIRKLLDHAYLNNIKGLENPTSENMCKYIWEKVKPEILGLVEIEIKETHSTGCIYKGD

SEQ ID NO: 18130 - protein, 138 aa, unidentified
  source 1..138: note = Unknown
  REGION 1..138: note = tr|A0A1Z8ZAD9|A0A1Z8ZAD9_9BACT Uncharacterized protein OS=bacterium TMED80 OX=1986784 GN=CBC40_02910 PE=4; SV = 1
MNYPIITKRYHFCASHKYGNDVWSEEKNLEVFGKDYNTHGHNYVLEVSVTGPIDPGSGWLVDLPTLNKIVKSKVVDVLDHSQIEKDVEWFKDKQPSSENLLLWIWDQIFDKITDCKLHRIRLVETHSIFNDYYGPGEE

SEQ ID NO: 18131 - protein, 123 aa, unidentified
  source 1..123: note = Unknown
  REGION 1..123: note = tr|A0A1Z9B185|A0A1Z9B185_9BACT Uncharacterized protein (Fragment) OS=bacterium TMED88 OX=1986661; GN = CBC48_15405 PE=4 SV=1
MKVLRVTRSIHFSSSLRYWLEDLSEAENLKRFGAQARQHGHNYELEITVAGVPDPETGMVINLTDLKAVAEKEIMARFDHRDLNADTDFFIRQPPTPENFASVVFRLLDEALPPGLLSRIRLY

SEQ ID NO: 18132 - protein, 171 aa, unidentified
  source 1..171: note = Unknown
  REGION 1..171: note = tr|A0A0A1PF54|A0A0A1PF54_9BACT 6-pyruvoyl tetrahydropterin synthase OS=bacterium YEK0313 OX=1522316; GN = BN1110_02068 PE=4 SV=1
MADPTVSIVPEAQAGGPGPQAVYRSTKSYDHNEGLSCCFRQWRAGHSHCRLVHGYALAVAFVFACHELDERNWCYDFGGMKPVKAWLHDMFDHTMIVAADDPELGTFQALADKGLVDLRVMPAVGCEATARFIFDHVAPRIHAETRGRVWLESVEVREHAGNSAIYEPIRG

SEQ ID NO: 18133 - protein, 133 aa, unidentified
  source 1..133: note = Unknown
  REGION 1..133: note = tr|A0A0A1Q2L4|A0A0A1Q2L4_9BACT 6-pyruvoyl tetrahydropterin synthase OS=bacterium YEK0313 OX=1522316; GN = BN1110_05462 PE=4 SV=1
MYSVEVRDRIMIAHSLPDPFFGPAQGKHGASFVVDVAFFRETLNAQNVVVDIGAALDVLAGTLKELAYRDLDALPQFQGKLTTTEFLCRHIFDACCAAAKAGALGADGADLAKIRVTLHEHDLARASFEGPVA

SEQ ID NO: 18134 - protein, 151 aa, unidentified
  source 1..151: note = Bacteroidales bacterium
  REGION 1..151: note = tr|U5Q676|U5Q676_9BACT 6-carboxy-5,6,7,8-tetrahydropterin synthase; OS = Bacteroidales bacterium CF OX=1400053 GN=queD PE=4 SV=1
MSTLRITKEFRFEGAHALTGYDGKCRHIHGHSYGLYITVKGTPISETSNPKNGMVLDFSDLKKVVNDYIINVFDHALILRRGSALSSEISEAYDNVVIVDFQPTCENLVLYIHDILIERLPAKVTLQSIKLYETPTSYVEWMADDNSQSLI

SEQ ID NO: 18135 - protein, 110 aa, unidentified
  source 1..110: note = Bacteroidales bacterium
  REGION 1..110: note = tr|A0A4S4H524|A0A4S4H524_9BACT 6-carboxy-5,6,7,8-tetrahydropterin synthase; OS = Bacteroidales bacterium OX=2030927 GN=queD PE=3 SV=1
MYYVRKRLEISAAHQLELSYPSKCTNLHGHNWIITVECRARELNADGMVVDFTKIKELVMDRLDHAVINDVIDCNPTAENIARWIVDTVPNCWRCEVQESEGNVAIYEKD

SEQ ID NO: 18136 - protein, 116 aa, Bacteroides acidifaciens
  REGION 1..116: note = tr|A0A4Y9GWB1|A0A4Y9GWB1_9BACE 6-carboxy-5,6,7,8-tetrahydropterin synthase OS=Bacteroides acidifaciens OX=85831 GN=E4T97_08300 PE=3 SV=1
MFTVIKRMEISASHKLVLPYRSKCASLHGHNWIITVYCRSARLNSEGMVVDFTRIKEVVMEKLDHQNLNEVLPFNPTAENIARWVCKQIPQCYKVEVQESEGNIVIYEKDPVGAEG

SEQ ID NO: 18137 - protein, 116 aa, Bacteroides acidifaciens
  REGION 1..116: note = tr|A0A3L8AH75|A0A3L8AH75_9BACE 6-carboxy-5,6,7,8-tetrahydropterin synthase OS=Bacteroides acidifaciens OX=85831 GN=D7Y07_02110 PE=3 SV=1
MFTVIKRMEISASHKLVLPYRSKCASLHGHNWIITVYCRSERLNSEGMVVDFTRIKEVVTEKLDHQNLNEVLPFNPTAENIARWVCKQIPQCYKVEVQESEGNIVIYEKDPVGAEG

SEQ ID NO: 18138 - protein, 129 aa, Bacteroides caccae
  REGION 1..129: note = tr|R5U9G9|R5U9G9_9BACE 6-carboxy-5,6,7,8-tetrahydropterin synthase OS=Bacteroides caccae CAG:21 OX=1263037 GN=BN535_01991 PE=3 SV=1
MFTVIKRLEISASHKLVLPYRSKCASLHGHNWIITVYCRSARLNADGMVVDFTRIKEVVMEKLDHQNLNEVLPFNPTAENIARWVCKQIPQCYKVEVQESEGNIVIYEKDTVKDNASNDVKDHSEDKEE

SEQ ID NO: 18139 - protein, 129 aa, Bacteroides caccae; identical to SEQ ID NO: 18138
  REGION 1..129: note = tr|A0A174WLI9|A0A174WLI9_9BACE 6-carboxy-5,6,7,8-tetrahydropterin synthase OS=Bacteroides caccae OX=47678 GN=queD PE=3 SV=1

SEQ ID NO: 18140 - protein, 116 aa, unidentified; identical to SEQ ID NO: 18137
  source 1..116: note = Bacteroides caecimuri
  REGION 1..116: note = tr|A0A4V6RDL4|A0A4V6RDL4_9BACE 6-carboxy-5,6,7,8-tetrahydropterin synthase OS=Bacteroides caecimuri OX=2516958 GN=E5353_09420 PE=3 SV=1

SEQ ID NO: 18141 - protein, 145 aa, unidentified; identical to SEQ ID NO: 18037
  source 1..145: note = Bacteroides caecimuris
  REGION 1..145: note = tr|A0A3A9B788|A0A3A9B788_9BACE 6-carboxy-5,6,7,8-tetrahydropterin synthase OS=Bacteroides caecimuris OX=1796613 GN=D7W50_15530 PE=3 SV=1

SEQ ID NO: 18142 - protein, 116 aa, unidentified; identical to SEQ ID NO: 18137
  source 1..116: note = Bacteroides caecimuris
  REGION 1..116: note = tr|A0A1C7H771|A0A1C7H771_9BACE 6-carboxy-5,6,7,8-tetrahydropterin synthase OS=Bacteroides caecimuris OX=1796613 GN=A4V03_03400 PE=3 SV=1

SEQ ID NO: 18143 - protein, 110 aa, Bacteroides cellulosilyticus
  REGION 1..110: note = tr|A0A0P0FVD8|A0A0P0FVD8_9BACE 6-carboxy-5,6,7,8-tetrahydropterin synthase OS=Bacteroides cellulosilyticus OX=246787 GN=queD PE=3 SV=1
MYTVIKRMEISAAHSLKLSYRSKCEDLHGHNWIITVYCRSRELNADGMVVDFSHIKETVKGKLDHRNLNEVLPFNPTAENIARWICEQIPTCFKVEVQESESNVATYEKE

SEQ ID NO: 18144 - protein, 110 aa, Bacteroides cellulosilyticus; identical to SEQ ID NO: 18143
  REGION 1..110: note = tr|R6KI50|R6KI50_9BACE 6-carboxy-5,6,7,8-tetrahydropterin synthase OS=Bacteroides cellulosilyticus CAG:158 OX=1263038 GN=BN506_02219 PE=3; SV = 1

SEQ ID NO: 18145 - protein, 110 aa, Bacteroides clarus
  REGION 1..110: note = tr|F3PHI1|F3PHI1_9BACE 6-carboxy-5,6,7,8-tetrahydropterin synthase OS=Bacteroides clarus YIT 12056 OX=762984 GN=HMPREF9445_01118 PE=3 SV=1
MYTVIKRMEVSAAHSLKLSYQSKCENLHGHNWIITVYCRSKELNADGMVVDFSHIKQVVKEQLDHRNINEVLPFNPTAENIARWICDQIPTCFKVEVQESESNIAVYEED

SEQ ID NO: 18146 - protein, 110 aa, Bacteroides clarus; identical to SEQ ID NO: 18145
  REGION 1..110: note = tr|A0A1Y3YQG5|A0A1Y3YQG5_9BACE 6-carboxy-5,6,7,8-tetrahydropterin synthase OS=Bacteroides clarus OX=626929 GN=queD PE=3 SV=1

SEQ ID NO: 18147 - protein, 110 aa, Bacteroides coprocola
  REGION 1..110: note = tr|A0A412GA96|A0A412GA96_9BACE 6-carboxy-5,6,7,8-tetrahydropterin synthase OS=Bacteroides coprocola OX=310298 GN=queD PE=3 SV=1
MYTVIKRMEISASHSLKLSYPSKCEKLHGHNWIITVYCRSKELDENGMVVDFTHIKQAVEKQLDHNNLNDILPFNPTAENIACWICNQVPHCFKVEVKESEGNTAIYEKD

SEQ ID NO: 18148 - protein, 110 aa, Bacteroides coprocola; identical to SEQ ID NO: 18147
  REGION 1..110: note = tr|B3JGJ8|B3JGJ8_9BACE 6-carboxy-5,6,7,8-tetrahydropterin synthase OS=Bacteroides coprocola DSM 17136 OX=470145 GN=BACCOP_01000 PE=3 SV=1

SEQ ID NO: 18149 - protein, 103 aa, Bacteroides coprophilus
  REGION 1..103: note = tr|R6S9A1|R6S9A1_9BACE 6-carboxy-5 6 7 8-tetrahydropterin synthase OS=Bacteroides coprophilus CAG:333 OX=1263041 GN=BN612_01573 PE=4 SV=1
MEVSASHSLKLSYQSKCENLHGHNWIITVFCRSKDLNEDGMVVDFTHIKEVVMGQLDHRNLNDVLSVNPTAENIAHWICERIPHCFKVEVCESEGNTVVYEKD

SEQ ID NO: 18150 - protein, 110 aa, Bacteroides coprophilus
  REGION 1..110: note = tr|S0F9Y6|S0F9Y6_9BACE 6-carboxy-5,6,7,8-tetrahydropterin synthase OS=Bacteroides coprophilus DSM 18228 = JCM 13818 OX=547042; GN = BACCOPRO_02750 PE=3 SV=1
MYTVIKRMEVSASHSLKLSYQSKCENLHGHNWIITVFCRSKDLNEDGMVVDFTHIKEVVMGQLDHRNLNDVLSVNPTAENIAHWICERIPHCFKVEVCESEGNTVVYEKD

SEQ ID NO: 18151 - protein, 110 aa, Bacteroides dorei
  REGION 1..110: note = tr|A0A0K2HIQ6|A0A0K2HIQ6_9BACE 6-carboxy-5,6,7,8-tetrahydropterin synthase OS=Bacteroides dorei OX=357276 GN=queD PE=3 SV=1
MYTVIKRMEISASHSLKLSYRSKCENLHGHNWIITVYCRSEVLNEDGMVVDFTHIKETVMGRLDHQNLNEVVSLNPTAENIARWVCEQIPTCFKVEVRESEGNTVIYEKD

SEQ ID NO: 18152 - protein, 110 aa, Bacteroides dorei; identical to SEQ ID NO: 18151
  REGION 1..110: note = tr|I9Q960|I9Q960_9BACE 6-carboxy-5,6,7,8-tetrahydropterin synthase OS=Bacteroides dorei CL02T12C06 OX=997876 GN=HMPREF1064_04779 PE=3 SV=1

SEQ ID NO: 18153 - protein, 110 aa, Bacteroides eggerthii
  REGION 1..110: note = tr|R5JRD7|R5JRD7_9BACE 6-carboxy-5,6,7,8-tetrahydropterin synthase OS=Bacteroides eggerthii CAG:109 OX=1263043 GN=BN464_00741 PE=3 SV=1
MYTVIKRMEVSAAHSLKLSYQSKCENLHGHNWIITVFCRSKELNSDGMVVDFSHIKQAVKEKLDHRNINEVLPFNPTAENIARWICDQIPTCFKVEVQESESNIAVYEED

SEQ ID NO: 18154 - protein, 110 aa, Bacteroides eggerthii; identical to SEQ ID NO: 18153
  REGION 1..110: note = tr|A0A380YI90|A0A380YI90_9BACE 6-carboxy-5,6,7,8-tetrahydropterin synthase OS=Bacteroides eggerthii OX=28111 GN=queD PE=3 SV=1

SEQ ID NO: 18155 - protein, 117 aa, Bacteroides faecichinchillae
  REGION 1..117: note = tr|A0A1M4VJ01|A0A1M4VJ01_9BACE 6-carboxy-5,6,7,8-tetrahydropterin synthase OS=Bacteroides faecichinchillae OX=871325 GN=E5981_17135 PE=3 SV=1
MFTVIKRMEISASHKLVLPYRSKCASLHGHNWIITVYCRSARLNSEGMVVDFSRIKEVVMEKLDHQNLNEVLPFNPTAENIARWVCKQIPQCYKVEVQESEGNVAIYEKDNVENEKE

SEQ ID NO: 18156 - protein, 117 aa, Bacteroides faecis
  REGION 1..117: note = tr|R6W5A9|R6W5A9_9BACE 6-carboxy-5,6,7,8-tetrahydropterin synthase OS=Bacteroides faecis CAG:32 OX=1263044 GN=BN607_02642 PE=3 SV=1
MFTVIKRMEISASHKLVLPYRSKCASLHGHNWIITVYCRSSRLNSEGMVVDFTRIKEVVTEKLDHQNLNEVLPFNPTAENIARWVCKQIPQCYKVEVQESEGNIVIYEKDRTEDEKE

SEQ ID NO: 18157 - protein, 117 aa, Bacteroides faecis; identical to SEQ ID NO: 18156
  REGION 1..117: note = tr|A0A3E5FXY4|A0A3E5FXY4_9BACE 6-carboxy-5,6,7,8-tetrahydropterin synthase OS=Bacteroides faecis OX=674529 GN=DXB21_24560 PE=3 SV=1

SEQ ID NO: 18158 - protein, 110 aa, Bacteroides fluxus
  REGION 1..110: note = tr|F3PS45|F3PS45_9BACE 6-carboxy-5,6,7,8-tetrahydropterin synthase OS=Bacteroides fluxus YIT 12057 OX=763034 GN=HMPREF9446_01578 PE=3 SV=1
MYTVIKRMEVSAAHSLQLSYRSKCENLHGHNWIITVYCRSKELNADGMVIDFSRIKQVVKEQLDHRNLNEVLPFNPTAENIARWICDQIPACFKVEVQESESNIAVYEKD

SEQ ID NO: 18159 - protein, 110 aa, Bacteroides fragilis
  REGION 1..110: note = tr|A0A0K6BY12|A0A0K6BY12_BACFG 6-carboxy-5,6,7,8-tetrahydropterin synthase OS=Bacteroides fragilis OX=817 GN=queD PE=3 SV=1
MFTVIKRMEISAAHKLILPYRSKCASLHGHNWIITVYCRSERLNADGMVVDFTQIKQAVKEKLDHRNLNEVLPFNPTAENIARWVCKQIPQCYKVEVQESEANTVIYEKD

SEQ ID NO: 18160 - protein, 110 aa, Bacteroides fragilis
  REGION 1..110: note = tr|A0A081UBN4|A0A081UBN4_BACFG 6-carboxy-5,6,7,8-tetrahydropterin synthase OS=Bacteroides fragilis OX=817 GN=BUN20_14630 PE=3 SV=1
MFTVIKRMEISAAHKLILPYRSKCATLHGHNWIITVYCRSERLNSDGMVVDFTQIKQTVKEKLDHQNLNEVLPFNPTAENIARWVCKQIPQCYKVEVQESEANTVIYEKD

SEQ ID NO: 18161 - protein, 110 aa, Bacteroides helcogenes
  REGION 1..110: note = tr|E6SWA7|E6SWA7_BACT6 6-carboxy-5,6,7,8-tetrahydropterin synthase OS=Bacteroides helcogenes (strain ATCC 35417 / DSM 20613 / JCM 6297 / P 36-108) OX=693979 GN=Bache _1577 PE=3 SV=1
MYTVIKRMEVSAAHSLQLSYRSKCENLHGHNWIITVYCRSKELNADGMVIDFSHIKKVVKEQMDHRNLNDVFPFNPTAENIARWVCDRIPSCFKVEVQESESNTAIYEKD

SEQ ID NO: 18162 - protein, 110 aa, Bacteroides intestinalis
  REGION 1..110: note = tr|A0A4Q5HI91|A0A4Q5HI91_9BACE 6-carboxy-5,6,7,8-tetrahydropterin synthase OS=Bacteroides intestinalis OX=329854 GN=EAJ06_03190 PE=3 SV=1
MYTVIKRMEISAAHSLKLSYRSKCEDLHGHNWIITVYCRSRELNADGMVVDFSHIKETVKGKLDHRNLNEVLPFNPTAENIACWICEQIPTCFKVEVQESESNVATYEKE

SEQ ID NO: 18163 - protein, 110 aa, Bacteroides intestinalis
  REGION 1..110: note = tr|A0A412PGN2|A0A412PGN2_9BACE 6-carboxy-5,6,7,8-tetrahydropterin synthase OS=Bacteroides intestinalis OX=329854 GN=queD PE=3 SV=1
MYTVIKRMEISAAHSLKLSYRSKCEDLHGHNWIITVYCCSRELNADGMVVDFSHIKETVKGKLDHRNLNEVLPFNPTAENIARWICEQIPTCFKVEVQESESNVATYEKE

SEQ ID NO: 18164 - protein, 110 aa, Bacteroides massiliensis
  REGION 1..110: note = tr|U6RNW4|U6RNW4_9BACE 6-carboxy-5,6,7,8-tetrahydropterin synthase OS=Bacteroides massiliensis B84634 = Timone 84634 = DSM 17679 = JCM 13223; OX = 1121098 GN=HMPREF1534 _00263 PE=3 SV=1
MYTVIKRMEVSASHSLNLSYRSKCENLHGHNWIITVYCRSEVLNADGMVVDFTHIKEAVMGRLDHQNLNEVLHFNPTAENIAHWICEQIPFCFKVEVRESEGNTVIYEKD

SEQ ID NO: 18165 - protein, 110 aa, Bacteroides nordii
  REGION 1..110: note = tr|A0A413VQK6|A0A413VQK6_9BACE 6-carboxy-5,6,7,8-tetrahydropterin synthase OS=Bacteroides nordii OX=291645 GN=DW888_08340 PE=3 SV=1
MYTVIKRLEVSAAHSLNLSYSSKCENLHGHNWVITVYCRSAELNADGMVVDFSHIKKAVKEKLDHQNLNEVLPFNTTAENIARWVCEQVPHCFKVEVQESESNTAIYEKD

SEQ ID NO: 18166 - protein, 110 aa, Bacteroides nordii; identical to SEQ ID NO: 18165
  REGION 1..110: note = tr|I9S968|I9S968_9BACE 6-carboxy-5,6,7,8-tetrahydropterin synthase OS=Bacteroides nordii CL02T12C05 OX=997884 GN=HMPREF1068_01490 PE=3 SV=1

SEQ ID NO: 18167 - protein, 110 aa, Bacteroides oleiciplenus
  REGION 1..110: note = tr|A0A3E5BKH6|A0A3E5BKH6_9BACE 6-carboxy-5,6,7,8-tetrahydropterin synthase OS=Bacteroides oleiciplenus OX=626931 GN=DXB65_04340 PE=3 SV=1
MYTVIKRMEISASHSLKLSYRSKCENLHGHNWIITVYCRSRELNADGMVVDFSHIKEAVKEKLDHRNLNEVLPFNSTAENIACWICEQIPTCFKVEVQESESNVAIYEKD

SEQ ID NO: 18168 - protein, 110 aa, Bacteroides oleiciplenus
  REGION 1..110: note = tr|A0A1Q6GBA5|A0A1Q6GBA5_9BACE 6-carboxy-5,6,7,8-tetrahydropterin synthase OS=Bacteroides oleiciplenus OX=626931 GN=BHV75_14345 PE=3 SV=1
MYTVIKRMEISAAHSLKLSYRSKCENLHGHNWIITVYCRSRELNADGMVVDFSHIKETVKEKLDHRNLNEVLPFNPTAENIARWICEQIPTCFKVEVQESESNVAVYEKD

SEQ ID NO: 18169 - protein, 78 aa, Bacteroides ovatus
  REGION 1..78: note = tr|A7M566|A7M566_BACO1 Uncharacterized protein; OS = Bacteroides ovatus (strain ATCC 8483 / DSM 1896 / JCM 5824 / NCTC 11153) OX=411476 GN=BACOVA_05260 PE=4 SV=1
MRLNSEGMVVDFTRIKEVVMEKLDHQNLNEVLPFNPTAENIARWVCKQLPQCYKVEVQESEGNIVIYEKDSASAEGQE

SEQ ID NO: 18170 - protein, 118 aa, Bacteroides ovatus
  REGION 1..118: note = tr|A0A1Y4Q043|A0A1Y4Q043_BACOV 6-carboxy-5,6,7,8-tetrahydropterin synthase OS=Bacteroides ovatus OX=28116 GN=DW206_13105 PE=3 SV=1
MFTVIKRMEISASHKLVLPYRSKCASLHGHNWIITVYCRSARLNSEGMVVDFTRIKEVVTEKLDHQNLNEVLPFNPTAENIARWVCKQIPQCYKVEVQESEGNIVIYEKDPVGAEGQE

SEQ ID NO: 18171 - protein, 110 aa, Bacteroides plebeius
  REGION 1..110: note = tr|R5W7M2|R5W7M2_9BACE 6-carboxy-5,6,7,8-tetrahydropterin synthase OS=Bacteroides plebeius CAG:211 OX=1263052 GN=BN536_00903 PE=3 SV=1
MYTVIKRMEISASHKLKLSYESKCENLHGHNWIITVYCQAEQLNEDGMVVDFTHIKEVVKGQLDHKHLNDVLPCNPTAENIARWICEQVPHCVKVEVCESEGNRVIYEKD

SEQ ID NO: 18172 - protein, 110 aa, Bacteroides plebeius
  REGION 1..110: note = tr|A0A415TF00|A0A415TF00_9BACE 6-carboxy-5,6,7,8-tetrahydropterin synthase OS=Bacteroides plebeius OX=310297 GN=queD PE=3 SV=1
MYTVIKRMEISASHKLKLSYESKCENLHGHNWIITVYCQAEQLNEDGMVVDFTHIKEVVKGQLDHKNLNDVLPCNPTAENIARWICEQVPHCVKVEVCESEGNRVIYEKD

SEQ ID NO: 18173 - protein, 110 aa, unidentified
  source 1..110: note = Bacteroides reticulotermitis
  REGION 1..110: note = tr|W4UWJ1|W4UWJ1_9BACE 6-carboxy-5,6,7,8-tetrahydropterin synthase OS=Bacteroides reticulotermitis JCM 10512 OX=1445607 GN=JCM10512_3736; PE = 3 SV=1
MFTVVKRFTISAAHKLVLPYRSNCASLHGHNWTITVYCRSERLNADGMVIDFARIKDVIKEKLDHQNLNEVLPFNPTAENIARWVQKQIPQCFKVEVRETDDNLVIYEKE

SEQ ID NO: 18174 - protein, 110 aa, Bacteroides salanitronis
  REGION 1..110: note = tr|F0R8U2|F0R8U2_BACSH 6-carboxy-5,6,7,8-tetrahydropterin synthase OS=Bacteroides salanitronis (strain DSM 18170 / JCM 13567 / BL78); OX = 667015 GN=Bacsa_2503 PE=3 SV= 1
MYTVIKRMEISASHSLTLPYPSKCENLHGHNWIITVYCRSKELNEYGMVVDFSQIKEVVQGALDHRHLNDVLPFNPTAENIARWVCEQVPYCFKVEVRESEGNTVIYEKD

SEQ ID NO: 18175 - protein, 110 aa, Bacteroides salyersiae
  REGION 1..110: note = tr|A0A4Q5FHX2|A0A4Q5FHX2_9BACE 6-carboxy-5,6,7,8-tetrahydropterin synthase OS=Bacteroides salyersiae OX=291644 GN=EAJ08_18040 PE=3 SV=1
MYTVIKRLEVSAAHSLNLSYRSKCENLHGHNWIITVYCRSAELNADGMVVDFSLIKKAVKERLDHRNLNEVLPFNPTAENIARWVCEQVPHCFKVEVQESESNTAVYEKD

SEQ ID NO: 18176 - protein, 110 aa, Bacteroides salyersiae; identical to SEQ ID NO: 18175
  REGION 1..110: note = tr|I8Z7N9|I8Z7N9_9BACE 6-carboxy-5,6,7,8-tetrahydropterin synthase OS=Bacteroides salyersiae CL02T12C01 OX=997887 GN=HMPREF1071_00249 PE=3; SV = 1

SEQ ID NO: 18177 - protein, 103 aa, Bacteroides sartorii
  REGION 1..103: note = tr|R9HXZ2|R9HXZ2_9BACE Queuosine biosynthesis protein QueD OS=Bacteroides sartorii OX=671267; GN = C802_04324 PE=4 SV=1
MEISASHSLKLSYESKCENLHGHNWIITVYCRSEVLNEDGMVVDFTHIKEAVMGRLDHQNLNEVVPFNPTAENIARWVCEQVPACFKVEVRESEGNTVIYEKD

SEQ ID NO: 18178 - protein, 110 aa, Bacteroides sartorii
  REGION 1..110: note = tr|A0A4S2FJL8|A0A4S2FJL8_9BACE 6-carboxy-5,6,7,8-tetrahydropterin synthase OS=Bacteroides sartorii OX=671267 GN=queD PE=3 SV=1
MYTVIKRMEISASHSLKLSYESKCENLHGHNWIITVYCRSEVLNEDGMVVDFTHIKEAVMGRLDHQNLNEVVPFNPTAENIARWVCEQVPACFKVEVRESEGNTVIYEKD

SEQ ID NO: 18179 - protein, 110 aa, Bacteroides sp.
  REGION 1..110: note = tr|R6EU90|R6EU90_9BACE 6-carboxy-5,6,7,8-tetrahydropterin synthase OS=Bacteroides sp. CAG:709 OX=1262748 GN=BN760_01681 PE=3 SV=1
MYYVSKRFEVSGAHYVTTDRRTKCEELHGHNWIVIVHCKSMTLNEDGMVTDFTVIKQNIMSRIDHKNLNEVLPFSPTAENIAKWICDETENCYKVEIWESENNKAVYEKE

SEQ ID NO: 18180 - protein, 110 aa, Bacteroides sp.
  REGION 1..110: note = tr|A0A4P6RJG5|A0A4P6RJG5_9BACE 6-carboxy-5,6,7,8-tetrahydropterin synthase OS=Bacteroides sp. A1C1 OX=2528203 GN=queD PE=3 SV=1
MYTVIKRMEVSAAHSLKLSYRSKCENLHGHNWIITVYCRSKELNADGMVVDFSHIKQVVKEQLDHHNLNEVLSFNPTAENIARWICDQIPTCFKVEVQESESNIAVYEED

SEQ ID NO: 18181 - protein, 110 aa, Bacteroides stercorirosoris; identical to SEQ ID NO: 18168
  REGION 1..110: note = tr|A0A1M6IVY9|A0A1M6IVY9_9BACE 6-carboxy-5,6,7,8-tetrahydropterin synthase OS=Bacteroides stercorirosoris OX=871324 GN=queD PE=3 SV=1

SEQ ID NO: 18182 - protein, 110 aa, Bacteroides stercoris
  REGION 1..110: note = tr|A0A4Q5GAF2|A0A4Q5GAF2_BACSE 6-carboxy-5,6,7,8-tetrahydropterin synthase OS=Bacteroides stercoris OX=46506 GN=queD PE=3 SV=1
MYTVIKRMEVSAAHSLKLSYQSKCENLHGHNWIITVYCRAKELNADGMVVDFSHIKQAVKEKLDHRNINEVLPFNPTAENMARWICNQIPACFKVEVQESESNIAIYEED

SEQ ID NO: 18183 - protein, 187 aa, Bacteroides stercoris
  REGION 1..187: note = tr|A0A108TDG7|A0A108TDG7_BACSE 6-pyruvoyl tetrahydropterin synthase OS=Bacteroides stercoris; OX = 46506 GN=AA415_00323 PE=4 SV=1
MRSITTFDLQYAHRFYGFRGEAQYLHGHTGVLTIEVEDTINTGVNMVYPCNEIQKIAWNVLKNFDHALVLREDDPLLPAVLGVYEKQGIKNGNPQNTMKGEAFKIELATAYPDARLVVTKETMTVEGMIKIVYALLKDKLNIAKITFTSGVNAGSAEFVTKNKIQRCPLCGVTLNEESACPKCGYKK

SEQ ID NO: 18184 - protein, 124 aa, Bacteroides thetaiotaomicron
  REGION 1..124: note = tr|R9H9A6|R9H9A6_BACT4 6-carboxy-5,6,7,8-tetrahydropterin synthase OS=Bacteroides thetaiotaomicron dnLKV9 OX=1235785 GN=C799_02239 PE=3 SV=1
MFTVIKRMEISASHKLVLPYRSKCASLHGHNWIITVYCRSSRLNSEGMVVDFTRIKEVVTEKLDHQNLNEVLPFNPTAENIARWVCKQIPQCYKVEVQESEGNIVIYEKDAAANEKTPAAGETE

SEQ ID NO: 18185 - protein, 124 aa, Bacteroides thetaiotaomicron
  REGION 1..124: note = tr|A0A0P0EXK7|A0A0P0EXK7_BACT4 6-carboxy-5,6,7,8-tetrahydropterin synthase OS=Bacteroides thetaiotaomicron OX=818 GN=queD PE=3 SV=1
MFTVIKRMEISASHKLVLPYRSKCASLHGHNWIITVYCRSSRLNSEGMVVDFTRIKEVVTEKLDHQNLNEVLPFNPTAENIARWVCRQIPQCYKVEVQESEGNIVIYEKDAVANEKTPAAGETE

SEQ ID NO: 18186 - protein, 110 aa, Bacteroides uniformis; identical to SEQ ID NO: 18180
  REGION 1..110: note = tr|A0A139K5F7|A0A139K5F7_BACUN 6-carboxy-5,6,7,8-tetrahydropterin synthase OS=Bacteroides uniformis OX=820 GN=queD PE=3 SV=1

SEQ ID NO: 18187 - protein, 110 aa, Bacteroides uniformis; identical to SEQ ID NO: 18180
  REGION 1..110: note = tr|A0A078RZF9|A0A078RZF9_BACUN 6-carboxy-5,6,7,8-tetrahydropterin synthase OS=Bacteroides uniformis str. 3978 T3 ii OX=1339349 GN=queD PE=3 SV=1

SEQ ID NO: 18188 - protein, 103 aa, Bacteroides vulgatus
  REGION 1..103: note = tr|A0A069SV39|A0A069SV39_BACVU 6-pyruvoyl tetrahydropterin synthase family protein OS=Bacteroides vulgatus str. 3975 RP4 OX=1339352 GN=M099_1141 PE=4 SV=1
MEISASHSLKLSYRSKCENLHGHNWIITVYCRSEVLNEDGMVVDFTHIKETVMGRLDHRNLNEVVSFNPTAENIARWVCEQIPTCFKVEVRESEGNTVIYEKD

SEQ ID NO: 18189 - protein, 103 aa, Bacteroides vulgatus; identical to SEQ ID NO: 18188
  REGION 1..103: note = tr|A0A174V505|A0A174V505_BACVU 6-pyruvoyl-tetrahydropterin synthase OS=Bacteroides vulgatus OX=821 GN=queD PE=4 SV=1

SEQ ID NO: 18190 - protein, 118 aa, Bacteroides xylanisolvens
  REGION 1..118: note = tr|A0A1Y4VDI8|A0A1Y4VDI8_9BACE 6-carboxy-5,6,7,8-tetrahydropterin synthase OS=Bacteroides xylanisolvens OX=371601 GN=B5E50_14155 PE=3 SV=1
MFTVIKRMEISASHKLVLPYRSKCASLHGHNWIITVYCRSARLNSEGMVVDFTRIKEVVTEKLDHQNLNEVLPFNPTAENIARWVCKQIPQCYKVEVQESEGNIVIYEKDSGSAEGQE

SEQ ID NO: 18191 - protein, 118 aa, Bacteroides xylanisolvens; identical to SEQ ID NO: 18170
  REGION 1..118: note = tr|I9UZ34|I9UZ34_9BACE 6-carboxy-5,6,7,8-tetrahydropterin synthase OS=Bacteroides xylanisolvens CL03T12C04 OX=997892 GN=HMPREF1074_00515; PE = 3 SV=1

SEQ ID NO: 18192 - protein, 145 aa, Bacteroides xylanolyticus
  REGION 1..145: note = tr|A0A2S6HNA9|A0A2S6HNA9_9BACE 6-carboxy-5,6,7,8-tetrahydropterin synthase OS=Bacteroides xylanolyticus OX=384636 GN=BXY41_112119 PE=3 SV=1
MYYLETEQSFDSAHFLKGYDGKCKNIHGHRWRVVIEIESPTLQKEGQSQGMIVDFTRLKQDLKEETDYFDHSLIMETGSLKPNTLVALKEEGFLLVEVNFRPTAEEFSRYFYERMSQRGYDVKSAKVYETPVNCASYGEDSHGRL

SEQ ID NO: 18193 - protein, 122 aa, unidentified
  source 1..122: note = Bacteroidetes bacterium
  REGION 1..122: note = tr|A0A2T2STY5|A0A2T2STY5_9BACT 6-pyruvoyl tetrahydropterin synthase OS=Bacteroidetes bacterium QH_1_64_81 OX=1919089 GN=BRD26_02525 PE=4 SV=1
MYQLMVRRDFVAQHYLTVPNCGPENEWHSHHFEVEVLLEGESLNENGYLVDIVEIEDALGALVDRYRDATLNDLPEFEGLNPSIEHFSRIFCTSLQERLDTDGLDTTVKIWEDEDAWASYSA

SEQ ID NO: 18194 - protein, 150 aa, unidentified
  source 1..150: note = Bacteroidetes bacterium
  REGION 1..150: note = tr|A0A1J5MCT1|A0A1J5MCT1_9BACT 6-carboxytetrahydropterin synthase QueD OS=Bacteroidetes bacterium MedPE-SWsnd-G1 OX=1860094 GN=BM563_03080 PE=4; SV = 1
MSKIRITKQFNFETGHALYGYDGKCKNVHGHSYKLSVTVIGTPISDTNNVKFGMVIDFKDLKDIVESEVVDVFDHATVFNKNTPHIELAKELKDRGHSVILVDYQPTSEMMIIDFAEKIKKRLPENIELHSLKLRETGTSHAEWYASDNQ

SEQ ID NO: 18195 - protein, 148 aa, unidentified
  source 1..148: note = Bacteroidetes sp.
  REGION 1..148: note = tr|A0A3N0ZL81|A0A3N0ZL81_9BACT 6-carboxytetrahydropterin synthase; OS = Bacteroidetes/Chlorobi group bacterium MS-B_bin-24; OX = 2382228 GN=D9V87_07460 PE=4 SV=1
MYVRGEKMKVKIGKEFVWQMSHRLPFHKGLCSNIHGHTYKLRVSIVGEPDENGFLIDFYELMSAVQPIIDQLDHSFVVDSNDTEVIEFLRKNNFRYVIIPSTTTSENLAFWIANQIVEKFQKYPNLEKLIVRFYETFDSFAEVELPLR

SEQ ID NO: 18196 - protein, 143 aa, unidentified
  source 1..143: note = Bacteroidetes sp.
  REGION 1..143: note = tr|A0A3N0ZCY8|A0A3N0ZCY8_9BACT 6-carboxytetrahydropterin synthase; OS = Bacteroidetes/Chlorobi group bacterium Naka2016; OX = 2382229 GN=D9V84_09325 PE=4 SV=1
MIYITRRETFSSAHRLYNPTFSDEENERIYDKCNNPNWHGHNYVLEVTVCGYPDPNTGYLIDLKELKKIIRTHIISKVDHKNLNLDVEFLKGIIPTVENLAVAFWKELEDKFTNCKLYRIKLYETENNVVEYYGEKIDLHKFV

SEQ ID NO: 18197 - protein, 121 aa, unidentified
  source 1..121: note = Bacteroidia bacterium
  REGION 1..121: note = tr|A0A1Q3QCC9|A0A1Q3QCC9_9BACT 6-carboxy-5,6,7,8-tetrahydropterin synthase OS=Bacteroidia bacterium 43-41 OX=1895720 GN=BGO33_08825 PE=3 SV=1
MYKISKQFAFSAAHSLDGLPGDHPCTRLHGHNYVVTVHLRSKELNDTGFVKDYNELKMVKQYIDEHIDHRNLNDIMHPLNSSAENLARLFFDIFKPILPELYAVEVSETPKTSAIYEPDGQ

SEQ ID NO: 18198 - protein, 150 aa, unidentified
  source 1..150: note = Bacteroidia bacterium
  REGION 1..150: note = tr|A0A2G6PKT0|A0A2G6PKT0_9BACT 6-carboxytetrahydropterin synthase QueD OS=Bacteroidia bacterium OX=2044936 GN=CSA07_00055 PE=4 SV=1
MIVRLTKEFAFEASHFLPGYRGRCANIHGHSYRLFVTIRGVPRDEPGHPEDGMLIDFGVLKRCVHTAVIDCLDHSLMVRGGSWAELTRLLDGRMRVVELPFQPTCENLLQWMAGRLMPLLPAGVSLFSLRLHETRTSYAEWFASEQGASG

SEQ ID NO: 18199 - protein, 132 aa, unidentified
  source 1..132: note = Baekduia soli
  REGION 1..132: note = tr|A0A5B8U0B7|A0A5B8U0B7_9ACTN 6-carboxytetrahydropterin synthase OS=Baekduia soli; OX = 496014 GN=FSW04_01795 PE=4 SV=1
MFSVTIRDHMMIAHSLRGATFGPAQRLHGATYVVDATFRRATLDEDGIVVDIARAAGALHVVVAELGYRNLDDEPALAGLNTTTEELARVVADRLADRAAAGDLGDGGRRLDGLAVTLHESHVAWAGYERSL

SEQ ID NO: 18200 - protein, 130 aa, unidentified
  source 1..130: note = Baia soyae
  REGION 1..130: note = tr|A0A4R2RQT8|A0A4R2RQT8_9BACL 6-carboxy-5,6,7,8-tetrahydropterin synthase OS=Baia soyae; OX = 1544746 GN=EDD57_12225 PE=3 SV=1
MSQGMYTLVKHFWISCAHSVPGAGKCERIHGHNYKVTFCVQGNSLDSSHMLIDFREVKHAIEKQFDHHYLNDFPEFSPELGGAAPSTEKVAEVFFERIKQLCEKKENCPIMKWVEVEETNEAFARYEEMN

SEQ ID NO: 18201 - protein, 128 aa, unidentified
  source 1..128: note = Baia soyae
  REGION 1..128: note = tr|A0A4R2S188|A0A4R2S188_9BACL PreQ(0) biosynthesis protein QueD OS=Baia soyae OX=1544746 GN=EDD57_10417 PE=4; SV = 1
MQGKYTLTKHFWISCAHSVPGAGKCERIHGHNYKVTFCVDGTKLDESQMLIDFRLVKHVIEKKYDHHLLNDFPEFNTELGGAAPSTEKVAEIFFYAIDQLCEQKSNQPTLRWVEVQETNEAFVRFERA

SEQ ID NO: 18202 - protein, 215 aa, Balnearium lithotrophicum
  REGION 1..215: note = tr|A0A521APQ3|A0A521APQ3_9BACT 6-pyruvoyltetrahydropterin/6-carboxytetrahydropterin synthase OS=Balnearium lithotrophicum OX=223788; GN = SAMN06269117_10266 PE=4 SV=1
MFEISKTFEFSSAHSVHSQRLNPEWAGNSYPKCRRLPGHGHNYRLKVFLSSDKLDESQMVTDFGHLKWLKEFIDDCFDHKLILGMDDPAFHFLLERLGLTNGNSFIIPHGKAKSTIVDEHFRIETKEISEISLKDLNRFNFITFNSYSPNEISPITDFYQRLIDGIAFFKGSPTSENLARFFFKFVSENVKPLGVKCSRVKIYETPTSCASYFEE

SEQ ID NO: 18203 - protein, 143 aa, Balneola sp.
  REGION 1..143: note = tr|A0A1B6YE23|A0A1B6YE23_9BACT 6-carboxy-5,6,7,8-tetrahydropterin synthase OS=Balneola sp. EhC07 OX=1849360 GN=A8B79_00020 PE=3 SV=1
MVLVTRKTHFNAAHRLHNPSKSDEWNKKTFGKCNHPNWHGHNYVMEVTVAGEPNPETGFIIDLSDLKQIIEENIVEPCDHKNLNLDVPFLEGILPSSENLVKAFYEELKEEVEEASSEGGVLYSVKLYETERNIAEYCPFKKV

SEQ ID NO: 18204 - protein, 143 aa, Balneola sp.
  REGION 1..143: note = tr|A0A2D8CHJ0|A0A2D8CHJ0_9BACT 6-pyruvoyl tetrahydrobiopterin synthase OS=Balneola sp. OX=2024824; GN = CL667_09310 PE=4 SV=1
MTFVTRRAHFNAAHRLHNPDKSEEWNKKTFGKCNLPNWHGHNYVIEVTVSGEPDPETGYTIDLGKLKAIMKEKVLDPCDHRNLNLDVDFLDGIIPTTENLVRAFYEQLRPDVEEACARGGKLYKVKLFETERNIAEYCPYVGL

SEQ ID NO: 18205 - protein, 144 aa, unidentified
  source 1..144: note = Balneolaceae bacterium
  REGION 1..144: note = tr|A0A3D1G8A2|A0A3D1G8A2_9BACT 6-carboxy-5,6,7,8-tetrahydropterin synthase; OS = Balneolaceae bacterium OX=2053516 GN=DEQ34_03785 PE=3; SV = 1
MIFVTRKTHFNAAHRLHNPNRSDDWNSETYGKCNYPNWHGHNYIIEVTVAGSPDPETGYVIDLGDLKSIINEKVLEPCDHRNLNIDVPFLEGVIPTSENLVKAFYDQLKDEVEAAASEGSILYSVKLFETERNIAEYCPYITIG

SEQ ID NO: 18206 - protein, 101 aa, unidentified
  source 1..101: note = Balneolaceae bacterium
  REGION 1..101: note = tr|A0A359E088|A0A359E088_9BACT 6-pyruvoyl tetrahydrobiopterin synthase (Fragment) OS=Balneolaceae bacterium OX=2053516 GN=DEG32_00710 PE=4 SV=1
MTFVTRRAHFNAAHRLHNPDKSEEWNKKTFGKCNLPNWHGHNYVIEVTVSGEPDPETGYTIDLGKLKAIMKEKVLDPCDHRNLNLDVDFLDGIIPTTENLV

SEQ ID NO: 18207 - protein, 119 aa, Barnesiella intestinihominis
  REGION 1..119: note = tr|K0X7Y3|K0X7Y3_9BACT 6-carboxy-5,6,7,8-tetrahydropterin synthase OS=Barnesiella intestinihominis YIT 11860 OX=742726 GN=HMPREF9448_01648; PE = 3 SV=1
MYYVAKTMEIAGAHSLHLSYESKCEKLHGHNWIITVYCKAKELNQDGMVCDFKHIKDKIHGYLDHGNLNELLPFNPTAENIAKWITDQIPECYKTKVQESGGNTAIYEIDDFENENIDK

SEQ ID NO: 18208 - protein, 119 aa, Barnesiella sp.
  REGION 1..119: note = tr|A0A1Y4GXX9|A0A1Y4GXX9_9BACT 6-carboxy-5,6,7,8-tetrahydropterin synthase OS=Barnesiella sp. An22 OX=1965590 GN=B5F38_01260 PE=3 SV=1
MYYVAKTMEIAGAHALTLSYESKCEQLHGHNWIVTVYCKARELNADGMVCDFKHIKDKIHGYLDHGNLNELLPFNPTAENIARWITEQIPECYKTKVQESGGNIAVYRVDDCADDDFAL

SEQ ID NO: 18209 - protein, 119 aa, Barnesiella sp.
  REGION 1..119: note = tr|A0A1Y3WYE1|A0A1Y3WYE1_9BACT 6-carboxy-5,6,7,8-tetrahydropterin synthase OS=Barnesiella sp. An55 OX=1965646 GN=B5G10_01000 PE=3 SV=1
MYYVAKTMEIAGAHALTLSYESKCEQLHGHNWIVTVYCKAEQLNADGMVCDFKHIKDKIHGYLDHGNLNELLPFNPTAENIARWITEQIPECYKTKVQESGGNIAVYRVDDCKDDDFAL

SEQ ID NO: 18210 - protein, 119 aa, Barnesiella viscericola
  REGION 1..119: note = tr|W0ER56|W0ER56_9BACT 6-carboxy-5,6,7,8-tetrahydropterin synthase OS=Barnesiella viscericola DSM 18177 OX=880074 GN=BARVI_00615 PE=3 SV=1
MYYVAKTMEIAGAHALTLSYESKCEQLHGHNWIITVYCKAEELNADGMVCDFKHIKDQIHGYLDHGNLNELLPFNPTAENIARWITDQIPQCYKTKVQESGGNIAVYRVDDCKDDDFAL

SEQ ID NO: 18211 - protein, 139 aa, unidentified
  source 1..139: note = Basilea psittacipulmonis
  REGION 1..139: note = tr|A0A077DEX7|A0A077DEX7_9BURK 6-carboxy-5,6,7,8-tetrahydropterin synthase OS=Basilea psittacipulmonis DSM 24701 OX=1072685 GN=IX83_08355 PE=3; SV = 1
MKVSKTFSFDAAHMLDTHDGKCKNLHGHTYTLIVTVSGDLITDGPKKGMVIDFSDLKAKVKSEIIDRLDHAYLYDQTNAQERELAEVLERQGKKTFAFKQRTTAENLTIYVYRCLRDAGLDVSNVRLYETPNSFCEYGE

SEQ ID NO: 18212 - protein, 125 aa, unidentified
  source 1..125: note = Bathymodiolus azoricus
  REGION 1..125: note = tr|A0A1H6K6M8|A0A1H6K6M8_9GAMM 6-carboxy-5,6,7,8-tetrahydropterin synthase; OS = Bathymodiolus azoricus thioautotrophic gill symbiont; OX = 235205 GN=BAZSYMA_ACONTIG28818_ 0 PE=3 SV=1
MFVLKIVTDFASAHSLRNYPGDCSRLHGHNWQVEVSVESEVVDALGIAIDFREIKKQTKEVVKRLDHQYLNEIPPFDELNPTAENIAKYFYQEVGVLINNQDVRVCEVIIWETPRASVAYSEPRL

SEQ ID NO: 18213 - protein, 122 aa, unidentified
  source 1..122: note = Bathymodiolus brooksi
  REGION 1..122: note = tr|A0A482YSC3|A0A482YSC3_9BACT 6-carboxy-5,6,7,8-tetrahydropterin synthase; OS = Bathymodiolus brooksi thiotrophic gill symbiont; OX = 1052209 GN=BBROOKSOX_308 PE=3 SV=1
MFVLKIVTDFGAAHSLRDYPGDCARLHGHNWGVEVSVEAQELDASGIAIDFREIKKQTKAIVKRLDHQYLNEIPPFDILNPTAENIAKYFYQAVGKLINNQNVRVSEVIIWETPRASVSYSE

SEQ ID NO: 18214 - protein, 125 aa, unidentified
  source 1..125: note = Bathymodiolus heckerae
  REGION 1..125: note = tr|A0A483A6H9|A0A483A6H9_9BACT 6-carboxy-5,6,7,8-tetrahydropterin synthase; OS = Bathymodiolus heckerae thiotrophic gill symbiont; OX = 1052212 GN=BHECKSOX2_1476 PE=3 SV=1
MFVLKIVTDFASAHSLRNYPGNCARLHGHNWQVEVSVESEVLDDTGIAIDFREIKKQTKAVVKRLDHQYLNEIKPFDKLNPTAENIAKYFYEEAGVLINNQAVRVCEVIIWETLRASVTYSEPKP

SEQ ID NO: 18215 - protein, 123 aa, unidentified
  source 1..123: note = Bathymodiolus heckerae
  REGION 1..123: note = tr|A0A482Z0P4|A0A482Z0P4_9BACT 6-carboxy-5,6,7,8-tetrahydropterin synthase; OS = Bathymodiolus heckerae thiotrophic gill symbiont; OX = 1052212 GN=BHECKSOX_2331 PE=3 SV=1
MFVLKIVTDFAAAHSLRDYPGDCSRLHGHNWQVEVLVASKVLDDVGMAIDFRDIKKQTKVVVKRLDHQYLNEVTPFDQLNPTAENIAKYFFEEVGKLINTDDVRVKEITIWETLRASVTYSED

SEQ ID NO: 18216 - protein, 117 aa, unidentified
  source 1..117: note = Bathymodiolus platifrons
  REGION 1..117: note = tr|A0A1Z5HCG9|A0A1Z5HCG9_9GAMM 6-carboxy-5,6,7,8-tetrahydropterin synthase; OS = Bathymodiolus platifrons methanotrophic gill symbiont; OX = 113268 GN=bplSymb_SCF06201P001PE=3 SV=1
MYTISKQFNFSASHIIEGLPEAHPCSRLHGHNYVVELVLGAEELNETGFVVDYNELVVFKNMIDETLDHRHLNDVLTGPTTAESIAKYLYEHAKSIWQEVLSVSVSETPKTNATYRP

SEQ ID NO: 18217 - protein, 122 aa, unidentified
  source 1..122: note = Bathymodiolus thermophilus
  REGION 1..122: note = tr|A0A1J5TX90|A0A1J5TX90_9GAMM 6-carboxy-5,6,7,8-tetrahydropterin synthase; OS = Bathymodiolus thermophilus thioautotrophic gill symbiont OX=2360 GN=BGC33_06735 PE=3 SV =1
MFVLKIVTDFGAAHSLRDYPGDCARLHGHNWGVEVSVEAQELDVSGIAIDFREIKKQTKAVVKRLDHQYLNEIPPFDVLNPTAENIAKYFYQAVGKLINNQDVRVSEVIIWETPRASVAYSE

SEQ ID NO: 18218 - protein, 129 aa, unidentified
  source 1..129: note = Baumannia cicadellinicola
  REGION 1..129: note = tr|Q1LTP0|Q1LTP0_BAUCH 6-carboxy-5,6,7,8-tetrahydropterin synthase OS=Baumannia cicadellinicola subsp. Homalodisca coagulata OX=374463; GN = BCI_0219 PE=3 SV=1
MFSLMNKNTALTTTLFKDFTFESAHYLPYVPAGHKCGRIHGHSFRVRIELTAKIDLYTGWIMDFAELKAVCQPIIEQLDHSYLNKIPGLENPTSEVLAQWIWQRLLPNLPLLSAVYIKETCNSGCVYRG

SEQ ID NO: 18219 - protein, 135 aa, Bdellovibrio bacteriovorus
  REGION 1..135: note = tr|Q6MLY9|Q6MLY9_BDEBA 6-carboxy-5,6,7,8-tetrahydropterin synthase; OS = Bdellovibrio bacteriovorus (strain ATCC 15356 / DSM 50701 / NCIB 9529 / HD100) OX=264462 GN=ygc M PE=3 SV=1
MWSWTYSPRNDYSISMKFELKQHFQIESARFLPHLPASHPCSRMHGHSFKLILTLVGDLDPKIGWVIDYNDIQALMKPLLDQIDHRVLNEVPGLENPTSELLAKWLYDKARPFLPTLVKVTVAETPATECSYPVI

SEQ ID NO: 18220 - protein, 129 aa, Bdellovibrio bacteriovorus
  REGION 1..129: note = tr|A0A1Z3N8G9|A0A1Z3N8G9_BDEBC 6-pyruvoyl tetrahydropterin synthase OS=Bdellovibrio bacteriovorus; OX = 959 GN=B9G79_09245 PE=4 SV=1
MIITLKSPFSAAHFYAQPAWDEQKNRETFARCYTQYGHGHNYVLEAGFHCQNSNWQQQQQHYQSVLNKLTSVLDHEHLNFVIPEFKTNIPTTENICLYFLDKLKSQVKSEEISYLRLYEMDNIWTEIRL

SEQ ID NO: 18221 - protein, 163 aa, unidentified
  source 1..163: note = Bdellovibrio exovorus
  REGION 1..163: note = tr|M4VQ88|M4VQ88_9PROT 6-pyruvoyl-tetrahydropterin synthase, putative OS=Bdellovibrio exovorus JSS OX=1184267; GN = A11Q_1103 PE=4 SV=1
MNKTTLHLAKQNFKFSSAHFLIFDEKSAEMLHGHNYQVEVDIFCSSEDAIGGKGYFVDFNVLKKIIKDQCDIWDEHILLPQAHSDMKYQESANGKNYEITFRDRFYSFPINETIWLPIQNTSVENLSWLFAKSIFEKMKSLGVEKVRVSVEETRGQKASTEVS

SEQ ID NO: 18222 - protein, 119 aa, unidentified
  source 1..119: note = Bdellovibrio exovorus
  REGION 1..119: note = tr|M4V7W4|M4V7W4_9PROT 6-carboxy-5,6,7,8-tetrahydropterin synthase; OS = Bdellovibrio exovorus JSS OX=1184267 GN=A11Q_1102 PE=3; SV = 1
MKYELKQHFQIESARFLPHLPADHPCSRMHGHSFKIILTLKGDLDPQIGWVVDYHQITQVMQPLLKQLDHRVLNEVEGLENPTSELLAKWIYERALKTLPILQRVTIMETPATECTYPV

SEQ ID NO: 18223 - protein, 129 aa, Bdellovibrio sp.
  REGION 1..129: note = tr|A0A514XIE5|A0A514XIE5_9PROT 6-carboxytetrahydropterin synthase OS=Bdellovibrio sp. ZAP7 OX=2231053 GN=DOM22_10470 PE=4 SV=1
MILTLKSSFSSAHLYHQPLWSSEENLKNFGRCFTEHGHGHNYTLEVGFHLTEDELKAKLEEYRQLLKSLTSVLDHEHLNFAIPEFKTKIPTTENIALYFMEKLKEHLPQSQIAHIRLYEMNDLWTEIQP

SEQ ID NO: 18224 - protein, 168 aa, Bdellovibrio sp.
  REGION 1..168: note = tr|A0A317JHI3|A0A317JHI3_9PROT 6-pyruvoyl tetrahydropterin synthase OS=Bdellovibrio sp. OX=28201; GN = C5B49_10970 PE=4 SV=1
MQSHTTLHLYKQNFRFSAAHFLIFDAHRAERLHGHNYQVEVELRGEQFNHQSGYYIEFKEIKKIIRDRLARWNETVLMPARNEEMKFATHGTTLEIIFRERRYAFPVSEVVLLPTNNTSVEHLSRILAEDLMGLLNAYGVQTIRVQVEETQGQAASCTLTRKSRVVDP

SEQ ID NO: 18225 - protein, 138 aa, unidentified
  source 1..138: note = Bdellovibrionaceae bacterium
  REGION 1..138: note = tr|A0A2E1Q6E9|A0A2E1Q6E9_9PROT 6-pyruvoyl tetrahydrobiopterin synthase OS=Bdellovibrionaceae bacterium OX=2026715 GN=CL676_11790 PE=4 SV=1
MTPALQLSRALYFDCAHSYQVKSWTQDENLKEFGACFSPVGHGHTYRLEAFVEGPVDPVSGMILNLRDLDDLLKLSVTPLQGKFLDREVPEFLEKVPTTENIALFLFEKLAALLTEKKLKLCRIRLFETEDLWVDCQS

SEQ ID NO: 18226 - protein, 201 aa, unidentified
  source 1..201: note = Bdellovibrionaceae bacterium
  REGION 1..201: note = tr|A0A2E7GB91|A0A2E7GB91_9PROT Uncharacterized protein OS=Bdellovibrionaceae bacterium OX=2026715; GN = CL678_07150 PE=4 SV=1
MFVFKFNSIKSSGVRKPKEFKFMYQLSFSYSFESAHRFTRCESIPCMTPHGHSWRAVLWIQSLHGSLNENDMVTEFQSLKKQWKKFIQQTVDHSFFHHENDPLLPYLNQEIPKFRGLSFPGDPTTEMIATCFLLKAFAMHPKEIQAKPFKIEVFETQTNFVSYTAESPSEIFKNHPKLKSEKQWWNQAEPYSRERFLNSSK

SEQ ID NO: 18227 - protein, 160 aa, unidentified
  source 1..160: note = Bdellovibrionales bacterium
  REGION 1..160: note = tr|A0A1F3SSP4|A0A1F3SSP4_9PROT Uncharacterized protein OS=Bdellovibrionales bacterium GWA2_49_15; OX = 1797384 GN=A2X86_02290 PE=4 SV=1
MESCARRIHFCYGHRVMHHESKCATLHGHNGVIWIHATPVEGLDALGRVIDFSVLKAKVGAWVEENWDHTMILFKDDHKTLELVAQAPSYKKPFIFNVNPTAENLAKYLLWEVCPKVLKGQGVIVHKITFFETENCQAEQSLSPDSPEVLKLYGLPSLGK

SEQ ID NO: 18228 - protein, 104 aa, unidentified
  source 1..104: note = Bdellovibrionales bacterium
  REGION 1..104: note = tr|A0A1F3SPP7|A0A1F3SPP7_9PROT 6-carboxytetrahydropterin synthase QueD; OS = Bdellovibrionales bacterium RBG_16_40_8 OX=1797388; GN = A2Z20_00120 PE=4 SV=1
MLPNVPPGHKCGRLHGHSYKMTLIVRGPLLKHEGWIMDFSDIKLLAKPVIDKLDHRYLNEIPGLENPTAEVLARWIYENLQVSITGLYQVIINETCTAQCRYPV

SEQ ID NO: 18229 - protein, 118 aa, Beggiatoa alba
  REGION 1..118: note = tr|I3CF74|I3CF74_9GAMM 6-carboxy-5,6,7,8-tetrahydropterin synthase OS=Beggiatoa alba B18LD OX=395493 GN=BegalDRAFT_1373 PE=3 SV=1
MEIYKRFSIEAAHRLPHVPEGHKCARLHGHSFQVSLYVSGAVDVHTGWIMDFGDIKSAFQPLYAQLDHHYLNEIAGLENPTSENLARWIWQRLKPVLPALSKIVIEETCTSGCVYTGE

SEQ ID NO: 18230 - protein, 118 aa, unidentified
  source 1..118: note = Beggiatoa leptomitoformis
  REGION 1..118: note = tr|A0A2N9YG70|A0A2N9YG70_9GAMM 6-carboxy-5,6,7,8-tetrahydropterin synthase OS=Beggiatoa leptomitoformis OX=288004 GN=BLE401_12260 PE=3 SV=1
MEIYKKFSIEAAHRLPNVPEGHKCARLHGHSFQITIYVSGTVAPHTGWIMDFGDIKSAFQPIYARLDHYYLNEIEGLDNPTSENIARWIWLHLKPVLPALSKIVIEETCTSGCVYTGD

SEQ ID NO: 18231 - protein, 148 aa, Beggiatoa sp.
  REGION 1..148: note = tr|A7BS03|A7BS03_9GAMM 6-carboxy-5,6,7,8-tetrahydropterin synthase OS=Beggiatoa sp. PS OX=422289 GN=BGP_0825 PE=3 SV=1
MNMYKIIVKIKYEYAHRLLHHTGKCRHVHGHSGEAIIELASNTLNDNGFVMDFADVKTPLKKWINQFWDHAYLANESDPLLPAFKSENMNIYTFPEEPTAEVMARHLFEQAAILERPPGVILTRVTIRETCTGQASYQPKELEIAYEI

SEQ ID NO: 18232 - protein, 119 aa, Beggiatoa sp.
  REGION 1..119: note = tr|A0A1W9X0R6|A0A1W9X0R6_9GAMM 6-carboxy-5,6,7,8-tetrahydropterin synthase OS=Beggiatoa sp. 4572_84 OX=1972449 GN=B6247_11245 PE=3 SV=1
MEIYKKFSIEAAHRLPNVPEGHKCSRLHGHSFQVTIHVCGEVGAHSGWVMDFADIKKAFKPVFEQLDHHYLNDIEGLENPTSENLARWIWLRLKPTLPGLCKITIQETCTSGCVYGGEA

SEQ ID NO: 18233 - protein, 117 aa, Beijerinckia indica
  REGION 1..117: note = tr|B2IGN7|B2IGN7_BEII9 6-carboxy-5,6,7,8-tetrahydropterin synthase; OS = Beijerinckia indica subsp. indica (strain ATCC 9039 / DSM 1715 / NCIB 8712) OX=395963 GN=Bind_2 178 PE=3 SV=1
MKITQAFHFEAAHRLPKVPEGHRCANLHGHSYRVELYLEGPVDPDTGFVIDFFDIEAVFGPLLHRLDHHYLNEIEGLENPTAELIAVWIWDRVKPSLPQLVKVIVYETPDCWAEYEG

SEQ ID NO: 18234 - protein, 132 aa, Beijerinckia sp.
  REGION 1..132: note = tr|A0A1H4TCW4|A0A1H4TCW4_9RHIZ 6-pyruvoyl-tetrahydropterin synthase OS=Beijerinckia sp. 28-YEA-48 OX=1882748 GN=SAMN05443249_2939 PE=4 SV=1
MYAIEVRDHIMIAHSFKGDLFGPAQKLHGATFVVDVAFFRESLTADGVVVDIGRAHEALKATLAPLNYNNLDTLSQFAGQQTTTEFLSKHIFDAMAAAARTGALGPGGEGIARIRVTLHESHVARAWFEGPV

SEQ ID NO: 18235 - protein, 118 aa, unidentified
  source 1..118: note = Beijerinckiaceae bacterium
  REGION 1..118: note = tr|A0A2N8MDJ8|A0A2N8MDJ8_9RHIZ 6-carboxy-5,6,7,8-tetrahydropterin synthase; OS = Beijerinckiaceae bacterium OX=1978229 GN=queD PE=3 SV=1
MKISQAFRFEAAHTLPNVAEGHRCRRLHGHSYRVELRLEGAVDPITGFVADFLAIEAAFKPLLERLDHRFLNDIEGLENPTAENIAIWIWHRIKTPLPQLARVVVFETQDCFAEYDGI

SEQ ID NO: 18236 - protein, 118 aa, unidentified
  source 1..118: note = Beijerinckiaceae bacterium
  REGION 1..118: note = tr|A0A522GH17|A0A522GH17_9RHIZ 6-carboxy-5,6,7,8-tetrahydropterin synthase; OS = Beijerinckiaceae bacterium OX=1978229 GN=queD PE=3 SV=1
MRITQAFSFESAHFLPKVPKTHRCHAMHGHSYRVELKLEGKVDPATGFVVDFFEIEHAFGPLRAKLDHHCLNEVEGLENPTAENIAVWIFTRVKKALPQLAGVVVYETKDCYAEYSGE

SEQ ID NO: 18237 - protein, 139 aa, Belliella baltica
  REGION 1..139: note = tr|I3Z0Y7|I3Z0Y7_BELBD 6-pyruvoyl-tetrahydropterin synthase OS=Belliella baltica (strain DSM 15883 / CIP 108006 / LMG 21964 / BA134) OX=866536 GN=Belba_0238 PE=4; SV = 1
MIHVCRKEHFNAAHKLWNPKWSEEKNLEVFGPCANANWHGHNFELIVTVKGIPDSETGFVVDLKQLSNVIRELVIEKVDHKNLNLDVDFMEGKMASCEILIMEFWKILKPAVDEITPHGSLYKLTLYETPRNFVEYFGK

SEQ ID NO: 18238 - protein, 135 aa, Belliella baltica
  REGION 1..135: note = tr|I3Z5Q7|I3Z5Q7_BELBD 6-carboxy-5,6,7,8-tetrahydropterin synthase OS=Belliella baltica (strain DSM 15883 / CIP 108006 / LMG 21964 / BA134) OX=866536 GN=Belba_2000 P E=3 SV=1
MLSITKIFTFEAAHRISDHDGACSQLHGHSYSLHVTVSGDDLKKDMLLDFKDLKKIVQEEVIEVFDHALLLKESEKNLIDFEKIGQKIFWMPYEPTAERILLWMKDRIAPQLPSHVKLEGLTLYETATCYARWKD

SEQ ID NO: 18239 - protein, 139 aa, unidentified
  source 1..139: note = Belliella buryatensis
  REGION 1..139: note = tr|A0A239DSE2|A0A239DSE2_9BACT 6-pyruvoyltetrahydropterin/6-carboxytetrahydropterin synthase OS=Belliella buryatensis OX=1500549; GN = SAMN06295967_10811 PE=4 SV=1
MIHVCRKEHFNAAHKLWNPNWSEEKNVEVFGPCANVNWHGHNFELIVTVRGLPDPDTGFVVDLKELSTLIRKLIIDKVDHKNLNLDVEFMIGKMASCENLVLEFWKILKPEVDRIVSHGSLYKLTLYETPRNFVEYFGE

SEQ ID NO: 18240 - protein, 136 aa, unidentified
  source 1..136: note = Belliella buryatensis
  REGION 1..136: note = tr|A0A239G551|A0A239G551_9BACT 6-pyruvoyltetrahydropterin/6-carboxytetrahydropterin synthase OS=Belliella buryatensis OX=1500549; GN = SAMN06295967_114100 PE=4 SV=1
MKVAVYRKEHFNAAHRLHNPNWSDEKNQEIFGKCNNPNFHGHNYELIVKLVGPVDPDTGYVFDMKVLSDLIKVNVLNRFDHKNLNLDTNEFKNLNPTAENIAVVIWNILRTEIDTKYDLTIRLYETERNFVEYDGN

SEQ ID NO: 18241 - protein, 136 aa, Belliella pelovolcani
  REGION 1..136: note = tr|A0A1N7PV92|A0A1N7PV92_9BACT 6-pyruvoyltetrahydropterin/6-carboxytetrahydropterin synthase OS=Belliella pelovolcani OX=529505; GN = SAMN05421761_12132 PE=4 SV=1
MKVAVYRKEHFNAAHRLHNPNWSDEKNQEIFGKCNNPNFHGHNYELIVKLVGPVDPETGYVFDMKVLSDLIKVNILNRFDHKNLNLDTHEFRNLNPTAENIAVVIWNILRTEIDTKYDLTIRLYETERNFVEYDGN

SEQ ID NO: 18242 - protein, 139 aa, Belliella pelovolcani
  REGION 1..139: note = tr|A0A1N7Q445|A0A1N7Q445_9BACT 6-pyruvoyltetrahydropterin/6-carboxytetrahydropterin synthase OS=Belliella pelovolcani OX=529505; GN = SAMN05421761_1291 PE=4 SV=1
MIHVCRKEHFNAAHKLWNPNWSEEKNVEVFGPCANANWHGHNFELIVTVKGLPDPETGFVVDLKDLSSLIRKLIIDRVDHKNLNLDVDFMLGKMASCENLVMEFWKILKPEVDKIVANGSLYKLTLYETPRNFVEYFGE

SEQ ID NO: 18243 - protein, 125 aa, Bellilinea caldifistulae
  REGION 1..125: note = tr|A0A0P6XE97|A0A0P6XE97_9CHLR 6-pyruvoyl tetrahydropterin synthase OS=Bellilinea caldifistulae; OX = 360411 GN=AC812_00905 PE=4 SV=1
MYRVGVLRDFIAQHYLIGGDWGAENQLHSHPYRLELELSGKQLDQHQYLVDIVAIEQALDRLIAYYRDHTLNDLPEFAGINPSLEHFARVLCESLAQQFLHGAVERISVKLWENSLAWAGYEVNR

SEQ ID NO: 18244 - protein, 107 aa, Belnapia rosea
  REGION 1..107: note = tr|A0A1G7B5H9|A0A1G7B5H9_9PROT 6-pyruvoyl-tetrahydropterin synthase OS=Belnapia rosea; OX = 938405 GN=SAMN04487779_102320 PE=4 SV=1
MMTIWAECTVSAAHRFADYDMHGHTYIVRVSIREAEDGFLNAETFRDELLRIRRGVDHRCLNDVLETPTMEELARWFARELRKERYDVTEVQISRPEGLGCRLVLAG

SEQ ID NO: 18245 - protein, 138 aa, Belnapia rosea
  REGION 1..138: note = tr|A0A1G6JE50|A0A1G6JE50_9PROT 6-pyruvoyl-tetrahydropterin synthase OS=Belnapia rosea; OX = 938405 GN=SAMN04487779_1001148 PE=4 SV=1
MFSLTVCDHIMVAHSFRGAEFGPAQRLHGATFAVEAEFRAERLDALHLLVDIGLAKVELRRALDGLDYRNLDAEPAFAGLNTTTEFLCHHIHGLLVAALKAGRLGPQAENVTGLKVLLRESPNAWAAYEGPIGEGPTA

SEQ ID NO: 18246 - protein, 142 aa, Bergeriella denitrificans
  REGION 1..142: note = tr|A0A378UI02|A0A378UI02_BERDE 6-carboxy-5,6,7,8-tetrahydropterin synthase OS=Bergeriella denitrificans OX=494 GN=queD PE=3 SV=1
MKITKIFTFDSSHMLDGHDGKCQNLHGHTYTLEITVSDGLIPNGAKSGMVMDFTDLKAIVKQAIIEPFDHAFIYDGSNPREQQIAALLEGWNMKTLRLPFRTTAEHMSIEMYGRLKKAGLNVCRIKLWETPTSCAEYEGDHP

SEQ ID NO: 18247 - protein, 148 aa, Bergeyella zoohelcum
  REGION 1..148: note = tr|K1M1H3|K1M1H3_9FLAO 6-carboxy-5,6,7,8-tetrahydropterin synthase OS=Bergeyella zoohelcum ATCC 43767 OX=883096 GN=HMPREF9699_00637 PE=3; SV = 1
MIRITKIFTFETAHVLYNYDGKCKNMHGHSYKLFVTVKGTPINDINHCKNGMVIDFGDIKSIVKEEIVDAWDHAVLVNAASPHVDLGKDLETRGHKVIFCPYQPTCENMLLDIAQKIQRRLPETVSLAYLKLHETENSYGEWFAEDNE

SEQ ID NO: 18248 - protein, 148 aa, Bergeyella zoohelcum
  REGION 1..148: note = tr|A0A380ZSH5|A0A380ZSH5_9FLAO 6-carboxy-5,6,7,8-tetrahydropterin synthase OS=Bergeyella zoohelcum OX=1015 GN=NCTC11661_01477 PE=3 SV=1
MIRITKIFTFETAHVLYNYDGKCKNMHGHSYKLFVTVKGTPINDINHCKNGMVIDFGDIKSIVKEEIVDAWDHAVLVNAASPHVDLGKDLETKGHKVIFCPYQPTCENMLLDIAQKIQRRLPETVSLAYLKLHETENSYGEWFAEDNE

SEQ ID NO: 18249 - protein, 282 aa, Bermanella marisrubri
  REGION 1..282: note = tr|Q1N6S7|Q1N6S7_9GAMM Uncharacterized protein; OS = Bermanella marisrubri OX=207949 GN=RED65_08994 PE=4 SV=1
MKLFVDNLTNVDVSYLDANRGLVGESWLTGIMLDGKLDQQSMICDFGIVKRNAKQWLDENIDHRLVIPSQMPGLHIEEHDTQITVRCPHPTGGEFVCTAPQQAFCFIDCDEINNQNVAEWLSKELSSTIPGDIANLTISLQNEMIGGAYYHYSHGLKKHDGNCQRIAHGHRSKIEIFVDGARQPELEKEWAQKWQDIYVGTLEDLHNTTSIHDIEHYHYRYEAPQGKFDLTLPTSVCYNMDSDTTVEQIARHIAKTLLESGHTVTVKAFEGVGKGAIAAYEQ

SEQ ID NO: 18250 - protein, 281 aa, Bermanella sp.
  REGION 1..281: note = tr|A0A1Y5DER4|A0A1Y5DER4_9GAMM Uncharacterized protein OS=Bermanella sp. 47_1433_sub80_T6 OX=1856278; GN = A9Q73_05075 PE=4 SV=1
MKLFVENLSNVDVSYLDAKRGLVGESWLAGLVLTGNLDNQSMICDFGIVKRNAKAWLDEHIDHRLVVPTQMQGLHISKHASLLTIKFPHPLGGEFVCSAPEQAFCLIDTDTINETTVATWLEQKLSDSIPGDIEKLNVKLDCELMGGAYYHYSHGLKKHDGNCQRIAHGHRSKIEIFIDGARQPELEKNWAKNWQDIYVGTSEDLHNQPTIEGIEHNHYRYEAPQGQFSLTLPKAACYDIKTDTTVEQIANHIATVLLESGHSVTVKAFEGVGKGAMATYE

SEQ ID NO: 18251 - protein, 141 aa, unidentified
  source 1..141: note = Bernardetia litoralis
  REGION 1..141: note = tr|I4AQV5|I4AQV5_BERLS 6-pyruvoyl-tetrahydropterin synthase OS=Bernardetia litoralis (strain ATCC 23117 / DSM 6794 / NBRC 15988 / NCIMB 1366 / Sio-4) OX=880071 GN=Fl eli_4042 PE=4 SV=1
MVYLCRKEYFCASHRLFNPAWSDEKNEEEFGICSNQYFHGHNFELIVKVKGKINPNTGCVLDLKKLGKLIRTEIIDKVDHKNLNIQVDFLKGKIPSCEIVIMEFWKILAPKILELSEKNAVLHSLTLFETEKNYVEYFGEE

SEQ ID NO: 18252 - protein, 135 aa, unidentified
  source 1..135: note = Bernardetia litoralis
  REGION 1..135: note = tr|I4AMN5|I4AMN5_BERLS 6-carboxy-5,6,7,8-tetrahydropterin synthase OS=Bernardetia litoralis (strain ATCC 23117 / DSM 6794 / NBRC 15988 / NCIMB 1366 / Sio-4) OX=88007 1 GN=Fleli_2867 PE=3 SV=1
MRVSVFRKEHFNAAHRLNNPNWSVEKNQEVFGKCNNEHFHGHNYNLIVQVTGEIDPETGYVVDMKWLSDLIQEHIANRFDHKNLNLEIPEFKELNPSAENIAVVIYNILRPKLNSNLDLKIKLYETERNFVECPA

SEQ ID NO: 18253 - protein, 154 aa, unidentified
  source 1..154: note = Unknown
  REGION 1..154: note = tr|M1T427|M1T427_9PROT Uncharacterized protein; OS = beta proteobacterium CB OX=543913 GN=D521_1209 PE=4 SV=1
MSAKQEAISITRRLEFDSGHRIPNHDGQCRHLHGHRYAIEVTLTGVIADHPGKADDGMVLDFGDIKRLTNQYVVEPWDHAFLVAKEDAGLVDYLNSIPNHKTVVMEHVPTVENLASAAFRVLQPVFEKAFDGRLKLASIRLYETPNCWADVSHP

SEQ ID NO: 18254 - protein, 369 aa, unidentified
  source 1..369: note = Unknown
  REGION 1..369: note = tr|A0A2T0XAY7|A0A2T0XAY7_9PROT 6-pyruvoyltetrahydropterin/6-carboxytetrahydropterin synthase OS=beta proteobacterium MWH-P2sevCIIIb OX=323426; GN = BCM14_3033 PE=4 SV=1
MEEQLLYVAAARFEAACQVDCLPAGHRSAKLHGHSYLGEVRVKLPLGWAEFPGAEVYALRVQLQQCVAPLDYSHLNTHLNEPTDENIARWIRKRLGGLPGGVPGIVAVGVQSTTESGVDLDASDHAHVWRRYVFQSAHQLPHVPADHKCGRMHGHGFEVILHANRDLGQQALSIDYDQLDALWAPIHAELDHACLNDIPGLENPTSENISAWIWVKLKPRLPELSWVTVYETAQCGAHFDGHHYRIWKEFTLDSAVQLKRAPDGDARRRIHGHTFTLRLHLHAPLDTVRGWTVDFGDVKEVFDPIFKQLDHQPLHEVLADSDSDTANIARYIKTLASAKIPEMDRIDLFETPGCGVILYWGELGPALPV

SEQ ID NO: 18255 - protein, 150 aa, unidentified
  source 1..150: note = Betaproteobacteria bacterium
  REGION 1..150: note = tr|A0A1F4BZL1|A0A1F4BZL1_9PROT 6-carboxytetrahydropterin synthase QueD; OS = Betaproteobacteria bacterium RIFCSPLOWO2_12_61_14; OX = 1797494 GN=A2W81_02840 PE=4 SV=1
MLITRRLEFDAGHRIPNHTSQCRHLHGHRYAIEITLSGDIITAEGQSEQGMVMDFSDVKRIANEKLVDAWDHAFLVYHGDRVVSDFLASLPEHKTVILDAVPTAENLAQIAFNILDPAYRDTYGNRLRLERVRLYETPNNWADCVRVANP

SEQ ID NO: 18256 - protein, 66 aa, unidentified
  source 1..66: note = Betaproteobacteria bacterium
  REGION 1..66: note = tr|A0A3D0LTB3|A0A3D0LTB3_9PROT 6-carboxytetrahydropterin synthase QueD (Fragment); OS = Betaproteobacteria bacterium OX=1891241 GN=DEP05_03095; PE = 4 SV=1
VAFLRTLPRHKTVTLDTIPTAENLAIHAFTLLDHAFSETYGARLHLERVRLYETPNNWADAVCGQF

SEQ ID NO: 18257 - protein, 140 aa, Bibersteinia trehalosi
  REGION 1..140: note = tr|A0A3R8MGG6|A0A3R8MGG6_BIBTR 6-carboxy-5,6,7,8-tetrahydropterin synthase; OS = Bibersteinia trehalosi OX=47735 GN=queD PE=3 SV=1
MHKIAKEFSFDMAHMLDGHDGKCQNLHGHTYKLQVEVCGELIESGAKNGMVIDFSDLKAIVKREILDQMDHAFIYDSTSERECQVAKLLTNLKSKNYGIPMRTTAENMAKYMFDKLSQAGLPVSLIRLWETPTSYCEYSE

SEQ ID NO: 18258 - protein, 140 aa, Bibersteinia trehalosi
  REGION 1..140: note = tr|M4R8G2|M4R8G2_BIBTR 6-carboxy-5,6,7,8-tetrahydropterin synthase; OS = Bibersteinia trehalosi USDA-ARS-USMARC-192 OX=1171377; GN = WQG_7700 PE=3 SV=1
MHKIAKEFSFDMAHMLDGHDGKCQNLHGHTYKLQVEVCGELIESGAKNGMVIDFSDLKAIVKREILDRMDHAFIYDSTSERECQVAKLLTDLKSKNYGIPMRTTAENMAKYMFDKLSQAGLPVSLIRLWETPTSYCEYSE

SEQ ID NO: 18259 - protein, 128 aa, Bilophila sp.
  REGION 1..128: note = tr|G1UYF1|G1UYF1_9DELT 6-carboxy-5,6,7,8-tetrahydropterin synthase OS=Bilophila sp. 4_1_30 OX=693988 GN=HMPREF0178_00298 PE=3 SV=1
MSRPFWKLTVRSEFCAAHALRHYQGKCEHLHGHNYAVEVVVKGYTLSQDTELLMDFGDLKGLLKQALEPLDHAYINDVPPFDAVNPSSENLARYIWNQMAPSLPETVKMYSVTVAEKGIQSATYMEEE

SEQ ID NO: 18260 - protein, 128 aa, Bilophila wadsworthia
  REGION 1..128: note = tr|E5Y639|E5Y639_BILWA 6-carboxy-5,6,7,8-tetrahydropterin synthase OS=Bilophila wadsworthia 3_1_6 OX=563192 GN=HMPREF0179_01652 PE=3 SV=1
MSRPFWKLTVRSEFCAAHALRHYQGKCEHLHGHNYAVEVVVKGYTLSQNTELLMDFGDLKALLKQALEPLDHAYINDVPPFDAVNPSSENLARYIWNQMAPSLPETVKMYSVTVAEKGIQSATYMEEE

SEQ ID NO: 18261 - protein, 121 aa, Biostraticola sp.
  REGION 1..121: note = tr|A0A4U2UQR4|A0A4U2UQR4_9ENTR 6-carboxy-5,6,7,8-tetrahydropterin synthase; OS = Biostraticola sp. BGMRC 2031 OX=2575567 GN=queD PE=3; SV = 1
MVTTLFKDFTFEAAHRLPHVPAGHKCGRLHGHSFTVRVEIEGPVDPHTGWVMDFADLKAAFNPILRQLDHYYLNDIPGLENPTSEILSRWIWTRLKPQLPQLSAITVKETCTAGCLYRGED

SEQ ID NO: 18262 - protein, 121 aa, Biostraticola tofi
  REGION 1..121: note = tr|A0A4R3Z0S1|A0A4R3Z0S1_9ENTR 6-carboxy-5,6,7,8-tetrahydropterin synthase; OS = Biostraticola tofi OX=466109 GN=EDC52_102564 PE=3 SV=1
MTTSLFKDFTFEAAHLLPHVPAGHKCGRLHGHSFLVRIEITGPVDPHTGWILDFADLKAAFKPVLDRLDHYYLNDIPGLENPTSEVLSQWIWQQLKPALPLLSAVQVKETCTAGCIYRGEV

SEQ ID NO: 18263 - protein, 142 aa, Bisgaardia hudsonensis
  REGION 1..142: note = tr|A0A4V6NQ85|A0A4V6NQ85_9PAST 6-carboxy-5,6,7,8-tetrahydropterin synthase OS=Bisgaardia hudsonensis OX=109472 GN=EV697_103113 PE=3 SV=1
MFKIAKEFSFDMAHLLDGHDGKCKNLHGHTYKLQVEVSGQLHSNGAKRGMVMDYADLKSIVKTHILDKMDHAFLYDLHSEKECQIAELLQRFDSKTFGLATRTTAEEIAKYIFDTLTSLGLSVSLIRLWETPTSYCEYNGNE

SEQ ID NO: 18264 - protein, 136 aa, Bizionia algoritergicola
  REGION 1..136: note = tr|A0A5D0QU06|A0A5D0QU06_9FLAO 6-carboxy-5,6,7,8-tetrahydropterin synthase OS=Bizionia algoritergicola OX=291187 GN=ES675_09215 PE=3 SV=1
MRVTVSRKAHFNAAHRLYRKDWPDQRNDAVFGKCNNPSFHGHNYDLIVSVTGEIDQETGYVLDVKILKDLIKSKIEDAFDHKNLNVDVPEFQDLNPTAENIVVVIFNKLRPHLAANLDLEITLYETPRNFVTYSGK

SEQ ID NO: 18265 - protein, 152 aa, Bizionia algoritergicola
  REGION 1..152: note = tr|A0A5D0R3P7|A0A5D0R3P7_9FLAO 6-carboxytetrahydropterin synthase OS=Bizionia algoritergicola OX=291187 GN=ES675_03440 PE=4 SV=1
MGNIRITKQFSFETGHALYGYDGKCKNVHGHSYKLSVTVIGKPISDSGNVKFGMVIDFGDLKKIVKTEIVDVFDHATVFNKNTPHVELAKELQVRGHNVLLVDYQPTSEMMVIDFADKIKSLLPSHIALHSLKLQETDTSFAEWYASDNKPL

SEQ ID NO: 18266 - protein, 149 aa, Bizionia argentinensis
  REGION 1..149: note = tr|G2EEL2|G2EEL2_9FLAO 6-carboxy-5,6,7,8-tetrahydropterin synthase OS=Bizionia argentinensis JUB59 OX=1046627 GN=BZARG_1113 PE=3 SV=1
MGNIRITKQFSFEAGHALYGYDGKCKNVHGHSYKLSVTVIGKPIEDPNNVKFGMVIDFGDLKKIVKSEIVDVFDHATVFNKNTPHVELAKELQDRDHSVLLVDYQPTSEMMVIDFAHKIKKHLPKHIALHSLRLSETDTSCAEWYASDN

SEQ ID NO: 18267 - protein, 136 aa, Bizionia argentinensis
  REGION 1..136: note = tr|G2EG36|G2EG36_9FLAO 6-carboxy-5,6,7,8-tetrahydropterin synthase OS=Bizionia argentinensis JUB59 OX=1046627 GN=BZARG_1865 PE=3 SV=1
MIVTVSRKAHFNAAHRLYRKDWSDEKNDTVFGKCNNPSFHGHNYDLTVSVTGEIDQETGYVLDVKVLKDLIKTEIEDAFDHKNFNLDVPEFKDLNPTAENIAVVIFNKLKPKLLSNLDLEITLYETPRNFVTYSGK

SEQ ID NO: 18268 - protein, 136 aa, Bizionia echini
  REGION 1..136: note = tr|A0A1I5D9I3|A0A1I5D9I3_9FLAO 6-carboxy-5,6,7,8-tetrahydropterin synthase OS=Bizionia echini OX=649333 GN=SAMN04487989_10777 PE=3 SV=1
MKVTVSRKAHFNAAHRLYRKDWSDEKNDQIFGKCNNPNFHGHNYDMIVSVTGDIDPETGYVIDVKILKDLIKTEIEDAFDHKNLNLDVPEFQNLNPTAENIVVVIFNKLRKHLAKTLDLEVTLYETPRNFVTYSGK

SEQ ID NO: 18269 - protein, 152 aa, Bizionia echini
  REGION 1..152: note = tr|A0A1I4ZDG8|A0A1I4ZDG8_9FLAO 6-pyruvoyltetrahydropterin/6-carboxytetrahydropterin synthase OS=Bizionia echini OX=649333; GN = SAMN04487989_101746 PE=4 SV=1
MGNIRITKQFSFETGHALYGYDGKCKNVHGHSYKLSVTVIGKPIEDTNNVKFGMVIDFGDLKKIVKTEIVDVFDHATVFNKNTPHVELAKELQDRGHNVLLVNYQPTSEMMVIDFAEKIKSFLPSHIALHSLKLQETDTSFAEWYASDNESL

SEQ ID NO: 18270 - protein, 136 aa, Bizionia myxarmorum
  REGION 1..136: note = tr|A0A5D0R7U5|A0A5D0R7U5_9FLAO 6-carboxy-5,6,7,8-tetrahydropterin synthase OS=Bizionia myxarmorum OX=291186 GN=ES674_09385 PE=3 SV=1
MKVTVSRKAHFNAAHRLYRKDWSDEKNDAVFGKCNNPNFHGHNYDLIVSVTGEIDPETGYVMDVKVLKDLIKLEVEDAFDHKNLNVDVPEFQDLNPTAENIVVVIFNKLRSHLSEKLEMEVTLYETPRNFVTYSGQ

SEQ ID NO: 18271 - protein, 149 aa, Bizionia myxarmorum
  REGION 1..149: note = tr|A0A5D0RAX9|A0A5D0RAX9_9FLAO 6-carboxy-5,6,7,8-tetrahydropterin synthase OS=Bizionia myxarmorum OX=291186 GN=ES674_02430 PE=3 SV=1
MENIRITKQFSFETGHALYGYDGKCKNVHGHSYKLSVTVIGKPIADSNNVKFGMVIDFGDLKKIVKTEIVDVFDHATVFNKNTPHVELAKELQDRGHCVLLVDYQPTSEMMVIDFAKKIKTYLPTHIALHSLKLSETDTSFAEWYACDN

SEQ ID NO: 18272 - protein, 136 aa, Bizionia paragorgiae
  REGION 1..136: note = tr|A0A1H4DGG5|A0A1H4DGG5_9FLAO 6-pyruvoyltetrahydropterin/6-carboxytetrahydropterin synthase OS=Bizionia paragorgiae OX=283786; GN = SAMN04487990_1325 PE=4 SV=1
MRVTVSRKAHFNAAHRLHNKAWSDEKNKAVYGLCNNPNYHGHNYEIIASVTGNIDEETGYVIDIKTLKNIIKLEVEDAFDHKNLNLDVPEFKNVIPTAENIVVVIHNKIKNKLKEGLDLEVTLYETPRNFVSYAGE

SEQ ID NO: 18273 - protein, 149 aa, Bizionia paragorgiae
  REGION 1..149: note = tr|A0A1H4CEG4|A0A1H4CEG4_9FLAO 6-carboxy-5,6,7,8-tetrahydropterin synthase OS=Bizionia paragorgiae OX=283786 GN=SAMN04487990_11944 PE=3 SV=1
MSNIRITKQFSFETGHALYGYDGKCKNVHGHSYKLSVTVIGKPISDNTNVKYGMVIDFGDLKKIVKEEIVDVFDHATVFNKNTPHVELAKELQKRDHSVLLVDYQPTSEMMVIDFAEKIKQRLPENIKLHALRLQETDSSYAEWFASDN

SEQ ID NO: 18274 - protein, 136 aa, Bizionia saleffrena
  REGION 1..136: note = tr|A0A5D0QMY4|A0A5D0QMY4_9FLAO 6-carboxy-5,6,7,8-tetrahydropterin synthase OS=Bizionia saleffrena OX=291189 GN=ES676_13150 PE=3 SV=1
MRVTVSRKAHFNAAHRLYRKDWTDEKNDAVFGLCNNPNFHGHNYDLIASVTGDIDTETGYVIDIKTLKDIIKAEVEDAFDHKNLNLDVPEFKELIPTAENIVVVIYNKIKNKLKEGLDLEVTLYETPRNFVSYAGQ

SEQ ID NO: 18275 - protein, 149 aa, Bizionia saleffrena
  REGION 1..149: note = tr|A0A5D0QZM5|A0A5D0QZM5_9FLAO 6-carboxy-5,6,7,8-tetrahydropterin synthase OS=Bizionia saleffrena OX=291189 GN=ES676_07975 PE=3 SV=1
MSNIRITKLFSFETGHALYGYDGKCKNVHGHSYKLSVTVIGKPIKDNSNVKFGMVIDFGDLKKIVKEEIVDVFDHATVFNKNTPHVELARELQKRDHNVLLVDYQPTSEMMVIDFAQKIKQRLPENIQLYALKLQETDSSYAEWYAADN

SEQ ID NO: 18276 - protein, 127 aa, unidentified
  source 1..127: note = Blastocatellia bacterium
  REGION 1..127: note = tr|A0A353CC41|A0A353CC41_9BACT 6-carboxy-5,6,7,8-tetrahydropterin synthase; OS = Blastocatellia bacterium OX=2052146 GN=queD PE=3 SV=1
MAGFYEVMIERDFSSAHQLRGYKGKCENLHGHNYKVEIYARGDELNNIGLLIDFGDLKKAADEIVAYLDHRNLNELPPFDEELNPSAENIARYFVEYLNSRVGDKRVNVYKVRCFETPTSIATYQID

SEQ ID NO: 18277 - protein, 126 aa, unidentified
  source 1..126: note = Blastocatellia bacterium
  REGION 1..126: note = tr|A0A3D5SM45|A0A3D5SM45_9BACT 6-carboxy-5,6,7,8-tetrahydropterin synthase; OS = Blastocatellia bacterium OX=2052146 GN=queD PE=3 SV=1
MPGQFEVMIERNFSSAHQLRGYKGKCENLHGHNYRIEIYARGRELDNIGLLVDFVELKAAADEVVQYLDHRNINELDPFVELQPSAENLAKYILERVATKVGDERVQIYKVRCFETPTSVATYEVV

SEQ ID NO: 18278 - protein, 117 aa, Blastochloris viridis
  REGION 1..117: note = tr|A0A0H5BFR0|A0A0H5BFR0_BLAVI 6-carboxy-5,6,7,8-tetrahydropterin synthase; OS = Blastochloris viridis OX=1079 GN=queD PE=3 SV=1
MKITQVFTFEAAHRLPKVPETHRCHRMHGHSYRVELRLEGPVDRETGFVVDFFDIEAAFAPLHQQLDHRCLNDVAGLDNPTAENIAIWIWDRVRPALPQTVAVVVYETPTCWAEYQG

SEQ ID NO: 18279 - protein, 122 aa, Blastococcus sp.
  REGION 1..122: note = tr|A0A4Y9PAT8|A0A4Y9PAT8_9ACTN Uncharacterized protein OS=Blastococcus sp. CT_GayMR19 OX=2559608; GN = E4P39_05860 PE=4 SV=1
MYETGTALQVRAFHVMPGMPPPEGERHSHDYRLDVVVRRDDLDERGMVVDLDLLDQALRDAAARVEGVDLESVVPAEAVTVEVFARWLHDQLAASLGRLPGTTLAVRVWESSVAFGGYSSSL

SEQ ID NO: 18280 - protein, 132 aa, Blastococcus sp.
  REGION 1..132: note = tr|A0A366ZW59|A0A366ZW59_9ACTN 6-carboxytetrahydropterin synthase OS=Blastococcus sp. TF02-9 OX=2250576 GN=DQ239_01355 PE=4 SV=1
MFTLTVRDSMMIAHSFTGAVFGPAQRLHGATYVVDATFRRSELDEDGLVVDIGAAGTALHAVLGELTYRNLDDDPDLAGTNTTTEALARVVADRLAARIGDGALCPGGAGLEGLTVTLHESHVAWASYERGL

SEQ ID NO: 18281 - protein, 124 aa, Blastomonas sp.
  REGION 1..124: note = tr|A0A0N1LFH7|A0A0N1LFH7_9SPHN 6-carboxy-5,6,7,8-tetrahydropterin synthase OS=Blastomonas sp. AAP25 OX=1523416 GN=IP68_13780 PE=3 SV=1
MFELSKQFRFDAAHTLDRSINTESSRRIHGHSYRAEVTVRGCPDPVTGMVVDLGLLERIMDDARDALDHRFLDEINDLGPATMENLSRWIWDRLSPEVGNLSKVSVYRDSSGEACSYWGEEVPA

SEQ ID NO: 18282 - protein, 159 aa, unidentified
  source 1..159: note = Blastopirellula cremea
  REGION 1..159: note = tr|A0A368KU24|A0A368KU24_9PLAN 6-carboxytetrahydropterin synthase OS=Blastopirellula cremea OX=1031537 GN=DTL42_12955 PE=4 SV=1
MSLNIMRRIKFCAGHRLHKHGGKCEFFHGHNYVADFHVTGDHVDDVGRVIDFAELKRLFKGWIDEHWDHAFLLNEADENGIHALKQVVPCKMYILPANPTAEGMATYLLESVCPKLLKGTGVTCVKVAIWETEDSFAEASIDTPSRVQEQEEWSEPMVS

SEQ ID NO: 18283 - protein, 161 aa, unidentified
  source 1..161: note = Blastopirellula cremea
  REGION 1..161: note = tr|A0A368KQL2|A0A368KQL2_9PLAN 6-pyruvoyl tetrahydropterin synthase family protein; OS = Blastopirellula cremea OX=1031537 GN=DTL42_17545 PE=4; SV = 1
MRKRHWVRLTKDHLVFSAGHFITFGGNICERIHGHNYRVEVELHGPLDENHYVVDFIALRDSLQAIVNGLDHRMLLPTRHPSIKLVMDEKEVTASYEDRRWVFPRTECVLLDIPNTTTELLAEWIGERLLVALAEKLQWKPEAMKVGVDENHGQWGYCEFS

SEQ ID NO: 18284 - protein, 167 aa, Blastopirellula marina
  REGION 1..167: note = tr|A3ZTI8|A3ZTI8_9PLAN 6-pyruvoyl tetrahydrobiopterin synthase OS=Blastopirellula marina DSM 3645 OX=314230 GN=DSM3645_19683 PE=4 SV=1
MSFEGDGKMSLVIMRRIKFCAGHRLYKHGGKCEFFHGHNYVADFYVTADEVDDVGRVIDFADLKAKFKGWLDEHWDHGFLLSEQDENGINAIKQVVPCKYFVMPYNPTAENMARYLLDYVCPELLDQSNVRPVKVVIWETEEAFAEARLSGEVGETSSASLSSVTVD

SEQ ID NO: 18285 - protein, 158 aa, Blastopirellula marina
  REGION 1..158: note = tr|A0A2S8G7S0|A0A2S8G7S0_9PLAN Uncharacterized protein OS=Blastopirellula marina OX=124 GN=C5Y83_00790; PE = 4 SV=1
MIIQKQYKFYAAHRNEELQDKCRNLHGHRYGIVCHFDVQRTGSYSTLFSDFDDKIGPFLKDFYDHGMLINVNDPLFATLKQHMEIHGEDLKLREFDGPTSVENLAHQLFTEITQMGFDLVRLDVQETDTSVVCYDRNDWERDNEAQVFSKSKPVKATS

SEQ ID NO: 18286 - protein, 170 aa, Blastopirellula sp.
  REGION 1..170: note = tr|A0A2G2JBB6|A0A2G2JBB6_9PLAN 6-pyruvoyl tetrahydropterin synthase OS=Blastopirellula sp.; OX = 2024826 GN=COA78_31425 PE=4 SV=1
MALQEYSIRRRIEIDTAHRVPDHGSKCFNLHGHRYVINAECRGPVIVSGEQNGMVMDFSFLKTCMMDVIYDACDHGTILFKDDPLCATFLKVPADAPVGECIMDHSNLMEGMKLLLLPVVPTAENLAQFWHAKLVERIESFFRNRSENAPRLHCIEVAETPNCVATFPAV

SEQ ID NO: 18287 - protein, 159 aa, Blastopirellula sp.
  REGION 1..159: note = tr|A0A2G2JHB2|A0A2G2JHB2_9PLAN 6-pyruvoyl tetrahydrobiopterin synthase OS=Blastopirellula sp.; OX = 2024826 GN=COA78_27235 PE=4 SV=1
MSMVIMRRIKFCAGHRLYKHGGKCEFFHGHNYVADFYVTADEVDSVGRVIDFADLKKMFKGWIDEHWDHGFILNEDDENGINAIKQVIPCKYYILPYNPTAESMARYLLENVCVKLLEGSSVRPCKVVIWETEEAFAEARMSCASDEVMVSSFAGSADE

SEQ ID NO: 18288 - protein, 141 aa, Blattabacterium cuenoti
  REGION 1..141: note = tr|M4ZU16|M4ZU16_9FLAO 6-pyruvoyltetrahydropterin synthase OS=Blattabacterium cuenoti BPAA OX=1229512; GN = ygcM PE=4 SV=1
MYKKNTIATINRKGYFSAAHRLYNNHWNYKKNIEIFGKCAHLNYHGHNYEYIVSITGKIDPETGFVFNLQKLKSILSDEIEKLFDHKNINLDIIEFSSINPTIENIVIFMWNRINKKISPDLKLKITLYETKNNFVEYDGK

SEQ ID NO: 18289 - protein, 136 aa, Blattabacterium cuenoti
  REGION 1..136: note = tr|A0A224AKI2|A0A224AKI2_9FLAO 6-pyruvoyl-tetrahydropterin synthase OS=Blattabacterium cuenoti STAT OX=1457030 GN=sscR PE=4 SV=1
MIATVNRKGYFSSSHRLYNNHWDFKKNIEMFGKCANFNYHGHNYEYIVGITGEIDPKTGFVFNLQKLKCILFDEIEKLFDHKNINLDIKEFSFINPTIENIVVFMWNRINSKIPSDLKLKITLYETVNNFVEYDGK

SEQ ID NO: 18290 - protein, 136 aa, unidentified
  source 1..136: note = Blattabacterium punctulatus
  REGION 1..136: note = tr|A0A2U9QBC8|A0A2U9QBC8_9FLAO 6-carboxytetrahydropterin synthase OS=Blattabacterium punctulatus OX=164514 GN=DM805_00910 PE=4 SV=1
MKVTISRKGHFSAAHRLYNPHWDHNKNIEEFGKCAYINYHGHNYEYIVSITGEISSKTGFVFNIQKLKNLIREEIDIIFDHKNINVDIKEFYDVNPTMENIVIFLWNKIKKKISSNLNLKITLYETKNNFAEYDGS

SEQ ID NO: 18291 - protein, 136 aa, unidentified
  source 1..136: note = Blattabacterium punctulatus
  REGION 1..136: note = tr|A0A2U9Q9J4|A0A2U9Q9J4_9FLAO 6-carboxytetrahydropterin synthase OS=Blattabacterium punctulatus OX=164514 GN=DM780_00910 PE=4 SV=1
MKVTISRKGHFSAAHRLYNPHWDHNKNIKEFGKCAYINYHGHNYEYIVSITGEINSKTGFVFNIQKLKNLIHKEIDIFFDHKNINVDIEEFYDVNPTMENIVIFLWNKIKKKISSNLNLKITLYETKNNFAEYDGS

SEQ ID NO: 18292 - protein, 136 aa, Blattabacterium sp.
  REGION 1..136: note = tr|G7SQB5|G7SQB5_9FLAO 6-pyruvoyl tetrahydrobiopterin synthase OS=Blattabacterium sp. (Mastotermes darwiniensis) str. MADAR OX=1074889 GN=sscR; PE = 4 SV=1
MKATISRKGYFSAAHKLYNNHWNRHKNIETFGKCAYLNYHGHNYEYIVSITGEVDPETGFVFSIQKLKNLLREEIEVIFDHKNINLDIKEFSVINPTTENIVIFIWNRINQKINPHLDLKITLYETTKNFAEYNGS

SEQ ID NO: 18293 - protein, 136 aa, Blattabacterium sp.
  REGION 1..136: note = tr|G8LRL2|G8LRL2_9FLAO 6-carboxy-5,6,7,8-tetrahydropterin synthase; OS = Blattabacterium sp. (Cryptocercus punctulatus) str. Cpu; OX = 1075399 GN=ygcM PE=3 SV=1
MKVTINRKGHFSAAHRLYNPHWDHNKNIEEFGKCAYINYHGHNYEYIVSITGKINSKTGFVFSIQKLKNILREEINILFDHKNINVDIEEFYDVNPTMENIVIFLWQKIKKKISSNLNLKITLYETKNNFAEYDGS

SEQ ID NO: 18294 - protein, 149 aa, Blautia luti
  REGION 1..149: note = tr|A0A564VV75|A0A564VV75_9FIRM 6-carboxy-5,6,7,8-tetrahydropterin synthase OS=Blautia luti OX=89014 GN=RSSSTS7063_03016 PE=3 SV=1
MYQLKTEADFDSAHFLSGYTGKCSNIHGHRWHVEIEIESRKLEKNGQERGMLVDFGDLKKDLRELADSMDHTLIYEENTLRPKTLEALDEEGFHLVKVPFRPTAENFSEYFFRKMEEKGYPVKRAVVYETPNNCAAYRETEEETEVVWL

SEQ ID NO: 18295 - protein, 149 aa, unidentified
  source 1..149: note = Blautia obeum
  REGION 1..149: note = tr|A0A367FVI6|A0A367FVI6_9FIRM 6-carboxy-5,6,7,8-tetrahydropterin synthase OS=Blautia obeum OX=40520 GN=queD PE=3 SV=1
MYQLKTEADFDSAHFLSGYTGKCSNIHGHRWHVEIEIESQKLEKNGQERGMLVDFGDLKKDLRELADSMDHTLIYEENTLRPKTLEALDEEGFHLVKVPFRPTAENFSEYFFRKMEEKGYPVKRAVVYETPNNCAAYRETEEETEAVWL

SEQ ID NO: 18296 - protein, 139 aa, unidentified
  source 1..139: note = Blautia obeum
  REGION 1..139: note = tr|A0A411ZLH2|A0A411ZLH2_9FIRM 6-carboxy-5,6,7,8-tetrahydropterin synthase OS=Blautia obeum OX=40520 GN=queD PE=3 SV=1
MYILKTEASFDSAHFLAGYDGKCSNLHGHRWKIILEVQAEELKDDIQHKGMYVDFGELKKDLRDLADSMDHALIIEKNSLKETTLEALKSENFRIIELDFRPTAENMAKYFYEKIKKLGYNMKAVTVYETPVNSATYME

SEQ ID NO: 18297 - protein, 73 aa, Blautia sp.
  REGION 1..73: note = tr|A0A416EJK1|A0A416EJK1_9FIRM Conjugal transfer protein OS=Blautia sp. AF34-10 OX=2292968 GN=DWZ60_14645; PE = 4 SV=1
MYMAFFSSAITTLKTLVVAIGAGLGVWGVVNLLEGYGNDNPGAKSQGIKQLMAGAGIMLLGTTLIPQLATLFS

SEQ ID NO: 18298 - protein, 70 aa, Blautia sp.
  REGION 1..70: note = tr|A0A416EF94|A0A416EF94_9FIRM Site-specific integrase (Fragment) OS=Blautia sp. AF34-10 OX=2292968; GN = DWZ60_06485 PE=4 SV=1
KTLEGFEGFHFHQLRHTYTSNLLANGAAPKDVQELLGHSDVSTTMNVYAHSTRDAKRKSVRLLDKVVGND

SEQ ID NO: 18299 - protein, 158 aa, unidentified
  source 1..158: note = Unknown
  REGION 1..158: note = tr|A0A1U9VD93|A0A1U9VD93_9RALS 6-carboxytetrahydropterin synthase QueD OS=blood disease bacterium A2-HR MARDI OX=1944648 GN=B0B51_00270 PE=4 SV=1
MTKTVSITRRLEFDAGHRIPGHAGQCRNLHGHRYQLELTLTGEVLHNDKATDDGMILDFGDVKTLATKHLVELWDHAFLVYRGDTKLVEFLDGMEGGHKTVVLDDVPTVENLAQIAFDILEPVFRNVYGHHLRLSKLVLYETPNCWADVKLARPHEQD

SEQ ID NO: 18300 - protein, 158 aa, unidentified; identical to SEQ ID NO: 18299
  source 1..158: note = Unknown
  REGION 1..158: note = tr|G2ZJ29|G2ZJ29_9RALS Putative 6-pyruvoyl tetrahydrobiopterin synthase (PtpS) (PTP synthase); OS = blood disease bacterium R229 OX=741978 GN=BDB_20065; PE = 4 SV=1

SEQ ID NO: 18301 - protein, 125 aa, Bogoriella caseilytica
  REGION 1..125: note = tr|A0A3N2BD53|A0A3N2BD53_9MICO 6-pyruvoyltetrahydropterin/6-carboxytetrahydropterin synthase OS=Bogoriella caseilytica OX=56055 GN=EDD31_1549; PE = 4 SV=1
MFSLTVRDHMMIAHSLPHPAFGPAQGLHGATFVVELSIRRAELDEAGIVIDIGEATGMLKDALADLDYSNLDDHPELTGTLTTTEHLARFIAERIATRLQGGPYAGLDVTLREHPDAWASYSREL

SEQ ID NO: 18302 - protein, 185 aa, unidentified
  source 1..185: note = Bombella intestini
  REGION 1..185: note = tr|A0A1S8GNE5|A0A1S8GNE5_9PROT 6-pyruvoyl tetrahydropterin synthase OS=Bombella intestini OX=1539051; GN = AL01_08630 PE=4 SV=1
MSDITRTELIFTRRFCMGHRLISGCSERCAIPHGHNEYVTVTLVPGPNAPQQNQRLDGHSNMLLPFAEAKGRWHRFIDERMDHSFQLSESDPLLNWFAEHEPQRLDRLVVTPGDPTTELLAALLMSKLQAFLTAQGGLLAPASLEIKETPTNTVRLHGDPALYLPLVDRPEDQCWWHRADDTTRD

SEQ ID NO: 18303 - protein, 151 aa, unidentified
  source 1..151: note = Bordetella ansorpii
  REGION 1..151: note = tr|A0A157SXE2|A0A157SXE2_9BORD 6-pyruvoyl tetrahydrobiopterin synthase OS=Bordetella ansorpii; OX = 288768 GN=SAMEA3906486_05343 PE=4 SV=1
MISITRRLEFDAGHRIPDHRSQCRNLHGHRYVLEITLCGDIVQAPGESDNGMLMDFSEIKSIAQAQLVNVWDHAFLVYSGDEAVRNFLDTLPGHKTVVLDRIPTVENLAAIAFETLAPHYHGHYGHALRLQRVRLYETPNCWADCDGTASP

SEQ ID NO: 18304 - protein, 151 aa, unidentified
  source 1..151: note = Bordetella ansorpii
  REGION 1..151: note = tr|A0A157RAP7|A0A157RAP7_9BORD 6-pyruvoyl tetrahydrobiopterin synthase OS=Bordetella ansorpii; OX = 288768 GN=SAMEA1982600_04575 PE=4 SV=1
MISITRRLEFDAGHRIPDHRSQCRNLHGHRYVLEITLCGDVVQAPGESDNGMLMDFSEIKSIAQAQLVNVWDHAFLVYSGDEAVRNFLDTLPGHKTVVLDRIPTVENLAAIAFETLAPHYHGHYGHALRLQRVRLYETPNCWADCDGAAKP

SEQ ID NO: 18305 - protein, 148 aa, Bordetella avium
  REGION 1..148: note = tr|Q2KZU5|Q2KZU5_BORA1 Uncharacterized protein (Fragment) OS=Bordetella avium (strain 197N) OX=360910; GN = BAV2020 PE=4 SV=1
VIAVTRKLEFDAGHRIPDHRSQCRNLHGHRYVLEITLSGDVVEAPGQSDTGMVMDFSEIKHIAKTHIVDVWDHAFLVYEGDTAVREFLATLPGHKTVVLDRIPTAENLAAIIFARLAPHYQSAYGNALRLSRVRLYETPNCWADCDGH

SEQ ID NO: 18306 - protein, 157 aa, unidentified
  source 1..157: note = Bordetella bronchialis
  REGION 1..157: note = tr|A0A193FXR3|A0A193FXR3_9BORD 6-carboxytetrahydropterin synthase QueD OS=Bordetella bronchialis OX=463025 GN=BAU08_15425 PE=4 SV=1
MNSPTRAAPGTISVTRRLEFDAGHRIPDHRSQCRNMHGHRYVLEVTLEGQVIDAPGASDNGMVMDFSDIKAIASEHLVDRWDHAFLVYAGDEAVRGFLESLPGHKTVVLDRIPTVENLARIAFDILRPHYHRQFGGDLRLARVRLYETPNCWADCEG

SEQ ID NO: 18307 - protein, 147 aa, Bordetella bronchiseptica
  REGION 1..147: note = tr|A0A0H3LQA6|A0A0H3LQA6_BORBR 6-carboxy-5,6,7,8-tetrahydropterin synthase OS=Bordetella bronchiseptica (strain ATCC BAA-588 / NCTC 13252 / RB50); OX = 257310 GN=BB3076PE=3 SV=1
MISVTRRLEFDAGHRIPDHNSQCRNLHGHRYVLEVTLSGDVVQAPGASDNGMLMDFSEIKRIARTHIVDVWDHAFLVYEGDHAVRGFLDTLPDHKTVVLDRIPTAENLASIIFATLAPHYHGHYGADLRLTRVRLYETPNCWADCGS

SEQ ID NO: 18308 - protein, 147 aa, Bordetella bronchiseptica; identical to SEQ ID NO: 18307
  REGION 1..147: note = tr|A0A3T0NYK1|A0A3T0NYK1_BORBO 6-carboxy-5,6,7,8-tetrahydropterin synthase OS=Bordetella bronchiseptica OX=518 GN=queD PE=3 SV=1

SEQ ID NO: 18309 - protein, 147 aa, unidentified
  source 1..147: note = Bordetella flabilis
  REGION 1..147: note = tr|A0A193GC63|A0A193GC63_9BORD 6-carboxy-5,6,7,8-tetrahydropterin synthase OS=Bordetella flabilis OX=463014 GN=BAU07_11270 PE=3 SV=1
MISVTRRLEFDAGHRIPDHRSQCRNMHGHRYVLEVTLAGDVVNVPGASDNGMVMDFSDIKAIAREHVVDKWDHAFLVFAGDTAVRAFLESLPDHKTVVLDRIPTVENLARIAFDTLFPHYHGQYGGDLRLVRVRLYETPNCWADCEG

SEQ ID NO: 18310 - protein, 201 aa, unidentified
  source 1..201: note = Bordetella genomosp.
  REGION 1..201: note = tr|A0A261S0U3|A0A261S0U3_9BORD 6-carboxytetrahydropterin synthase QueD OS=Bordetella genomosp. 10 OX=1416804 GN=CAL29_23710 PE=4 SV=1
MLIRKLFKFENAHIVRGCSTRRCSHSVHGHSYKVELLLEAHALDRGQMVYDFGLLKRGARDLIDAFDHAVTLWSEDDPAYVAAMQQHSERWIVLPVSPSAEQFSRVIFRLVDAVLAQTDMANGEADVGLHSVIVHETETGYAQCFREDVENPYMGTIDLRDITFSAAISREWGDPDLFERLKLGKLRAPASHESISDAAIT

SEQ ID NO: 18311 - protein, 148 aa, unidentified
  source 1..148: note = Bordetella genomosp.
  REGION 1..148: note = tr|A0A261SEK7|A0A261SEK7_9BORD 6-carboxy-5,6,7,8-tetrahydropterin synthase OS=Bordetella genomosp. 1 OX=1395607 GN=queD PE=3 SV=1
MISVTRRLEFDAGHRIPDHRSQCRNLHGHRYVLELTLTGDIVQAPGESDNGMLMDFSEIKSIAKQHVVDVWDHAFLVYEGDSAVRAFLDTLPGHKTVVLDRIPTAENLATIIFGILAPHYHGHYGADLRLTRVRLYETPNCWADCTGA

SEQ ID NO: 18312 - protein, 148 aa, Bordetella hinzii
  REGION 1..148: note = tr|A0A0H4WJG3|A0A0H4WJG3_9BORD 6-carboxy-5,6,7,8-tetrahydropterin synthase OS=Bordetella hinzii OX=103855 GN=queD PE=3 SV=1
MISVTRRLEFDAGHRIPDHRSQCRNLHGHRYVLEITLTGDVVQTPGQSDTGMVMDFSDIKHIAKTHVVDVWDHAFLVYEGDTAVRDFLATLPGHKTVVLDRIPTAENLAAIIFDQLAPHYQDAYGHHLRLARVRLFETPNCWADCDGA

SEQ ID NO: 18313 - protein, 148 aa, Bordetella holmesii
  REGION 1..148: note = tr|A0A158M6N2|A0A158M6N2_9BORD 6-carboxy-5,6,7,8-tetrahydropterin synthase OS=Bordetella holmesii CDC-H585-BH OX=1331206 GN=queD PE=3 SV=1
MISVTRRLEFDAGHRIPDHRSQCRNLHGHRYVLELTLTGDVVQAPGQSDNGMVMDFSDIKHIAKTHLVDIWDHAFLVYEGDAAVRDFLASLPDHKTVILDRIPTAENLAAVIFGILAPHYQNTYGHHLRLSRVRLFETPNCWADCDGN

SEQ ID NO: 18314 - protein, 147 aa, Bordetella parapertussis; identical to SEQ ID NO: 18307
  REGION 1..147: note = tr|Q7W9V0|Q7W9V0_BORPA 6-carboxy-5,6,7,8-tetrahydropterin synthase OS=Bordetella parapertussis (strain 12822 / ATCC BAA-587 / NCTC 13253); OX = 257311 GN=BPP1652 PE=3 S V=1

SEQ ID NO: 18315 - protein, 147 aa, Bordetella parapertussis
  REGION 1..147: note = tr|K0MFC1|K0MFC1_BORPB 6-carboxy-5,6,7,8-tetrahydropterin synthase OS=Bordetella parapertussis (strain Bpp5) OX=1208660 GN=BN117_2811 PE=3; SV = 1
MISVTRRLEFDAGHRIPDHNSQCRNLHGHRYVLEVTLSGDVVQAPGASDNGMLMDFSEIKRIARTHIVDVWDHAFLVYEGDHAVRDFLDTLPDHKTVVLDRIPTAENLASIIFATLAPHYHGHYGADLRLTRVRLYETPNCWADCGS

SEQ ID NO: 18316 - protein, 147 aa, Bordetella pertussis
  REGION 1..147: note = tr|A0A0E7U7K1|A0A0E7U7K1_BORPT 6-carboxy-5,6,7,8-tetrahydropterin synthase OS=Bordetella pertussis OX=520 GN=queD PE=3 SV=1
MISVTRRLEFDAGHRIPDHNSQCRNLHGHRYVLEVTLSGDVVQAPGASDNGMLMDFSEIKRIARAHIVDVWDHAFLVYEGDHAVRGFLDTLPDHKTVVLDRIPTAENLASIIFATLAPHYHGHYGADLRLTRVRLYETPNCWADCGS

SEQ ID NO: 18317 - protein, 147 aa, Bordetella pertussis; identical to SEQ ID NO: 18316
  REGION 1..147: note = tr|A0A171JVR1|A0A171JVR1_BORPT 6-carboxy-5,6,7,8-tetrahydropterin synthase OS=Bordetella pertussis 2356847 OX=1331248 GN=queD PE=3 SV=1

SEQ ID NO: 18318 - protein, 147 aa, Bordetella petrii
  REGION 1..147: note = tr|A9IPG5|A9IPG5_BORPD 6-carboxy-5,6,7,8-tetrahydropterin synthase OS=Bordetella petrii (strain ATCC BAA-461 / DSM 12804 / CCUG 43448); OX = 340100 GN=Bpet2601 PE=3 SV= 1
MISVTRRLEFDAGHRIPDHRSQCRNLHGHRYVLEVTLEGDVADAPGASHNGMLMDFSEIKAIAKRHIVDPWDHAFLVYRDDAAVRGFLDTLPGHKTVVLDCIPTAENLARVIFAALAPHYHGHYGAQLRLSRVRLYETPNCWADCSG

SEQ ID NO: 18319 - protein, 148 aa, unidentified
  source 1..148: note = Bordetella pseudohinzii
  REGION 1..148: note = tr|A0A0J6C0Z1|A0A0J6C0Z1_9BORD 6-carboxy-5,6,7,8-tetrahydropterin synthase OS=Bordetella pseudohinzii OX=1331258 GN=ERS370011_00317 PE=3 SV=1
MISVTRRLEFDAGHRIPDHRSQCRNLHGHRYVLEITLTGDVVQTPGQSDTGMVMDFSDIKHIAKTHVVDVWDHAFLVYEGDTAVRDFLATLPGHKTVVLDRIPTAENLAAIIFDLLAPHYQDAYGHHLRLTRVRLYETPNCWADCDGA

SEQ ID NO: 18320 - protein, 147 aa, Bordetella sp.
  REGION 1..147: note = tr|A0A0S1XXM7|A0A0S1XXM7_9BORD 6-carboxy-5,6,7,8-tetrahydropterin synthase OS=Bordetella sp. N OX=1746199 GN=ASB57_05650 PE=3 SV=1
MISVTRRLEFDAGHRIPDHRSQCRNMHGHRYVLEVTLQGDVVNTPGSSDNGMLMDFSEIKAIGKKELVDRWDHAFLVYSGDEAVLNFLQSLPGHKTVVLDRIPTVENLVRIAFDTLAPHYHSHYGLDLRLTRVRLYETPNCWADCNG

SEQ ID NO: 18321 - protein, 152 aa, Bordetella sp.
  REGION 1..152: note = tr|A0A2V1K224|A0A2V1K224_9BORD 6-carboxytetrahydropterin synthase QueD OS=Bordetella sp. 3d-2-2 OX=2175229 GN=DD235_03830 PE=4 SV=1
MLTITRKLEFDAGHRIPDHGSQCRNLHGHRYVLEITLRGHINDTPGASDRGMVMDFADVKALATTHLVAIWDHAFLVYEGDTRVREFLASMPDHKTVVLTRIPTVENLAVEAFRILAAVYDVRYGDALRLARVRLYETPNCWADVDASDLQG

SEQ ID NO: 18322 - protein, 148 aa, Bordetella trematum
  REGION 1..148: note = tr|A0A157R249|A0A157R249_9BORD 6-carboxy-5,6,7,8-tetrahydropterin synthase OS=Bordetella trematum OX=123899 GN=SAMEA3906487_03556 PE=3 SV=1
MISVTRKLEFDAGHRIPDHRSQCRNLHGHRYVLEITLSGEVVQTPGQSDTGMVMDFSEIKHIAKTHVVDVWDHAFLVYEGDAAVRDFLATLPGHKTVVLDRIPTAENLAAIIFARLAPEYQGAYGGQLRLSRVRLYETPNCWADCHGD

SEQ ID NO: 18323 - protein, 133 aa, unidentified
  source 1..133: note = Bosea lathyri
  REGION 1..133: note = tr|A0A1H6BCJ1|A0A1H6BCJ1_9BRAD 6-pyruvoyl-tetrahydropterin synthase OS=Bosea lathyri; OX = 1036778 GN=SAMN04488115_107110 PE=4 SV=1
MFSVEVRDRIMIGHSLPDPFFGPAQNMHGATFVVDVAFFREKLTRQNVVVDIGAALDVLNRTLKPLNYQNLDALPQFAGVLTTTEFLCRYIFDAMAAAATSGALGEDGAGLARIRVTLHETDLARATYEGALA

SEQ ID NO: 18324 - protein, 133 aa, unidentified
  source 1..133: note = Bosea lupini
  REGION 1..133: note = tr|A0A1H7VUB6|A0A1H7VUB6_9BRAD 6-pyruvoyl-tetrahydropterin synthase OS=Bosea lupini; OX = 1036779 GN=SAMN04515666_107251 PE=4 SV=1
MFSVEVRDRIMIGHSLPDPFFGPAQAMHGATFVVDVAFFRESLTRQNVVVDIGAALTVLNETLKPLNYKNLDTLPQFEGVLTTTEFLCKYIFDAMALAARTGKLGADAADLAKIRVTLHETDLARASYEGALA

SEQ ID NO: 18325 - protein, 133 aa, Bosea sp.
  REGION 1..133: note = tr|A0A0N0JPL5|A0A0N0JPL5_9BRAD 6-pyruvoyl tetrahydropterin synthase OS=Bosea sp. AAP35 OX=1523417; GN = IP69_20485 PE=4 SV=1
MFSVEVRDRIMIGHSLPDPFFGPAQNMHGATFVVDVAFFRPTLTKQNVVVDIGAALDVLNKTLKPLNYQNLDVLPQFAGVLTTTEFLCKYIFDAMADAARSGALGEDGAGLARIRVTLHETDLARASFEGALA

SEQ ID NO: 18326 - protein, 133 aa, Bosea sp.
  REGION 1..133: note = tr|A0A1Q3NUB0|A0A1Q3NUB0_9BRAD Uncharacterized protein OS=Bosea sp. 67-29 OX=1895723 GN=BGO20_13190 PE=4; SV = 1
MFSVEVRDRIMIGHSLPDPFFGPAQNMHGATFVVDVAFFRETLNRQNVVVDIGAALDVLARTLKPLKYQNLDALPQFAGVLTTTEFLCKHIFDAMAAAAKSGTLGADGAGLARIRVTLHETDLARASFEGALA

SEQ ID NO: 18327 - protein, 133 aa, Bosea thiooxidans
  REGION 1..133: note = tr|A0A0Q3PHN9|A0A0Q3PHN9_9BRAD 6-pyruvoyl-tetrahydropterin synthase OS=Bosea thiooxidans; OX = 53254 GN=ARD30_18735 PE=4 SV=1
MFSVEVRDRIMIGHSLPDPFFGPAQAMHGATFVVDVAFFRETLNRQNVVVDIGAALDVLSRTLKPLNYQNLDALPQFAGVLTTTEFLCKHIFDAMAAAAKSGALGADGTGLAKIRVTLHETDLARASYEGALA

SEQ ID NO: 18328 - protein, 133 aa, unidentified
  source 1..133: note = Bosea vaviloviae
  REGION 1..133: note = tr|A0A1D7U8D0|A0A1D7U8D0_9BRAD Uncharacterized protein OS=Bosea vaviloviae OX=1526658 GN=BHK69_27105 PE=4; SV = 1
MFSVEVRDRIMIGHSLPDPFFGPARNMHGATFIVDVAFFRERLTRHNVVVDIGAALEVLNRTLKPLNYQNLDALPQFAGVLTTTEFLCKHIFDAMAQAAASGALGEDGAGLSRIKVTLHETDLARASYEGMLA

SEQ ID NO: 18329 - protein, 133 aa, unidentified
  source 1..133: note = Bosea vaviloviae
  REGION 1..133: note = tr|A0A0N1F4B2|A0A0N1F4B2_9BRAD 6-pyruvoyl tetrahydropterin synthase OS=Bosea vaviloviae OX=1526658; GN = AE618_14525 PE=4 SV=1
MYSVEVRDRIMIGHSLPDPFFGPAQNMHGATFVVDVAFFRETLTRQNVVVDIGAALDVLNKTLKPLNYQNLDALPQFAGVLTTTEFLCKHIFNAMASAAKAGALGEDGNGLSRIRVTLHETDLARASFEGALA

SEQ ID NO: 18330 - protein, 133 aa, Bosea vestrisii
  REGION 1..133: note = tr|A0A543NPT3|A0A543NPT3_9BRAD 6-pyruvoyl-tetrahydropterin synthase OS=Bosea vestrisii; OX = 151416 GN=FHW41_2559 PE=4 SV=1
MFSVEVRDRIMIGHSLPDPFFGPAQNMHGATFVVDVAFFREALNRHNVVVDIGAALDVLAETLKPLKYQNLDALPQFAGVLTTTEFLCKHIFDTMAAAAKSGALGADGAGLARIRVTLHETDLARASYEGALA

SEQ ID NO: 18331 - protein, 290 aa, Bowmanella sp.
  REGION 1..290: note = tr|A0A4V2L0E7|A0A4V2L0E7_9ALTE 6-pyruvoyl tetrahydropterin synthase OS=Bowmanella sp. JS7-9; OX = 1605368 GN=TK45_07995 PE=4 SV=1
MQLFVNDLTVMDFSYLCPQRGMVGESWIVDVILDGSLNEESMVLDFSKVKKRLKALIDEYVDHKLLIPAEHAYTRIERDEQNERVQVDFLRPDERSIHLNCPPEAYAFIYANEVSMASVQEYLKQIIKTHLPENVQGLTLSLREEKIDGPYYHYTHGLKKHDGNCQRIAHGHRSKVVVFADGQQSVRWEDYWAKRWCDIYIGSREDLVTADKLIMQPDISGDEHYLFAYESSQGIFELAIPKCESDLVDTDSTVECLAQFMADEQKRLAPGNSFKVFAFEGVGKGAIAGA

SEQ ID NO: 18332 - protein, 189 aa, Bowmanella sp.
  REGION 1..189: note = tr|A0A4Q9XL98|A0A4Q9XL98_9ALTE QueD like protein; OS = Bowmanella sp. JS7-9 OX=1605368 GN=TK45_09945 PE=4 SV=1
MELAIILMILLIVVAAAAIKLSDVGLTFPFSKKTNLYTPAERKFLQMLDMAVGDQYRIICRVRLSDIVSIRPNTSVKVSRSAMAQAATKQLDFVLCQKDTMSPVVAVDLVSVEAERSYKAQRDWYVSGALDAARIPHIRIKAKASYKPQEIRDCIHAKLAPLRFQQPQEPLVRGTLNNDKAPLRRPVAA

SEQ ID NO: 18333 - protein, 121 aa, Brachyspira sp.
  REGION 1..121: note = tr|R5HJ75|R5HJ75_9SPIR 6-carboxy-5,6,7,8-tetrahydropterin synthase OS=Brachyspira sp. CAG:484 OX=1262759 GN=BN676_01359 PE=3 SV=1
MYEIKTQAFFSAAHHLLNYDGECENQHGHNWMVEAFVKGETLDKSNILIDYKVLKRELNAVLDLLDHKDINEIPEFHGESPSSEMIAAFIYNKLKEKVVLLSKISVWETQTSCASYYEEEV

SEQ ID NO: 18334 - protein, 121 aa, unidentified
  source 1..121: note = Bradymonadaceae bacterium
  REGION 1..121: note = tr|A0A3D8MW50|A0A3D8MW50_9DELT 6-carboxy-5,6,7,8-tetrahydropterin synthase; OS = Bradymonadaceae bacterium TMQ3 OX=2283320 GN=queD PE=3; SV = 1
MIVELVKEFRFEAAHRLPHVPEGHKCQRLHGHSYRVTVTVRGEVDPEMGWLLDYGDIKAAVKPLIVEQLDHYYLNEIEGLENPTSEVLAGWMWERIKPVLPQLHSLQIHETCESSCIYRGE

SEQ ID NO: 18335 - protein, 118 aa, unidentified
  source 1..118: note = Bradymonadales bacterium
  REGION 1..118: note = tr|A0A5B8XW71|A0A5B8XW71_9DELT 6-carboxy-5,6,7,8-tetrahydropterin synthase; OS = Bradymonadales bacterium V1718 OX=2600177 GN=queD PE=3; SV = 1
MEIFKEFTFEAAHRLPNLPPDHKCSRLHGHSFRCRIYVEGPLDPVFGWVSDFGDIKAVFKPTWERLDHHYLNEIPGLENPTSEVLARWIWQELKAELPQLSRVEVFETCTTGAIYRGD

SEQ ID NO: 18336 - protein, 120 aa, unidentified
  source 1..120: note = Bradymonadales bacterium
  REGION 1..120: note = tr|A0A5B8YCI3|A0A5B8YCI3_9DELT 6-carboxy-5,6,7,8-tetrahydropterin synthase; OS = Bradymonadales bacterium YN101 OX=2292766 GN=queD PE=3; SV = 1
MVVELTKQFRFEAAHRLPNTPEGHKCRRLHGHSFKVTVEVKGPVDPDTGWLIDFAEIKEAWKPLHDELDHYFLNEIEGLENPTSEVLARWIWVRLEKTLDCLSAITVHETCTSACTYRGE

SEQ ID NO: 18337 - protein, 120 aa, unidentified
  source 1..120: note = Bradymonas sediminis
  REGION 1..120: note = tr|A0A2Z4FI10|A0A2Z4FI10_9DELT 6-carboxy-5,6,7,8-tetrahydropterin synthase OS=Bradymonas sediminis OX=1548548 GN=queD PE=3 SV=1
MIVELKKKFTFEAAHCLPNTPPGHKCRRLHGHSYTIEIEVKGEVGEESGWLIDFTDIKEAWQPLHAELDHYYLNEIEGLENPTSEVLAGWIWKRLAPTLEYLSAVTVHETCTSSCTYRGE

SEQ ID NO: 18338 - protein, 120 aa, unidentified; identical to SEQ ID NO: 18336
  source 1..120: note = Bradymonas sp.
  REGION 1..120: note = tr|A0A4Y6PYI5|A0A4Y6PYI5_9DELT 6-carboxy-5,6,7,8-tetrahydropterin synthase OS=Bradymonas sp. YN101 OX=2589075 GN=queD PE=3 SV=1

SEQ ID NO: 18339 - protein, 121 aa, unidentified
  source 1..121: note = Bradyrhizobiaceae bacterium
  REGION 1..121: note = tr|A0A257KRX5|A0A257KRX5_9BRAD 6-carboxy-5,6,7,8-tetrahydropterin synthase; OS = Bradyrhizobiaceae bacterium PARB1 OX=2015576; GN = CFE29_12815 PE=3 SV=1
MWELTKSFRFEAAHALSYTTLGEASQEIHGHSFRAEITIRGEPDPVTGMVMDLGLLDRSLDDLRKTLDHKFLNKIEAIGVPTLENLSRYIWDRVADKGPVVRVGVFRDSCNESCVYFGPKK

SEQ ID NO: 18340 - protein, 118 aa, unidentified
  source 1..118: note = Bradyrhizobiaceae bacterium
  REGION 1..118: note = tr|A0A3S0NIG0|A0A3S0NIG0_9BRAD 6-carboxy-5,6,7,8-tetrahydropterin synthase; OS = Bradyrhizobiaceae bacterium OX=2072420 GN=queD PE=3 SV=1
MRISQAFKFEAAHRLPNVPETHRCRRLHGHSYRVEVQLDGPVDPHTGFVADFFDIENSFADIMGALDHHCLNEVKGLENPTAENIAIWIWDRLKPSLPQLWAVRVYETADCWAEYQGR

SEQ ID NO: 18341 - protein, 121 aa, unidentified
  source 1..121: note = Bradyrhizobium arachidis
  REGION 1..121: note = tr|A0A1I7M169|A0A1I7M169_9BRAD 6-carboxy-5,6,7,8-tetrahydropterin synthase; OS = Bradyrhizobium arachidis OX=858423 GN=SAMN05192541_1249; PE = 3 SV=1
MWELTKSFRFEAAHSLSGTTFGAASEEIHGHSFRAEVTLRGTPDPKTGMVVDLGLVQRAIEDVRLTLDHKYLNKIEALGTPTLENLSRFVWERLAHIGKLTRVSIHRDSCNESCTYYGPQE

SEQ ID NO: 18342 - protein, 121 aa, Bradyrhizobium betae
  REGION 1..121: note = tr|A0A4Q1VPT5|A0A4Q1VPT5_9BRAD 6-carboxy-5,6,7,8-tetrahydropterin synthase; OS = Bradyrhizobium betae OX=244734 GN=B5V03_03470 PE=3 SV=1
MWELTKSFRFEAAHSLTGTTFGAASEEIHGHSFRAEVTVRGTPDPKTGMVVDLGLLQRAIEEVRVTLDHKFLNKIEALGTPTLENLSRFVWERLAHIGKLTRVSIHRDSCNESCTYYGPQG

SEQ ID NO: 18343 - protein, 121 aa, Bradyrhizobium canariense
  REGION 1..121: note = tr|A0A1H2B2Y9|A0A1H2B2Y9_9BRAD 6-carboxy-5,6,7,8-tetrahydropterin synthase; OS = Bradyrhizobium canariense OX=255045; GN = SAMN05444158_6707 PE=3 SV=1
MWELTKSFRFEAAHALPGTTLGEASEEIHGHSFRAEVSIRGMPDPATGMVLDLGLLERSMTDVRKMLDHKLLNKVDALGPPTLENLSRFIWEKVQHAGHVTRVSVHRDSCNESCTYFGPQS

SEQ ID NO: 18344 - protein, 120 aa, Bradyrhizobium canariense
  REGION 1..120: note = tr|A0A1X3GZN8|A0A1X3GZN8_9BRAD 6-carboxy-5,6,7,8-tetrahydropterin synthase; OS = Bradyrhizobium canariense OX=255045 GN=BSZ18_29320 PE=3; SV = 1
MKISQAFKFEAAHRLPNVPQTHRCHRVHGHSYRVEVVLNGAVDPHTGFVMDFFNMEEAFGLLIKKLDHHCLNDVPGLENPTAENIAIWIWEHAKPRLAQLSSVRVYETTDSWAEYDGPDR

SEQ ID NO: 18345 - protein, 121 aa, unidentified
  source 1..121: note = Bradyrhizobium centrolobii
  REGION 1..121: note = tr|A0A176YCB3|A0A176YCB3_9BRAD 6-carboxy-5,6,7,8-tetrahydropterin synthase; OS = Bradyrhizobium centrolobii OX=1505087 GN=AYJ54_04125; PE = 3 SV=1
MWELTKSFRFEAAHSLSGTTFGAASEEIHGHSFRAEVSLRGTPDPVTGMVVDLGLVQRAIEDVRLTLDHKFLNKIEAIGVPTLENLSRFVWERLQHIDGLTRVSIHRDSCNESCTYYGPQG

SEQ ID NO: 18346 - protein, 118 aa, unidentified
  source 1..118: note = Bradyrhizobium centrolobii
  REGION 1..118: note = tr|A0A176YKE1|A0A176YKE1_9BRAD 6-carboxy-5,6,7,8-tetrahydropterin synthase; OS = Bradyrhizobium centrolobii OX=1505087 GN=AYJ54_18795; PE = 3 SV=1
MKISQAFKFRAAHRLPNVPSTHGCSRVHGHSYRVEVYLEGPVDPVNGIVADFSAIDESIVGIMTTLDHRYLNEVQGLENPTAERIAEWIWERLNDGLPRMSSVRVYETADCWAEYDGR

SEQ ID NO: 18347 - protein, 121 aa, unidentified
  source 1..121: note = Bradyrhizobium daqingense
  REGION 1..121: note = tr|A0A562L8U3|A0A562L8U3_9BRAD 6-carboxy-5,6,7,8-tetrahydropterin synthase; OS = Bradyrhizobium daqingense OX=993502 GN=IQ17_03920 PE=3; SV = 1
MWELTKSFRFEAAHSLSGTTFGAASEEIHGHSFRAEVTVRGTPDPETGMVVDLGLLQRAIEDVRLVLDHKYLNKIEALGTPTLENLSRFVWERLAHVGKLTRVSIHRDSCNESCTYYGPQG

SEQ ID NO: 18348 - protein, 121 aa, unidentified
  source 1..121: note = Bradyrhizobium diazoefficiens
  REGION 1..121: note = tr|Q89SC1|Q89SC1_BRADU 6-carboxy-5,6,7,8-tetrahydropterin synthase; OS = Bradyrhizobium diazoefficiens (strain JCM 10833 / IAM 13628 / NBRC 14792 / USDA 110) OX=224911GN=bll2482 PE=3; SV = 1
MWELTKSFRFEAAHSLSGTTFGAASEEIHGHSFRAEVTVRGTPDPETGMVVDLGLLQRAIEDVRLTLDHKFLNKIEALGKPTLENLSRFVWERLQHIGKLTRVSIHRDSCNESCTYYGPQG

SEQ ID NO: 18349 - protein, 121 aa, unidentified; identical to SEQ ID NO: 18348
  source 1..121: note = Bradyrhizobium diazoefficiens
  REGION 1..121: note = tr|A0A2A6MMS6|A0A2A6MMS6_9BRAD 6-carboxy-5,6,7,8-tetrahydropterin synthase; OS = Bradyrhizobium diazoefficiens OX=1355477 GN=CO678_40090; PE = 3 SV=1

SEQ ID NO: 18350 - protein, 120 aa, Bradyrhizobium elkanii
  REGION 1..120: note = tr|A0A4Y3ZY96|A0A4Y3ZY96_BRAEL 6-carboxy-5,6,7,8-tetrahydropterin synthase; OS = Bradyrhizobium elkanii OX=29448 GN=BEL01nite_82960 PE=3; SV = 1
MRISQAFKFEAAHRLPNVPETHRCHRMHGHSYRIELVLSGRVDPRTGFVIDFFELEQVLGPLLRQLDHHCLNDIHGLENPTVENIAIWIWDKIRPRLQQLSAVKVFETAGCWAEYDGDEP

SEQ ID NO: 18351 - protein, 121 aa, Bradyrhizobium elkanii
  REGION 1..121: note = tr|A0A4V1WCY4|A0A4V1WCY4_BRAEL 6-carboxy-5,6,7,8-tetrahydropterin synthase; OS = Bradyrhizobium elkanii OX=29448 GN=BEL01nite_25820 PE=3; SV = 1
MWELTKAFRFEAAHALSGTTFGTASEEIHGHSFRAEVTVRGTPDPKTGMVIDLGLLERAMAEVQKTLDHKFLNKIEAIGVPTLENLSRFIWERLQHAGRLTRVSVHRDSCNESCTYFGPQG

SEQ ID NO: 18352 - protein, 121 aa, unidentified
  source 1..121: note = Bradyrhizobium erythrophlei
  REGION 1..121: note = tr|A0A1M5GQ96|A0A1M5GQ96_9BRAD 6-carboxy-5,6,7,8-tetrahydropterin synthase; OS = Bradyrhizobium erythrophlei OX=1437360; GN = SAMN05444169_0297 PE=3 SV=1
MWELTKSFRFEAAHALPGTTLGAASEEIHGHSFRAEVTVRGTPDPATGMVLDLGLLQRNIAEVQKMLDHKLLNKIEALGAPTLENLSRFVWERVQHAGRITRVSIHRDSCDESCTYYGPQG

SEQ ID NO: 18353 - protein, 121 aa, unidentified
  source 1..121: note = Bradyrhizobium erythrophlei
  REGION 1..121: note = tr|A0A1M5JMH7|A0A1M5JMH7_9BRAD 6-carboxy-5,6,7,8-tetrahydropterin synthase; OS = Bradyrhizobium erythrophlei OX=1437360; GN = SAMN05443248_1463 PE=3 SV=1
MWELTKSFRFEAAHALPGTALGAASEEIHGHSFRAEVTVRGTPDPLTGMVLDLGLLERSMAEVQKMLDHKLLNKVEALGPPTLENLSRFVWERLQHAGQIARVSIHRDSCGESCTYYGPQG

SEQ ID NO: 18354 - protein, 121 aa, unidentified
  source 1..121: note = Bradyrhizobium genosp.
  REGION 1..121: note = tr|A0A4Q7FG78|A0A4Q7FG78_9BRAD 6-carboxy-5,6,7,8-tetrahydropterin synthase; OS = Bradyrhizobium genosp. SA-3 OX=508868 GN=CWO91_16225; PE = 3 SV=1
MWELTKSFRFEAAHSLSGTTFGAASEEIHGHSFRAEVTVRGTPDPNTGMVVDLGLLQRAIEDVRLMLDHKYLNKIEALGTPTLENLSRFVWDRLAHIDKLTRVSIHRDSCNESCTYYGPQE

SEQ ID NO: 18355 - protein, 121 aa, unidentified
  source 1..121: note = Bradyrhizobium guangdongense
  REGION 1..121: note = tr|A0A410VBW6|A0A410VBW6_9BRAD 6-carboxy-5,6,7,8-tetrahydropterin synthase; OS = Bradyrhizobium guangdongense OX=1325090 GN=X265_28650; PE = 3 SV=1
MWELTKSFRFEAAHTLKGTTFGAASEEIHGHSFRAEVTVRGTPDPATGMVVDLGLLQRAIEEVRLGLDHKFLNKIEALGTPTLENLSRFVWERLAHIGKLTRVSIHRDSCNESCTYYGPQG

SEQ ID NO: 18356 - protein, 121 aa, unidentified
  source 1..121: note = Bradyrhizobium guangzhouense
  REGION 1..121: note = tr|A0A4Q0RB73|A0A4Q0RB73_9BRAD 6-carboxy-5,6,7,8-tetrahydropterin synthase; OS = Bradyrhizobium guangzhouense OX=1325095 GN=EAS56_29450; PE = 3 SV=1
MWELTKQFRFEAAHTLKGTTFGEASEEIHGHSFRAEVTVRGTPDPATGMVIDLGLLQRAIEEVRLTLDHKFLNKIEALGTPTLENLSRFVWERLAHVGKLSRVSIHRDSCYESCTYYGPQT

SEQ ID NO: 18357 - protein, 121 aa, unidentified
  source 1..121: note = Bradyrhizobium huanghuaihaiense
  REGION 1..121: note = tr|A0A562QYS0|A0A562QYS0_9BRAD 6-carboxy-5,6,7,8-tetrahydropterin synthase; OS = Bradyrhizobium huanghuaihaiense OX=990078 GN=IQ16_06823; PE = 3 SV=1
MWELTKSFRFEAAHSLSGTTFGAASEEIHGHSFRAEVTVRGTPDPDTGMVVDLGLLQRAIEDVRLTLDHKYLNKIEALGKPTLENLSRFVWERLQHIGKLTRVSIHRDSCNESCTYYGPQG

SEQ ID NO: 18358 - protein, 118 aa, unidentified
  source 1..118: note = Bradyrhizobium icense
  REGION 1..118: note = tr|A0A533J0V1|A0A533J0V1_9BRAD 6-carboxy-5,6,7,8-tetrahydropterin synthase; OS = Bradyrhizobium icense OX=1274631 GN=queD PE=3 SV=1
MKISQAFKFEAAHFLPGVPATHRCSRLHGHSYRVEVQLDGPVDPQTGFVVDFFDLERSFAGILDALDHRCLNEVEGLPNPTAENIAIWIWDRLKPDFKPMSAVRVYETTDCWAEYDGR

SEQ ID NO: 18359 - protein, 130 aa, unidentified
  source 1..130: note = Bradyrhizobium icense
  REGION 1..130: note = tr|A0A1B1UB54|A0A1B1UB54_9BRAD 6-carboxy-5,6,7,8-tetrahydropterin synthase; OS = Bradyrhizobium icense OX=1274631 GN=LMTR13_07265 PE=3; SV = 1
MWELTKSFRFEAAHSLKGTTFGAASEEIHGHSFRAEVSVRGTPDPETGMVMDLGLLERSMEEVRKALDHKLLNNVEALGTPTLENISRYIFERIQHAGQITRVSVHRDSCNESCTYFGPQKLMDNCHHED

SEQ ID NO: 18360 - protein, 121 aa, Bradyrhizobium japonicum
  REGION 1..121: note = tr|A0A4Y3Z7M9|A0A4Y3Z7M9_BRAJP 6-carboxy-5,6,7,8-tetrahydropterin synthase; OS = Bradyrhizobium japonicum OX=375 GN=BJA01nite_80640 PE=3; SV = 1
MWELTKSFRFEAAHSLSGTTFGAASEEIHGHSFRAEVTLRGTPDPKTGMVVDLGLVQRAIEDVRLTLDHKYLNKIEALGTPTLENLSRFVWERLQHIGKLTRVSIHRDSCNESCSYYGPQG

SEQ ID NO: 18361 - protein, 139 aa, Bradyrhizobium japonicum
  REGION 1..139: note = tr|A0A1Y2JM54|A0A1Y2JM54_BRAJP 6-pyruvoyl tetrahydrobiopterin synthase OS=Bradyrhizobium japonicum; OX = 375 GN=BSZ19_22025 PE=4 SV=1
MPIIRATRYHDISCGHRVVDHEGKCQFLHGHNYRVHFHCEADALDHLGRIIDFGVIKSTLCQWLEDNWDHRMVLWHRDPLLPALLVIEPSIVTVPFNPTAENIAAHLLTVVGPQVLPPTVRLVRVVVDETRKCSCEAAI

SEQ ID NO: 18362 - protein, 121 aa, Bradyrhizobium jicamae
  REGION 1..121: note = tr|A0A0R3L1R0|A0A0R3L1R0_9BRAD 6-carboxy-5,6,7,8-tetrahydropterin synthase; OS = Bradyrhizobium jicamae OX=280332 GN=CQ12_27095 PE=3 SV=1
MWELTKSFRFEAAHSLKGTTFGADSEEIHGHSFRAEVSVRGTPDPETGMVLDLGLLERSMEEVRKALDHRLLNKVEALGMPTLENISRYIFERVQHAGKITRVSVHRDSCNESCTYFGPQG

SEQ ID NO: 18363 - protein, 118 aa, Bradyrhizobium jicamae
  REGION 1..118: note = tr|A0A0R3LKW6|A0A0R3LKW6_9BRAD 6-carboxy-5,6,7,8-tetrahydropterin synthase; OS = Bradyrhizobium jicamae OX=280332 GN=CQ12_16670 PE=3 SV=1
MKISQAFKFEAAHRLPNLPPTHKCSRVHGHSYRVEVQLDGRLDPVTGFVVDFSDLEEAFLGIIKALDHRCLNEVEGLENPTAENIVVWIWERLKRKLHQMSSVRVYETSDCWAEYDGR

SEQ ID NO: 18364 - protein, 121 aa, Bradyrhizobium lablabi
  REGION 1..121: note = tr|A0A1M7DCG9|A0A1M7DCG9_9BRAD 6-carboxy-5,6,7,8-tetrahydropterin synthase; OS = Bradyrhizobium lablabi OX=722472 GN=SAMN05444171_5260; PE = 3 SV=1
MWELTKSFRFEAAHSLPGTTFGAASEEIHGHSFRAEVSVRGTPDPSTGMVLDLGLLERSMAEVQKTLDHKLLNRIEALGTPTLENISRFIWERVQHAGKITRVSVHRDSCNESCTYFGPQG

SEQ ID NO: 18365 - protein, 121 aa, Bradyrhizobium lablabi
  REGION 1..121: note = tr|A0A0R3MB76|A0A0R3MB76_9BRAD 6-carboxy-5,6,7,8-tetrahydropterin synthase; OS = Bradyrhizobium lablabi OX=722472 GN=CQ14_31600 PE=3 SV=1
MWELTKSFRFEAAHSLKGTTFGAASEEIHGHSFRAEVSVRGTPDPETGMVLDLGLLERSMEEVRKALDHKLLNKVEALGTPTLENISRYIFERVQHAGKITRVSVHRDSCNESCTYFGPQG

SEQ ID NO: 18366 - protein, 118 aa, Bradyrhizobium liaoningense
  REGION 1..118: note = tr|A0A151FQT7|A0A151FQT7_9BRAD 6-carboxy-5,6,7,8-tetrahydropterin synthase; OS = Bradyrhizobium liaoningense OX=43992 GN=A1D31_04220; PE = 3 SV=1
MRISQAFKFEAAHRLPNVPETHRCSRLHGHSYRVEVQLDGPVDPHTGFVADFFDIEKCFADIMGTLDHQCLNEVEGLENPTAENIAVWIWDRLKPGLAQLSAVRVYETADCWAEYQGR

SEQ ID NO: 18367 - protein, 118 aa, unidentified; identical to SEQ ID NO: 17156
  source 1..118: note = Bradyrhizobium lupini
  REGION 1..118: note = tr|K5D1V6|K5D1V6_RHILU 6-carboxy-5,6,7,8-tetrahydropterin synthase; OS = Bradyrhizobium lupini HPC(L) OX=1229491 GN=C241_11643; PE = 3 SV=1

SEQ ID NO: 18368 - protein, 121 aa, unidentified
  source 1..121: note = Bradyrhizobium macuxiense
  REGION 1..121: note = tr|A0A120FP67|A0A120FP67_9BRAD 6-carboxy-5,6,7,8-tetrahydropterin synthase; OS = Bradyrhizobium macuxiense OX=1755647 GN=AS156_04415; PE = 3 SV=1
MWELTKSFRFEAAHALSGTTLGSGSEEIHGHSFRAEVTVRGTQDPKTGMVVDLGLLERSMAEVQKTLDHKFLNKIEAIGLPTLENLSRFIWERLQHAGTLARVSVHRDSCNESCTYFGPQD

SEQ ID NO: 18369 - protein, 120 aa, unidentified
  source 1..120: note = Bradyrhizobium macuxiense
  REGION 1..120: note = tr|A0A125Q9R8|A0A125Q9R8_9BRAD 6-carboxy-5,6,7,8-tetrahydropterin synthase; OS = Bradyrhizobium macuxiense OX=1755647 GN=AS156_36180; PE = 3 SV=1
MKISQAFKFEAAHRLPSVPQTHRCHRMHGHSYRIEVVLDGPVDPHTGFVVDFFDMEAAFGPLLKALDHHCLNDVPGLENPTAENIAIWIWDRIKPQLAQLFSVRVYETTDCWAEYDGPRR

SEQ ID NO: 18370 - protein, 158 aa, unidentified
  source 1..158: note = Bradyrhizobium manausense
  REGION 1..158: note = tr|A0A0R3D2A6|A0A0R3D2A6_9BRAD 6-pyruvoyl tetrahydrobiopterin synthase OS=Bradyrhizobium manausense; OX = 989370 GN=AOQ71_29990 PE=4 SV=1
MTYLSTKTYGHEIGLSATFRQWRALSHCRLLHGYSLSFRFEFEADTLDDKNWVVDFGGLKELKAILEDTFDHKTVVAADDPELEWFHEAARRGVADIVVLPAVGCEKFAEHVYGIASKWLLTERLSPRCRLASVEVKEHGANSAIYRGTSRAAGQRDL

SEQ ID NO: 18371 - protein, 121 aa, unidentified
  source 1..121: note = Bradyrhizobium manausense
  REGION 1..121: note = tr|A0A0R3D4P3|A0A0R3D4P3_9BRAD 6-carboxy-5,6,7,8-tetrahydropterin synthase; OS = Bradyrhizobium manausense OX=989370 GN=AOQ71_35220 PE=3; SV = 1
MWELTKQFRFEAAHTLKGTTFGEASEEIHGHSFRAEVTVRGTPDPATGMVVDLGLLQRAIEEVRLMLDHKFLNKIEALGTPTLENLSRFVWERLAHIGKLTRVSIHRDSCNESCTYYGPQT

SEQ ID NO: 18372 - protein, 118 aa, unidentified
  source 1..118: note = Bradyrhizobium nanningense
  REGION 1..118: note = tr|A0A4V1L203|A0A4V1L203_9BRAD 6-carboxy-5,6,7,8-tetrahydropterin synthase; OS = Bradyrhizobium nanningense OX=1325118 GN=XH99_17460; PE = 3 SV=1
MRISQAFKFEAAHRLPNVPETHRCRRLHGHSYRVEVQLDGPVDPHTGFVADFFDIEKCFADILDALDHHCLNEVKGLENPTAENIAIWIWDRLKPSLPQLWAVRVYETADCWAEYQGQ

SEQ ID NO: 18373 - protein, 121 aa, unidentified
  source 1..121: note = Bradyrhizobium neotropicale
  REGION 1..121: note = tr|A0A176ZA01|A0A176ZA01_9BRAD 6-carboxy-5,6,7,8-tetrahydropterin synthase; OS = Bradyrhizobium neotropicale OX=1497615 GN=AXW67_08790; PE = 3 SV=1
MWELTKSFRFEAAHSLSGTTFGAASEEIHGHSFRAEVTLRGTPDPVTGMVVDLGLVQRAIEDVRLTLDHKFLNKIEAIGVPTLENLSRFVWERLQHIEGLTRVSIHRDSCNESCTYYGPQG

SEQ ID NO: 18374 - protein, 122 aa, unidentified
  source 1..122: note = Bradyrhizobium oligotrophicum
  REGION 1..122: note = tr|M4ZCM2|M4ZCM2_9BRAD 6-carboxy-5,6,7,8-tetrahydropterin synthase; OS = Bradyrhizobium oligotrophicum S58 OX=1245469; GN = S58_55750 PE=3 SV=1
MWELTKSFTFEAAHTLPITTLGEASQEIHGHSFRAEVTVRGDTTNPETGMVVDFGVLTQRLGEIQAMLDHKFLNKIEAIGLPTLENLSRFIYERVRHIGHVTKVSVHRDSCRETCTYFGPRD

SEQ ID NO: 18375 - protein, 118 aa, unidentified
  source 1..118: note = Bradyrhizobium ottawaense
  REGION 1..118: note = tr|A0A2U8P3I4|A0A2U8P3I4_9BRAD 6-carboxy-5,6,7,8-tetrahydropterin synthase; OS = Bradyrhizobium ottawaense OX=931866 GN=queD PE=3 SV=1
MKISQAFKFEAAHRLPNVPETHRCRRLHGHSYRVEVQLDGPVDPHTGFVADFFDIEKCFADILGALDHHCLNEVKGLENPTAENIAIWIWDRLKPSLRQLSAVRVYETADCWAEYNGQ

SEQ ID NO: 18376 - protein, 121 aa, Bradyrhizobium pachyrhizi
  REGION 1..121: note = tr|A0A0R3DBM7|A0A0R3DBM7_9BRAD 6-carboxy-5,6,7,8-tetrahydropterin synthase; OS = Bradyrhizobium pachyrhizi OX=280333 GN=AOQ73_13390 PE=3; SV = 1
MWELTKAFRFEAAHALSGTTFGTASEEIHGHSFRAEVTVRGTPDPATGMVVDLGLLERAMAEVQKTLDHKFLNKIEAIGVPTLENLSRFIWERLQHAGKLSRVSVHRDSCNESCTYFGPQG

SEQ ID NO: 18377 - protein, 121 aa, unidentified
  source 1..121: note = Bradyrhizobium retamae
  REGION 1..121: note = tr|A0A0R3NBI4|A0A0R3NBI4_9BRAD 6-carboxy-5,6,7,8-tetrahydropterin synthase; OS = Bradyrhizobium retamae OX=1300035 GN=CQ13_15295 PE=3; SV = 1
MWELTKSFRFEAAHSLKGTTFGAASEEIHGHSFRAEVSVRGTPDPETGMVLDLGLLERSMEEVRKALDHKLLNKVEALGTPTLENISRYIFERVQHAGQITRVSVHRDSCNESCTYFGPQG

SEQ ID NO: 18378 - protein, 124 aa, unidentified
  source 1..124: note = Bradyrhizobium rifense
  REGION 1..124: note = tr|A0A5D3KJY2|A0A5D3KJY2_9BRAD 6-carboxy-5,6,7,8-tetrahydropterin synthase; OS = Bradyrhizobium rifense OX=515499 GN=FXB40_08920 PE=3; SV = 1
MWELTKSFRFEAAHSLSGTTFGADSEEIHGHSFRAEVTVRGTPDPATGMVVDLGLLQRAIEDVRVMLDHKFLNKIEALGTPTLENLSRFVWERLAPIGELTRVSIHRDSCNESCTYYGPQELTK

SEQ ID NO: 18379 - protein, 121 aa, unidentified
  source 1..121: note = Bradyrhizobium sacchari
  REGION 1..121: note = tr|A0A560JKU4|A0A560JKU4_9BRAD 6-carboxy-5,6,7,8-tetrahydropterin synthase; OS = Bradyrhizobium sacchari OX=1399419 GN=FBZ95_10812 PE=3; SV = 1
MWELTKSFRFEAAHSLSGTTFGAASEEIHGHSFRAEVTVRGTPDPETGMVVDLGLLQRAIEDVRLVLDHKFLNKIEALGKPTLENLSRFVWERLQHIGKLTRVSIHRDSCSESCTYYGPQG

SEQ ID NO: 18380 - protein, 158 aa, unidentified
  source 1..158: note = Bradyrhizobium sacchari
  REGION 1..158: note = tr|A0A560JAC5|A0A560JAC5_9BRAD 6-pyruvoyltetrahydropterin/6-carboxytetrahydropterin synthase OS=Bradyrhizobium sacchari OX=1399419; GN = FBZ95_11316 PE=4 SV=1
MTYLSTKTYGHEIGLSTTFRQWRALSHCRLLHGYSLSFRFEFEADSLDDKNWVVDFGGLKELKAILEDTFDHKTVVAADDPELEWFHEAARRGVADIVVLPAVGCEKFAEHVYGIASKWLLTERLAPRCRLASVEVKEHGANSAIYRGTSRAAGQRDL

SEQ ID NO: 18381 - protein, 118 aa, unidentified
  source 1..118: note = Bradyrhizobium shewense
  REGION 1..118: note = tr|A0A1C3UZU4|A0A1C3UZU4_9BRAD 6-carboxy-5,6,7,8-tetrahydropterin synthase; OS = Bradyrhizobium shewense OX=1761772 GN=GA0061098_100342; PE = 3 SV=1
MKISQAFKFEAAHRLPNVPETHRCRRLHGHSYRVEVQLDGPIDPHTGFVADFFDIEKCFADILGALDHHCLNEVKGLENPTAENIAIWIWDRLKPSLRQLSAVRVYETADCWAEHNGQ

SEQ ID NO: 18382 - protein, 121 aa, Bradyrhizobium sp.
  REGION 1..121: note = tr|A0A1Y6KNF4|A0A1Y6KNF4_9BRAD 6-carboxy-5,6,7,8-tetrahydropterin synthase; OS = Bradyrhizobium sp. ORS 285 OX=115808 GN=ptpS PE=3 SV=1
MWELTKSFTFEAAHALSHTTLGEVSQEIHGHSFRAEVTVRGMPDPKTGMVVDFGVLTQRLSEIQATLDHKFLNKIEAIGLPTLENLCRFIYERVRSIGHVTKVSVHRDSCRETCTYFGPQD

SEQ ID NO: 18383 - protein, 121 aa, Bradyrhizobium sp.
  REGION 1..121: note = tr|A0A1Q5QY77|A0A1Q5QY77_9BRAD 6-carboxy-5,6,7,8-tetrahydropterin synthase; OS = Bradyrhizobium sp. NAS96.2 OX=1680160 GN=AC628_36315; PE = 3 SV=1
MWELTKAFRFEAAHALSGTTFGAASEEIHGHSFRAEVTVRGTPDPKTGMVIDLGLLERAMAEVQKTLDHKLLNKIEAIGVPTLENLSRFIWERLQHAGKLTRVSVHRDSCNESCTYFGPQG

SEQ ID NO: 18384 - protein, 121 aa, unidentified
  source 1..121: note = Bradyrhizobium stylosanthis
  REGION 1..121: note = tr|A0A560DBB9|A0A560DBB9_9BRAD 6-carboxy-5,6,7,8-tetrahydropterin synthase; OS = Bradyrhizobium stylosanthis OX=1803665 GN=FBZ96_108168; PE = 3 SV=1
MWELTKSFRFEAAHSLSGTTFGPASEEIHGHSFRAEVTVRGTPDPDTGMVVDLGLLQRAIEDVRLTLDHKFLNKIEALGKPTLENLSRFVWERLAHIGKLTRVSIHRDSCNESCTYYGPQG

SEQ ID NO: 18385 - protein, 121 aa, unidentified
  source 1..121: note = Bradyrhizobium valentinum
  REGION 1..121: note = tr|A0A0R3LLB5|A0A0R3LLB5_9BRAD 6-carboxy-5,6,7,8-tetrahydropterin synthase; OS = Bradyrhizobium valentinum OX=1518501 GN=CP49_24785 PE=3; SV = 1
MWELTKSFRFEAAHSLKGTTFGAASEEIHGHSFRAEVSVRGTPDPETGMVLDLGLLERSMDEVRKTLDHKFLNKIEALGTPTLENLSRYIWERVQHAGKITRVTVHRDSCNESCTYFGPQR

SEQ ID NO: 18386 - protein, 118 aa, unidentified
  source 1..118: note = Bradyrhizobium vignae
  REGION 1..118: note = tr|A0A4Q0QRX6|A0A4Q0QRX6_9BRAD 6-carboxy-5,6,7,8-tetrahydropterin synthase; OS = Bradyrhizobium vignae OX=1549949 GN=EAV90_20975 PE=3; SV = 1
MRISQAFKFEAAHRLPNVPETHRCSRLHGHSYRVEVQLDGPVDPHTGFVADFFDIEKSFADIMAALDHHCLNEVDGLANPTAENIAVWIWDRLQPSLRQLWAVRVYETADCWAEYQGR

SEQ ID NO: 18387 - protein, 118 aa, Bradyrhizobium yuanmingense
  REGION 1..118: note = tr|A0A1C3WKK9|A0A1C3WKK9_9BRAD 6-carboxy-5,6,7,8-tetrahydropterin synthase; OS = Bradyrhizobium yuanmingense OX=108015; GN = GA0061099_1006349 PE=3 SV=1
MRISQAFKFEAAHRLPNVPETHRCSRLHGHSYRVEVQLDGPVDPHTGFVADFFDIEKSFAGIMAALDHQCLNEVDGLANPTAENIAVWIWDRLKPSLPQLWAVRVYETTDCWAEYQGR

SEQ ID NO: 18388 - protein, 118 aa, Bradyrhizobium yuanmingense
  REGION 1..118: note = tr|A0A0R3CPP9|A0A0R3CPP9_9BRAD 6-carboxy-5,6,7,8-tetrahydropterin synthase; OS = Bradyrhizobium yuanmingense OX=108015 GN=AOQ72_18250; PE = 3 SV=1
MRISQAFKFEAAHRLPNVPETHRCSRLHGHSYRVEVQLDGPVDPHTGFVADFFDIEKSFAGIMAALDHQCLNEVDGLANPTAENIAVWIWGRLKPSLPQLWAVRVYETTDCWAEYQGR

SEQ ID NO: 18389 - protein, 158 aa, unidentified
  source 1..158: note = Bradyrhizobium zhanjiangense
  REGION 1..158: note = tr|A0A4Q0QDJ9|A0A4Q0QDJ9_9BRAD 6-pyruvoyl tetrahydrobiopterin synthase OS=Bradyrhizobium zhanjiangense OX=1325107 GN=EAS61_28925 PE=4 SV=1
MTYLSTKTYGHEIGLSATFRQWRALSHCRLLHGYSLSFRFEFEADTLDDKNWVVDFGGLKELKAILEDTFDHKTVVAADDPELEWFHEAARRGVADIVVLPAVGCEKFAEHVYGIASKWLLTERLAPRCRLASVEVKEHGANSAIYRGTSRAAGQRDL

SEQ ID NO: 18390 - protein, 121 aa, unidentified
  source 1..121: note = Bradyrhizobium zhanjiangense
  REGION 1..121: note = tr|A0A4Q0R158|A0A4Q0R158_9BRAD 6-carboxy-5,6,7,8-tetrahydropterin synthase; OS = Bradyrhizobium zhanjiangense OX=1325107 GN=EAS61_01610; PE = 3 SV=1
MWELTKSFRFEAAHSLSGTTFGAASEEIHGHSFRAEVTVRGTPDPNTGMVVDLGLLQRAIEDVRLMLDHKYLNKIEALGTPTLENLSRFVWDRLAHIGKLTRVSIHRDSCNESCTYYGPQE

SEQ ID NO: 18391 - protein, 120 aa, Brenneria alni
  REGION 1..120: note = tr|A0A421DP72|A0A421DP72_9GAMM 6-carboxy-5,6,7,8-tetrahydropterin synthase OS=Brenneria alni OX=71656 GN=BIY29_09225 PE=3 SV=1
MPITLFKDFQFEAAHRLPHVPSGHKCGRLHGHSFMVRLEITGDVDPHTGWIMDFAELKAAFKPTWERLDHHYLNDIPGLENPTSEVLAHWIWQQIKPSLPELSAVTVKETCTAGCIYKGE

SEQ ID NO: 18392 - protein, 120 aa, unidentified
  source 1..120: note = Brenneria goodwinii
  REGION 1..120: note = tr|A0A0G4JWX4|A0A0G4JWX4_9GAMM 6-carboxy-5,6,7,8-tetrahydropterin synthase OS=Brenneria goodwinii OX=1109412 GN=AWC36_00700 PE=3 SV=1
MATTLFKDFQFEAAHRLPHVPAGHKCGRLHGHSFMVRLEITGEVDPHTGWVMDFAELKAAFKPTWEKLDHHYLNEIPGLENPTSEVLAHWIWQQVKPSLPELSAVMVKETCTAGCVYKGE

SEQ ID NO: 18393 - protein, 120 aa, Brenneria nigrifluens
  REGION 1..120: note = tr|A0A2U1UVA7|A0A2U1UVA7_9GAMM 6-carboxy-5,6,7,8-tetrahydropterin synthase OS=Brenneria nigrifluens DSM 30175 = ATCC 13028 OX=1121120 GN=queD PE=3; SV = 1
MATTLFKDFQFEAAHRLPHVPAGHKCGRLHGHSFMVRLEITGEVDAYTGWVMDFAELKAAFKPTWERLDHHYLNDIPGLENPTSEVLAQWIWQQVKPVLPELSAVMVKETCTAGCVYKGE

SEQ ID NO: 18394 - protein, 120 aa, Brenneria nigrifluens
  REGION 1..120: note = tr|A0A2U1UIN3|A0A2U1UIN3_9GAMM 6-carboxy-5,6,7,8-tetrahydropterin synthase OS=Brenneria nigrifluens DSM 30175 = ATCC 13028 OX=1121120 GN=queD PE=3; SV = 1
MKTTLFKDFTFEAAHNLPHVPDGHKCGRLHGHSFVVRLEITGEVDKHTGWIIDFAELKAIFKTTLDRLDHYYLNDIPGLENPTSEVLAEWIWNQVKPQLPILSAITVKETCTAGCTYRGE

SEQ ID NO: 18395 - protein, 120 aa, unidentified
  source 1..120: note = Brenneria roseae
  REGION 1..120: note = tr|A0A2U1U2U0|A0A2U1U2U0_9GAMM 6-carboxy-5,6,7,8-tetrahydropterin synthase OS=Brenneria roseae subsp. americana OX=1508507 GN=queD PE=3 SV=1
MATTLFKDFQFEAAHRLPHVPAGHKCGRLHGHSFMVRLEITGEVDPHTGWVMDFAELKAAFKPTWERLDHHYLNDIPGLENPTSEVLAHWIWQQLKPSLPELSAVMVKETCTAGCIYQGE

SEQ ID NO: 18396 - protein, 120 aa, Brenneria rubrifaciens
  REGION 1..120: note = tr|A0A4P8QR16|A0A4P8QR16_9GAMM 6-carboxy-5,6,7,8-tetrahydropterin synthase OS=Brenneria rubrifaciens OX=55213 GN=queD PE=3 SV=1
MVTTLFKDFQFEAAHRLPHVPPGHKCGRLHGHSFMVRLEITGEVDPHTGWVMDFAELKAAFKPTWERLDHHYLNDIPGLENPTSEVLAHWVWQQLKPLLPALSAVTVKETCTAGCVYRPA

SEQ ID NO: 18397 - protein, 120 aa, Brenneria salicis
  REGION 1..120: note = tr|A0A366I054|A0A366I054_9GAMM 6-carboxy-5,6,7,8-tetrahydropterin synthase OS=Brenneria salicis ATCC 15712 = DSM 30166 OX=714314 GN=DES54_13215; PE = 3 SV=1
MVTTLFKDFQFEAAHRLPHVPDGHKCGRLHGHSFMVRLEITGEIDPHTGWVMDFAELKAAFKPTWEKLDHHYLNDITGLENPTSEVLAHWIWQQLKSALPLLSAVTVKETCTAGCVYRGE

SEQ ID NO: 18398 - protein, 120 aa, Brenneria sp.; identical to SEQ ID NO: 18393
  REGION 1..120: note = tr|G7LMK4|G7LMK4_9GAMM 6-carboxy-5,6,7,8-tetrahydropterin synthase OS=Brenneria sp. EniD312 OX=598467 GN=BrE312_0864 PE=3 SV=1

SEQ ID NO: 18399 - protein, 120 aa, Brenneria sp.
  REGION 1..120: note = tr|A0A5J5FVE2|A0A5J5FVE2_9GAMM 6-carboxytetrahydropterin synthase QueD OS=Brenneria sp. L3-3HA OX=2590031 GN=queD PE=4 SV=1
MTTTIFKDFQFEAAHRLPHVPAGHKCGRLHGHSFMVRLEVTGEVDANTGWVMDFADIKTTFRPIWEQLDHQYLNEIPGLENPTSEVLSRWIWQRLKPILPQLSGVTVKETCSAGCVYRGE

SEQ ID NO: 18400 - protein, 142 aa, Breoghania corrubedonensis
  REGION 1..142: note = tr|A0A2T5VFB5|A0A2T5VFB5_9RHIZ 6-pyruvoyl-tetrahydropterin synthase OS=Breoghania corrubedonensis OX=665038 GN=C8N35_101485 PE=4 SV=1
MFAVEVRDHIMIAHSFTGSLFGPAQALHGATFVVDAAFLAKTLDANGVVIDIGRAHEALKSILAPLNYRNLDDVEEFAGINTTTEFLTGHIHAKLSEVARAGGLGRPGNEIGSIRVTLSESHVARAWYEAPIAPHPSGQDNG

SEQ ID NO: 18401 - protein, 134 aa, Breoghania sp.
  REGION 1..134: note = tr|A0A346QYN4|A0A346QYN4_9RHIZ 6-carboxytetrahydropterin synthase OS=Breoghania sp. L-A4; OX = 2304600 GN=D1F64_03840 PE=4 SV=1
MFAVEVRDHIMIAHSFSGALFGPAQALHGATFVIDAAFMASALDANGVVIDIGRAHEALKAIIEPLNYKNLDAVPEFAGRNTTTEFLTKHIHDGLAAAARADALGRPGMEIAAIRVTLSESHVARAWYEGPVAQ

SEQ ID NO: 18402 - protein, 118 aa, Breoghania sp.
  REGION 1..118: note = tr|A0A346R010|A0A346R010_9RHIZ 6-carboxy-5,6,7,8-tetrahydropterin synthase OS=Breoghania sp. L-A4 OX=2304600 GN=queD PE=3 SV=1
MKITQAFTFEAAHRLPKVPQTHRCHRMHGHSYRVELVLDGPVDPETGFVVDFFDVEAAFGPLLLRLDHYCLNEVEGLENPTAENIAVWIWQRTKPLLPLLSAVRVFETADCWAEYEGD

SEQ ID NO: 18403 - protein, 162 aa, Brevibacillus agri
  REGION 1..162: note = tr|A0A3M8AHA3|A0A3M8AHA3_9BACL 6-carboxytetrahydropterin synthase QueD OS=Brevibacillus agri OX=51101 GN=queD PE=4 SV=1
MSANFDFRIVDRMQELGTHIQKSQLRYHNKRVLVSKEFTFDAAHHLHAYEGKCKNLHGHTYHVVFGISGYPDEIGLVIDFGDIKQIWKEHIEIYLDHRYLNEMLPPMNTTAENMVVWLFEQMEEQLQSDAYRDRYRGARVEFVRLFETPTSYAEARREWMME

SEQ ID NO: 18404 - protein, 162 aa, Brevibacillus brevis
  REGION 1..162: note = tr|A0A291BQ08|A0A291BQ08_BREBE 6-carboxytetrahydropterin synthase QueD OS=Brevibacillus brevis X23 OX=1200792 GN=queD PE=4 SV=1
MSANFDFRIVDRMQALGTHIQKSQLRYHNKRVLVSKEFTFDAAHHLHAYEGKCKNLHGHTYTVVFGISGFPDEIGLVIDFGDIKQIWKEHIEIYLDHRYLNEMLPPMNTTAENMVVWIFEEMEKQLQSDAYRDHYNDARVEFVRLFETPTSYAEVRREWMME

SEQ ID NO: 18405 - protein, 162 aa, Brevibacillus brevis
  REGION 1..162: note = tr|A0A1Y4WXU1|A0A1Y4WXU1_BREBE 6-carboxytetrahydropterin synthase QueD OS=Brevibacillus brevis OX=1393 GN=B5G50_22010 PE=4 SV=1
MSANFDFRIVDRMQALGTHIQKSQLRYHNKRVLVSKEFTFDAAHHLHAYEGKCKNLHGHTYTVVFGISGFPDEIGLVIDFGDIKQIWKEHIEIYLDHRYLNEMLPPMNTTAENMVVWIFEEMEKQLQSDAYRDRYDGARVEFVRLFETPTSYAEARREWMTE

SEQ ID NO: 18406 - protein, 163 aa, Brevibacillus choshinensis
  REGION 1..163: note = tr|A0A0Q3SY34|A0A0Q3SY34_BRECH 6-pyruvoyl tetrahydrobiopterin synthase OS=Brevibacillus choshinensis; OX = 54911 GN=AN963_12555 PE=4 SV=1
MSANSFDFRIVDRMQQLGTHIEKSQLRYHNKRVLVSKEFTFDAAHHLHAYEGKCKNLHGHTYQVVFGISGHPDEIGLVIDFGDIKQIWKEHIEIYLDHRYLNEMLPPMNTTAENMVVWMFEQMENQLQSEAYRDRYNGARVEFVRLFETPTSYAEARREWMYE

SEQ ID NO: 18407 - protein, 155 aa, Brevibacillus fluminis
  REGION 1..155: note = tr|A0A3M8DFS4|A0A3M8DFS4_9BACL 6-carboxytetrahydropterin synthase QueD OS=Brevibacillus fluminis OX=511487 GN=queD PE=4 SV=1
MSGFYDFRIVEGLQKFGTDIQKEQLKYHKKRVLVSKEFTFDAAHHLHCYEGKCKNLHGHTYKVVFGISGYADDIGIVIDFGDIKKIWKEHIEIHLDHRYLNETLPLMNTTAENMVVWIFEQMESQLTNGNRVEFVRLFETPTSYAEARREWMYGE

SEQ ID NO: 18408 - protein, 162 aa, Brevibacillus formosus
  REGION 1..162: note = tr|A0A220MLE2|A0A220MLE2_9BACL 6-carboxytetrahydropterin synthase QueD OS=Brevibacillus formosus OX=54913 GN=BP422_18610 PE=4 SV=1
MSANFDFRIVDRMQALGTHIQKSQLRYHNKRVLVSKEFTFDAAHHLHAYEGKCKNLHGHTYTVVFGISGFPDEIGLVIDFGDIKQIWKEHIEIYLDHRYLNEMLPPMNTTAENMVVWIFEEMEKQLQSDAYRDRYNGARVEFVRLFETPTSYAEARREWMME

SEQ ID NO: 18409 - protein, 162 aa, Brevibacillus formosus
  REGION 1..162: note = tr|A0A4Y4I120|A0A4Y4I120_9BACL 6-carboxytetrahydropterin synthase QueD OS=Brevibacillus formosus OX=54913 GN=ygcM PE=4 SV=1
MSANFDFRIVDRMQALGTHIQKSQLRYHNKRVLVSKEFTFDAAHHLHAYEGKCKNLHGHTYTVVFGISGFPDEIGLVIDFGDIKQIWKEHIEIYLDHRYLNEMLPPMNTTAENMVVWIFEEMEKQLQSDAYRDRYNGARVEFVRLFETPTSYAEARREWMIE

SEQ ID NO: 18410 - protein, 162 aa, unidentified
  source 1..162: note = Brevibacillus gelatini
  REGION 1..162: note = tr|A0A3M8BCE9|A0A3M8BCE9_9BACL 6-carboxytetrahydropterin synthase QueD OS=Brevibacillus gelatini OX=1655277 GN=queD PE=4 SV=1
MSANFDFRIVERMQALGTHIQKSQLRYHNKRVLVSKEFTFDAAHHLHAYEGKCKNLHGHTYQVVFGISGYPDEIGLVIDFGDIKQIWKEHIEIYLDHRYLNEMLPPMNTTAENMVVWLFEQMEQQLQSDAYRDRYRGARVEFVRLYETPTSYAEARREWMME

SEQ ID NO: 18411 - protein, 273 aa, unidentified
  source 1..273: note = Brevibacillus gelatini
  REGION 1..273: note = tr|A0A3M8AIB9|A0A3M8AIB9_9BACL 6-pyruvoyl tetrahydropterin synthase OS=Brevibacillus gelatini; OX = 1655277 GN=EDM57_22655 PE=4 SV=1
MLYLSRRIDFSATHVYRVPAWSEEENRRVFGKCNNPSGHGHDYKLEIMVKGPLNEKSGIVVNTTEIKQIANSFVSEELDGKFLDREHPFFQQRIPTTENLVQYIWQSLENRFKGCELHRIRLHENHYLSAEREGGSMTRLTRKYHFCAAHRLHSNDLSPEENIALFGKCNNPHGHGHNYYLDVTVQGEPDPITGMIIHLSELDEIVETVVLNKFDHKHLNLDTEEFKDLNPTSEVVAMVIYNLLHPHLPQLHKIGLWETEKNYFEYYGTGEQT

SEQ ID NO: 18412 - protein, 162 aa, Brevibacillus invocatus
  REGION 1..162: note = tr|A0A3M8C2Q7|A0A3M8C2Q7_9BACL 6-carboxytetrahydropterin synthase QueD OS=Brevibacillus invocatus OX=173959 GN=queD PE=4 SV=1
MSANFDFRIVDRMQTLGTHIDRSQLRYHNKRVLVSKEFTFDAAHHLHAYEGKCKNLHGHTYTVVFGISGYPDEIGLVIDFGDIKQIWKEHIEIYLDHRYLNEMLPAMNTTAENMVVWLFEQMEQQLQSEAYRDHYNGARVEFVRLFETPTSYAEARREWMME

SEQ ID NO: 18413 - protein, 162 aa, Brevibacillus laterosporus
  REGION 1..162: note = tr|H0UFU4|H0UFU4_BRELA Queuosine biosynthesis protein QueD OS=Brevibacillus laterosporus GI-9 OX=1118154; GN = queD PE=4 SV=1
MGNFYDFRIVERLQRYEQDIQKKELRYHQKRVLVSKEFTFDAAHHLHAYEGKCKNLHGHTYKVVFGISGRPNEIGITVDFGDIKTIWKEQIEVYLDHRYLNETLPPMNTTAENMVAWIFEKMEESLTNSSIYLEQDVRVEFVRLFETPTSYAEMRREWMYHE

SEQ ID NO: 18414 - protein, 162 aa, Brevibacillus laterosporus
  REGION 1..162: note = tr|A0A2S5H1H8|A0A2S5H1H8_BRELA 6-carboxytetrahydropterin synthase QueD OS=Brevibacillus laterosporus OX=1465 GN=queD PE=4 SV=1
MGNFYDFHIVERLQRYEQDIQKEELRYHQKRVLVSKEFTFDAAHHLHAYEGKCKNLHGHTYKVVFGISGRPNEIGITVDFGDIKTIWKEQIEVYLDHRYLNETLPQMNTTAENMVAWIFEKMEESLTNISIYQEQGVRVEFVRLFETPTSYAEMRREWMYNE

SEQ ID NO: 18415 - protein, 162 aa, unidentified
  source 1..162: note = Brevibacillus nitrificans
  REGION 1..162: note = tr|A0A3M8CTV8|A0A3M8CTV8_9BACL 6-carboxytetrahydropterin synthase QueD OS=Brevibacillus nitrificans OX=651560 GN=queD PE=4 SV=1
MSANFDFRIVDRMQQLGTHIEKSQLRYHNKRVLVSKEFTFDAAHHLHAYEGKCKNLHGHTYQVVFGISGFPDEIGLVIDFGDIKQIWKEHIEIYLDHRYLNEMLPPMNTTAENMVVWIFEQMEQQLTSEAYHDRYNGARVEFVRLFETPTSYAEARREWMYE

SEQ ID NO: 18416 - protein, 162 aa, Brevibacillus panacihumi
  REGION 1..162: note = tr|V6M620|V6M620_9BACL 6-pyruvoyl tetrahydrobiopterin synthase OS=Brevibacillus panacihumi W25 OX=1408254 GN=T458_21130 PE=4 SV=1
MSAYFDFKIVERMQTLGTDIDHSQLRYHNKRVMVSKEFTFDAAHHLHAYEGKCKNLHGHTYKVVFGISGFPDEIGLVIDFGDIKEIWKKHIEIYLDHRYLNEMLPPMNTTAENMVVWIFEQMEQQLQSSTYRDRYKGAWLEFVRLYETPTSYAEARREWMVE

SEQ ID NO: 18417 - protein, 162 aa, Brevibacillus panacihumi
  REGION 1..162: note = tr|A0A3M8CRK4|A0A3M8CRK4_9BACL 6-carboxytetrahydropterin synthase QueD OS=Brevibacillus panacihumi OX=497735 GN=queD PE=4 SV=1
MSAYFDFKIVERMQTLGTDIDHSQLRYHNKRVMVSKEFTFDAAHHLHAYEGKCKNLHGHTYKVVFGISGFPDEIGLVIDFGDIKEIWKKHIEIYLDHRYLNEMLPPMNTTAENMVVWIFEQMEQQLQSSTYRDRYKGARVEFVRLYETPTSYAEARREWMVE

SEQ ID NO: 18418 - protein, 162 aa, Brevibacillus parabrevis
  REGION 1..162: note = tr|A0A4Y3PWT4|A0A4Y3PWT4_BREPA 6-carboxytetrahydropterin synthase QueD OS=Brevibacillus parabrevis OX=54914 GN=ygcM PE=4 SV=1
MSANFDFRIVDRMQTLGTHIQQSQLRYHNKRVLVSKEFTFDAAHHLHAYEGKCKNLHGHTYHVVFGISGYPDEIGLVIDFGDIKQIWKEHIEIYLDHRYLNEMLPPMNTTAENMVVWLFEQMEQQLQSDVYRDRYRGARVEFVRLFETPTSYAEARREWMME

SEQ ID NO: 18419 - protein, 160 aa, Brevibacillus reuszeri
  REGION 1..160: note = tr|A0A0K9YKE7|A0A0K9YKE7_9BACL 6-pyruvoyl tetrahydrobiopterin synthase OS=Brevibacillus reuszeri; OX = 54915 GN=ADS79_24810 PE=4 SV=1
MSANFDFRIIDRMQALGTHIQKSELRYHNKRILVSKEFTFDAAHHLHAYEGKCKNLHGHTYKVVFGISGFPDEIGLVIDFGDIKQIWKEHIEVYLDHRYLNEMLPLMNTTAENMVVWIFEQMDNQLQSDTYRNRYNEARVEFVRLFETPTSYAEARREWM

SEQ ID NO: 18420 - protein, 162 aa, Brevibacillus sp.
  REGION 1..162: note = tr|A0A553KQC4|A0A553KQC4_9BACL 6-carboxytetrahydropterin synthase QueD OS=Brevibacillus sp. LEMMJ03 OX=2595056 GN=queD PE=4 SV=1
MSGFFDFRIVDRLQTLGKEIQKEQLRYHRKRVLVSKEFTFDAAHHLHAYEGKCKNLHGHTYKVVFGISGYPNEIGIVIDFGDIKEIWKRHIEVYLDHRYLNEMLPPMNTTAENMVVWLFEQMEAQLCSEAYRDRYDGARVEFVRLYETPTSYAEARREWMYE

SEQ ID NO: 18421 - protein, 162 aa, Brevibacillus sp.
  REGION 1..162: note = tr|A0A2P7ULK1|A0A2P7ULK1_9BACL 6-carboxytetrahydropterin synthase QueD OS=Brevibacillus sp. NRRL NRS-1210 OX=2126352 GN=queD PE=4 SV=1
MSANFDFRIVDRMQALGTHIQKSQLRYHNKRVLVSKEFTFDAAHHLHAYEGKCKNLHGHTYTVVFGISGFPDEIGLVIDFGDIKQIWKEHIEIYLDHRYLNEMLPPMNTTAENMVVWIFEEMEKQLQSDAYRDRYNGARVEFVRLFETPTSYAETRREWMME

SEQ ID NO: 18422 - protein, 127 aa, Brevibacterium antiquum
  REGION 1..127: note = tr|A0A2H1KID4|A0A2H1KID4_9MICO 6-pyruvoyltetrahydropterin/6-carboxytetrahydropterin synthase OS=Brevibacterium antiquum OX=234835; GN = BANT10_03105 PE=4 SV=1
MFSLSVNDHVMIAHSLPDEFFGPAQALHGATLAVEATFTSDQLDEHSVVLDIGQALQMLDDALAPLQYANLDEHPDFAGRFSTSEAIAEHIGTSLSVSLADRPDIGISVHLRENPRAAVSYTVVNRP

SEQ ID NO: 18423 - protein, 127 aa, Brevibacterium antiquum; identical to SEQ ID NO: 18422
  REGION 1..127: note = tr|A0A2H1JQF6|A0A2H1JQF6_9MICO 6-pyruvoyltetrahydropterin/6-carboxytetrahydropterin synthase OS=Brevibacterium antiquum CNRZ 918 OX=1255637; GN = BANT918_01781 PE=4 SV= 1

SEQ ID NO: 18424 - protein, 127 aa, Brevibacterium aurantiacum
  REGION 1..127: note = tr|A0A1D7W3B9|A0A1D7W3B9_9MICO 6-carboxytetrahydropterin synthase OS=Brevibacterium aurantiacum OX=273384 GN=BAUR9175_00898 PE=4 SV=1
MFSLSVNDHVMIAHSLPHEFFGPAQSLHGATLAVEVTFTRAELDEHAVVLDIGEALALLDDALTPLQYANLDEHPDFAGRFSTSETIAEYIGTRLSVSLADRPDIGIAVHLRENPRAAVSYTVANRP

SEQ ID NO: 18425 - protein, 127 aa, Brevibacterium aurantiacum
  REGION 1..127: note = tr|A0A2A3ZNR1|A0A2A3ZNR1_9MICO 6-carboxytetrahydropterin synthase OS=Brevibacterium aurantiacum OX=273384 GN=CIK59_13535 PE=4 SV=1
MFSLSVNDHVMIAHSLPHEFFGPAQALHGATLAVEVTFTREELDEHRVVLDIGEALALLDEALTPLRYTNLDEHPDFAGRLSTSEAIAEYIGTDLSTSLADRPEIGITVHLRENPRAAVSYTVANRP

SEQ ID NO: 18426 - protein, 156 aa, unidentified
  source 1..156: note = [Brevibacterium] frigoritolerans
  REGION 1..156: note = tr|A0A4Y8U7L4|A0A4Y8U7L4_9BACI 6-carboxytetrahydropterin synthase QueD; OS = [Brevibacterium] frigoritolerans OX=450367 GN=queD PE=4; SV = 1
MYGFKIVDKLQKIDEDIQRSQLKYTNKRVLVSKEFTFDAAHHLHDYEGKCKNLHGHTYKVIFGLSGYTDSRGLMIDFGDIKDIWKNEIEIHLDHRYLNETLPLMNTTAENMVVWIYEKMAEALSSKEYEGARVEFVRLYETPTSYAEARREWMESE

SEQ ID NO: 18427 - protein, 156 aa, unidentified; identical to SEQ ID NO: 17936
  source 1..156: note = [Brevibacterium] frigoritolerans
  REGION 1..156: note = tr|A0A3Q9SJH9|A0A3Q9SJH9_9BACI 6-carboxytetrahydropterin synthase QueD; OS = [Brevibacterium] frigoritolerans OX=450367 GN=queD PE=4; SV = 1

SEQ ID NO: 18428 - protein, 127 aa, Brevibacterium linens
  REGION 1..127: note = tr|A0A0B9A4L2|A0A0B9A4L2_BRELN Uncharacterized protein OS=Brevibacterium linens OX=1703 GN=AE0388_0812; PE = 4 SV=1
MFGLTVNDHVMIAHSLPDEFFGPAQGVHGATLEVSATFTRPSLDEHSVVLDIGEAMTLLDAALTPLRYANLDEHPDFTGKLSTTEAVAEYIGQRLAGSLADRPEIGISIELRENPRAAITYTVPERA

SEQ ID NO: 18429 - protein, 127 aa, Brevibacterium linens
  REGION 1..127: note = tr|A0A142NL69|A0A142NL69_BRELN 6-pyruvoyl tetrahydrobiopterin synthase OS=Brevibacterium linens; OX = 1703 GN=A2T55_06835 PE=4 SV=1
MFGLTVNDHVMIAHSLPDEFFGLAQGVHGATLEVSATFTRPSLDEHSVVLDIGEAMTLLDAALSPLRYANLDEHPDFTGKLSTTEAVAEYIGQRLAESLADRPEIGISIELRENPRAAITYTVPERA

SEQ ID NO: 18430 - protein, 139 aa, Brevibacterium luteolum
  REGION 1..139: note = tr|A0A2N6PGV9|A0A2N6PGV9_9MICO 6-pyruvoyl tetrahydrobiopterin synthase OS=Brevibacterium luteolum; OX = 199591 GN=CJ198_08895 PE=4 SV=1
MFRLSINDHIMIAHSLPDPFFGPAQHMHGATLAVEAHFETAELDSHGVVLDIGRAGEILSAALDPLRYANLDEHPDFAGKISTTEVIAAHIGSRLRAALADRPDISIAVTLDENPNARVTYTVPPAPTLHPADPGPRQV

SEQ ID NO: 18431 - protein, 127 aa, Brevibacterium sandarakinum; identical to SEQ ID NO: 18425
  REGION 1..127: note = tr|A0A1H1LQ28|A0A1H1LQ28_9MICO 6-pyruvoyltetrahydropterin/6-carboxytetrahydropterin synthase OS=Brevibacterium sandarakinum OX=629680; GN = SAMN04489751_0374 PE=4 SV=1

SEQ ID NO: 18432 - protein, 151 aa, unidentified
  source 1..151: note = Brevibacterium siliguriense
  REGION 1..151: note = tr|A0A1H1W1X6|A0A1H1W1X6_9MICO 6-pyruvoyltetrahydropterin/6-carboxytetrahydropterin synthase OS=Brevibacterium siliguriense OX=1136497; GN = SAMN04489752_2821 PE=4 SV=1
MLARNYLQPGGEEPDRHPDKKEKTMFGLTVNDHVMIAHSLPDEFFGSAQGMHGATLDVSASFTRPSLDEHSVVLDIGEAMSMLDAALSPLRYANLDEHPDFAGKLSTTEAIAEYIGQRLTESLADRPEIGISIELRENPRAAITYTVPESA

SEQ ID NO: 18433 - protein, 127 aa, Brevibacterium sp.
  REGION 1..127: note = tr|A0A4P8H9Q6|A0A4P8H9Q6_9MICO 6-carboxytetrahydropterin synthase OS=Brevibacterium sp. CS2 OX=2575923 GN=FDF13_03200 PE=4 SV=1
MFSLTVNDHVMIAHSLPDEFFGPAQGVHGATLTVDATFTRAELDPHSVVLDIGHASQLLDEALAPLRYANLDTHPDFAGRLSTTEAVARYIGERLAAGLAEQPDIGITVSIVENPRASVSYTVPGRT

SEQ ID NO: 18434 - protein, 127 aa, Brevibacterium sp.
  REGION 1..127: note = tr|A0A2H1HYL5|A0A2H1HYL5_9MICO 6-pyruvoyl tetrahydropterin synthase OS=Brevibacterium sp. 239c; OX = 1965356 GN=BSP239C_00169 PE=4 SV=1
MFTLSVNDHVMIAHSLPHEFFGPAQALHGATLAVEVTFTREELDEHRVVLDIGEALALLDEALTPLRYTNLDEHPDFAGRLSTSEAIAEYIGTGLSTSLADRPEIGITVHLRENPRAAVSFTVANRP

SEQ ID NO: 18435 - protein, 121 aa, unidentified
  source 1..121: note = Brevifollis gellanilyticus
  REGION 1..121: note = tr|A0A512M6V0|A0A512M6V0_9BACT 6-carboxy-5,6,7,8-tetrahydropterin synthase OS=Brevifollis gellanilyticus OX=748831 GN=BGE01nite_17530 PE=3 SV=1
MRARIIKDFRFEAAQTLPTLPSDHKCTKMHGHSFKVEITVEGEVDPKIGWVYDHAEISRAMKPILDRLDHSYLNEIEGLENPTIEYMAAWLWKKLAPQLPGLAEITIHETPSARCVFRGEF

SEQ ID NO: 18436 - protein, 118 aa, unidentified
  source 1..118: note = Brevirhabdus pacifica
  REGION 1..118: note = tr|A0A1U7DHH7|A0A1U7DHH7_9RHOB 6-carboxy-5,6,7,8-tetrahydropterin synthase; OS = Brevirhabdus pacifica OX=1267768 GN=BV394_06650 PE=3; SV = 1
MYRITKEFHFSASHQLCRLPDDHPCARMHGHNYIVEVELSSETLDDDGFVVDYRALAPLKSWIDDTLDHRHLNEVFGHDGVTSEWLARTIFDRARASWPQVSAVRISETPKTWAEYRP

SEQ ID NO: 18437 - protein, 123 aa, unidentified
  source 1..123: note = Brevundimonas abyssalis
  REGION 1..123: note = tr|U3AQH9|U3AQH9_9CAUL 6-carboxy-5,6,7,8-tetrahydropterin synthase; OS = Brevundimonas abyssalis TAR-001 OX=1391729; GN = MBEBAB_2209 PE=3 SV=1
MTKPVFEITKAATFDAAHHFPNEPEGSPYRRIHGHSFQVEVSIRSDRLDANGWVADLNALDAALKAAAGELDHGMLNEHAGLEVPSLEHLCLWFARRLTPAWPGLSRVVVSRPTIHERCALEL

SEQ ID NO: 18438 - protein, 178 aa, Brevundimonas diminuta
  REGION 1..178: note = tr|A0A1Z3LW82|A0A1Z3LW82_BREDI 6-pyruvoyl tetrahydropterin synthase OS=Brevundimonas diminuta OX=293; GN = CD943_05990 PE=4 SV=1
MPAVRFTRRFSMAHRLIADAGSKCAVPHGHNEFVTVTLEPTAEIAFGGSNYAASFERLKARWHGFVDRSLDHAFQLNRADPLLAWFQQHEPHRLNQVLTVDGDPTTEALVIALWRKLEAILSAEGLPFRLAELAIEETPTNTVLARGLTEAERVWALGAWCDRADFSINDLLPPETWS

SEQ ID NO: 18439 - protein, 122 aa, Brevundimonas diminuta
  REGION 1..122: note = tr|A0A3D4DB98|A0A3D4DB98_BREDI 6-carboxy-5,6,7,8-tetrahydropterin synthase; OS = Brevundimonas diminuta OX=293 GN=DIV82_03645 PE=3 SV=1
MYELTKQFRFDCAHTLERVVETEGSRRIHGHSYRAQVTLRGKPDPVSGMIIDTSLLAMKLAQARDALDHRFLDEINDLGPGTMENLCAYIWRKLEDDIPTLFSVTVLRDSTEDQVTYFGEAA

SEQ ID NO: 18440 - protein, 122 aa, Brevundimonas intermedia
  REGION 1..122: note = tr|A0A4Y9RV27|A0A4Y9RV27_9CAUL 6-carboxy-5,6,7,8-tetrahydropterin synthase; OS = Brevundimonas intermedia OX=74315 GN=EGY25_12135 PE=3; SV = 1
MPVFEITKQATFDAAHHFPNEPEGSIYRRVHGHSFTVEATVRSEVLDAEHGWVADLGALDRALKAAAETLDHGMLNEHPGLELPSLENLCLWFVKTLKPEWPGLCRVQVARPTINERCVLSL

SEQ ID NO: 18441 - protein, 178 aa, Brevundimonas naejangsanensis
  REGION 1..178: note = tr|A0A172Y7E3|A0A172Y7E3_9CAUL 6-pyruvoyl tetrahydropterin synthase OS=Brevundimonas naejangsanensis; OX = 588932 GN=DA69_10125 PE=4 SV=1
MPAVRFTRRFSMAHRLIADAGSKCAVPHGHNEFVTVTLEPTAEIDFGGANYAASFERLKARWHGFVDRSLDHAFQLNRADPLLAWFQQHEPHRLNQVLTVDGDPTTEALVIALWRKLEAILAAEGLPFRLAELAIEETPTNTVLTRGLTEAERAWALGAWCDRADFSINDLLPPETWS

SEQ ID NO: 18442 - protein, 178 aa, Brevundimonas naejangsanensis
  REGION 1..178: note = tr|A0A4P7BSF0|A0A4P7BSF0_9CAUL 6-pyruvoyl tetrahydropterin synthase OS=Brevundimonas naejangsanensis; OX = 588932 GN=E3U41_14735 PE=4 SV=1
MPAVRFTRRFSMAHRLIADAGSKCAVPHGHNEFVTVTLEPTAEIDFGGANYAASFERLKARWHGFVDRSLDHAFQLNRADPLLGWFQQHEPHRLNQVLTVDGDPTTEALVIALWRKLEAILQAEGLPFRLAELAIEETPTNTVLTRGLTEAERAWALGAWCDRADFSINDLLPPETWS

SEQ ID NO: 18443 - protein, 122 aa, Brevundimonas nasdae
  REGION 1..122: note = tr|A0A0B4CS19|A0A0B4CS19_9CAUL 6-carboxy-5,6,7,8-tetrahydropterin synthase; OS = Brevundimonas nasdae OX=172043 GN=RM53_10065 PE=3 SV=1
MPVFEITKQATFDAAHHFPNEPEGSIYRRVHGHSFTVEATVRSEVLDVEHGWVADLGALDRALKAAAETLDHGMLNEHEGLALPSLENLCLWFAKTLKPEWPGLCRIQVARPTINERCVLSL

SEQ ID NO: 18444 - protein, 178 aa, Brevundimonas sp.
  REGION 1..178: note = tr|A0A1R1I6L9|A0A1R1I6L9_9CAUL 6-pyruvoyl tetrahydropterin synthase OS=Brevundimonas sp. ZS04; OX = 1906854 GN=BJP32_15595 PE=4 SV=1
MPAVRFTRRFSMAHRLIADAGSKCAVPHGHNEFVTVTLEPTAEIAFGGSNHAASFERLKARWHGFVDRSLDHAFQLNRADPLLAWFRQHEPHRLNQVLTVDGDPTTEALVIALWRKLEAILAAEGLPFRLAELAIEETPTNTVLTRGLTEAERAWELGAWCDRADFSINDLLPPETWS

SEQ ID NO: 18445 - protein, 121 aa, Brevundimonas sp.
  REGION 1..121: note = tr|A0A0Q7T8K2|A0A0Q7T8K2_9CAUL 6-carboxy-5,6,7,8-tetrahydropterin synthase; OS = Brevundimonas sp. Root1423 OX=1736462 GN=ASD25_02015; PE = 3 SV=1
MSVFEITKAATFDAAHHFPNEPDGSPYRRMHGHSFSVEATVRGEALDGHGWVADLGALDRALKDAAEELDHGLLNDKPGLELPTLEHLCLWFAERLKPEWPGLSRITVARPTIHERCTLSL

SEQ ID NO: 18446 - protein, 175 aa, Brevundimonas subvibrioides
  REGION 1..175: note = tr|D9QN44|D9QN44_BRESC Uncharacterized protein; OS = Brevundimonas subvibrioides (strain ATCC 15264 / DSM 4735 / LMG 14903 / NBRC 16000 / CB 81) OX=633149; GN = Bresu_0932PE=4 SV=1
MPQVRFTRRFSMAHRLLADAGSRCAVPHGHNEFVTVTLATDAAIDFGGSNYVASFETLKKRWHGFIDGAVDHAFQVGSADPLLDWFRTHEPHRLGQLMVFEGDPTTEAFAIALRRKLDAFLADDGSPYRCVELALEETPTNTIVMGEHLSAAERGWAAGSWMDRPDMSINDLSLA

SEQ ID NO: 18447 - protein, 174 aa, Brevundimonas subvibrioides
  REGION 1..174: note = tr|A0A258FQQ1|A0A258FQQ1_9CAUL 6-pyruvoyl tetrahydropterin synthase OS=Brevundimonas subvibrioides; OX = 74313 GN=B7Z01_07010 PE=4 SV=1
MPQVRFTRRFSMAHRLLADAGSRCAVPHGHNEFVTVTLATDAQMDFGGSNYVASFESLKTRWHGFIDGAVDHAFQVGAADPLLDWFRTHEPQRLNQIMVFDGDPTTEAFAIALRRKIDAILTAENSAYRCIELALEETPTNTIVVGETLSAAERGWMAGGWMDRPDLTINDLTP

SEQ ID NO: 18448 - protein, 178 aa, Brevundimonas vancanneytii
  REGION 1..178: note = tr|A0A4P1JVU7|A0A4P1JVU7_9CAUL Queuosine biosynthesis protein QueD OS=Brevundimonas vancanneytii; OX = 1325724 GN=NCTC9239_00387 PE=4 SV=1
MPAVRFTRRFSMAHRLIADAGSKCAVPHGHNEFVTVTLEPTAEIAFGGSNHAASFERLKARWHGFVDRSLDHAFQLNRADPLLAWFQQHEPHRLNQVLTVDGDPTTEALVIALWRKLEAILAAEGLPFRLAELAIEETPTNTVLTRGLTEAERAWELGAWCDRADFSINDLLPPETWS

SEQ ID NO: 18449 - protein, 170 aa, Brevundimonas vancanneytii
  REGION 1..170: note = tr|A0A4P1K2S4|A0A4P1K2S4_9CAUL Queuosine biosynthesis protein QueD OS=Brevundimonas vancanneytii; OX = 1325724 GN=NCTC9239_01366 PE=4 SV=1
MPFHSIKTYGAERGLSCVFRQWDARTDCQLMHGYSLGFRFTFAAETLDRRGWVLDFGEGGFGAVRRWLHATFDHTLLVAADDPAREKFEELARCGLADIRMVPGTSCERLAQHVFAMVQPMVHDATQGRCRLRAVECFEHGANSAVYEQPDAQLQQTVDDVMRAVLERLE

SEQ ID NO: 18450 - protein, 122 aa, Brevundimonas vesicularis
  REGION 1..122: note = tr|A0A2X1B773|A0A2X1B773_BREVE 6-carboxy-5,6,7,8-tetrahydropterin synthase; OS = Brevundimonas vesicularis OX=41276 GN=queD PE=3 SV=1
MPVFEITKQATFDAAHHFPNEPEGSIYRRVHGHSFTVEATVRSEVLDVEHGWVADLGALDRALKAAAETLDHGMLNEHEGLELPSLENLCLWFAKTLKPEWPGLCRIQVARPTINERCVLSL

SEQ ID NO: 18451 - protein, 122 aa, Brevundimonas vesicularis
  REGION 1..122: note = tr|A0A1Z3UB08|A0A1Z3UB08_BREVE 6-carboxy-5,6,7,8-tetrahydropterin synthase; OS = Brevundimonas vesicularis OX=41276 GN=CEP68_13930 PE=3; SV = 1
MPVFEITKQATFDAAHHFPNEPEGSIYRRIHGHSFTVEATVRSEVLDVEHGWVADLGALDRALKAAAETLDHGMLNEHEGLELPSLENLCLWFAKTLKPEWPGLCRVQVARPTINERCVLSL

SEQ ID NO: 18452 - protein, 174 aa, unidentified
  source 1..174: note = Brevundimonas viscosa
  REGION 1..174: note = tr|A0A1I6SJT2|A0A1I6SJT2_9CAUL 6-pyruvoyltetrahydropterin/6-carboxytetrahydropterin synthase OS=Brevundimonas viscosa OX=871741; GN = SAMN05192570_2504 PE=4 SV=1
MAWMSTKTYGADRGLSCAWRQWPARSHCALLHGYSLGFRFTFAAEQLDARGWVIDFGKGGFGPIRDWLHETFDHTLLVAADDPEMPEFLRLRDRGLAEVRILPGVSCERIAAWVGEQMEPGVRERTGGRCWIDSVECFEHGANSAIWRNPEAVLRQVSAEILNRALTGEAGIQA

SEQ ID NO: 18453 - protein, 122 aa, unidentified
  source 1..122: note = Brevundimonas viscosa
  REGION 1..122: note = tr|A0A1I6S1P6|A0A1I6S1P6_9CAUL 6-carboxy-5,6,7,8-tetrahydropterin synthase; OS = Brevundimonas viscosa OX=871741 GN=SAMN05192570_2098; PE = 3 SV=1
MPVFEITKQATFDAAHHFPNEPEGSIYRRVHGHSFTVEATVRSETLDAEHGWVADLGALDRALRTAAEELDHGMLNEKPGLELPSLENLCLWFANRLGGEWPGLCRIQVARPTINERCVLTL

SEQ ID NO: 18454 - protein, 121 aa, unidentified
  source 1..121: note = Brucella abortus
  REGION 1..121: note = tr|D7H080|D7H080_BRUAO 6-carboxy-5,6,7,8-tetrahydropterin synthase OS=Brucella abortus bv. 5 str. B3196 OX=520453 GN=BAYG_00104 PE=3 SV=1
MFRITKEFHFSASHQLTGLPADHQCARLHGHNYIVEVELSAPDLDTHGFVRDYHELAALKHYIDDTFDHRHLNDVLGHEQTTAERLAKHFFDWCHARWPEISAVRVSETPKTWAEYRPGKP

SEQ ID NO: 18455 - protein, 121 aa, unidentified; identical to SEQ ID NO: 18454
  source 1..121: note = Brucella abortus
  REGION 1..121: note = tr|Q57AT1|Q57AT1_BRUAB 6-carboxy-5,6,7,8-tetrahydropterin synthase OS=Brucella abortus biovar 1 (strain 9-941) OX=262698 GN=BruAb1_1949; PE = 3 SV=1

SEQ ID NO: 18456 - protein, 121 aa, unidentified; identical to SEQ ID NO: 18454
  source 1..121: note = Brucella canis
  REGION 1..121: note = tr|A9M960|A9M960_BRUC2 6-carboxy-5,6,7,8-tetrahydropterin synthase OS=Brucella canis (strain ATCC 23365 / NCTC 10854) OX=483179; GN = BCAN_A2018 PE=3 SV=1

SEQ ID NO: 18457 - protein, 121 aa, Brucella ceti
  REGION 1..121: note = tr|C0G803|C0G803_9RHIZ 6-carboxy-5,6,7,8-tetrahydropterin synthase OS=Brucella ceti str. Cudo OX=595497 GN=queD PE=3 SV=1
MFRITKEFHFSASHQLTGLPADHQCARLHGHNYIVEVELSAPNLDTHGFVRDYHELAALKHYIDDTFDHRHLNDVLGHEQTTAERLAKHFFDWCHARWPEISAMRVSETPKTWAEYRPGKP

SEQ ID NO: 18458 - protein, 121 aa, Brucella melitensis; identical to SEQ ID NO: 18454
  REGION 1..121: note = tr|C0RFL6|C0RFL6_BRUMB 6-carboxy-5,6,7,8-tetrahydropterin synthase OS=Brucella melitensis biotype 2 (strain ATCC 23457) OX=546272 GN=queD; PE = 3 SV=1

SEQ ID NO: 18459 - protein, 148 aa, Brucella melitensis
  REGION 1..148: note = tr|Q8YJI9|Q8YJI9_BRUME Vacuolar ATP synthase 16 kd proteolipid subunit OS=Brucella melitensis biotype 1 (strain 16M / ATCC 23456 / NCTC 10094) OX=224914; GN = BMEI0094PE=4 SV=1
MFRITKEFHFSASHQLTGLPADHQCARLHGHNYIVEVELSAPDLDTHGFVRDYHELAALKHYIDDTFDHRHLNDVLGHEQTTAERLAKHFFDWCHARWPEISAVRSAKHRRPGRNTGPENHDETRNETCNETRPRNPHQRDFRPDHSR

SEQ ID NO: 18460 - protein, 121 aa, Brucella microti; identical to SEQ ID NO: 18454
  REGION 1..121: note = tr|C7LEK2|C7LEK2_BRUMC 6-carboxy-5,6,7,8-tetrahydropterin synthase OS=Brucella microti (strain CCM 4915) OX=568815 GN=queD PE=3 SV=1

SEQ ID NO: 18461 - protein, 121 aa, unidentified; identical to SEQ ID NO: 18454
  source 1..121: note = Brucella neotomae
  REGION 1..121: note = tr|A0A381B9S8|A0A381B9S8_BRUNE 6-carboxy-5,6,7,8-tetrahydropterin synthase OS=Brucella neotomae OX=29460 GN=queD PE=3 SV=1

SEQ ID NO: 18462 - protein, 121 aa, unidentified; identical to SEQ ID NO: 18454
  source 1..121: note = Brucella ovis
  REGION 1..121: note = tr|A0A0H3ASS0|A0A0H3ASS0_BRUO2 6-carboxy-5,6,7,8-tetrahydropterin synthase OS=Brucella ovis (strain ATCC 25840 / 63/290 / NCTC 10512) OX=444178; GN = queD PE=3 SV=1

SEQ ID NO: 18463 - protein, 121 aa, unidentified; identical to SEQ ID NO: 18454
  source 1..121: note = Brucella ovis
  REGION 1..121: note = tr|N8N9N1|N8N9N1_BRUOV 6-carboxy-5,6,7,8-tetrahydropterin synthase OS=Brucella ovis IntaBari-2002-82-58 OX=1293916 GN=H715_01884 PE=3 SV=1

SEQ ID NO: 18464 - protein, 121 aa, Brucella pinnipedialis; identical to SEQ ID NO: 18454
  REGION 1..121: note = tr|A0A0E1WZ05|A0A0E1WZ05_9RHIZ 6-carboxy-5,6,7,8-tetrahydropterin synthase OS=Brucella pinnipedialis M292/94/1 OX=520462 GN=BALG_00102 PE=3 SV=1

SEQ ID NO: 18465 - protein, 121 aa, Brucella sp.
  REGION 1..121: note = tr|A0A1M4LDU6|A0A1M4LDU6_9RHIZ 6-carboxy-5,6,7,8-tetrahydropterin synthase OS=Brucella sp. 10RB9215 OX=1149953 GN=queD PE=3 SV=1
MFRITKEFHFSASHQLTGLPADHQCARLHGHNYIVEVELSAPDLDTHGFVRDYHELAAFKHYIDDTFDHRHLNDVLGHEQTTAERLAKHFFDWCHARWPEISAVRVSETPKTWAEYRPGKP

SEQ ID NO: 18466 - protein, 121 aa, Brucella sp.; identical to SEQ ID NO: 18465
  REGION 1..121: note = tr|A0A1P8S3S1|A0A1P8S3S1_9RHIZ 6-carboxy-5,6,7,8-tetrahydropterin synthase OS=Brucella sp. 09RB8910 OX=1844051 GN=BKD02_06330 PE=3 SV=1

SEQ ID NO: 18467 - protein, 121 aa, unidentified; identical to SEQ ID NO: 18454
  source 1..121: note = Brucella suis
  REGION 1..121: note = tr|A0A4Z0F785|A0A4Z0F785_BRUSS 6-carboxy-5,6,7,8-tetrahydropterin synthase OS=Brucella suis OX=29461 GN=queD PE=3 SV=1

SEQ ID NO: 18468 - protein, 121 aa, unidentified; identical to SEQ ID NO: 18454
  source 1..121: note = Brucella suis
  REGION 1..121: note = tr|B0CIX6|B0CIX6_BRUSI 6-carboxy-5,6,7,8-tetrahydropterin synthase OS=Brucella suis (strain ATCC 23445 / NCTC 10510) OX=470137; GN = BSUIS_A1813 PE=3 SV=1

SEQ ID NO: 18469 - protein, 122 aa, unidentified
  source 1..122: note = Brucellaceae bacterium
  REGION 1..122: note = tr|A0A3P1V1F7|A0A3P1V1F7_9RHIZ 6-carboxy-5,6,7,8-tetrahydropterin synthase; OS = Brucellaceae bacterium VT-16-1752 OX=2487907 GN=queD; PE = 3 SV=1
MFRITKEFHFSASHQLTGLPADHQCARLHGHNYIVEVELSAPDLDGHGFVRDYHELAPFKRYIDDAFDHRHLNDVLGHGQTTAETLAKHFFDWCHARWPEISAVRVSETPKTWAEYRPSAKP

SEQ ID NO: 18470 - protein, 133 aa, unidentified
  source 1..133: note = Brumimicrobium aurantiacum
  REGION 1..133: note = tr|A0A3E1F1N4|A0A3E1F1N4_9FLAO 6-carboxy-5,6,7,8-tetrahydropterin synthase; OS = Brumimicrobium aurantiacum OX=1737063 GN=DXU93_01960; PE = 3 SV=1
MVKIGRRTTFNSAHRLHNDKWSDEKNQKVFGKCNSPNYHGHNYTLETWVEGEIDPETGFLIDLADLKQIIKEEIEEEFDHRNLNLDVPAFKDLNPTAENIAKVIYQKLKPRLQGFKLTVRLSETQNNMVEYSE

SEQ ID NO: 18471 - protein, 143 aa, unidentified
  source 1..143: note = Brumimicrobium aurantiacum
  REGION 1..143: note = tr|A0A3E1EV56|A0A3E1EV56_9FLAO 6-carboxytetrahydropterin synthase OS=Brumimicrobium aurantiacum OX=1737063 GN=DXU93_13395 PE=4 SV=1
MKTVYITRKEHFNAAHKLWNDEWSDEKNEAIFGKCSNKNWHGHNFNIFVTVKGVPCEDTGFVMNLKDLSKITKEYVVEALDHKNLNLDVPFMKGILASTENLVMEIWDQIEEPIAKAGGILSKIRLEETENNYVEYYGGKEPF

SEQ ID NO: 18472 - protein, 143 aa, Brumimicrobium glaciale
  REGION 1..143: note = tr|A0A4Q4KJS2|A0A4Q4KJS2_9FLAO 6-carboxytetrahydropterin synthase OS=Brumimicrobium glaciale OX=200475 GN=ERX46_12900 PE=4 SV=1
MKTVYITRREHFNAAHKLWNEGWSDEKNEAVFGKCSNKNWHGHNFNIFVTVKGTPSTDTGFVINLKDLSQIMKDYVVEALDHKNLNLDVPFMKGVLASTENLVMKIWEEIEGPIKKAGGVLSKIKLEETENNYVEYYGGNEPF

SEQ ID NO: 18473 - protein, 133 aa, Brumimicrobium glaciale
  REGION 1..133: note = tr|A0A4Q4KLQ9|A0A4Q4KLQ9_9FLAO 6-carboxy-5,6,7,8-tetrahydropterin synthase; OS = Brumimicrobium glaciale OX=200475 GN=ERX46_08015 PE=3; SV = 1
MIKIGRRTTFNAAHRLHNAKWSEDKNNEVFGKCNSPNFHGHNYVMETWVKGDIDPDTGFVINLTDLKKIIKEEIEDEFDHRNLNLDVPAFKNLNPTAENIAKVIYEKLKPRLKQYELTIRLYETQNNIVEYTG

SEQ ID NO: 18474 - protein, 148 aa, unidentified
  source 1..148: note = Brumimicrobium salinarum
  REGION 1..148: note = tr|A0A2I0R626|A0A2I0R626_9FLAO 6-carboxy-5,6,7,8-tetrahydropterin synthase; OS = Brumimicrobium salinarum OX=2058658 GN=CW751_01455 PE=3; SV = 1
MNEEKIRVTKRFTFEMAHALYDYDGNCRYIHGHSYKLYVTIIGAVKKNDSSPKDGMVCDFSDLKKIVNENIVDVYDHALVLNQKDSDKINVLKGEQRTYYFPVQPTCENLLLHFKNTLQSVLPSELKLANIKLYETEGSYAEWDINDQ

SEQ ID NO: 18475 - protein, 143 aa, unidentified
  source 1..143: note = Brumimicrobium salinarum
  REGION 1..143: note = tr|A0A2I0R1X8|A0A2I0R1X8_9FLAO 6-pyruvoyl tetrahydrobiopterin synthase OS=Brumimicrobium salinarum; OX = 2058658 GN=CW751_09350 PE=4 SV=1
MKTVYITRREHFNAAHKLWNEEWSDEKNESVFGKCSNKNWHGHNFNIFVTVKGVPHEETGFVINLKDLSKIMKDHVVEALDHKNLNLDVPFMNGVLASTENLVIKIWEEIEKPIQEAGGELAKIRLEETENNYVEYFGENTPY

SEQ ID NO: 18476 - protein, 143 aa, Brumimicrobium sp.
  REGION 1..143: note = tr|A0A2U2XFE5|A0A2U2XFE5_9FLAO 6-pyruvoyl tetrahydrobiopterin synthase OS=Brumimicrobium sp. C305; OX = 2100725 GN=DIT68_04590 PE=4 SV=1
MKTVYITRREHFNAAHKLWNEEWSDEKNEAVFGKCSNKNWHGHNFNIFVTVKGVPNVDTGFVINLKDLSKIMKEYVVEALDHKNLNLDVPFMNGVLASTENLVMKIWEEIEEPIKKAGGVLAKIRLEETENNYVEYYGGNEPF

SEQ ID NO: 18477 - protein, 150 aa, Brumimicrobium sp.
  REGION 1..150: note = tr|A0A2U2XAB3|A0A2U2XAB3_9FLAO 6-carboxytetrahydropterin synthase QueD OS=Brumimicrobium sp. C305 OX=2100725 GN=DIT68_13315 PE=4 SV=1
MNRNILRVTKRFTFEMAHALMNYDGNCQYIHGHSYKLYVTLLGLVKDSPNMAKDGMVCDFSSLKKIVNDKIIDRFDHTLVLNANDESKTKFNQPNQRILLFPVQPTCENLLLHFKNELLSDLPDDLTLANIKLYETEGSFAEWDIHDQNF

SEQ ID NO: 18478 - protein, 174 aa, unidentified
  source 1..174: note = Bryobacterales bacterium
  REGION 1..174: note = tr|A0A350UQF6|A0A350UQF6_9BACT 6-pyruvoyl tetrahydrobiopterin synthase OS=Bryobacterales bacterium; OX = 2026791 GN=DCY80_19720 PE=4 SV=1
MPENEEPGRPVVRVTRRYRFSASHRLHAPELSAERNREVYGKCNNPYGHGHDYVMDVTLRGPLDARLGRLVSVDQLDQFVRCTIVDAFDRRNLNLDVPEFATLVPTTENLALVAAHRLAAAWPLAFPGSPALPEKVRIWETPRNIFQVFVANSEPFRVMDESARRHAAPTKESR

SEQ ID NO: 18479 - protein, 140 aa, unidentified
  source 1..140: note = Bryobacterales bacterium
  REGION 1..140: note = tr|A0A2E5FMD7|A0A2E5FMD7_9BACT 6-pyruvoyl tetrahydrobiopterin synthase OS=Bryobacterales bacterium; OX = 2026791 GN=CMN58_07515 PE=4 SV=1
MPQLTKRYPFSASHRLHAAKLSAEENVKLFGKCNNPHGHGHNYTLEVTISGPTDPHSGMIIARTQLDDIVERCILSEIDHTDLNSDIEEFSSTPTTTENLALIISHRLDKFWAQKFTATDPRVTRIRVEETTRNSFEVTF

SEQ ID NO: 18480 - protein, 140 aa, Bryocella elongata
  REGION 1..140: note = tr|A0A1H5TY94|A0A1H5TY94_9BACT 6-pyruvoyltetrahydropterin/6-carboxytetrahydropterin synthase OS=Bryocella elongata OX=863522; GN = SAMN05421819_0786 PE=4 SV=1
MSAGTPIAHFGRRYHFSASHRLHCGELSAERNREVFGKCNNPFGHGHNYVVEVLLAGPIDAATGMVTNLADLDAFAGQELLARFDHQNLNLLPEFASQVSTTENLAVEIWKLFQGYRHATLKKVRVEETGNNSFEYFGER

SEQ ID NO: 18481 - protein, 125 aa, Bryocella elongata
  REGION 1..125: note = tr|A0A1H6AFJ7|A0A1H6AFJ7_9BACT 6-carboxy-5,6,7,8-tetrahydropterin synthase OS=Bryocella elongata OX=863522 GN=SAMN05421819_3112 PE=3 SV=1
MFEVTVQAGFSSGHFLRNYKGKCENPHGHNYRVLVTLVGQDLDASGLLLDFKDLKLVLRPTVEYLDHQMINELEPFDVVNPSAENLAKYFFEKTSDHVKAMTDGRVRVKDCTLYETDTSFARYYE

SEQ ID NO: 18482 - protein, 120 aa, Buchnera aphidicola
  REGION 1..120: note = sp|Q8K9D8|QUED_BUCAP 6-carboxy-5,6,7,8-tetrahydropterin synthase OS=Buchnera aphidicola subsp. Schizaphis graminum (strain Sg); OX = 198804 GN=queD PE=3 SV=1
MKTIIFKDFQFEAAHYLPYVPKMHKCRRLHGHSFFVRLELKDKINEKNGWIIDYAEIKLAFQPIYDQLDHHFLNDIPGLENPTSEILAKWIWHRLKPKLSILNTIIIKETCTSGCIYQGF

SEQ ID NO: 18483 - protein, 120 aa, Buchnera aphidicola
  REGION 1..120: note = tr|A0A5J6ZEX8|A0A5J6ZEX8_9GAMM 6-carboxytetrahydropterin synthase QueD OS=Buchnera aphidicola (Aphis fabae) OX=571430 GN=queD PE=4 SV=1
MNTTIFKDFQFEAAHYLPNLPKAHKCNRLHGHSFFVRLELKGVIDKDKGWIMDYSDIKLLFQPIYDQLDHYLLNDIPGLENPTSEILAKWIWDRLKPNLLELNAVIIKETCTSGCIYKDI

SEQ ID NO: 18484 - protein, 120 aa, Budvicia aquatica
  REGION 1..120: note = tr|A0A2C6DMZ2|A0A2C6DMZ2_9GAMM 6-carboxy-5,6,7,8-tetrahydropterin synthase OS=Budvicia aquatica OX=82979 GN=queD PE=3 SV=1
MVTTLFKDFNFEAAHRLPNVPEGHKCARLHGHSFMVRIEVTGEVDPYTGWVMDFSDIKAAFKPILDSLDHYYLNDIEGLDNPTSEVLAHWIWQRLKPSLPLLSAIRVKETCTAGCIYRGE

SEQ ID NO: 18485 - protein, 150 aa, Burkholderia ambifaria
  REGION 1..150: note = tr|B1YPW7|B1YPW7_BURA4 Queuosine biosynthesis protein QueD OS=Burkholderia ambifaria (strain MC40-6); OX = 398577 GN=BamMC406_3055 PE=4 SV=1
MLITRKLEFDAGHRIPDHRSQCRNLHGHRYVLEVTLRGDLVDTEGAPDRGMVMDFADVKALAVEHLVNKWDHAFLVYARDEVVRSFLEQMADHKTVVLDRIPTVENLAAIAFDILANVYDAHYGVNLRLERVRLYETPNCWADVERDPAR

SEQ ID NO: 18486 - protein, 150 aa, Burkholderia ambifaria; identical to SEQ ID NO: 18485
  REGION 1..150: note = tr|A0A2S9L2J3|A0A2S9L2J3_9BURK 6-carboxytetrahydropterin synthase QueD OS=Burkholderia ambifaria OX=152480 GN=queD PE=4 SV=1

SEQ ID NO: 18487 - protein, 150 aa, Burkholderia anthina
  REGION 1..150: note = tr|A0A106DI15|A0A106DI15_9BURK 6-carboxy-5,6,7,8-tetrahydropterin synthase; OS = Burkholderia anthina OX=179879 GN=WT32_28925 PE=4 SV=1
MLITRKLEFDAGHRIPDHRSQCRNLHGHRYVLEITLRGDLVDTEGAPDRGMVMDFADVKALAMEHLVSKWDHAFLVYARDEVVRSFLEQMADHKTVVIDRIPTVENLAAIAFDILANVYDAHYGVNLRLERVRLYETPNCWADVERQPGR

SEQ ID NO: 18488 - protein, 150 aa, Burkholderia anthina
  REGION 1..150: note = tr|A0A3P0C1C0|A0A3P0C1C0_9BURK 6-carboxytetrahydropterin synthase QueD OS=Burkholderia anthina OX=179879 GN=queD PE=4 SV=1
MLITRKLEFDAGHRIPDHRSQCRNLHGHRYVLEITLRGDLVDTEGAPDRGMVMDFADVKALAMEHLVGKWDHAFLVYARDEVVRSFLEQMADHKTVVIDRIPTVENLAAIAFDILANVYDAHYGVNLRLERVRLYETPNCWADVERQPGR

SEQ ID NO: 18489 - protein, 150 aa, unidentified
  source 1..150: note = Burkholderia catarinensis
  REGION 1..150: note = tr|A0A1J9NR41|A0A1J9NR41_9BURK 6-carboxytetrahydropterin synthase QueD OS=Burkholderia catarinensis OX=1108140 GN=BFF94_07205 PE=4 SV=1
MLITRKLEFDAGHRIPDHRSQCRNLHGHRYVLEVTLRGDLVDTEGAPDRGMVMDFADVKALAVEHLVSKWDHAFLVYARDEVVRSFLEQMADHKTVVIDRIPTVENLAAIAFDLLANVYDAHYGVNLRLERVRLYETPNCWADVERQPGR

SEQ ID NO: 18490 - protein, 192 aa, Burkholderia cenocepacia
  REGION 1..192: note = tr|A0A0H2XUN3|A0A0H2XUN3_BURCA 6-pyruvoyl-tetrahydropterin synthase-like protein; OS = Burkholderia cenocepacia (strain AU 1054) OX=331271; GN = Bcen_3036 PE=4 SV=1
MLIRKLFRFENAHVVRGCSTRRCSHSIHGHSYRVELLLEAHALDHGQMIYDFGLLKGDVRDLIDAFDHAVTLWSDDDPRYVESMRRHSERWVRLPVSPSAEQFSRVFFRLVDAALCGTRMSNGEADVRLHSVIVHETETGYAQCFRDDAFNPRMGRIDLDAIVFAPAIVAQWRDPGLFERLKRGHTLSRQKS

SEQ ID NO: 18491 - protein, 192 aa, Burkholderia cenocepacia
  REGION 1..192: note = tr|A0A3N9H255|A0A3N9H255_9BURK 6-carboxytetrahydropterin synthase OS=Burkholderia cenocepacia OX=95486 GN=DF047_06555 PE=4 SV=1
MLIRKLFRFENAHVVRGCSTRRCSHSIHGHSYRVELLLEAHAFDHGQMIYDFGLLKGDVRDLIDAFDHAVTLWSDDDPRYVESMRRHSERWVMLPVSPSAEQFSRVFFRLVDAALCGTRMSNGEADVRLHSVIVHETETGYAQCFRDDAFNPRMGRIDLDAIVFAPAIVAQWRDPGLFERLKRGDILSRKES

SEQ ID NO: 18492 - protein, 193 aa, Burkholderia cepacia
  REGION 1..193: note = tr|A0A0U4CCB8|A0A0U4CCB8_BURCE 6-carboxy-5,6,7,8-tetrahydropterin synthase; OS = Burkholderia cepacia JBK9 OX=1395570 GN=P350_25830 PE=4; SV = 1
MLIRKLFRFENAHVVRGCSTRRCSHSIHGHSYRVELLLEAHALDHGQMIYDFGLLKGDVRDLIDAFDHAVTLWSNDDPRYVESMRRHSERWVSLPVSPSAEQFSRVLFRLVDAALSCTRMSNGEADVRLHSVIVHETETGYAQCFRDDAFNPRMGRIDLDAIVFAPAIVAQWRDPGLFERLRRSHLVSQKESS

SEQ ID NO: 18493 - protein, 150 aa, Burkholderia cepacia
  REGION 1..150: note = tr|A0A105ZYJ9|A0A105ZYJ9_BURCE 6-carboxy-5,6,7,8-tetrahydropterin synthase; OS = Burkholderia cepacia OX=292 GN=queD PE=4 SV=1
MLITRKLEFDAGHRIPDHRSQCRNLHGHRYVLEVTLRGDLVDTEGAPDRGMVMDFADVKALAMEHLVGKWDHAFLVYARDEVVRSFLEQMADHKTVVIDRIPTVENLAAIAFDILANVYDAHYGVNLRLERVRLYETPNCWADVERQPGR

SEQ ID NO: 18494 - protein, 192 aa, Burkholderia contaminans
  REGION 1..192: note = tr|A0A2S5E5H2|A0A2S5E5H2_9BURK 6-carboxytetrahydropterin synthase OS=Burkholderia contaminans OX=488447 GN=C3743_08795 PE=4 SV=1
MLIRKLFRFENAHVVRGCSTRRCSHSIHGHSYRVELLLEAHALDHGQMIYDFGLLKGDVRDLIDAFDHAVTLWTDDDPCYVESMRRHSERWVLLPVSPSAEQFSRVFFRLVDAALSSTRMTNGEADVRLHSIIVHETETGYAQCFRDDAFNPRMGRIDLDDIVFAPAIAAQWRDPGLFERIKRGRPLSRQES

SEQ ID NO: 18495 - protein, 150 aa, Burkholderia contaminans; identical to SEQ ID NO: 18493
  REGION 1..150: note = tr|A0A0G3Z251|A0A0G3Z251_9BURK 6-carboxytetrahydropterin synthase QueD OS=Burkholderia contaminans OX=488447 GN=queD PE=4 SV=1

SEQ ID NO: 18496 - protein, 150 aa, unidentified
  source 1..150: note = Burkholderia dabaoshanensis
  REGION 1..150: note = tr|A0A2N7VSS0|A0A2N7VSS0_9BURK 6-carboxytetrahydropterin synthase QueD OS=Burkholderia dabaoshanensis OX=564714 GN=queD PE=4 SV=1
MTITRKLEFDAGHRIPDHRSQCRNLHGHRYVLEITLRGDVVETEGAPDRGMVMDFADVKSLAMEHLVSRWDHAFLVFEGDARVREFLESMPEHKTVVLDRIPTVENLAAVAFDVLAQVYDAHYGVNLRLHQVRLYETPNCWADVVREGAL

SEQ ID NO: 18497 - protein, 150 aa, Burkholderia diffusa
  REGION 1..150: note = tr|A0A1B4BVZ0|A0A1B4BVZ0_9BURK 6-carboxy-5,6,7,8-tetrahydropterin synthase; OS = Burkholderia diffusa OX=488732 GN=WI26_15100 PE=4 SV=1
MLITRKLEFDAGHRIPDHRSQCRNLHGHRYVLEVTLRGDLVDTEGAPDRGMVMDFADVKALAVEHLVNKWDHAFLVYARDEVVRSFLEQMADHKTVVLDRIPTVENLAAIAFDILANVYDAHYGVNLRLERVRLYETPNCWADVERQPGR

SEQ ID NO: 18498 - protein, 150 aa, Burkholderia dolosa
  REGION 1..150: note = tr|A0A0D5J2H7|A0A0D5J2H7_9BURK Queuosine biosynthesis protein QueD OS=Burkholderia dolosa AU0158; OX = 350701 GN=queD PE=4 SV=1
MLITRKLEFDAGHRIPDHRSQCRNLHGHRYVLEVTLRGDLVDTEGAPDRGMVMDFADVKALAVEHLVSKWDHAFLVYARDEVVRSFLEQMADHKTVVLDRIPTVENLAAIAFDILANVYDAHYGVNLRLERVRLYETPNCWADVEREPGR

SEQ ID NO: 18499 - protein, 150 aa, Burkholderia gladioli
  REGION 1..150: note = tr|F2LGW5|F2LGW5_BURGS Putative 6-pyruvoyl tetrahydropterin synthase OS=Burkholderia gladioli (strain BSR3) OX=999541 GN=bgla_1g38220 PE=4 SV=1
MLITRKLEFDAGHRIPDHRSQCRNLHGHRYVLEITLRGDLVDTEGAPDRGMVMDFADVKSLAMEHLVGKWDHAFLVYARDEVVRSFLEKMADHKTVVLDRIPTVENLAAVAFDILADVYDAHYGVNLRLERVRLYETPNCWADVERDPAR

SEQ ID NO: 18500 - protein, 150 aa, Burkholderia gladioli; identical to SEQ ID NO: 18499
  REGION 1..150: note = tr|A0A095HVZ8|A0A095HVZ8_BURGA 6-carboxytetrahydropterin synthase QueD OS=Burkholderia gladioli OX=28095 GN=queD PE=4 SV=1

SEQ ID NO: 18501 - protein, 150 aa, Burkholderia glumae
  REGION 1..150: note = tr|A0A2J9H6L0|A0A2J9H6L0_BURGL 6-carboxytetrahydropterin synthase QueD OS=Burkholderia glumae OX=337 GN=queD PE=4 SV=1
MLITRKLEFDAGHRIPDHRSQCRNLHGHRYVLEITLRGDLVDVEGAPDRGMVMDFADVKSLAMAHLVGKWDHAFLVYARDDVVRSFLEKMADHKTVVLDRIPTVENLAAIAFDILANVYDAHYGVNLRLERVRLYETPNCWAEVEREPGR

SEQ ID NO: 18502 - protein, 150 aa, Burkholderia glumae; identical to SEQ ID NO: 18501
  REGION 1..150: note = tr|C5AF27|C5AF27_BURGB Putative 6-pyruvoyl tetrahydropterin synthase OS=Burkholderia glumae (strain BGR1) OX=626418 GN=bglu_1g34000 PE=4 SV=1

SEQ ID NO: 18503 - protein, 148 aa, unidentified
  source 1..148: note = Burkholderia insecticola
  REGION 1..148: note = tr|R4WV76|R4WV76_9BURK 6-carboxy-5,6 7,8-tetrahydropterin synthase OS=Burkholderia insecticola; OX = 758793 GN=BRPE64_ACDS00380 PE=4 SV=1
MQTITRKLEFDAGHRIPDHRSQCRNLHGHRYVLEITLQGDLVDVEGAPDRGMVMDFADVKALAMEHLVGKWDHAFIVYEGDVKVREFLQTLADHKTVVMDRIPTVENMAAVAFNILAEVYDAHYGVNLKLTRVRLYETPNCWADVERG

SEQ ID NO: 18504 - protein, 192 aa, Burkholderia lata
  REGION 1..192: note = tr|A0A3G3HD31|A0A3G3HD31_BURL3 6-carboxytetrahydropterin synthase QueD OS=Burkholderia lata (strain ATCC 17760 / DSM 23089 / LMG 22485 / NCIMB 9086 / R18194 / 383) O X=482957 GN=CVS37_27435 PE=4 SV=1
MLIRKLFRFENAHVVRGCSTRRCSHSIHGHSYRVELLLEAHALDRGQMIYDFGLLKGDVRDLIDAFDHAVTLWSGDDPCYVESMRRHSERWVLLPVSPSAEQFSRVFFRLVDAALSCTRMANGEADLRLHSIIVHETETGYAQCFRDDAFNPRMGRIDLDDIVFAPAIAGQWRDPGLFERIKRGRPISRQES

SEQ ID NO: 18505 - protein, 192 aa, Burkholderia lata
  REGION 1..192: note = tr|Q39AS7|Q39AS7_BURL3 6-pyruvoyl-tetrahydropterin synthase-like protein OS=Burkholderia lata (strain ATCC 17760 / DSM 23089 / LMG 22485 / NCIMB 9086 / R18194 / 383)OX=482957 GN=Bcep18194_B0318 PE=4 SV=1
MLIRKLFRFENAHIVRGCSTRRCSHSIHGHSYRVELLLEAHALDHGQMIYDFGLLKGDVRDLIDAFDHAVTLWSDDDPCYVESMRRHSERWVLLPVSPSAEQFSRVFFRLVDAALSCTRMANGEADVRLHSIIVHETETGYAQCFRDDAFNPRMGRIDLDDIVFAPAIAGQWRDPGLFERIKRGRPISRQES

SEQ ID NO: 18506 - protein, 150 aa, Burkholderia latens
  REGION 1..150: note = tr|A0A1B4NVK4|A0A1B4NVK4_9BURK 6-carboxy-5,6,7,8-tetrahydropterin synthase; OS = Burkholderia latens OX=488446 GN=WK25_15130 PE=4 SV=1
MLITRKLEFDAGHRIPDHRSQCRNLHGHRYVLEITLRGDLVDTEGAPDRGMVMDFADVKALAVEHLVNKWDHAFLVYARDEVVRSFLEQMADHKTVVLDRIPTVENLAAIAFDILANVYDAHYGVNLRLERVRLYETPNCWADVERQPGR

SEQ ID NO: 18507 - protein, 150 aa, Burkholderia mallei
  REGION 1..150: note = tr|A0A0H2WHR6|A0A0H2WHR6_BURMA 6-pyruvoyl tetrahydrobiopterin synthase, putative OS=Burkholderia mallei (strain ATCC 23344) OX=243160 GN=BMA0154 PE=4 SV=1
MLITRKLEFDAGHRIPDHRSQCRNLHGHRYVLEITLRGDLVETEGAPDRGMVMDFADVKALAMEHLVSKWDHAFLVYARDEIVRSFLEKMADHKTVVLDRIPTVENLAAIAFDILANVYDAHYGVNLRLERVRLYETPNCWADVERDPRV

SEQ ID NO: 18508 - protein, 150 aa, Burkholderia mallei; identical to SEQ ID NO: 18507
  REGION 1..150: note = tr|A0A3N4FRE6|A0A3N4FRE6_BURML 6-carboxytetrahydropterin synthase QueD OS=Burkholderia mallei OX=13373 GN=queD PE=4 SV=1

SEQ ID NO: 18509 - protein, 150 aa, Burkholderia metallica
  REGION 1..150: note = tr|A0A1B4HXG8|A0A1B4HXG8_9BURK 6-carboxy-5,6,7,8-tetrahydropterin synthase; OS = Burkholderia metallica OX=488729 GN=WJ16_15805 PE=4 SV=1
MLITRKLEFDAGHRIPDHRSQCRNLHGHRYVLEVTLRGDLVDTEGAPDRGMVMDFADVKALAMEHLVGKWDHAFLVYARDDVVRSFLEQMADHKTVVIDRIPTVENLAAIAFDILANVYDAHYGVNLRLERVRLYETPNCWADVERQPGR

SEQ ID NO: 18510 - protein, 192 aa, Burkholderia metallica
  REGION 1..192: note = tr|A0A1B4I676|A0A1B4I676_9BURK 6-carboxy-5,6,7,8-tetrahydropterin synthase; OS = Burkholderia metallica OX=488729 GN=WJ16_31150 PE=4 SV=1
MLIRKLFRFENAHVVRGCSTRRCSHSIHGHSYRVELLLEAHALDHGQMIYDFGLLKGDVRELIDAFDHAVTLWSDDDPDYLDSMRRHSERWVLLPVSPSAEQFSRVFFRLVDAALSCTRMANGEGDVRLHSVIVHETETGYAQCFRDDAFNPRMGRIDLDAIVFAPAIAEQWRDPGMFERIRRGRPISTQES

SEQ ID NO: 18511 - protein, 150 aa, Burkholderia multivorans
  REGION 1..150: note = tr|A0A0H3KFR5|A0A0H3KFR5_BURM1 6-pyruvoyl tetrahydrobiopterin synthase OS=Burkholderia multivorans (strain ATCC 17616 / 249) OX=395019 GN=ptpS PE=4 SV=1
MLITRKLEFDAGHRIPDHRSQCRNLHGHRYVLEITLRGDLVDTEGAPDRGMVMDFADVKALAVEHLVSKWDHAFLVYARDEVVRSFLEQMADHKTVVLDRIPTVENLAAIAFDILASVYDAHYGVNLRLERVRLYETPNCWADVERDAGR

SEQ ID NO: 18512 - protein, 150 aa, Burkholderia multivorans; identical to SEQ ID NO: 18511
  REGION 1..150: note = tr|A0A1B4U0Z7|A0A1B4U0Z7_9BURK 6-carboxytetrahydropterin synthase QueD OS=Burkholderia multivorans OX=87883 GN=queD PE=4 SV=1

SEQ ID NO: 18513 - protein, 148 aa, unidentified
  source 1..148: note = Burkholderia novacaledonica
  REGION 1..148: note = tr|A0A2U3IBS5|A0A2U3IBS5_9BURK 6-carboxy-5,6,7,8-tetrahydropterin synthase; OS = Burkholderia novacaledonica OX=1544861 GN=NOV72_04773; PE = 4 SV=1
MQTITRKLEFDAGHRIPDHRSQCRNLHGHRYVLEITLQGDLVDVEGAPDRGMVMDFADVKSLAMEHLVNKWDHAFIVYEGDVKVREFLQTLADHKTVVLDRIPTVENLAAVAFNILAEVYDAHYGVNLKLKRVRLFETPNCWADVERG

SEQ ID NO: 18514 - protein, 150 aa, Burkholderia oklahomensis
  REGION 1..150: note = tr|A0A381BVI7|A0A381BVI7_9BURK Queuosine biosynthesis protein QueD OS=Burkholderia oklahomensis; OX = 342113 GN=NCTC13388_02345 PE=4 SV=1
MLITRKLEFDAGHRIPDHRSQCRNLHGHRYVLEITLRGDLVDTEGAPDRGMVMDFADVKALAMEHLVSKWDHAFLVYARDEVVRSFLEKMVDHKTVVLDRIPTVENLAAIAFDILANVYDAHYGVNLRLERVRLYETPNCWADVERGPRA

SEQ ID NO: 18515 - protein, 150 aa, Burkholderia plantarii
  REGION 1..150: note = tr|A0A0B6S734|A0A0B6S734_9BURK Queuosine biosynthesis protein QueD OS=Burkholderia plantarii; OX = 41899 GN=queD PE=4 SV=1
MLITRKLEFDAGHRIPDHRSQCRNLHGHRYVLEITLRGDLVDVEGAPDRGMVMDFADVKSLAMEHLVGKWDHAFLVYARDEVVRSFLEKMADHKTVVLDRIPTVENLAAIAFDILANVYDAHYGVNLRLERVRLYETPNCWADVEREPGR

SEQ ID NO: 18516 - protein, 150 aa, Burkholderia pseudomallei; identical to SEQ ID NO: 18507
  REGION 1..150: note = tr|A0A0E1WAT9|A0A0E1WAT9_BURPE Putative 6-pyruvoyl tetrahydropterin synthase OS=Burkholderia pseudomallei 1710a OX=320371 GN=BURPS1710A_0429 PE=4 SV=1

SEQ ID NO: 18517 - protein, 150 aa, Burkholderia pseudomallei; identical to SEQ ID NO: 18507
  REGION 1..150: note = tr|A8E883|A8E883_BURPE Putative 6-pyruvoyl tetrahydropterin synthase OS=Burkholderia pseudomallei 406e OX=360118 GN=BURPS406E_B0481 PE=4 SV=1

SEQ ID NO: 18518 - protein, 193 aa, unidentified
  source 1..193: note = Burkholderia pseudomultivorans
  REGION 1..193: note = tr|A0A132EL25|A0A132EL25_9BURK 6-carboxy-5,6,7,8-tetrahydropterin synthase; OS = Burkholderia pseudomultivorans OX=1207504 GN=WT56_10435; PE = 4 SV=1
MLIRKLFRFENAHIVRGCSTRRCSHSIHGHSYKVELLLEAHALDHGQMVYDFGLLKGDVRDLIDAFDHAVTLWSGDDPDYLEALRRHSERWVMLPVSPSAEQFSRVLFRLVDAALSQAEMSNGEADVRLHSVIVHETDTGYAQCFRDDAFNPRMGRIEMDAIEFAPTIVAQWRDPRLFERLARGTLPFPEETR

SEQ ID NO: 18519 - protein, 150 aa, unidentified
  source 1..150: note = Burkholderia pseudomultivorans
  REGION 1..150: note = tr|A0A132ED13|A0A132ED13_9BURK 6-carboxy-5,6,7,8-tetrahydropterin synthase; OS = Burkholderia pseudomultivorans OX=1207504 GN=WT56_21900; PE = 4 SV=1
MLITRKLEFDAGHRIPDHRSQCRNLHGHRYVLEVTLRGDLVDTEGAPDRGMVMDFADVKALAMEHLVSKWDHAFLVYARDEVVRSFLEQMADHKTVVIDRIPTVENLAALAFDILANVYDAHYGVNLRLERVRLYETPNCWADVERQPGR

SEQ ID NO: 18520 - protein, 192 aa, unidentified
  source 1..192: note = Burkholderia puraquae
  REGION 1..192: note = tr|A0A1X1P6T1|A0A1X1P6T1_9BURK 6-carboxytetrahydropterin synthase QueD OS=Burkholderia puraquae OX=1904757 GN=B7G54_34140 PE=4 SV=1
MLIRKLFRFENAHVVRGCSTRRCSHSIHGHSYRVELLLEAHALDHGQMIYDFGLLKGDVRDLIDAFDHAVTLWSDDDPCYVESMRRHSERWVLLPVSPSAEQFSRVLFRLVDAALSCTRMSNGEADVRLHSVIVHETETGYAQCFRDDAFNPRMGRIDLDAIVFAPAIAGQWRDPGLFERIKRGRPISSQAS

SEQ ID NO: 18521 - protein, 150 aa, unidentified; identical to SEQ ID NO: 18493
  source 1..150: note = Burkholderia puraquae
  REGION 1..150: note = tr|A0A1X1PAN4|A0A1X1PAN4_9BURK 6-carboxytetrahydropterin synthase QueD OS=Burkholderia puraquae OX=1904757 GN=B7G54_27595 PE=4 SV=1

SEQ ID NO: 18522 - protein, 150 aa, Burkholderia pyrrocinia
  REGION 1..150: note = tr|A0A124UZK7|A0A124UZK7_BURPY 6-carboxy-5,6,7,8-tetrahydropterin synthase; OS = Burkholderia pyrrocinia OX=60550 GN=WJ63_03350 PE=4 SV=1
MLITRKLEFDAGHRIPDHRSQCRNLHGHRYVLEITLRGDLVDTEGAPDRGMVMDFADVKALAMEHLVSKWDHAFLVYARDEVVRSFLEQMADHKTVVIDRIPTVENLAAIAFDILANVYDAHYGVNLRLERVRLYETPNCWADVEREPGR

SEQ ID NO: 18523 - protein, 150 aa, Burkholderia pyrrocinia
  REGION 1..150: note = tr|A0A087P2W6|A0A087P2W6_BURPY 6-carboxy-5,6,7,8-tetrahydropterin synthase; OS = Burkholderia pyrrocinia OX=60550 GN=queD PE=4 SV=1
MLITRKLEFDAGHRIPDHRSQCRNLHGHRYVLEITLRGDLVDTEGAPDRGMVMDFADVKALAMEHLVSKWDHAFLVYARDEVVRSFLEQMADHKTVVIDRIPTVENLAAIAFDLLANVYDAHYGVNLRLERVRLYETPNCWADVERQPGR

SEQ ID NO: 18524 - protein, 192 aa, unidentified
  source 1..192: note = Burkholderia reimsis
  REGION 1..192: note = tr|A0A365QW51|A0A365QW51_9BURK 6-carboxytetrahydropterin synthase OS=Burkholderia reimsis; OX = 2234132 GN=DPV79_13050 PE=4 SV=1
MLIRKLFRFENAHVVRGCSTRRCSHSIHGHSYRVELLLEAHALDHGQMIYDFGLLKGDVRDLIDAFDHAVTLWSDDDPCYVESMRRHSERWVLLPVSPSAEQFSRVFFRLVDAALSCTRMSNGETGVRLHSIIVHETETGYAQCFRDDAFNPRMGRIDLDDIVFAPAIAGQWRDPGLFERIKRGRSMSRQES

SEQ ID NO: 18525 - protein, 150 aa, unidentified; identical to SEQ ID NO: 18493
  source 1..150: note = Burkholderia reimsis
  REGION 1..150: note = tr|A0A365QRV5|A0A365QRV5_9BURK 6-carboxytetrahydropterin synthase QueD OS=Burkholderia reimsis OX=2234132 GN=queD PE=4 SV=1

SEQ ID NO: 18526 - protein, 150 aa, Burkholderia seminalis; identical to SEQ ID NO: 18523
  REGION 1..150: note = tr|A0A103K2U0|A0A103K2U0_9BURK 6-carboxy-5,6,7,8-tetrahydropterin synthase; OS = Burkholderia seminalis OX=488731 GN=WJ13_01265 PE=4 SV=1

SEQ ID NO: 18527 - protein, 193 aa, Burkholderia seminalis
  REGION 1..193: note = tr|A0A118FR02|A0A118FR02_9BURK 6-carboxy-5,6,7,8-tetrahydropterin synthase; OS = Burkholderia seminalis OX=488731 GN=WJ13_22125 PE=4 SV=1
MLIRKLFRFENAHVVRGCSTRRCSHSIHGHSYRVELLLEAHALDHGQMVYDFGLLKGDVRDLVDAFDHAVTLWSDDDPCYVESMRRFSERWVVLPVSPSAEQFSRVLFRLVDAALSGTRMSNGEADVRLHSVIVHETETGYAQCFRDDAFNPRMGPIDLDAIVFAPAIAAQWRDPGLFERLRRGPLLSRQESS

SEQ ID NO: 18528 - protein, 150 aa, unidentified
  source 1..150: note = Burkholderia singularis
  REGION 1..150: note = tr|A0A103E1Z9|A0A103E1Z9_9BURK 6-carboxy-5,6,7,8-tetrahydropterin synthase; OS = Burkholderia singularis OX=1503053 GN=BSIN_2358 PE=4; SV = 1
MLITRKLEFDAGHRIPDHRSQCRNLHGHRYVLEITLRGDLVETEGAPDRGMVMDFADVKALAMEHLVNQWDHAFLVYARDEVVRSFLEKMADHKTVVLDRIPTVENLAAVAFDILANVYDSHYGVNLRLERVRLYETPNCWAEVDRESRG

SEQ ID NO: 18529 - protein, 150 aa, Burkholderia sp.
  REGION 1..150: note = tr|A0A063BNJ1|A0A063BNJ1_9BURK Queuosine biosynthesis protein QueD OS=Burkholderia sp. lig30; OX = 1192124 GN=LIG30_1090 PE=4 SV=1
MLITRKLEFDAGHRIPDHRSQCRNLHGHRYVLEVTLRGDLVDTEGAPDRGMVMDFADVKALAVEHLVSKWDHAFLVYARDEVVRAFLEKMADHKTVVLDRIPTVENLAAVAFDILSNVYDAHYGVNLRLERVRLYETPNCWADVERPPAR

SEQ ID NO: 18530 - protein, 150 aa, Burkholderia sp.; identical to SEQ ID NO: 18497
  REGION 1..150: note = tr|A0A3P0S8A4|A0A3P0S8A4_9BURK 6-carboxytetrahydropterin synthase QueD OS=Burkholderia sp. Bp9004 OX=2184559 GN=queD PE=4 SV=1

SEQ ID NO: 18531 - protein, 150 aa, Burkholderia stabilis
  REGION 1..150: note = tr|A0A1D7ZEW3|A0A1D7ZEW3_9BURK 6-carboxytetrahydropterin synthase QueD OS=Burkholderia stabilis OX=95485 GN=BBJ41_13000 PE=4 SV=1
MLITRKLEFDAGHRIPDHRSQCRNLHGHRYVLEITLRGDLVDTEGAPDRGMVMDFADVKALAVEHLVSKWDHAFLVYARDEVVRSFLEQMADHKTVVIDRIPTVENLAAIAFDLLANVYDAHYGVNLRLERVRLYETPNCWADVERQPGR

SEQ ID NO: 18532 - protein, 193 aa, Burkholderia stabilis
  REGION 1..193: note = tr|A0A1D7ZR13|A0A1D7ZR13_9BURK 6-carboxytetrahydropterin synthase QueD OS=Burkholderia stabilis OX=95485 GN=BBJ41_26625 PE=4 SV=1
MLIRKLFRFENAHVVRGCSTRRCSHSIHGHSYRVELLLEAHALDNGQMIYDFGLLKGDVRDLIDAFDHAVTLWSGDDAGYLDSMRRHSERWVLLPVSPSAEQFSRVFFLLVDAVLSCTGMSNGEGDVRLHSIIVHETETGYAQCFRDDAFNPRMGCIDLDAIVFSPAVAAQWRDPELFERLKRDRAIFQQESR

SEQ ID NO: 18533 - protein, 150 aa, unidentified
  source 1..150: note = Burkholderia stagnalis
  REGION 1..150: note = tr|A0A106G2Y7|A0A106G2Y7_9BURK 6-carboxy-5,6,7,8-tetrahydropterin synthase; OS = Burkholderia stagnalis OX=1503054 GN=queD PE=4 SV=1
MLITRKLEFDAGHRIPDHRSQCRNLHGHRYVLEITLRGDLVDTEGAPDRGMVMDFADVKALAMEHLVSKWDHAFLVYARDEVVRSFLEQMADHKTVVIDRIPTVENLAAIAFDILANVYDAHYGINLRLERVRLYETPNCWADVEREPGR

SEQ ID NO: 18534 - protein, 150 aa, unidentified; identical to SEQ ID NO: 18497
  source 1..150: note = Burkholderia territorii
  REGION 1..150: note = tr|A0A125HSB9|A0A125HSB9_9BURK 6-carboxy-5,6,7,8-tetrahydropterin synthase; OS = Burkholderia territorii OX=1503055 GN=WT83_22990 PE=4; SV = 1

SEQ ID NO: 18535 - protein, 150 aa, unidentified
  source 1..150: note = Burkholderia territorii
  REGION 1..150: note = tr|A0A105W2I9|A0A105W2I9_9BURK 6-carboxy-5,6,7,8-tetrahydropterin synthase; OS = Burkholderia territorii OX=1503055 GN=WT27_22515 PE=4; SV = 1
MLITRKLEFDAGHRIPDHRSQCRNLHGHRYVLEVTLRGDLVDTEGAPDRGMVMDFADVKALAVEHLVDKWDHAFLVYARDEVVRSFLEQMADHKTVVLDRIPTVENLAAIAFDILANVYDAHYGVNLRLERVRLYETPNCWADVERQPGR

SEQ ID NO: 18536 - protein, 150 aa, Burkholderia thailandensis
  REGION 1..150: note = tr|Q2T2A2|Q2T2A2_BURTA 6-pyruvoyl tetrahydrobiopterin synthase, putative OS=Burkholderia thailandensis (strain ATCC 700388 / DSM 13276 / CIP 106301 / E264) OX=271848GN=BTH_I0139 PE=4 SV=1
MLITRKLEFDAGHRIPDHRSQCRNLHGHRYVLEITLRGDLVETEGAPDRGMVMDFADVKGLAMEHLVSKWDHAFLVYARDEIVRSFLEKMADHKTVVLDRIPTVENLAAIAFDILANVYDAHYGVNLRLERVRLYETPNCWADVERDPRV

SEQ ID NO: 18537 - protein, 150 aa, Burkholderia thailandensis; identical to SEQ ID NO: 18536
  REGION 1..150: note = tr|A0A1B4JZT2|A0A1B4JZT2_BURTH 6-carboxytetrahydropterin synthase QueD OS=Burkholderia thailandensis OX=57975 GN=queD PE=4 SV=1

SEQ ID NO: 18538 - protein, 150 aa, Burkholderia ubonensis
  REGION 1..150: note = tr|A0A105ZF61|A0A105ZF61_9BURK 6-carboxy-5,6,7,8-tetrahydropterin synthase; OS = Burkholderia ubonensis OX=101571 GN=WK95_00175 PE=4 SV=1
MLITRKLEFDAGHRIPDHRSQCRNLHGHRYVLEITLRGDLVDTEGAPDRGMVMDFADVKALAMEHLVSKWDHAFLVYARDEVVRSFLERMADHKTVVIDRIPTVENLAAIAFDILANVYDAHYGINLRLERVRLYETPNCWADVEREPGR

SEQ ID NO: 18539 - protein, 150 aa, Burkholderia ubonensis; identical to SEQ ID NO: 18533
  REGION 1..150: note = tr|A0A124V862|A0A124V862_9BURK 6-carboxy-5,6,7,8-tetrahydropterin synthase; OS = Burkholderia ubonensis OX=101571 GN=queD PE=4 SV=1

SEQ ID NO: 18540 - protein, 150 aa, Burkholderia vietnamiensis
  REGION 1..150: note = tr|A4JIT9|A4JIT9_BURVG Uncharacterized protein; OS = Burkholderia vietnamiensis (strain G4 / LMG 22486); OX = 269482 GN=Bcep1808_3201 PE=4 SV=1
MLITRKLEFDAGHRIPDHRSQCRNLHGHRYVLEVTLRGDLVDTEGAPDRGMVMDFADVKALAVEHLVDKWDHAFLVYARDEVVRSFLEQMADHKTVVLDRIPTVENLAAIAFDILAHVYDAHYGVNLRLERVRLYETPNCWADVEREPSR

SEQ ID NO: 18541 - protein, 150 aa, Burkholderia vietnamiensis; identical to SEQ ID NO: 18540
  REGION 1..150: note = tr|A0A124QFX2|A0A124QFX2_BURVI 6-carboxy-5,6,7,8-tetrahydropterin synthase; OS = Burkholderia vietnamiensis OX=60552 GN=BvRS1_36330 PE=4; SV = 1

SEQ ID NO: 18542 - protein, 158 aa, unidentified
  source 1..158: note = Burkholderiaceae bacterium
  REGION 1..158: note = tr|A0A0F0DAS8|A0A0F0DAS8_9BURK 6-carboxy-5,6,7,8-tetrahydropterin synthase; OS = Burkholderiaceae bacterium 26 OX=1619951 GN=UB44_24785; PE = 4 SV=1
MTKTVSITRRLEFDAGHRIPSHAGQCRNLHGHRYQLELTLTGEVLHNDKAADDGMILDFGDVKQLANKHLVDLWDHAFLVYRGDTKLVEFLNAMEGGHKTVVLNDVPTVENLAQIAFDILEPVFRNTFGHHLRLSKLVLYETPNCWADVKLARPHEQD

SEQ ID NO: 18543 - protein, 153 aa, unidentified
  source 1..153: note = Burkholderiaceae bacterium
  REGION 1..153: note = tr|A0A521ZFH3|A0A521ZFH3_9BURK 6-carboxytetrahydropterin synthase OS=Burkholderiaceae bacterium OX=2030806 GN=EPO06_03780 PE=4 SV=1
MKTELLTITRKIEFDAGHRIPDHGSQCRNMHGHRYVLEATVTGEVHQRDGDPENGMVTDFSSLKQLMLESVGNPWDHAFLVYRNDREVLNFLHSLPEHKTVVLDAVPTAENLVRIAAAQLTQALRERYGNAVTLVNLRLYETPNCWADVQPQR

SEQ ID NO: 18544 - protein, 131 aa, unidentified
  source 1..131: note = Burkholderiales bacterium
  REGION 1..131: note = tr|A0A257CVN7|A0A257CVN7_9BURK 6-carboxy-5,6,7,8-tetrahydropterin synthase; OS = Burkholderiales bacterium PBB3 OX=2015565; GN = CFE43_04685 PE=3 SV=1
MSTQQRQAAAGGPYFEISQRFFFDAAHTLKREIEAEGSRRIHGHTYNAEITLGGAPDPETGMVVDLGLVRQAIEQLRPQLDHHLLDEVPDLGVPTLENLCAYIWRALQPSLPALTQVRVWRDGMGDSCTLR

SEQ ID NO: 18545 - protein, 121 aa, unidentified
  source 1..121: note = Burkholderiales bacterium
  REGION 1..121: note = tr|A0A2G6U0K8|A0A2G6U0K8_9BURK 6-carboxy-5,6,7,8-tetrahydropterin synthase; OS = Burkholderiales bacterium 23 OX=2035215 GN=CLU98_4676; PE = 3 SV=1
MQFTVHQRFFFDAAHTLERAIETESSRRIHGHTYYAEVSVTGPRNPDNGMVIDLGYLRSRLKTLGDALDHRFLDEIPGLGKPTLENLCLFIADSLADLQPAPSRIRVWRDSIGDGCVLDLN

SEQ ID NO: 18546 - protein, 119 aa, Buttiauxella agrestis
  REGION 1..119: note = tr|A0A381C3R6|A0A381C3R6_9ENTR 6-carboxy-5,6,7,8-tetrahydropterin synthase; OS = Buttiauxella agrestis OX=82977 GN=queD PE=3 SV=1
MTTTLFKDFTFEAAHHLPHVPEGHKCGRLHGHSFMVRLEITGEVDPYTGWIMDFSELKAAFKPTYDRLDHYYLNDIPGLENPTSEVLAKWIWDEMKPIVPLLSAVMVKETCTAGCVYKG

SEQ ID NO: 18547 - protein, 119 aa, Buttiauxella agrestis; identical to SEQ ID NO: 18546
  REGION 1..119: note = tr|A0A085G430|A0A085G430_9ENTR 6-carboxy-5,6,7,8-tetrahydropterin synthase; OS = Buttiauxella agrestis ATCC 33320 OX=1006004 GN=queD; PE = 3 SV=1

SEQ ID NO: 18548 - protein, 85 aa, Buttiauxella brennerae
  REGION 1..85: note = tr|A0A1B7ILK5|A0A1B7ILK5_9ENTR Queuosine biosynthesis, PTPS-I OS=Buttiauxella brennerae ATCC 51605; OX = 1354251 GN=M975_2905 PE=4 SV=1
MVRLEITGEVDPYTGWIMDFSELKAAFKPTYDRLDHYYLNDIPGLENPTSEVLAKWIWDEMKPIVPLLSSVMVKETCTAGCVYKG

SEQ ID NO: 18549 - protein, 119 aa, Buttiauxella gaviniae
  REGION 1..119: note = tr|A0A1B7I351|A0A1B7I351_9ENTR 6-carboxy-5,6,7,8-tetrahydropterin synthase; OS = Buttiauxella gaviniae ATCC 51604 OX=1354253; GN = M977_01324 PE=3 SV=1
MTTTLFKDFTFEAAHHLPHVPEGHKCGRLHGHSFMVRLEITGEVDPYTGWIMDFSELKAAFKPTYDRLDHYYLNDIPGLENPTSEVLAKWIWDEMKPIVPLLSSVMVKETCTAGCVYKG

SEQ ID NO: 18550 - protein, 119 aa, Buttiauxella izardii
  REGION 1..119: note = tr|A0A3A5JWK6|A0A3A5JWK6_9ENTR 6-carboxy-5,6,7,8-tetrahydropterin synthase; OS = Buttiauxella izardii OX=82991 GN=queD PE=3 SV=1
MSTTLFKDFTFEAAHHLPHVPEGHKCGRLHGHSFMVRLEITGEVDPYTGWIMDFSELKAAFKPTYDRLDHYYLNDIPGLENPTSEVLAKWIWDEMKPLVPLLSAVMVKETCTAGCVYKG

SEQ ID NO: 18551 - protein, 119 aa, Buttiauxella noackiae
  REGION 1..119: note = tr|A0A1B7HLU3|A0A1B7HLU3_9ENTR 6-carboxy-5,6,7,8-tetrahydropterin synthase; OS = Buttiauxella noackiae ATCC 51607 OX=1354255; GN = M979_2619 PE=3 SV=1
MTTTLFKDFTFEAAHHLPHVPEGHKCGRLHGHSFMVRLEITGEVDPYTGWIMDFSELKAAFKPTYDRLDHYYLNDIPGLENPTSEVLAKWIWDEMKPLVPLLSSVMVKETCTAGCVYKG

SEQ ID NO: 18552 - protein, 119 aa, Buttiauxella sp.; identical to SEQ ID NO: 18549
  REGION 1..119: note = tr|A0A4R8F396|A0A4R8F396_9ENTR 6-carboxy-5,6,7,8-tetrahydropterin synthase; OS = Buttiauxella sp. BIGb0552 OX=2485120 GN=EDF88_1993 PE=3; SV = 1

SEQ ID NO: 18553 - protein, 119 aa, Buttiauxella sp.
  REGION 1..119: note = tr|A0A4P5QC92|A0A4P5QC92_9ENTR 6-carboxy-5,6,7,8-tetrahydropterin synthase; OS = Buttiauxella sp. A111 OX=2563088 GN=queD PE=3 SV=1
MSTTLFKDFTFEAAHRLPHVPEGHKCGRLHGHSFMVRLEITGEVDPYTGWIMDFSELKAAFKPTYNRLDHYYLNDIPGLENPTSEVLAKWIWDEMKPIVPLLSAVMVKETCTAGCVYKG

SEQ ID NO: 18554 - protein, 119 aa, Buttiauxella warmboldiae
  REGION 1..119: note = tr|A0A3N5DJD2|A0A3N5DJD2_9ENTR 6-carboxy-5,6,7,8-tetrahydropterin synthase; OS = Buttiauxella warmboldiae OX=82993 GN=queD PE=3 SV=1
MTTTLFKDFTFEAAHHLPHVPEGHKCGRLHGHSFMVRLEITGEVDPYTGWIMDFSELKAAFKPIYDRLDHYYLNDIPGLENPTSEVLAKWIWDQMKPIVPLLSAVMVKETCTAGCVYKG

SEQ ID NO: 18555 - protein, 142 aa, unidentified
  source 1..142: note = Butyricicoccus porcorum
  REGION 1..142: note = tr|A0A252F719|A0A252F719_9CLOT 6-carboxy-5,6,7,8-tetrahydropterin synthase; OS = Butyricicoccus porcorum OX=1945634 GN=CBW42_03000 PE=3; SV = 1
MFYLKAESSFDAAHFLAHYEGKCHNIHGHHWIVQLRVCGEALQDTVQERGMLVDFSQLKGDLKAIVEPMDHTLIYEAGTLRAGTRDALAEDGFSLTEIPFRPTAEHFAKYFFERASALGYHVAEATVYETPNNCASYTGEED

SEQ ID NO: 18556 - protein, 188 aa, Butyricicoccus pullicaecorum
  REGION 1..188: note = tr|R8VTW0|R8VTW0_9CLOT Uncharacterized protein; OS = Butyricicoccus pullicaecorum 1.2 OX=1203606; GN = HMPREF1526_02227 PE=4 SV=1
MRSITTLDLQYAHRFYGFKGEAQYLHGHTGVLTIEVEDSVEPGVNMVFPCNEIQKTAWEVLKNFDHALILREDDPLLPAVLKVYEEQGIRDGAPQNQMKGPAFKTELATAYPECRLVVTKETLTVEGMIKIVYDLLKDKLNIAKITFTSGVNAASADFSTHNQIDRCPLCGIALNEHGVCPKCGYKKQ

SEQ ID NO: 18557 - protein, 188 aa, Butyricicoccus pullicaecorum
  REGION 1..188: note = tr|A0A1Y4LUD2|A0A1Y4LUD2_9CLOT Rubredoxin; OS = Butyricicoccus pullicaecorum OX=501571 GN=B5F15_02910; PE = 4 SV=1
MRSITTLDLQYAHRFYGFKGEAQYLHGHTGVLTIEVEDSVEPGVNMVFPCNEIQKTAWEVLKNFDHALILREDDPLLPAVLKVYEEQGVRDGAPQNQMKGPAFKTELATAYPECRLVVTKETLTVEGMIKIVYDLLKDKLNIAKITFTSGVNAASADFTTHNQIDRCPLCGIALNEHGICPKCGYKKQ

SEQ ID NO: 18558 - protein, 182 aa, unidentified
  source 1..182: note = Butyricimonas faecalis
  REGION 1..182: note = tr|A0A3Q9IMG5|A0A3Q9IMG5_9BACT 6-carboxytetrahydropterin synthase OS=Butyricimonas faecalis OX=2093856 GN=D8S85_03610 PE=4 SV=1
MLIRKLFKFEGAHIVRNCSSHRCRENIHGHSYIVEVFITSDKLDRGYMVMDFVLLDKVKELVDSFDHTYSLWQEESDDLKTFIYKYNRRVAEIPVSPSAEGYALLLLYLIDKILQNTEHKNGEGNVRLSSVRVHETATGYAEAFREDLKLVNFNIHDIRFSEAIREEWKDELWWEEMKKDKN

SEQ ID NO: 18559 - protein, 178 aa, Butyricimonas sp.
  REGION 1..178: note = tr|A0A3D2E0F7|A0A3D2E0F7_9BACT 6-carboxytetrahydropterin synthase OS=Butyricimonas sp.; OX = 1969738 GN=DFK15_16150 PE=4 SV=1
MLIRKLFKFEGAHIVRNCSSHRCRENIHGHSYIVEVFITSDKLDRGYMVIDFVLLDKVKELVDSFDHTYSLWQEESDELKTFIYKYNRRVAEIPVSPSAEGYALLFLYLIDKILQNTEHKNGEGNVRLSSVRVHETATGYAEAFREDLQLVNFNIHDIRFSEAIREEWKDDQWWEGIR

SEQ ID NO: 18560 - protein, 178 aa, Butyricimonas sp.
  REGION 1..178: note = tr|A0A1Y3W841|A0A1Y3W841_9BACT 6-carboxytetrahydropterin synthase QueD OS=Butyricimonas sp. An62 OX=1965649 GN=B5G13_05960 PE=4 SV=1
MVIRKLFKFEGAHIVRNCSSHRCRENIHGHSYIVEVFITSDKLDRGYMVMDFVLLDKVKELVDSFDHTYSLWQEESDELKTFVYKYNRRVAEIPVSPSAEGYALLFFYLIDKILQNTEHKNGEGNVQLSSVRVHETATGYAEAFREDLKLVNFNVHDIRFSEAIREEWKNEQWWEGIR

SEQ ID NO: 18561 - protein, 183 aa, Butyricimonas synergistica
  REGION 1..183: note = tr|A0A1U7LAV0|A0A1U7LAV0_9BACT 6-carboxytetrahydropterin synthase QueD OS=Butyricimonas synergistica OX=544644 GN=BHV81_09995 PE=4 SV=1
MVIRKLFKFEGAHIVRNCSSHRCRENIHGHSYIVEVFITSDKLDRGYMVMDFVLLDKVKELVDSFDHTYSLWQEESDELKTFVYKYNRRVAEIPVSPSAEGYALLFLYLIDKILQNTEHKNGEGNVQLSSVRVHETATGYAEAFREDLKLVNFNVHDIRFSEAIREEWKNDQWWEGIKIKDKN

SEQ ID NO: 18562 - protein, 178 aa, Butyricimonas virosa
  REGION 1..178: note = tr|A0A413IMR8|A0A413IMR8_9BACT 6-carboxytetrahydropterin synthase OS=Butyricimonas virosa; OX = 544645 GN=DXA50_10500 PE=4 SV=1
MLIRKLFKFEGAHIVRNCSSHRCRENIHGHSYIVEVFITSDKLDRGYMVMDFVLLDKVKELVDSFDHTYSLWQEESDELKTFIYKYNRRVAEIPVSPSAEGYALLFLYLIDKILQNTEHKNGEGNVRLSSVRVHETATGYAEAFREDLQLVNFNIHDIRFSEAIREEWKDDQWWEGIR

SEQ ID NO: 18563 - protein, 178 aa, Butyricimonas virosa; identical to SEQ ID NO: 18559
  REGION 1..178: note = tr|A0A415QRL2|A0A415QRL2_9BACT 6-carboxytetrahydropterin synthase OS=Butyricimonas virosa; OX = 544645 GN=DWZ68_00600 PE=4 SV=1

SEQ ID NO: 18564 - protein, 139 aa, Butyrivibrio crossotus
  REGION 1..139: note = tr|D4RWH6|D4RWH6_9FIRM 6-carboxy-5,6,7,8-tetrahydropterin synthase; OS = Butyrivibrio crossotus DSM 2876 OX=511680 GN=queD PE=3; SV = 1
MYSLISEHSFDAAHFLKGYEGKCSNIHGHRWRVVVEIQGDALKKDSHTRGMLIDFDELKETIKKEVDYFDHCLIIEKNSLKENTYNALKDEGFRIVELDFRSTAENFSKYFYDRISEKGYQVKCVSVYETPNDCAVYGE

SEQ ID NO: 18565 - protein, 139 aa, Butyrivibrio crossotus
  REGION 1..139: note = tr|R5LHJ1|R5LHJ1_9FIRM 6-carboxy-5,6,7,8-tetrahydropterin synthase; OS = Butyrivibrio crossotus CAG:259 OX=1263062; GN = BN569_00097 PE=3 SV=1
MYSLISEHSFDAAHFLKGYEGKCSNIHGHRWRVVVEIQGDALKKDSHTRGMLIDFDELKETIKKEVDYFDHCLIIEKNSLKENTYNALKDEGFRIVELDFRSTAENFSKYFYDRIIEKGYQVKCVSVYETPNNCAVYGE

SEQ ID NO: 18566 - protein, 140 aa, Butyrivibrio fibrisolvens
  REGION 1..140: note = tr|D4IW47|D4IW47_BUTFI 6-carboxy-5,6,7,8-tetrahydropterin synthase; OS = Butyrivibrio fibrisolvens 16/4 OX=657324 GN=CIY_23340; PE = 3 SV=1
MYYLTAEASFDGAHFLAGYEGKCSNLHGHRWRVILKIKTDKLQEEGQQRGMVVDFGDVKNALKKETDLFDHSFIYEEGSLKEATVAALQAENFEMHVVPFRPTAENFAKYFFDKFKEYGFTVAEVTVYETPNNCASYSED

SEQ ID NO: 18567 - protein, 139 aa, Butyrivibrio sp.
  REGION 1..139: note = tr|A0A350RPY1|A0A350RPY1_9FIRM 6-carboxy-5,6,7,8-tetrahydropterin synthase; OS = Butyrivibrio sp. OX=28121 GN=queD PE=3 SV=1
MYSLISEHSFDAAHFLKGYEGKCSNIHGHRWRVVVEIQGDALKKDSHTRGMLIDFDELKETIKKEVDYFDHCLIIEKNSLKENTYNALKDEGFRIVELDFRSTAENFSKYFYDRISEKGYQVKRVSVYETPNNCAVYGE

SEQ ID NO: 18568 - protein, 168 aa, Butyrivibrio sp.
  REGION 1..168: note = tr|A0A3A9SUX0|A0A3A9SUX0_9FIRM 6-pyruvoyl tetrahydrobiopterin synthase OS=Butyrivibrio sp. CB08; OX = 2364879 GN=D6855_03055 PE=4 SV=1
MQSKRRSELRRNKVRNDALREYKFKLYLNANHFVIFNGQKGESHPHTWEFAIELLVDKDKFIMFLDFEKAIDDYLEPFQDKLLNDIKPFDTIIPTLENMLDYFAPIFYEEIKKIGGLLIKIEASETPSRTYVYSFRGRDEYLNDLNEHMNTALSNIVHSIVEESLDEE

SEQ ID NO: 18569 - protein, 159 aa, unidentified
  source 1..159: note = Bythopirellula goksoyri
  REGION 1..159: note = tr|A0A5B9QFC6|A0A5B9QFC6_9PLAN 6-pyruvoyl tetrahydropterin synthase OS=Bythopirellula goksoyri; OX = 1400387 GN=Pr1d_49400 PE=4 SV=1
MIIQKQYKFYAAHRNEELEDKCRNLHGHRYGITCFFEVERTGSLSTLFGDFDRKIEPFLKSEYDHGMMVNIKDTLYETLMNHVLRTGEKLKLKRFSQPTTVENLAHQLFTEITDMGFRLSCLEVRETDTSVVSYTREDWVTDSRYFANSKTADTESLSE

SEQ ID NO: 18570 - protein, 159 aa, unidentified
  source 1..159: note = Bythopirellula goksoyri
  REGION 1..159: note = tr|A0A5B9Q5Y3|A0A5B9Q5Y3_9PLAN 6-pyruvoyl tetrahydropterin synthase OS=Bythopirellula goksoyri; OX = 1400387 GN=Pr1d_16730 PE=4 SV=1
MSESFHVRLSKERFVFSAAHFITFNGDICEPLHGHNYHVTAEVNGPLDENQYVVDFILVRDALQKIVDSLDHRMLLPLEHPTIGVTVEGEEVEVTHGVRRWVFPRQDCVLLPMANTTAELLAKYIATLLLETLPDCTPSRLSVGVDECDGQWGYYETNP

SEQ ID NO: 18571 - protein, 148 aa, unidentified
  source 1..148: note = Caballeronia arationis
  REGION 1..148: note = tr|A0A158CER1|A0A158CER1_9BURK 6-carboxy-5,6,7,8-tetrahydropterin synthase; OS = Caballeronia arationis OX=1777142 GN=AWB81_03996 PE=3; SV = 1
MQTITRKLEFDAGHRIPDHRSQCRNLHGHRYVLEITLQGDLVDTEGAPDRGMVMDFADVKSLAMEHLVNKWDHAFLVYEGDVKVREFLDSMAGHKTVVLDRIPTVENMAAVAFGILAEVYDAHYGVNLKLKRVRLYETPNCWADVERA

SEQ ID NO: 18572 - protein, 148 aa, unidentified
  source 1..148: note = Caballeronia arvi
  REGION 1..148: note = tr|A0A158HGE9|A0A158HGE9_9BURK 6-carboxy-5,6,7,8-tetrahydropterin synthase; OS = Caballeronia arvi OX=1777135 GN=AWB74_01782 PE=3 SV=1
MQTITRKLEFDAGHRIPDHRSQCRNLHGHRYVLEITLQGDLVDVEGAPDRGMVMDFADVKALAMEHLVNKWDHAFIVYEGDVKVREFLQTLSDHKTVVLDRIPTVENLAAVAFNILAEVYDAHYGVNLKLKRVRLYETPNCWADVERG

SEQ ID NO: 18573 - protein, 148 aa, unidentified
  source 1..148: note = Caballeronia calidae
  REGION 1..148: note = tr|A0A157Z8I5|A0A157Z8I5_9BURK 6-carboxy-5,6,7,8-tetrahydropterin synthase; OS = Caballeronia calidae OX=1777139 GN=AWB78_00184 PE=3 SV=1
MQTITRKLEFDAGHRIPDHRSQCRNLHGHRYVLEITLQGELVDVEGAPDRGMVMDFADVKALAMEHLVNKWDHAFIVYEGDVKVREFLQTLSDHKTVVLDRIPTVENLAAVAFDLLADVYDAHYGVNLKLKRVRLYETPNCWADVERG

SEQ ID NO: 18574 - protein, 148 aa, unidentified
  source 1..148: note = Caballeronia catudaia
  REGION 1..148: note = tr|A0A157Z586|A0A157Z586_9BURK 6-carboxy-5,6,7,8-tetrahydropterin synthase; OS = Caballeronia catudaia OX=1777136 GN=AWB75_00211 PE=3; SV = 1
MQTITRKLEFDAGHRIPDHRSQCRNLHGHRYVLEITLQGDLVDVEGAPDRGMVMDFADVKALAMDHLVNKWDHAFIVYEGDVKVREFLQTLSDHKTVVLDRIPTVENLAAVAFNILADVYDAHYGVNLKLKRVRLYETPNCWADVERG

SEQ ID NO: 18575 - protein, 148 aa, unidentified
  source 1..148: note = Caballeronia choica
  REGION 1..148: note = tr|A0A158FGE7|A0A158FGE7_9BURK 6-carboxy-5,6,7,8-tetrahydropterin synthase; OS = Caballeronia choica OX=326476 GN=AWB68_00614 PE=3 SV=1
MQTITRKLEFDAGHRIPDHRSQCRNLHGHRYVLEITLQGDLVDTEGAPDRGMVMDFADVKSLAMEHLVNKWDHAFIVYEGDGKVREFLDSMAGHKTVVLDRIPTVENMAAVAFDILADVYDAHYGVNLKLKRVRLYETPNCWADVERA

SEQ ID NO: 18576 - protein, 148 aa, unidentified
  source 1..148: note = Caballeronia cordobensis
  REGION 1..148: note = tr|A0A158F325|A0A158F325_9BURK 6-carboxy-5,6,7,8-tetrahydropterin synthase; OS = Caballeronia cordobensis OX=1353886 GN=AWB70_00458 PE=3; SV = 1
MQTITRKLEFDAGHRIPDHRSQCRNLHGHRYVLEITLQGDLVDVEGAPDRGMVMDFADVKALAMEHLVNKWDHAFIVYEGDVKVREFLQTLSDHKTVVLDRIPTVENLAAVAFDILADVYDAHYGVNLKLKRLRLYETPNCWADVERG

SEQ ID NO: 18577 - protein, 148 aa, unidentified
  source 1..148: note = Caballeronia fortuita
  REGION 1..148: note = tr|A0A157Z6R5|A0A157Z6R5_9BURK 6-carboxy-5,6,7,8-tetrahydropterin synthase; OS = Caballeronia fortuita OX=1777138 GN=AWB77_00318 PE=3; SV = 1
MQTITRKLEFDAGHRIPDHRSQCRNLHGHRYVLEITLQGDLVDVEGAPDRGMVMDFADVKALAMEHLVNKWDHAFIVYEGDAKVREFLQTLSDHKTVVLDRIPTVENLAAVAFNILAEVYDAHYGVNLKLKRVRLYETPNCWADVERG

SEQ ID NO: 18578 - protein, 148 aa, unidentified
  source 1..148: note = Caballeronia glathei
  REGION 1..148: note = tr|A0A069PHY5|A0A069PHY5_9BURK 6-carboxy-5,6,7,8-tetrahydropterin synthase; OS = Caballeronia glathei OX=60547 GN=BG61_26285 PE=3 SV=1
MQTITRKLEFDAGHRIPDHRSQCRNLHGHRYVLEITLQGDLVDTEGAPDRGMVMDFADVKSLAMEHLVNKWDHAFLVYEGDVKVREFLDSMAGHKTVVLDRIPTVENMAAVAFDILAGVYDAHYGVNLKLKRVRLYETPNCWADVERG

SEQ ID NO: 18579 - protein, 148 aa, unidentified
  source 1..148: note = Caballeronia glebae
  REGION 1..148: note = tr|A0A157ZQI1|A0A157ZQI1_9BURK 6-carboxy-5,6,7,8-tetrahydropterin synthase; OS = Caballeronia glebae OX=1777143 GN=AWB82_01096 PE=3 SV=1
MQTITRKLEFDAGHRIPDHRSQCRNLHGHRYVLEITLQGDLVDVEGAPDRGMVMDFADVKALAMEHLVNKWDHAFIVYEGDVKVREFLQTLPDHKTVVLDRIPTVENLAAVAFNILADVYDAHYGVNLKLKRLRLFETPNCWADVERD

SEQ ID NO: 18580 - protein, 121 aa, unidentified
  source 1..121: note = Caballeronia glebae
  REGION 1..121: note = tr|A0A158CZS2|A0A158CZS2_9BURK 6-carboxy-5,6,7,8-tetrahydropterin synthase; OS = Caballeronia glebae OX=1777143 GN=queD PE=3 SV=1
MNYELSQKFYFEAAHTLHREIDQEGSRRIHGHTYHAEVYLRGLPDSKTGMLVDLGLLRLEIERIRDLLDHRFLDEVSGLGPATLENLSGFILRKLAEYVPSITKVKVERHATGDACVAFAD

SEQ ID NO: 18581 - protein, 148 aa, unidentified
  source 1..148: note = Caballeronia grimmiae
  REGION 1..148: note = tr|A0A069NM63|A0A069NM63_9BURK 6-carboxy-5,6,7,8-tetrahydropterin synthase; OS = Caballeronia grimmiae OX=1071679 GN=BG57_17960 PE=3 SV=1
MQTITRKLEFDAGHRIPDHRSQCRNLHGHRYVLEITLQGDLVDVEGAPDRGMVMDFADVKSLAMQHLVNKWDHAFIVYEGDAKVREFLQSLADHKTVVFDRIPTVENMAAVAFRILADVYDAHYGVNLKLKRLRLYETPNCWADVERE

SEQ ID NO: 18582 - protein, 148 aa, unidentified
  source 1..148: note = Caballeronia humi
  REGION 1..148: note = tr|A0A158GEG9|A0A158GEG9_9BURK 6-carboxy-5,6,7,8-tetrahydropterin synthase; OS = Caballeronia humi OX=326474 GN=AWB65_01899 PE=3 SV=1
MQTITRKLEFDAGHRIPDHRSQCRNLHGHRYVLEITLQGDLVDTEGAPDRGMVMDFADVKSLAMEHLVNKWDHAFLVYEGDTQVREFLDSMAGHKTVVLDRIPTVENMAAVAFGILADVYDAHYGVNLKLKRVRLYETPNCWADVERA

SEQ ID NO: 18583 - protein, 148 aa, unidentified
  source 1..148: note = Caballeronia hypogeia
  REGION 1..148: note = tr|A0A157Z7C8|A0A157Z7C8_9BURK 6-carboxy-5,6,7,8-tetrahydropterin synthase; OS = Caballeronia hypogeia OX=1777140 GN=AWB79_00440 PE=3; SV = 1
MQTITRKLEFDAGHRIPDHRSQCRNLHGHRYVLEISLQGDLVDVEGAPDRGMVMDFADVKALAMEHLVNKWDHAFIVYEGDVKVREFLQTLSDHKTVVLDRIPTVENLAAVAFDILANVYDAHYGVNLKLKRVRLYETPNCWADVERT

SEQ ID NO: 18584 - protein, 148 aa, unidentified
  source 1..148: note = Caballeronia jiangsuensis
  REGION 1..148: note = tr|A0A038GMU4|A0A038GMU4_9BURK 6-carboxy-5,6,7,8-tetrahydropterin synthase; OS = Caballeronia jiangsuensis OX=1458357 GN=BG58_34545 PE=3; SV = 1
MQTITRKLEFDAGHRIPDHRSQCRNLHGHRYVLEITLQGDLVDVEGAPDRGMVMDFADVKALAMEHLVNKWDHAFIVYEGDVKVREFLQTLSDHKTVVLDRIPTVENLAAVAFNILAEVYDAHYGVNLKLKRVRLFETPNCWADVERG

SEQ ID NO: 18585 - protein, 148 aa, unidentified
  source 1..148: note = Caballeronia megalochromosomata
  REGION 1..148: note = tr|A0A149RNZ6|A0A149RNZ6_9BURK 6-carboxy-5,6,7,8-tetrahydropterin synthase; OS = Caballeronia megalochromosomata OX=1399969; GN = CR51_02860 PE=3 SV=1
MQTITRKLEFDAGHRIPDHRSQCRNLHGHRYVLEITLQGDLVDVEGAPDRGMVMDFADVKALAMDHLVNKWDHAFIVYEGDVKVREFLQTLSDHKTVVLDRIPTVENLAAVAFNILADVYDAHYGINLKLKRVRLYETPNCWADVERG

SEQ ID NO: 18586 - protein, 148 aa, unidentified
  source 1..148: note = Caballeronia mineralivorans
  REGION 1..148: note = tr|A0A0J1CQT1|A0A0J1CQT1_9BURK 6-carboxy-5,6,7,8-tetrahydropterin synthase; OS = Caballeronia mineralivorans PML1(12) OX=908627; GN = EOS_27490 PE=4 SV=1
MQTITRKLEFDAGHRIPDHRSQCRNLHGHRYVLEITLQGELVETEGAPDRGMVMDFADVKALAMEHLVNKWDHAFIVYARDEKVRGFLESMAEHKTIVLDRIPTVENLAAEAFRILSGVYDAHYGVNLKLKRIRLYETPNCWADVEGI

SEQ ID NO: 18587 - protein, 148 aa, unidentified
  source 1..148: note = Caballeronia pedi
  REGION 1..148: note = tr|A0A158A2F0|A0A158A2F0_9BURK 6-carboxy-5,6,7,8-tetrahydropterin synthase; OS = Caballeronia pedi OX=1777141 GN=AWB80_01725 PE=3 SV=1
MQTITRKLEFDAGHRIPDHRSQCRNLHGHRYVLEITLQGDLVDVEGAPDRGMVMDFADVKALAMEHLVNKWDHAFIVYEGDVKVREFLQTLSDHKTVVLDRIPTVENLAAVAFNILANVYDAHYGVNLKLNRVRLYETPNCWADVERN

SEQ ID NO: 18588 - protein, 148 aa, unidentified
  source 1..148: note = Caballeronia peredens
  REGION 1..148: note = tr|A0A158FZY1|A0A158FZY1_9BURK 6-carboxy-5,6,7,8-tetrahydropterin synthase; OS = Caballeronia peredens OX=1777132 GN=AWB71_01357 PE=3; SV = 1
MQTITRKLEFDAGHRIPDHRSQCRNLHGHRYVLEITLRGDLVDVEGAPDRGMVMDFADVKALAMEHLVNKWDHAFIVYEGDVKVREFLQTLADHKTVVLDRIPTVENMAAVAFNILAEVYDAHYGVNLKLSRVRLYETPNCWADVERG

SEQ ID NO: 18589 - protein, 148 aa, unidentified
  source 1..148: note = Caballeronia ptereochthonis
  REGION 1..148: note = tr|A0A158CTZ0|A0A158CTZ0_9BURK 6-carboxy-5,6,7,8-tetrahydropterin synthase; OS = Caballeronia ptereochthonis OX=1777144 GN=AWB83_04672; PE = 3 SV=1
MQTITRKLEFDAGHRIPDHRSQCRNLHGHRYVVEITLQGDLVDVEGAPDRGMVMDFADVKALAMEHLVNKWDHAFIVYEGDVKVREFLQTLSDHKTVVLDRIPTVENMAAVAFAILADVYDAHYGVNLKLKRLRLYETPNCWADVERG

SEQ ID NO: 18590 - protein, 148 aa, unidentified
  source 1..148: note = Caballeronia sordidicola
  REGION 1..148: note = tr|A0A158FAS6|A0A158FAS6_9BURK 6-carboxy-5,6,7,8-tetrahydropterin synthase; OS = Caballeronia sordidicola OX=196367 GN=AWB64_01055 PE=3; SV = 1
MQTITRKLEFDAGHRIPDHRSQCRNLHGHRYVLEITLQGELVETEGAPDRGMVMDFADVKALAMEHLVNKWDHAFIVYARDEIVRGFLEQMADHKTVVLDRIPTVENLAAEAFRILSGVYDAHYGVNLKLKRIRLYETPNCWADVEGV

SEQ ID NO: 18591 - protein, 148 aa, unidentified
  source 1..148: note = Caballeronia sordidicola
  REGION 1..148: note = tr|A0A226WJR8|A0A226WJR8_9BURK 6-carboxy-5,6,7,8-tetrahydropterin synthase; OS = Caballeronia sordidicola OX=196367 GN=BSU04_46435 PE=3; SV = 1
MQTITRKLEFDAGHRIPDHRSQCRNLHGHRYVLEITLQGELVETEGAPDRGMVMDFADVKALAMEHLVNKWDHAFIVYARDEVVRSFLEKMADHKTVVLDRIPTVENLAAEAFRILSGVYNDHYGVDLKLKRVRLYETPNCWADVEGV

SEQ ID NO: 18592 - protein, 148 aa, unidentified
  source 1..148: note = Caballeronia telluris
  REGION 1..148: note = tr|A0A158JAX4|A0A158JAX4_9BURK 6-carboxy-5,6,7,8-tetrahydropterin synthase; OS = Caballeronia telluris OX=326475 GN=AWB66_04004 PE=3 SV=1
MQTITRKLEFDAGHRIPDHRSQCRNLHGHRYVLEITLQGDLVDTEGAPDRGMVMDFADVKSLAMEHLVNKWDHAFLVYEGDAKVREFLDSMAGHKTVVLDRIPTVENMAAVAFGILADVYDAHYGVNLKLKRVRLYETPNCWADVERA

SEQ ID NO: 18593 - protein, 148 aa, unidentified
  source 1..148: note = Caballeronia temeraria
  REGION 1..148: note = tr|A0A157ZI63|A0A157ZI63_9BURK 6-carboxy-5,6,7,8-tetrahydropterin synthase; OS = Caballeronia temeraria OX=1777137 GN=AWB76_00705 PE=3; SV = 1
MQTITRKLEFDAGHRIPDHRSQCRNLHGHRYVLEITLQGDLVDVEGAPDRGMVMDFADVKALAMEHLVNKWDHAFIVYEGDVKVREFLQTLSDHKTVVLDRIPTVENLAAVAFNILADVYDAHYGINLKLKRVRLFETPNCWADVERG

SEQ ID NO: 18594 - protein, 148 aa, unidentified; identical to SEQ ID NO: 18582
  source 1..148: note = Caballeronia terrestris
  REGION 1..148: note = tr|A0A158JEL0|A0A158JEL0_9BURK 6-carboxy-5,6,7,8-tetrahydropterin synthase; OS = Caballeronia terrestris OX=1226301 GN=AWB67_03758 PE=3; SV = 1

SEQ ID NO: 18595 - protein, 148 aa, unidentified
  source 1..148: note = Caballeronia turbans
  REGION 1..148: note = tr|A0A158FJW3|A0A158FJW3_9BURK 6-carboxy-5,6,7,8-tetrahydropterin synthase; OS = Caballeronia turbans OX=1777134 GN=AWB73_01178 PE=3 SV=1
MQTITRKLEFDAGHRIPDHRSQCRNLHGHRYVLEITLQGDLVDVEGAPDRGMVMDFADVKALAMEHLVNKWDHAFIVYEGDVKVREFLHTLPDHKTVVLDRIPTVENLAAVAFNILAEVYDAHYGVNLKLKRVRLFETPNCWADVERG

SEQ ID NO: 18596 - protein, 148 aa, unidentified
  source 1..148: note = Caballeronia udeis
  REGION 1..148: note = tr|A0A158F8X2|A0A158F8X2_9BURK 6-carboxy-5,6,7,8-tetrahydropterin synthase; OS = Caballeronia udeis OX=1232866 GN=AWB69_00824 PE=3 SV=1
MQTITRKLEFDAGHRIPDHRSQCRNLHGHRYVLEITLQGELVETEGAPDRGMVMDFADVKALAMEHLVNKWDHAFIVYARDEVVRSFLEQMADHKTVVLDRIPTVENLAAEAFRILSGVYNDHYGVDLKLKRVRLYETPNCWADVEGV

SEQ ID NO: 18597 - protein, 148 aa, unidentified
  source 1..148: note = Caballeronia udeis
  REGION 1..148: note = tr|A0A3M0V8E4|A0A3M0V8E4_9BURK 6-carboxy-5,6,7,8-tetrahydropterin synthase; OS = Caballeronia udeis OX=1232866 GN=DFJ53_04738 PE=3 SV=1
MQTITRKLEFDAGHRIPDHRSQCRNLHGHRYVLEITLQGELVETEGAPDRGMVMDFADVKALAMEHLVNKWDHAFIVYAGDEKVRGFLESMAEHKTIVLDRIPTVENLAAEAFRILSGVYDAHYGVNLKLKRIRLYETPNCWADVEGI

SEQ ID NO: 18598 - protein, 134 aa, Caenispirillum bisanense
  REGION 1..134: note = tr|A0A286G1Z6|A0A286G1Z6_9PROT 6-pyruvoyl-tetrahydropterin synthase OS=Caenispirillum bisanense OX=414052 GN=SAMN05421508_101164 PE=4 SV=1
MFSVCVRDHFMIAHSFTGETFGPAQRLHGATYVVDVEFRRPDLDPDGVVVDIGAAHALVKDVLSDLNFRNLDDEPAFAGQNTTTEFLAHAVWRRIAGHVREGTLGPNAQGLAVLKVTLHESHVAWAAYEGALTS

SEQ ID NO: 18599 - protein, 142 aa, unidentified
  source 1..142: note = Caenispirillum salinarum
  REGION 1..142: note = tr|K9GTS0|K9GTS0_9PROT PTPS-like type 4; OS = Caenispirillum salinarum AK4 OX=1238182 GN=C882_0778; PE = 4 SV=1
MYSVTVRDHFMIAHSFTGETFGPAQALHGATYTVDLEFRRPRLDPDGVVVDIGAAHALLKDVLSELNFRNLDDEPAFAGQNTTTEFLAGAVFERIARHVHDGALGANAEGLTGMKVTLHESHVAWAAFEGPLNGAASGAEAR

SEQ ID NO: 18600 - protein, 126 aa, Caldalkalibacillus thermarum
  REGION 1..126: note = tr|F5LAD1|F5LAD1_CALTT 6-carboxy-5,6,7,8-tetrahydropterin synthase; OS = Caldalkalibacillus thermarum (strain TA2.A1) OX=986075; GN = CathTA2_2866 PE=3 SV=1
MGKYTLVKHFWMACAHAVKGAGKCERIHGHNFKITFCVEGEKLDDNGMLIDFREVKHSLEKKYDHHLLNDFPEFNPDQGGASPSTEKVAEIFFQHIKALCKQKKNQPRLKWVEVQETNEAYARYEE

SEQ ID NO: 18601 - protein, 122 aa, Caldanaerobacter subterraneus
  REGION 1..122: note = tr|A0A101FDE0|A0A101FDE0_9THEO 6-carboxy-5,6,7,8-tetrahydropterin synthase; OS = Caldanaerobacter subterraneus OX=911092 GN=XD65_0694; PE = 3 SV=1
MKVTKIFTFDSAHNLINYNGKCEELHGHTYKLEVTVEGKPDGEGMVIDFVKLKEIVNEKVVKKLDHKYLNEVLGFNTTCENILLWIWKELEPVFKGDNYHLYKLRLWETPTSFAEITEKDFV

SEQ ID NO: 18602 - protein, 122 aa, Caldanaerobacter subterraneus
  REGION 1..122: note = tr|Q8R7N5|Q8R7N5_CALS4 6-carboxy-5,6,7,8-tetrahydropterin synthase; OS = Caldanaerobacter subterraneus subsp. tengcongensis (strain DSM 15242 / JCM 11007 / NBRC 100824/ MB4); OX = 273068 GN=TTE2368 PE=3 SV=1
MRVTKIFTFDSAHNLVNYHGKCEELHGHTYRLEVTVEGYPDEEGMVLDFVKLKEIVNEKIIKKLDHKYLNEVLGFNTTCENILLWMWKELEGELKGPNYKLYKLTLWETPTSFAEVTAEDLK

SEQ ID NO: 18603 - protein, 126 aa, Caldanaerobius fijiensis
  REGION 1..126: note = tr|A0A1M4ZPA4|A0A1M4ZPA4_9THEO 6-carboxy-5,6,7,8-tetrahydropterin synthase; OS = Caldanaerobius fijiensis DSM 17918 OX=1121256; GN = SAMN02746089_01461 PE=3 SV=1
MKVTKVFEFDSAHNLINYNGKCEKLHGHTYKLEVTVSGVPDINGLVIDFTLLKSIVNECIIEKLDHQYLNELFDFNTTCENILVWMWNQLYGRLKTDRFELYQLTLWETPTSYATVTKEDMGDVES

SEQ ID NO: 18604 - protein, 125 aa, Caldanaerovirga acetigignens
  REGION 1..125: note = tr|A0A1M7LTK4|A0A1M7LTK4_9FIRM 6-carboxy-5,6,7,8-tetrahydropterin synthase; OS = Caldanaerovirga acetigignens OX=447595; GN = SAMN05660826_02033 PE=3 SV=1
MFLIKEFKFDAAHNLVSYKGKCEKLHGHTYRLVVVLEGVPDREEMIMDFLELKEIVNEKVLKKLDHSYINDIVKQPSAENIAVWVWQQLEEGVRRENCRLYEVQVWETETSGVIYRGENLEGRSK

SEQ ID NO: 18605 - protein, 121 aa, unidentified
  source 1..121: note = Calderihabitans maritimus
  REGION 1..121: note = tr|A0A1Z5HXH9|A0A1Z5HXH9_9THEO 6-carboxy-5,6,7,8-tetrahydropterin synthase; OS = Calderihabitans maritimus OX=1246530 GN=KKC1_33500 PE=3; SV = 1
MFRLTVREQFAAAHQLKNYEGKCARIHGHTWQVEVEVAGETLDEAGMLVDFNELKRSLKEILEDYDHTLLNELADFKEANPTAENLARTIYIRMAARIPEKVKVVQVRVWESPTACAIYHP

SEQ ID NO: 18606 - protein, 120 aa, Caldicellulosiruptor bescii
  REGION 1..120: note = tr|B9MNP3|B9MNP3_CALBD 6-carboxy-5,6,7,8-tetrahydropterin synthase; OS = Caldicellulosiruptor bescii (strain ATCC BAA-1888 / DSM 6725 / Z-1320) OX=521460 GN=Athe_0440 P E=3 SV=1
MLLKKIFKFDAAHNLTKYNGKCENLHGHTYKLAVTVEGKLDNQDMVIDFVLLKKIVQDEVIDILDHAYINDIIENPTAENIAKWIWKKLSKKIEEQGVKLYEIEVWETEDSSVIYRGEDE

SEQ ID NO: 18607 - protein, 121 aa, unidentified
  source 1..121: note = Caldicellulosiruptor changbaiensis
  REGION 1..121: note = tr|A0A3T0D2C8|A0A3T0D2C8_9FIRM 6-carboxy-5,6,7,8-tetrahydropterin synthase; OS = Caldicellulosiruptor changbaiensis OX=1222016 GN=queD; PE = 3 SV=1
MLLKKIFKFDAAHNLTKYHGKCEKLHGHTYKLVVTVKGKLDEQDMVIDFALLKDIVQKEVIDILDHAYLNDIIENPTAENIAKWIWQRLYDKIKAQNCTLYEIEVWETEDSGAVYRGEDDD

SEQ ID NO: 18608 - protein, 120 aa, Caldicellulosiruptor hydrothermalis
  REGION 1..120: note = tr|E4Q883|E4Q883_CALH1 6-carboxy-5,6,7,8-tetrahydropterin synthase; OS = Caldicellulosiruptor hydrothermalis (strain DSM 18901 / VKM B-2411 / 108) OX=632292 GN=Calhy_22 25 PE=3 SV=1
MLLKKIFKFDAAHNLTKYNGKCENLHGHTYKLVVTVEGKPDNQDMVIDFVLLKKIVQDEVIDVLDHAYINDIIENPTAENIAKWIWKKLSRKIEEQGCRLYEIEVWETEDSSVIYRGEDE

SEQ ID NO: 18609 - protein, 120 aa, Caldicellulosiruptor kristjanssonii
  REGION 1..120: note = tr|E4S6C5|E4S6C5_CALKI 6-carboxy-5,6,7,8-tetrahydropterin synthase; OS = Caldicellulosiruptor kristjanssonii (strain ATCC 700853 / DSM 12137 / I77R1B) OX=632335 GN=Calk r_2221 PE=3 SV=1
MLLKKIFKFDAAHNLTKYNGKCENLHGHTYKLVVTVEGKPDDQDMVIDFVLLKKIVHDEVINILDHAYINDIIENPTAENIAKWIWGKLSKKIEEQGCRLYEIEVWETEDSSVIYRGEDE

SEQ ID NO: 18610 - protein, 120 aa, Caldicellulosiruptor kronotskyensis
  REGION 1..120: note = tr|E4SH09|E4SH09_CALK2 6-carboxy-5,6,7,8-tetrahydropterin synthase; OS = Caldicellulosiruptor kronotskyensis (strain DSM 18902 / VKM B-2412 / 2002) OX=632348 GN=Calkro_ 2196 PE=3 SV=1
MLLKKIFKFDAAHNLTKYNGKCENLHGHTYKLAVTVEGKPDNQDMVIDFMLLKKIVQDEVIDILDHAYINDIIENPTAENIAKWIWEKLSKKIEEQGVKLYEIEVWETEDSSVIYRGEDE

SEQ ID NO: 18611 - protein, 120 aa, Caldicellulosiruptor lactoaceticus
  REGION 1..120: note = tr|G2PWG5|G2PWG5_9FIRM 6-carboxy-5,6,7,8-tetrahydropterin synthase; OS = Caldicellulosiruptor lactoaceticus 6A OX=632516; GN = Calla_0229 PE=3 SV=1
MLLKKIFKFDAAHNLTKYNGKCENLHGHTYKLVVTVEGKPNDQDMVIDFVLLKKIVHDEVINILDHAYINDIIENPTAENIAKWIWGKLSKKIEEQGCRLYEIEVWETEDSSVIYRGEDE

SEQ ID NO: 18612 - protein, 142 aa, unidentified
  source 1..142: note = Caldicellulosiruptor obsidiansis
  REGION 1..142: note = tr|D9TI95|D9TI95_CALOO 6-carboxy-5,6,7,8-tetrahydropterin synthase; OS = Caldicellulosiruptor obsidiansis (strain ATCC BAA-2073 / strain OB47) OX=608506 GN=COB47_0391 P E=3 SV=1
MSKEQPLKFLVNIYYGLGVIFVMLLKKIFKFDAAHNLTKYNGKCENLHGHTYKLVVTVEGKPDNQDMVIDFVLLKKIVQNEVIDILDHAYINDIIENPTAENIAKWIWGKLSKKIEEQGVKLYEIEVWETEDSSVIYRGEDE

SEQ ID NO: 18613 - protein, 120 aa, Caldicellulosiruptor owensensis
  REGION 1..120: note = tr|E4Q338|E4Q338_CALOW 6-carboxy-5,6,7,8-tetrahydropterin synthase; OS = Caldicellulosiruptor owensensis (strain ATCC 700167 / DSM 13100 / OL) OX=632518 GN=Calow_0273 P E=3 SV=1
MLLKKTFKFDAAHNLTKYNGKCENLHGHTYKLVVTVEGKPDNQDMVIDFVLLKKIVQNEVIDILDHAYINDIIENPTAENIAKWIWGKLSKKIEEQGCRLYEIEVWETEDSSVIYRGEDE

SEQ ID NO: 18614 - protein, 121 aa, Caldicellulosiruptor saccharolyticus
  REGION 1..121: note = tr|A4XG23|A4XG23_CALS8 6-carboxy-5,6,7,8-tetrahydropterin synthase; OS = Caldicellulosiruptor saccharolyticus (strain ATCC 43494 / DSM 8903 / Tp8T 6331) OX=351627 GN=Cs ac_0210 PE=3 SV=1
MLLKKIFKFDAAHNLTKYHGKCERLHGHTYKLVVTVKGKLDEQDMVIDFALLKDIVQKEVIDILDHAYLNDIIENPTAENIAKWIWQRLYDKIKAQNSTLYEVEVWETEDSGAVYRGEDDD

SEQ ID NO: 18615 - protein, 125 aa, Caldilinea aerophila
  REGION 1..125: note = tr|I0I7G3|I0I7G3_CALAS 6-pyruvoyl tetrahydropterin synthase family protein OS=Caldilinea aerophila (strain DSM 14535 / JCM 11387 / NBRC 104270 / STL-6-O1); OX = 926550GN=CLDAP_31610 PE=4 SV=1
MYTLAVQRDFVAQHFLIGGDWGAENFWHSHHYRLELILEGDELDQHGYLVDIVHVERELDAIVAHYKDKTLNDLPEFAGLNPSIEHFTRIVCLRLNEAIPAPNIRALTVKIWENQIAWAAYRHER

SEQ ID NO: 18616 - protein, 122 aa, unidentified
  source 1..122: note = Caldilineae bacterium
  REGION 1..122: note = tr|A0A3M1HQL0|A0A3M1HQL0_9CHLR 6-carboxytetrahydropterin synthase OS=Caldilineae bacterium OX=2420332 GN=D6775_06120 PE=4 SV=1
MYALAIQQDFIARRSASADGSATALSHRYRVELMVEAEELDQQGYVVDIDELQAQFEGIVDEFRDKTLNELPDFEGVNPSLEHFARVLCEKVDEALYAPQLSAISIKLWEDDTAWVAYDVER

SEQ ID NO: 18617 - protein, 126 aa, unidentified
  source 1..126: note = Caldilineae bacterium
  REGION 1..126: note = tr|A0A3M1F1E1|A0A3M1F1E1_9CHLR 6-carboxytetrahydropterin synthase OS=Caldilineae bacterium OX=2420332 GN=D6796_01000 PE=4 SV=1
MYTIATKRTFIARHRLAGTKHPQDSRAHSHQYRLEVILEGNRLNEHGFLVDIEDLERLVEARVRHFQDTVLNDLPEFAALNPTLEHFARILWYSLSEHLSQLPQLTMLTVRIWKGATTWAVYRRRL

SEQ ID NO: 18618 - protein, 124 aa, unidentified
  source 1..124: note = Caldimicrobium thiodismutans
  REGION 1..124: note = tr|A0A0U4W0V2|A0A0U4W0V2_9BACT 6-carboxy-5,6,7,8-tetrahydropterin synthase; OS = Caldimicrobium thiodismutans OX=1653476 GN=THC_0385; PE = 3 SV=1
MYRLKVQDHFSSAHYLRNYQGACENLHGHNWKVELVVEGEKLNEIDILLDFKDIKKILKEVLSELDHRLINELPYFQEKNPSSENIARYIFDRVKDKLKVFEGVRVKEVTVFETEKASATYLEE

SEQ ID NO: 18619 - protein, 124 aa, unidentified
  source 1..124: note = Caldimicrobium thiodismutans
  REGION 1..124: note = tr|A0A2N7PK72|A0A2N7PK72_9BACT 6-carboxy-5,6,7,8-tetrahydropterin synthase; OS = Caldimicrobium thiodismutans OX=1653476 GN=queD PE=3; SV = 1
MYRLKVKDHFSSAHYLRNYQGACENLHGHNWIVELVVEGEKLNEIEILIDFKDLKQILKDVLSQLDHRLINEHPYFKERNPSSENLARFIFEKVKERLKDYPNVRVKEVTVFETEKASATYSEV

SEQ ID NO: 18620 - protein, 127 aa, unidentified
  source 1..127: note = Caldiserica bacterium
  REGION 1..127: note = tr|A0A2H9MDV8|A0A2H9MDV8_9BACT 6-carboxy-5,6,7,8-tetrahydropterin synthase OS=Caldiserica bacterium CG02_land_8_20_14_3_00_36_38 OX=1973932 GN=queD; PE = 3 SV=1
MNKLSFYLSRNFTFDAAHRIIDYSGKCENLHGHTYKLTVTITGKLKSDGMVLDFAILKQIVEENVLERLDHKYLNDVFENPTTEIIAHWIFEKLQKPFEEVNCSIYEVDLTEGVNNKVSIKNERRSE

SEQ ID NO: 18621 - protein, 127 aa, unidentified; identical to SEQ ID NO: 18620
  source 1..127: note = Caldiserica bacterium
  REGION 1..127: note = tr|A0A2H9N4V1|A0A2H9N4V1_9BACT 6-carboxy-5,6,7,8-tetrahydropterin synthase OS=Caldiserica bacterium CG_4_8_14_3_um_filter_35_18 OX=1973931 GN=queD; PE = 3 SV=1

SEQ ID NO: 18622 - protein, 117 aa, Caldisericum exile
  REGION 1..117: note = tr|I0GJK4|I0GJK4_CALEA 6-carboxy-5,6,7,8-tetrahydropterin synthase; OS = Caldisericum exile (strain DSM 21853 / NBRC 104410 / AZM16c01) OX=511051 GN=CSE_08150 PE=3 SV=1
MFFLSREFSFDAAHRVIDYNGKCEKLHGHTYHLIVTITGDLKEDGMVLDFSILKKVVQEKVIVFLDHKYLNDVFENPTTEIVAQWIFKTLDNAFKEYNCKVYEIILFEGDNNRVSIR

SEQ ID NO: 18623 - protein, 127 aa, Caldisericum sp.; identical to SEQ ID NO: 18620
  REGION 1..127: note = tr|A0A1J5BLA2|A0A1J5BLA2_9BACT 6-carboxy-5,6,7,8-tetrahydropterin synthase; OS = Caldisericum sp. CG2_30_36_11 OX=1805053 GN=AUJ99_04900; PE = 3 SV=1

SEQ ID NO: 18624 - protein, 119 aa, Calditerrivibrio nitroreducens
  REGION 1..119: note = tr|E4TF31|E4TF31_CALNY 6-carboxy-5,6,7,8-tetrahydropterin synthase; OS = Calditerrivibrio nitroreducens (strain DSM 19672 / NBRC 101217 / Yu37-1) OX=768670 GN=Calni_156 3 PE=3 SV=1
MFKVRVIDHFSSAHNLRGYEGNCERLHGHNWKVEVELMGDKLDHIGMLVDFKVLKKSLKKIIDELDHTYLNEHPYFKDVNPTSENMAKYIFLRLKEDFGTLVHKVAVWESHNAVAEYFE

SEQ ID NO: 18625 - protein, 119 aa, Calditerrivibrio nitroreducens
  REGION 1..119: note = tr|A0A2J6WP30|A0A2J6WP30_9BACT 6-carboxy-5,6,7,8-tetrahydropterin synthase; OS = Calditerrivibrio nitroreducens OX=477976 GN=queD PE=3; SV = 1
MFKVRVIDHFSSAHNLRGYEGNCERLHGHNWKVEVELMGDRLDNIGMLVDFKVLKKSLKKIIDELDHTYLNEHPYFKDVNPTSENMAKYIFLRLKEDFGTFVYKVAVWESHNAVAEYFE

SEQ ID NO: 18626 - protein, 138 aa, Caldithrix abyssi
  REGION 1..138: note = tr|H1XX37|H1XX37_9BACT 6-pyruvoyltetrahydropterin/6-carboxytetrahydropterin synthase OS=Caldithrix abyssi DSM 13497 OX=880073; GN = Cabys_3982 PE=4 SV=1
MSRRQISLSKVYTFSAAHRLHAPQKDDDFNRRIYDKCNNPNGHGHDYYLEVTVRGAVDEQSGMIIPLPTLDSAVHSVIDPLEHRHFDLEIDYFKTRRSTGEEIIQFLWQELEKYLGNKLFKIKLWETNNNYFELERKA

SEQ ID NO: 18627 - protein, 121 aa, Caldithrix abyssi
  REGION 1..121: note = tr|H1XNF1|H1XNF1_9BACT 6-carboxy-5,6,7,8-tetrahydropterin synthase OS=Caldithrix abyssi DSM 13497 OX=880073 GN=Cabys_1333 PE=3 SV=1
MYQLSIDLMFSASHHLRGYEGPCQRIHGHNWKVQVVVKSKRVDSIGMVIDFKDLSDLAWQVVGKFDHQMVNDIAPFDQINPTAENLSRYFFKEIARLLPDGVEMQAIRLWETPKYMIEYTE

SEQ ID NO: 18628 - protein, 47 aa, Caldithrix sp.
  REGION 1..47: note = tr|A0A523HXL1|A0A523HXL1_9BACT 6-carboxytetrahydropterin synthase QueD (Fragment); OS = Caldithrix sp. OX=1962856 GN=E2O77_09790 PE=4 SV=1
MKLGTTHYIDCAHFLPGHPKCGQLHGHTYKVEVVIEGENKDGMIIDF

SEQ ID NO: 18629 - protein, 141 aa, unidentified
  source 1..141: note = Calditrichaeota bacterium
  REGION 1..141: note = tr|A0A3M2FVJ1|A0A3M2FVJ1_9BACT 6-carboxytetrahydropterin synthase OS=Calditrichaeota bacterium OX=2212469 GN=D6677_00465 PE=4 SV=1
MEARRVTFYRVYGFSAAHRLHAPWYDEMKNFEIYDKCNNISGHGHDYRVEVGVSGTPDARTGFIIDLVDMDKAVQSVLDKLDYKHLNKEVPYFRDRIATSEHLIGFLWQELEKALPAGKLYHIKLWETNNNYFEMERSATR

SEQ ID NO: 18630 - protein, 137 aa, unidentified
  source 1..137: note = Calditrichaeota bacterium
  REGION 1..137: note = tr|A0A3N5JSX8|A0A3N5JSX8_9BACT 6-carboxytetrahydropterin synthase OS=Calditrichaeota bacterium OX=2212469 GN=EHM72_14805 PE=4 SV=1
MPLVYVTRRLHFSAAHRLHSDQLSAQENEQVYGLCNNPLGHGHNYELEVTVQGIPDPVNGIVVDLKELKKVIESEIIDLVDHKHLNYEVEFMRGIVPTAENIAVAFWNQLKDKLPSGRLYEIKLYETPRNIAVYRGE

SEQ ID NO: 18631 - protein, 137 aa, unidentified
  source 1..137: note = Calditrichales bacterium
  REGION 1..137: note = tr|A0A524LQQ2|A0A524LQQ2_9BACT 6-carboxytetrahydropterin synthase OS=Calditrichales bacterium OX=2528038 GN=E4H13_05375 PE=4 SV=1
MSLQITFSRVYQFTCAHRLNSRDLSELENKKVYDKCNNLNGHGHDYKLEVTVQGDIDAKTGMIIPLEVFDQYVQNVLIKIDYKHLDNEVEYFKQHISSGEIIIQYLWQELAAQFPGEMLYHLKLWETNNNYFEFGNA

SEQ ID NO: 18632 - protein, 113 aa, unidentified
  source 1..113: note = Calditrichales bacterium
  REGION 1..113: note = tr|A0A524LFX1|A0A524LFX1_9BACT 6-carboxy-5,6,7,8-tetrahydropterin synthase; OS = Calditrichales bacterium OX=2528038 GN=queD PE=3 SV=1
MISAAHKLNEYPGPCARIHGHNWKIRLEVHARNLDDQGIALDFGDLDQLLWKVVGPFDHQLMNDLKPFDQLNPTAENLVKYIYTQVKSMIPANIQMHKVTVWETDQYKVAYEE

SEQ ID NO: 18633 - protein, 117 aa, Caloramator australicus
  REGION 1..117: note = tr|I7J5C2|I7J5C2_9CLOT 6-carboxy-5,6,7,8-tetrahydropterin synthase OS=Caloramator australicus RC3 OX=857293 GN=CAAU_1557 PE=3 SV=1
MLLIKEFEFDAAHNLIHYHGKCERLHGHTYKLVIKLEGEPDHEGMIFDFVELKRIVKERIIDKFDHAYLNDIISQPTAENIAIFVYKELKDVLKRDNCRLYEVEVWETKTSGVAYRG

SEQ ID NO: 18634 - protein, 148 aa, Caloramator australicus
  REGION 1..148: note = tr|I7K941|I7K941_9CLOT 6-carboxy-5,6,7,8-tetrahydropterin synthase OS=Caloramator australicus RC3 OX=857293 GN=CAAU_2026 PE=3 SV=1
MKITVTKEFTFDCAHMLSNHEGICSNLHGHTYKLEVTASAELIKEGSSQGMVVDFGDLKSIVKELIVDKFDHSFIFWEGGSEAEREIARVVEVYGMRIVKFNERPTAENMAIFIIKTLNEHLKDSPVKIVKVRLYETPTSFAEVEDDV

SEQ ID NO: 18635 - protein, 152 aa, Caloramator fervidus
  REGION 1..152: note = tr|A0A1H5WUL8|A0A1H5WUL8_9CLOT 6-pyruvoyltetrahydropterin/6-carboxytetrahydropterin synthase OS=Caloramator fervidus OX=29344; GN = SAMN05660865_01567 PE=4 SV=1
MKVMATKEFTFDCAHMLSNHEGMCANLHGHTYKLQVTVTRDELKKEGSSQGMVVDFGDLKRIVKELIVDKFDHSFIFWEGGSEAERKIADIVQKNNLKIVKFKDRPTAENMALYIFKVLNEHLKDKNLRVVKVKLYETPTSFAEVYEDVSYF

SEQ ID NO: 18636 - protein, 117 aa, Caloramator fervidus
  REGION 1..117: note = tr|A0A1H5W4C6|A0A1H5W4C6_9CLOT 6-carboxy-5,6,7,8-tetrahydropterin synthase OS=Caloramator fervidus OX=29344 GN=SAMN05660865_01379 PE=3 SV=1
MILIKEFEFDAAHNLIHYHGKCEKLHGHTYRLVVKLEGEPDEEGMIFDFVELKRIVKEKIIDKFDHAYLNEIISQPTAENIAIYVYNELKDVLKRDNCRLYEVEVWETKTSGVVYRG

SEQ ID NO: 18637 - protein, 117 aa, Caloramator mitchellensis
  REGION 1..117: note = tr|A0A0R3K029|A0A0R3K029_9CLOT 6-carboxy-5,6,7,8-tetrahydropterin synthase OS=Caloramator mitchellensis OX=908809 GN=queD_1 PE=3 SV=1
MILIKEFEFDAAHNLIHYHGKCERLHGHTYKLVIKLEGTPDKEGMIYDFVELKRVVKARIIDKFDHSYLNDIIEQPTAENIAMYVFNELKDVLKRENCKLYEVEVWETKTSGVVYRG

SEQ ID NO: 18638 - protein, 147 aa, Caloramator mitchellensis
  REGION 1..147: note = tr|A0A0R3K1T4|A0A0R3K1T4_9CLOT 6-carboxy-5,6,7,8-tetrahydropterin synthase OS=Caloramator mitchellensis OX=908809 GN=queD_2 PE=3 SV=1
MKLTVTKEFTFDCAHMLSNHDGLCSNLHGHTYKLEVTASAQLIKEGSSKGMVVDFGDLKSIVKETIVDKFDHSFLFWEEGSEAEKEIARVVENFGMRIVKFKERPTAENMAIYIINTLNENLENGIKIVRVRLYETPTSYAEVEIDV

SEQ ID NO: 18639 - protein, 117 aa, Caloramator proteoclasticus
  REGION 1..117: note = tr|A0A1M5AFW3|A0A1M5AFW3_9CLOT 6-carboxy-5,6,7,8-tetrahydropterin synthase OS=Caloramator proteoclasticus DSM 10124 OX=1121262 GN=SAMN02746091_02187; PE = 3 SV=1
MILIKEFEFDAAHNLIHYHGKCERLHGHTYKLVVKLEGEPDSEGMVFDFVQLKKIVKERIIDKFDHAYLNDIIEQPTAENMAIYVWDELYDVLKRDNCRLYEVEVWETKTSGIVYRR

SEQ ID NO: 18640 - protein, 141 aa, Caloramator proteoclasticus
  REGION 1..141: note = tr|A0A1M4TRE4|A0A1M4TRE4_9CLOT 6-pyruvoyltetrahydropterin/6-carboxytetrahydropterin synthase OS=Caloramator proteoclasticus DSM 10124; OX = 1121262 GN=SAMN02746091_0045 1 PE=4 SV=1
MLTVSKEFAFEAAHMLSEHEGDCKNLHGHSYKMIVEATGDMKDGMVIDFKDLKNIVKETIIDKIDHSFIYFNASKDEVEHKIADILKKSGKRVFEVNYRPTAENMATDFYNILNDKLADKGIRVVSITLYETQTSFAKVVG

SEQ ID NO: 18641 - protein, 117 aa, unidentified
  source 1..117: note = Caloramator quimbayensis
  REGION 1..117: note = tr|A0A1T4YFY9|A0A1T4YFY9_9CLOT 6-carboxy-5,6,7,8-tetrahydropterin synthase OS=Caloramator quimbayensis OX=1147123 GN=SAMN05443428_1422 PE=3 SV=1
MILIKEFEFDAAHNLINYHGKCEKLHGHTYKLVVKLEGNPDNEGMIFDFVELKKIVKEKVIDKFDHSYINEIIKQPTAENIAVYVFNELKDVLKRDNCRLFEVEVWETKNSGIVYRG

SEQ ID NO: 18642 - protein, 149 aa, unidentified
  source 1..149: note = Caloramator quimbayensis
  REGION 1..149: note = tr|A0A1T4YES9|A0A1T4YES9_9CLOT 6-carboxy-5,6,7,8-tetrahydropterin synthase OS=Caloramator quimbayensis OX=1147123 GN=SAMN05443428_14210 PE=3 SV=1
MKLTVTKEFTFDCAHMLSYHEGLCSNLHGHTYRLEVTALKYELINEGSSEGMILDFGDLKRIVKESVLDKFDHSFLFWERGCDAEREIAATIEKHGMRIVRLKDRPTAENIAVFIINTLNEHLKDSPINIVKVRLYETPTSYAEVKNYV

SEQ ID NO: 18643 - protein, 151 aa, Caloramator sp.
  REGION 1..151: note = tr|A0A5B7TF41|A0A5B7TF41_9CLOT 6-carboxytetrahydropterin synthase OS=Caloramator sp. E03; OX = 2576307 GN=FDN13_03665 PE=4 SV=1
MDLKLTVTKEFTFDCAHILSYHEGLCSNLHGHTYRLEVTASKNELINEGSSEGMILDFGDLKRIVKDLIIDIFDHSFLFWESGCDAEREIADIIEKYGMRIVKLKDRPTAENIAVFIINTLNEHLKDSPINIVKVRLYETPTSYAEVKNYV

SEQ ID NO: 18644 - protein, 117 aa, Caloramator sp.
  REGION 1..117: note = tr|A0A5B7TEB6|A0A5B7TEB6_9CLOT 6-carboxy-5,6,7,8-tetrahydropterin synthase OS=Caloramator sp. E03 OX=2576307 GN=queD PE=3 SV=1
MILIKEFEFDAAHNLVNYHGKCEKLHGHTYKLVVKLEGTVDEEGMVFDFVELKKIVKEKVIDKFDHSYINEIIKQPTAENIAVYVFNELKDVLKRDNCRLFEVEVWETKNSGVAYRG

SEQ ID NO: 18645 - protein, 118 aa, Caloranaerobacter azorensis
  REGION 1..118: note = tr|A0A096BKW3|A0A096BKW3_9CLOT 6-carboxy-5,6,7,8-tetrahydropterin synthase; OS = Caloranaerobacter azorensis H53214 OX=1156417; GN = Y919_00555 PE=3 SV=1
MDITKIFTFDSAHKLEDYDGECRFLHGHTYKLEITIRGEVDNRGIVIDFNELKEIVKEKVINVLDHKYLNEIFDFNPTCENILFWIFNEIDNAIKKDNCWLKKVVLWETPTSYATLER

SEQ ID NO: 18646 - protein, 122 aa, Caloranaerobacter azorensis
  REGION 1..122: note = tr|A0A1M5RU39|A0A1M5RU39_9CLOT 6-carboxy-5,6,7,8-tetrahydropterin synthase; OS = Caloranaerobacter azorensis DSM 13643 OX=1121264; GN = SAMN02745135_00339 PE=3 SV=1
MNRTIDITKIFTFDSAHKLEDYDGECRFLHGHTYKLEITIRGEVDNRGIVIDFNELKEIVKEKVINVLDHKYLNEIFDFNPTCENILFWIFNEIDNAIKKDNCWLKKVVLWETPTSYATLER

SEQ ID NO: 18647 - protein, 118 aa, Caloranaerobacter sp.
  REGION 1..118: note = tr|A0A0P8XUA4|A0A0P8XUA4_9CLOT 6-carboxy-5,6,7,8-tetrahydropterin synthase; OS = Caloranaerobacter sp. TR13 OX=1302151 GN=TR13x_01445; PE = 3 SV=1
MEITKIFTFDSAHKLEDYDGECKYLHGHTYKLEITIRGEIDNRGIVIDFNDLKDIVKERVINVLDHKYLNEVFDFNPTCENILLWIFNEIDNAIKNDKCCLKKVVLWETPTSYATLER

SEQ ID NO: 18648 - protein, 128 aa, unidentified
  source 1..128: note = Calothrix brevissima
  REGION 1..128: note = tr|A0A1Z4K5Y3|A0A1Z4K5Y3_9CYAN 6-carboxy-5,6,7,8-tetrahydropterin synthase OS=Calothrix brevissima NIES-22 OX=1973478 GN=NIES22_44830 PE=3 SV=1
MPKWKLVTEFTFDSAHYIKDYDGPCGRMHGHTYKVRLEATSSKLHSSEYCPHPVMVADFKTLKWAKQDVTKGGLDHCVLNEVLPPEYETTAEMIAKYIYDQTKQKLPAEVQLKVRVSETPNSWVEYQD

SEQ ID NO: 18649 - protein, 290 aa, unidentified
  source 1..290: note = Calothrix desertica
  REGION 1..290: note = tr|A0A433VF97|A0A433VF97_9CYAN 6-pyruvoyltetrahydropterin synthase OS=Calothrix desertica PCC 7102 OX=232991 GN=DSM106972_043500 PE=4 SV=1
MQCIVNRRAQFSASHRYWLPELSEVENFEKFGACAKFPGHGHNYVLFVSLLGELDEYGMVLNLSDVKHVIKREVTGQLDYSFLNDVWSEFQETLPTTENIARVIWDKLTPHLPVVRIQLFEHPELWADYMGNAMEGYLTVSTHFSAAHRLAHPSLSDEKNFEIYGKCARPNGHGHNYHLEVTVKGDIDKRTGMLVDLGALQKVIDDYVVEPFDHTFLNKDIAYFSEVVPTAENIALYISNVLRAPIQNIGASLHKIKLIESPNNSCEIYCNNSQQNIPSTTQSQPLLAQV

SEQ ID NO: 18650 - protein, 289 aa, unidentified
  source 1..289: note = Calothrix elsteri
  REGION 1..289: note = tr|A0A2A2TM65|A0A2A2TM65_9CYAN 6-pyruvoyl tetrahydropterin synthase OS=Calothrix elsteri CCALA 953; OX = 987040 GN=CK510_06180 PE=4 SV=1
MQCIINRRAQFSASHRYWLPELSETENLEKFGACAKFPGHGHNYVLFVSMIGELDEYGMVLNLSDVKHVIKKEVTSHLDYSFLNDAWSEFEETLPTSENIARVIWQKLAPHLPLVKVQLFEHPELWAEYMGNGMEAYLSVSTHFSAAHRLAHPKLSDEENAKIYGKCARTHGHGHNYHLEVTVKGEIDPRTGMLVDLGALNQIIEDYVVEPFDHMFLNKDVPFFAEVVPTAENIALYISNALRSPIQNIGGILHKIKLIESPNNSCEILCSDSDMNSTKAAAQPVLATM

SEQ ID NO: 18651 - protein, 290 aa, Calothrix parasitica
  REGION 1..290: note = tr|A0A1Z4M210|A0A1Z4M210_9CYAN 6-pyruvoyl-tetrahydropterin synthase homolog OS=Calothrix parasitica NIES-267 OX=1973488 GN=NIES267_70450 PE=4 SV=1
MQCIVNRRAQFSASHRYWFPELSEAENIEKFGACANFPGHGHNYVLFISLEGELDEYGMVLNLSDVKQVIKREVTNQLDFSYLNDVWEEFQQILPTTENIARVIYKRLSSYLPIVRVQLFEHPQLWADYMGNSMEAYLTVGTHFSAAHRLASPKLSKEENLEIYGKCARPNGHGHNYHLEITVKGEIAERTGMLVDLGALNKVVDDYVVEQFDHYFLNKDIPYFAEVVPTAENIALYISSTLREPIGELGASLYKVKLIESPNNSCEIYCNNSESNLNEATQEQPVLARL

SEQ ID NO: 18652 - protein, 129 aa, Calothrix parasitica
  REGION 1..129: note = tr|A0A1Z4LWN8|A0A1Z4LWN8_9CYAN 6-carboxy-5,6,7,8-tetrahydropterin synthase OS=Calothrix parasitica NIES-267 OX=1973488 GN=NIES267_51780 PE=3 SV=1
MPKWKLVTEFTFDSAHYIKDYDGPCGRMHGHSYKVKIEAVSNKLHSSEYCPHPVMVADFRSLRWAKKDVSKGGLDHCVLNEVLPPEYETTAEMIAKYIYDETKKKLPEGIKIKVAVSETANSWAEYEDD

SEQ ID NO: 18653 - protein, 291 aa, Calothrix sp.
  REGION 1..291: note = tr|A0A1Z4FSX9|A0A1Z4FSX9_9CYAN Putative 6-pyruvoyl tetrahydropterin synthase OS=Calothrix sp. NIES-2098; OX = 1954171 GN=NIES2098_14830 PE=4 SV=1
MQCIVNRRAQFSASHRYWLPELSEAENTQQFGACSKFPGHGHNYVLFISLIGELDEYGMVLNLSDVKHVIKREVTSQLDFSYLNDVWAEFQQTLPTTENIARVIWQRLAPHLPLVRVQLFEHPELWADYMGNSMEAYLTISTHFSAAHRLAHPNLSNEENAKIYGKCARTHGHGHNYHLEVTVKGEIDQRTGMIVDLGALNQVIEDRVVEPFDHTFLNKDIPYFAEVVPTAENIALYISNLLRSPVQKLGAKLHKVKLIESPNNSCEIYCTDSESNSVSATANQPILARVN

SEQ ID NO: 18654 - protein, 128 aa, Calothrix sp.
  REGION 1..128: note = tr|A0A1Z4G1Y1|A0A1Z4G1Y1_9CYAN 6-carboxy-5,6,7,8-tetrahydropterin synthase OS=Calothrix sp. NIES-2098 OX=1954171 GN=NIES2098_47150 PE=3 SV=1
MPEWKLVTEFTFDSAHYIKDYDGPCGRMHGHTYKVRLEAKSSQLYSSQYCPHPVMVADFRTLRWAKQDVTKGGLDHSILNEVLPPEYETTAEMIAKYIYDQTKKRLPIDVELKVRVSETPNSWVEYKD

SEQ ID NO: 18655 - protein, 125 aa, Camelimonas lactis
  REGION 1..125: note = tr|A0A4R2GTD5|A0A4R2GTD5_9RHIZ 6-carboxy-5,6,7,8-tetrahydropterin synthase OS=Camelimonas lactis OX=659006 GN=EV666_105124 PE=3 SV=1
MFELSKQFRFEAAHTLHRAAETREVESSRRIHGHSYRAEVTVRGRPDPATGMIIDLTLFERAMETARDGLDHRFLDEVPDLGPATMENLALWIWRKLHPACPGLAAVTVHRDSNGEKCTYFGEAA

SEQ ID NO: 18656 - protein, 194 aa, Caminibacter mediatlanticus
  REGION 1..194: note = tr|A0A4P9DQH5|A0A4P9DQH5_9PROT 6-carboxytetrahydropterin synthase OS=Caminibacter mediatlanticus TB-2 OX=391592 GN=FE773_02565 PE=4 SV=1
MIIRKLFKFENAHIVRNCTSRRCSKSIHGHSYRVEIKLQSNFLDNGEMVYDFGLMKTTIKTLIDSFDHAITLWSKDNKEYIEWAKKFSERYIILPVNPSAEQFSRVFFLIVDRVLECMEFKNGEKDIKVYSVVVHETDTGYAECFREDAYNFENMGEIKLEDIVFSDIIKEEWGDKNLWEKLLKKEKITPPKEV

SEQ ID NO: 18657 - protein, 131 aa, Caminicella sporogenes
  REGION 1..131: note = tr|A0A1M6R913|A0A1M6R913_9CLOT 6-carboxy-5,6,7,8-tetrahydropterin synthase OS=Caminicella sporogenes DSM 14501 OX=1121266 GN=SAMN02745883_01735 PE=3; SV = 1
MHNKFVNVTKIFTFDSAHKLENYDGNCKYLHGHTYKLEITVRGKTDYRGMVIDFNELKKIVNEKIISKLDHKYLNDVFDFNTTCENMVVWIFNELNGVLNSKNYLLKKVRLWETPTSYAELEREDFYNEGQ

SEQ ID NO: 18658 - protein, 193 aa, Campylobacter avium
  REGION 1..193: note = tr|A0A222MZ71|A0A222MZ71_9PROT 6-carboxy-5,6,7,8-tetrahydropterin synthase; OS = Campylobacter avium LMG 24591 OX=522484 GN=queD PE=4; SV = 1
MIIRKIFSFENAHIVRFCTSKRCKTSIHGHSYKVEILLQSKYLDNGGMVYDFGLLKQEIRQIIDSFDHSISLYKDDDKEYLKDMKKHSKRWVCLPLNASAENFCRIFFVLIDTLLNKTIMQNGEKGVKLYSVIVHETSTSYAQGFFDDAYSDVLPKVNLDEIEFSDEIKSEWSDENFFENLKGDYKFINKKEL

SEQ ID NO: 18659 - protein, 193 aa, unidentified
  source 1..193: note = Campylobacter blaseri
  REGION 1..193: note = tr|A0A2P8R103|A0A2P8R103_9PROT 6-carboxytetrahydropterin synthase QueD OS=Campylobacter blaseri OX=2042961 GN=CQ405_03745 PE=4 SV=1
MIIRKIYNFENAHIVRFCSSKRCRTSIHGHSYKCEVLLSSNFLDNASMVYDFGLMKQGIKTLIDSFDHSTTIFSGDSDEYKNDIKKHSLRWVEIPYNPSAEQFCRVFFVLIDRLLSLTKMQNGEKEVRLHSIIVHETTTGYAQCFRDDAYNENMGIINLEDIKFSDEVVGEWYDKELFNKMKNGISFIDEKDC

SEQ ID NO: 18660 - protein, 193 aa, Campylobacter coli
  REGION 1..193: note = tr|W8KCT0|W8KCT0_CAMCO 6-carboxy-5,6,7,8-tetrahydropterin synthase; OS = Campylobacter coli RM4661 OX=1183379 GN=YSS_08710 PE=4; SV = 1
MIIRKLFEFENAHIVRFCSSSRCKSSIHGHSYKVEVLLESKYLDNAGMVYDFGLLKTHMRQIIDSFDHAITLFNQDDESYLNEMKKYSQRWISLPVNVSAENFCRVFFILIDALLKQTKMINGEQGVNLQSIIVHETRTGYAQGFKEDAYSPTMPKITLEDIEFSPAIKAEWNDIEFYDKLKNLHIFTNPKEV

SEQ ID NO: 18661 - protein, 193 aa, Campylobacter coli
  REGION 1..193: note = tr|A0A3X8VNU4|A0A3X8VNU4_CAMCO 6-carboxytetrahydropterin synthase OS=Campylobacter coli; OX = 195 GN=EIC30_02765 PE=4 SV=1
MIIRKLFEFENAHIVRFCSSSRCKSSIHGHSYKVEVLLESKYLDNAGMVYDFGLLKTHMRQIIDSFDHAITLFNQDDESYLNEMKKYSQRWISLPVNVSAENFCRVFFILIDALLKQTKMINGEQGVNLQSIIVHETRTGYAQGFKEDAYSPTMSKITLEDIEFSPAIKAEWNDIEFYDKLKNLHIFTNPKEV

SEQ ID NO: 18662 - protein, 193 aa, Campylobacter concisus
  REGION 1..193: note = tr|U2GDG2|U2GDG2_9PROT Queuosine biosynthesis QueD, PTPS-I OS=Campylobacter concisus ATCC 51562 OX=1242969; GN = ATCC51562_58 PE=4 SV=1
MIIRKLFRFENAHIVRFCSSKRCRTSIHGHSYVAEILLSSNFLDNAGMVYDFGLMKQNIKTIIDSFDHATTIFSGDNDEYKNDLKKHSARWIEIPLNPSAEQFCRIFFVMIERLLELSVMNNGEREVKLHSIIVHETDTGYAQCFKEDAINAQMGEIRLDEIKFSDAIIEEWEDKNLFEKMKNRLKIEIPKDV

SEQ ID NO: 18663 - protein, 193 aa, Campylobacter concisus
  REGION 1..193: note = tr|A0A1X4MI16|A0A1X4MI16_9PROT 6-carboxy-5,6,7,8-tetrahydropterin synthase; OS = Campylobacter concisus OX=199 GN=A3835_08060 PE=4 SV=1
MIIRKLFRFENAHIVRFCSSKRCRTSIHGHSYVAEILLSSNFLDNAGMVYDFGLMKQNIKTIIDSFDHATTIFSGDNDEYKNDLKKHSARWIEIPLNPSAEQFCRIFFVMIERLLELSVMNNGEREVKLHSIIVHETDTGYAQCFKEDAVNAQMGEIKLDEIKFSDAIIEEWEDKNLFEKMKNRLKIEIPKDV

SEQ ID NO: 18664 - protein, 193 aa, Campylobacter cuniculorum
  REGION 1..193: note = tr|A0A1W6BUZ4|A0A1W6BUZ4_9PROT 6-carboxy-5,6,7,8-tetrahydropterin synthase; OS = Campylobacter cuniculorum DSM 23162 = LMG 24588; OX = 1121267 GN=queD PE=4 SV=1
MIIRKIFEFENAHIVRFCSSKRCKTSIHGHSYKIEILLESQYLDNAGMVYDFGLLKQEIKQIVDSFDHAITLFSADDKAYLKQMQKYSSRWILLPLNVSAENFVRIFFVLIDTLLKKTKMVNGEKGVNLKSIIIHETAKSYAQGFREDAYSELLPKIELKDIEFSPAIKSEWKDKDFFEKLKNSYIFINPKEV

SEQ ID NO: 18665 - protein, 193 aa, Campylobacter curvus
  REGION 1..193: note = tr|A7GWA7|A7GWA7_CAMC5 6-carboxy-5,6,7,8-tetrahydropterin synthase; OS = Campylobacter curvus (strain 525.92) OX=360105 GN=queD; PE = 4 SV=1
MIIRKLFTFENAHIVRFCSSKRCRTSIHGHSYKAEVLLSSNFLDNAGMVYDFGLMKQNIKCIIDSFDHATTIFSGDEAEYKSDLKKHSARWVEIPLNPSAEQFCRIFFVIIDRLLSTTIMQNGEREVKLESIIVHETDTGYAQCFRDDAYNAKMGEINLDRIVFSQAVIDEWDDKELFEKIKFKKPIVNAKDV

SEQ ID NO: 18666 - protein, 193 aa, Campylobacter fetus
  REGION 1..193: note = tr|A0A2S0JAK6|A0A2S0JAK6_CAMFE 6-carboxytetrahydropterin synthase OS=Campylobacter fetus subsp. testudinum OX=1507806 GN=C6B32_01155 PE=4 SV=1
MIIRKMYDYENAHIVRFCSSKRCRESLHGHSYKCEVMLSSNYLDNAEMVYDFGLMKQGIKTIIDSFDHTTTLYAKDDIQYKNDIKKYSKRWIELPYNPSAEQFSRVFFVLIDKLLGLTVMKNGEREVKLHSIIIHETASGYAQCFYEDAYNPNMGIINLEDIVFSQGIIEEWEDAMFYDKLKNGIKFINPKEC

SEQ ID NO: 18667 - protein, 193 aa, Campylobacter fetus
  REGION 1..193: note = tr|A0A433YJL9|A0A433YJL9_CAMFE 6-carboxytetrahydropterin synthase QueD OS=Campylobacter fetus OX=196 GN=BWK51_05575 PE=4 SV=1
MIIRKMYDYENAHIVRFCSSKRCRESLHGHSYKCEVMLSSNYLDNAEMVYDFGLMKQGIKTIIDSFDHTTTLYAKDDIEYKNDIKKYSKRWIELPYNPSAEQFSRVFFVLIDRLLGLTVMRNGEREVKLHSIIVHETASGYAQCFYEDAYNPNMGIINLEDIVFSQGIIEEWEDSMFYDKLKNGIKFINPKEC

SEQ ID NO: 18668 - protein, 193 aa, unidentified
  source 1..193: note = Campylobacter geochelonis
  REGION 1..193: note = tr|A0A128EP70|A0A128EP70_9PROT Putative 6-pyruvoyl tetrahydrobiopterin synthase OS=Campylobacter geochelonis; OX = 1780362 GN=ERS672216_00163 PE=4 SV=1
MIIRKIYDFENAHIVRDCSSKRCRTSIHGHSYKCEVLLSSNFLDNAGMVYDFGLMKLGIKSIIDSFDHATTLFLGDSDEYKNDIKKHSSRWVEIPYNPSAEQFCRVFFVIIDKLLSLINMQNGEREVKLHSIIVHETATGYAQCFRDDAYNEQMGIINLNDIKFSDEVMCDWDDKEFFQKIKNGVKFSYPRDC

SEQ ID NO: 18669 - protein, 193 aa, Campylobacter gracilis
  REGION 1..193: note = tr|C8PF26|C8PF26_9PROT Uncharacterized protein; OS = Campylobacter gracilis RM3268 OX=553220; GN = CAMGR0001_2667 PE=4 SV=1
MIIRKLYEFENAHIVRLCGSKRCRTSIHGHSYRCEILLSSNFLDEAGMVYDFGYMKLGIRELIDSFDHATTIYARDDASYIADLKKHSARWVQIPLNPSAEQFCRIFFVLIDRLLSLTQMQNGEREVKLHSVIVHETATGYAQCFREDAYNAQMGEIALEEIEFSPAVREEWKQPELWQKLLCGEKIIYPKDC

SEQ ID NO: 18670 - protein, 193 aa, Campylobacter helveticus
  REGION 1..193: note = tr|A0A1V0RH26|A0A1V0RH26_9PROT 6-carboxy-5,6,7,8-tetrahydropterin synthase; OS = Campylobacter helveticus OX=28898 GN=queD PE=4 SV=1
MIIRKMFEFENAHIVRFCSSKRCKTSIHGHSYRIEILLESRYLDNAGMVYDFGLLKNEIKQIIDSFDHAITLFKNDDEGYLEEMKKHSHRWVVLPVNVSAENFCRVFFVLIDSLLEKTKMQNGEKGVKLQSIIIHETRTGYAQGFREDAYSEILPKIALEDIEFSKAIKAEWSDEGFYEKLCGAYTFINPKEL

SEQ ID NO: 18671 - protein, 193 aa, unidentified
  source 1..193: note = Campylobacter hepaticus
  REGION 1..193: note = tr|A0A424Z0S1|A0A424Z0S1_9PROT 6-carboxytetrahydropterin synthase OS=Campylobacter hepaticus OX=1813019 GN=DZD40_03535 PE=4 SV=1
MIIRKLFEFENAHIVRFCSSKRCKSSIHGHSYKVEVLLQSQYLDNAGMVYDFGLLKTYIRQIIDSFDHSITLFKYDDKRYLEEMKKYSNRWVCLPVNVSAENFCRVFFILIDTLLQQTKMINGEQGVNLQSIIVHETRTGYAQGFKEDAYSPNMPKISFEDIEFSDAIKAEWNDINFYEKLKNKEIFINPKEV

SEQ ID NO: 18672 - protein, 193 aa, Campylobacter hominis
  REGION 1..193: note = tr|A7I089|A7I089_CAMHC Putative 6-pyruvoyl tetrahydrobiopterin synthase (Ptps)(Ptp synthase); OS = Campylobacter hominis (strain ATCC BAA-381 / LMG 19568 / NCTC 13146 /CH001A) OX=360107 GN=CHAB381_0328 PE=4 SV=1
MIIRKLYEFENAHIVRFCGSKKCRESIHGHSYKAEILLSSNFLDNAGMVYDFGYMKLAIKDIVESFDHATTLFSKDSDEYKNDIRKHSLRVVEIPVNPSAEQFCRVFFVLIDRLLNLTTFKNGEQGVKLHSVIVHETATGYAQCFKDDAYNENMGKIELCDIKFSDEIIRSWNDCNLMQKLINGEKIEFSKDC

SEQ ID NO: 18673 - protein, 193 aa, Campylobacter hyointestinalis
  REGION 1..193: note = tr|A0A562X7G1|A0A562X7G1_CAMHY 6-carboxytetrahydropterin synthase OS=Campylobacter hyointestinalis OX=198 GN=YZ82_08900 PE=4 SV=1
MIIRKMYDYENAHIVRFCSSKRCKESIHGHSYKCEVLLSSNYLDNAEMVYDFGLMKQGIKTIIDSFDHSTTLYAKDDIEYKNDIKRHSRRWIELPLNPSAEQFSRVFFVLIDRLLELTNMINGEKGVKLHSIIVHETATGYAQCFREDAYNPNMGKINLEDIIFSDGIKEEWDKQDFYENLKNGIKFTNPKEC

SEQ ID NO: 18674 - protein, 193 aa, Campylobacter hyointestinalis
  REGION 1..193: note = tr|A0A381CKS9|A0A381CKS9_CAMHY 6-carboxytetrahydropterin synthase OS=Campylobacter hyointestinalis OX=198 GN=NCTC11608_00250 PE=4 SV=1
MIIRKLYDYENAHIVRFCSSKRCKESIHGHSYKCEVLLSSNYLDNAEMVYDFGLMKQGIKTIIDSFDHSTTLYAKDDIGYKNDIKRHSRRWIELPFNPSAEQFSRVFFVLIDRLLELTDMINGEKGVKLHSIIVHETASGYAQCFREDAYNPNMGKINLEDIIFSDGIKEEWDEQDFYENLKNGVKFTNPKEC

SEQ ID NO: 18675 - protein, 193 aa, unidentified
  source 1..193: note = Campylobacter iguaniorum
  REGION 1..193: note = tr|A0A076F760|A0A076F760_9PROT 6-carboxy-5,6,7,8-tetrahydropterin synthase; OS = Campylobacter iguaniorum OX=1244531 GN=queD PE=4 SV=1
MIIRKLYDYENAHIVRFCSSKRCRESIHGHSYKCEVLLSSNYLDNAEMVYDFGLMKQGIKQIIDSFDHTTTLYAKDSDEYKNDIKKHSKRWIELPYNPSAEQFSRVFFVLIDRLLSLTNMQNGERDVTLHSIIVHETATGYAQCFKEDAYNRNMGVINLDEVVFSDGIKEEWDDFGFYERLKNADRFTNLKDC

SEQ ID NO: 18676 - protein, 194 aa, Campylobacter insulaenigrae
  REGION 1..194: note = tr|A0A0A8H5X1|A0A0A8H5X1_9PROT 6-carboxy-5,6,7,8-tetrahydropterin synthase; OS = Campylobacter insulaenigrae NCTC 12927 OX=1031564; GN = queD PE=4 SV=1
MIIRKLFEFENAHIVRFCSSKRCKTSIHGHSYKVEVLLESKYLDNAGMVYDFGLLKDGIRQIIDSFDHAITLFKNDDSKYLKDMKRHSKRWIILPVNVSAENFVRVFFILIDTLLQKTKMFNGEQGVKLQSIIVHETRTGYAQGFKEDAYSEFLPKINLEDIEFSEAIQDDWKDKNFYINLKDKNFVFINQKEV

SEQ ID NO: 18677 - protein, 193 aa, Campylobacter jejuni
  REGION 1..193: note = tr|A0A0M4UH93|A0A0M4UH93_CAMJU 6-carboxytetrahydropterin synthase OS=Campylobacter jejuni subsp. jejuni OX=32022 GN=CV422_08670 PE=4 SV=1
MIIRKLFEFENAHIVRFCSSKRCKSSIHGHSYKVEVLLESKYLDNAGMVYDFGLLKTYIRQIIDSFDHAITLFKYDDAKYLEEMKKYSSRWICLPVNVSAENFCRVFFILIDALLKQTKMINGEQGVTLQSIIVHETRTGYAQGFREDAYSELMPKISLQDIEFSNGIKAEWNDIDFYNKLKNEEIFINPKEI

SEQ ID NO: 18678 - protein, 193 aa, Campylobacter jejuni
  REGION 1..193: note = tr|A0A0B6U0M0|A0A0B6U0M0_CAMJU 6-carboxy-5,6,7,8-tetrahydropterin synthase; OS = Campylobacter jejuni subsp. jejuni OX=32022; GN = PJ16_00805 PE=4 SV=1
MIIRKLFEFENAHIVRFCSSKRCKSSIHGHSYKVEVLLESKYLDNAGMVYDFGLLKTYIRQIIDSFDHAITLFKYDDAKYLEEMKKYSSRWICLPVNVSAENFCRVFFILIDALLKQTKMVNGEQGVTLQSIIVHETRTGYAQGFREDAYSELMPKISLQDIEFSNGIKAEWNDIDFYNKLKNEEIFINPKEI

SEQ ID NO: 18679 - protein, 193 aa, Campylobacter lanienae
  REGION 1..193: note = tr|A0A1X9SPI4|A0A1X9SPI4_9PROT 6-carboxy-5,6,7,8-tetrahydropterin synthase; OS = Campylobacter lanienae NCTC 13004 OX=1031753 GN=queD; PE = 4 SV=1
MIIRKIYDFENAHIVRFCSSKRCKESIHGHSYRCEVLLKSEYLDAAGMVYDFGLMKQYIRMIIDSFDHTTTLYANDEIGYKNDMKKHSKRWIELPYNPSAEHFSRVFFVLIDKLLNQSIMQNGEKGVELYSIIVHETATGYAQCFKEDAYSPKMGIINLDEIIFSDGIKEEWSDFDFYEKLKNGSKFINPKEC

SEQ ID NO: 18680 - protein, 193 aa, Campylobacter lanienae; identical to SEQ ID NO: 18679
  REGION 1..193: note = tr|A0A562WTW5|A0A562WTW5_9PROT 6-carboxytetrahydropterin synthase OS=Campylobacter lanienae OX=75658 GN=XK09_06555 PE=4 SV=1

SEQ ID NO: 18681 - protein, 194 aa, Campylobacter lari
  REGION 1..194: note = tr|B9KDV0|B9KDV0_CAMLR 6-carboxy-5,6,7,8-tetrahydropterin synthase; OS = Campylobacter lari (strain RM2100 / D67 / ATCC BAA-1060) OX=306263 GN=queD PE=4 SV=2
MIIRKMFEFENAHIVRFCSSKRCKTSIHGHSYKVEILLESKYLDNAGMVYDFGLLKDEIKQIIDSFDHAITLFKDDDKVYLEDMKKHSQRWVSLPVNVSAENFVRIFFVLIDTLLLKTKMVNGEQGVSLKSIIVHETRTGYAQGFREDAYSEFLPKINLADIEFSQAISDEWKDKDFFKKLQDANFVFINQKEV

SEQ ID NO: 18682 - protein, 194 aa, Campylobacter lari
  REGION 1..194: note = tr|A0A0A8HX32|A0A0A8HX32_CAMLA 6-carboxy-5,6,7,8-tetrahydropterin synthase; OS = Campylobacter lari NCTC 11845 OX=1388749 GN=queD PE=4; SV = 1
MIIRKMFEFENAHIVRFCSSKRCKTSIHGHSYKVEILLESKYLDNAGMVYDFGLLKDEIKQIIDSFDHAITLFKDDDKVYLEDMKKHSQRWVSLPVNVSAENFVRIFFVLIDTLLLKTKMINGEQGVSLKSIIVHETRTGYAQGFREDAYSEFLPKINLTDIEFSQAISNEWKDKDFFKKLQDANFVFVNQKEV

SEQ ID NO: 18683 - protein, 194 aa, unidentified
  source 1..194: note = Campylobacter ornithocola
  REGION 1..194: note = tr|A0A1C2FTX2|A0A1C2FTX2_9PROT 6-carboxy-5,6,7,8-tetrahydropterin synthase; OS = Campylobacter ornithocola OX=1848766 GN=A7X81_06570; PE = 4 SV=1
MIIRKMFEFENAHIVRFCSSKRCKTSIHGHSYKVEILLESKYLDNAGMVYDFGLLKDEIKQIIDSFDHAITLFKDDDKAYLEDIKKHSQRWVSLPVNVSAENFVRVFFILIDTLLSKTKMINGEQGVNLKSIIVHETRTGYAQGFKEDAYSEFLPKITLADIEFSKAICDEWKDKDFFKKLQNSNFIFVNQKEV

SEQ ID NO: 18684 - protein, 194 aa, Campylobacter peloridis
  REGION 1..194: note = tr|A0A5C7DS74|A0A5C7DS74_9PROT 6-carboxytetrahydropterin synthase OS=Campylobacter peloridis OX=488546 GN=FPD46_03350 PE=4 SV=1
MIIRKLFEFENAHIVRFCSSKRCKTSLHGHSYKVEILLESKYLDNAGMVYDFGLLKDEIKQIIDSFDHAITLFKDDDKTYLEDMKKHSQRWVSLPVNVSAENFVRVFFVLIDALLLKTKMVNGERGVRLKSVIVHETRTGYAQGFEEDAYSEFLPKINLIDIEFSKAIQDEWKDKDFFKKLQDKDFIFVNQKEV

SEQ ID NO: 18685 - protein, 194 aa, Campylobacter peloridis
  REGION 1..194: note = tr|A0A0A8GU69|A0A0A8GU69_9PROT 6-carboxy-5,6,7,8-tetrahydropterin synthase; OS = Campylobacter peloridis LMG 23910 OX=1388753 GN=queD; PE = 4 SV=1
MIIRKLFEFENAHIVRFCSSKRCKTSLHGHSYKVEILLESKYLDNAGMVYDFGLLKDEIKQIIDSFDHAITLFKDDDKTYLEDMKKHSQRWVSLPVNVSAENFVRIFFVLIDALLLKTKMVNGERGVRLKSVIVHETRTGYAQGFEEDAYSEFLPKINLIDIEFSKAIQDEWKDKDFFKKLQDKDFIFVNQKEV

SEQ ID NO: 18686 - protein, 193 aa, unidentified
  source 1..193: note = Campylobacter pinnipediorum
  REGION 1..193: note = tr|A0A1S6TPW4|A0A1S6TPW4_9PROT 6-carboxy-5,6,7,8-tetrahydropterin synthase; OS = Campylobacter pinnipediorum subsp. pinnipediorum; OX = 1660067 GN=queD PE=4 SV=1
MIIRKLFKFENAHIVRFCSSKRCRTSIHGHSYKAEVLLKSDFLDNAGMVYDFGLMKKNIKTIIDSFDHSTTIYSLDNKEYIDDIKKHSARWVSIPVNPSAEQFCRVFFVIIDTLLQNTIMQNAEQGVTLDSIIVHETDTGYAQCFKQDAYNENMGIISLDDIVFSDAIIDEWEDKNLFNKIKTKTKILNPKEV

SEQ ID NO: 18687 - protein, 193 aa, unidentified
  source 1..193: note = Campylobacter pinnipediorum
  REGION 1..193: note = tr|A0A1S6U8E3|A0A1S6U8E3_9PROT 6-carboxy-5,6,7,8-tetrahydropterin synthase; OS = Campylobacter pinnipediorum subsp. caledonicus; OX = 1874362 GN=queD PE=4 SV=1
MIIRKLFKFENAHIVRFCSSKRCRTSIHGHSYKAEVLLKSDFLDNAGMVYDFGLMKKNIKTIIDSFDHSTTIYSLDNKEYIDDIKKHSARWVSIPVNPSAEQFCRIFFVIIDTLLQNTIMQNAEQGVTLDSIIVHETDTGYAQCFKQDAYNENMGIISLDNIVFSDAIIDEWEDKNLFDKIKTKTKILNPKEV

SEQ ID NO: 18688 - protein, 193 aa, Campylobacter rectus
  REGION 1..193: note = tr|B9CYW3|B9CYW3_CAMRE Uncharacterized protein; OS = Campylobacter rectus RM3267 OX=553218 GN=CAMRE0001_1950; PE = 4 SV=1
MIIRKMFKFENAHIVRFCSSKRCKTSIHGHSYRAEILLESNFLDNAGMVYDFGLMKRNIGCIIDSFDHCTTIFRGDNEEYKNDLKKHSARWIEIPLNPSAEQFCRIFFVMIDRLLKTTQMQNGEREVKLHSVIVHETDTGYAQCFKKDAYNVKMGEVNLSEIVFSEGVRAEWEDAELFEKIKLGKKIVNPKEV

SEQ ID NO: 18689 - protein, 193 aa, Campylobacter rectus
  REGION 1..193: note = tr|A0A3P1X600|A0A3P1X600_CAMRE 6-carboxytetrahydropterin synthase OS=Campylobacter rectus; OX = 203 GN=EII16_06435 PE=4 SV=1
MIIRKMFKFENAHIVRFCSSKRCKTSIHGHSYRAEILLESNFLDNAGMVYDFGLMKRNIGCIIDSFDHCTTIFSGDSAEYKNDLKKHSARWIEIPLNPSAEQFCRIFFVMIDRLLKTTQMQNGEREVKLHSVIVHETDTGYAQCFKKDAYNVKMGEVNLSEIVFSEGVRAEWEDAELFEKIKLGKKIVNPKEV

SEQ ID NO: 18690 - protein, 193 aa, Campylobacter showae
  REGION 1..193: note = tr|M3HZS7|M3HZS7_9PROT 6-pyruvoyl tetrahydrobiopterin synthase OS=Campylobacter showae CC57C; OX = 1073353 GN=H740_09626 PE=4 SV=1
MIIRKMFKFENAHIVRFCSSRRCKTSIHGHSYRAEILLESNFLDNAGMVYDFGLMKQGIGCIIDSFDHCTTIYSGDRVEYKNDLKKHSARWIEIPLNPSAEQFCRIFFVMIDRLLKTTQMQNGEREVKLHSVIVHETDTGYAQCFREDAYNAKMGEVNLNEIVFSEGVRAEWEDEELFEKIKLGKKIVNPKEV

SEQ ID NO: 18691 - protein, 193 aa, Campylobacter showae
  REGION 1..193: note = tr|C6RE10|C6RE10_9PROT Uncharacterized protein; OS = Campylobacter showae RM3277 OX=553219 GN=CAMSH0001_1902; PE = 4 SV=1
MIIRKMFKFENAHIVRFCSSRRCKTSIHGHSYKAEILLESNFLDNAGMVYDFGLMKRDIGCIIDSFDHCTTIFSGDGAEYKNDLKKHSARWIEIPLNPSAEQFCRIFFVMIDRLLKTTQMQNGEREVKLHSVIVHETDTGYAQCFREDAYNAKMGEVNLNEIVFSEGVRAEWEDEELFEKIKLGKKIVNPKEV

SEQ ID NO: 18692 - protein, 194 aa, Campylobacter sp.
  REGION 1..194: note = tr|A0A420VMJ8|A0A420VMJ8_9PROT 6-carboxytetrahydropterin synthase QueD OS=Campylobacter sp. P255 OX=1979368 GN=CKA54_03870 PE=4 SV=1
MIIRKMFEFENAHIVRFCSSKRCKTSIHGHSYKVEILLESQYLDNAGMVYDFGLLKDEIKQIIDSFDHAITLYQDDDKAYLEDMKKHSQRWVSLPVNVSAENFVRVFFVLIDTLLLKTKMMNGEQGVSLKSIIVHETRTGYAQGFREDAYSEFLPKINLADIEFSQAICNEWKDKDFFKKLQDANFIFVNQKEV

SEQ ID NO: 18693 - protein, 193 aa, Campylobacter sp.
  REGION 1..193: note = tr|A0A1X9T3B9|A0A1X9T3B9_9PROT 6-carboxy-5,6,7,8-tetrahydropterin synthase; OS = Campylobacter sp. RM8964 OX=1660074 GN=queD PE=4 SV=1
MIIRKIYDFENAHIVRFCSSKRCKESIHGHSYRCEVLLKSDYLDAAGMVYDFGLMKQHIRMIIDSFDHTTTLYAKDSNEYKNDMKKHSKRWIELPYNPSAEHFSRIFFVLIDKLLGQCVMQNGEKGVELYSVIVHETATGYAQCFKEDAYSPKMGIINLDEIIFSDEIKAEWSDFDFYEKLKNGFKFINPKEC

SEQ ID NO: 18694 - protein, 193 aa, Campylobacter sputorum
  REGION 1..193: note = tr|A0A381DJ14|A0A381DJ14_9PROT Putative 6-pyruvoyl tetrahydrobiopterin synthase OS=Campylobacter sputorum biovar sputorum OX=32024 GN=NCTC12475_00822 PE=4 SV=1
MIIRKIFDFENAHIVRFCSSKRCKTSIHGHSYKCEVLLESNFLDNAGMVYDFGLMKDGIKTIVDSFDHATTLYNKDDENYIKDMKKHSKRWIEIPQNPSAEQFCRIFFVLIDKLLSLSLMNNGEKNVKLHSIIVHETATSYAQCFRDDAYNENMGKIELEDIKFSPDIIDEWEDKLLFEKIKAGKIIQTKKEC

SEQ ID NO: 18695 - protein, 194 aa, Campylobacter subantarcticus
  REGION 1..194: note = tr|A0A0A8HBT3|A0A0A8HBT3_9PROT 6-carboxy-5,6,7,8-tetrahydropterin synthase; OS = Campylobacter subantarcticus LMG 24374 OX=1388751; GN = queD PE=4 SV=1
MIIRKMFEFENAHIVRFCSSKRCKTSIHGHSYKVEILLESQYLDNAGMVYDFGLLKDEIKQIIDSFDHAITLYQDDDKAYLEDMKKHSQRWVSLPVNVSAENFVRIFFVLIDTLLLKTKMVNGEQGVSLKSIIVHETRTGYAQGFREDAYSEFLSKINLADIEFSQAIIDEWKDKDFFKKLQDSNFVFVNQKEV

SEQ ID NO: 18696 - protein, 193 aa, Campylobacter upsaliensis
  REGION 1..193: note = tr|A0A381DTC0|A0A381DTC0_CAMUP Queuosine biosynthesis QueD, PTPS-I OS=Campylobacter upsaliensis; OX = 28080 GN=NCTC11540_00381 PE=4 SV=1
MIIRKMFEFENAHIVRFCSSKRCKTSIHGHSYKIEILLESKYLDNAGMVYDFGLLKNEMKQIVDSFDHAITLFKDDDEAYLKEMQKYSSRWVLLPVNVSAENFCRVFFVLIDALLEKTKMQNGEKGVKLQSIIIHETRTGYAQGFREDAYSEFLPKISLEDIEFSKAIKAEWSDESFYEKLCGTHTFINPKEL

SEQ ID NO: 18697 - protein, 193 aa, Campylobacter upsaliensis
  REGION 1..193: note = tr|A0A3X8R3B7|A0A3X8R3B7_CAMUP 6-carboxytetrahydropterin synthase OS=Campylobacter upsaliensis OX=28080 GN=EHI55_02360 PE=4 SV=1
MIIRKMFEFENAHIVRFCSSKRCKTSIHGHSYKIEVLLESKYLDNAGMVYDFGLLKNEMRQIVDSFDHAITLFKDDDKAYLEEMQRYSSRWVLLPVNVSAENFCRVFFVLIDALLEKTKMQNGEKGVKLQSIIIHETRTGYAQGFREDAYSEFLPKISLEDIEFSKAIKAEWSDESFYEKLCGTHTFINPKEL

SEQ ID NO: 18698 - protein, 193 aa, Campylobacter ureolyticus
  REGION 1..193: note = tr|A0A381EEL3|A0A381EEL3_9PROT Putative 6-pyruvoyl tetrahydrobiopterin synthase OS=Campylobacter ureolyticus; OX = 827 GN=NCTC10941_01746 PE=4 SV=1
MIIRKIYDFENAHIVRFCSSKRCRTSIHGHSYRCEVMLSSNFLDNAGMVYDFGLMKQGIKVIIDSFDHATTLFSGDSDEYKNDIKKHSKRWIEIPQNPSAEQFCRVFFILIDRLLSLTNMNNNEKNVTLYSIIVHETATGYAQCFRDDAYNENMGKIELKDIKFSPEILADLDDKEFFTKLKNGIKFNFLKDC

SEQ ID NO: 18699 - protein, 193 aa, Campylobacter ureolyticus
  REGION 1..193: note = tr|S3XKC3|S3XKC3_9PROT Uncharacterized protein; OS = Campylobacter ureolyticus ACS-301-V-Sch3b OX=883165; GN = HMPREF9309_00474 PE=4 SV=1
MIIRKIYDFENAHIVRFCSSKRCRTSIHGHSYRCEVMLSSNFLDSAGMVYDFGLMKQGIKVIIDSFDHATTLFSGDSDEYKNDIKKHSKRWVEIPQNPSAEQFCRVFFILIDRLLSLTNMNNNEKNVTLYSIIVHETATGYAQCFRDDAYNENMGKIELKDINFSPEILADLDDKEFFTKLKNGSKFNFLKGC

SEQ ID NO: 18700 - protein, 194 aa, Campylobacter volucris
  REGION 1..194: note = tr|A0A5C8KY15|A0A5C8KY15_9PROT 6-carboxytetrahydropterin synthase OS=Campylobacter volucris OX=1031542 GN=FVD15_04220 PE=4 SV=1
MIIRKLFEFENAHIVRFCSSKRCKTSIHGHSYKVEILLESKYLDNAGMVYDFGLLKDEIKQIIDSFDHAITLYKDDDEQYLNDMKKHSKRWVMLPVNVSAENFVRVFFVLIDALLKKTKMINGEQGVNLQSIIVHETRTGYAQGFKEDAYSEFLPKINLQDIEFSKAIQEEWKNKDFYNQLKDEKFIFINQKEV

SEQ ID NO: 18701 - protein, 194 aa, Campylobacter volucris
  REGION 1..194: note = tr|A0A5C7E4B7|A0A5C7E4B7_9PROT 6-carboxytetrahydropterin synthase OS=Campylobacter volucris OX=1031542 GN=FPD38_05230 PE=4 SV=1
MIIRKLFEFENAHIVRFCSSKRCKTSIHGHSYKVEILLESKYLDNAGMVYDFGLLKDEIKQIIDSFDHAITLYKDDDEQYLNDMKKHSRRWVMLPVNVSAENFVRVFFVLIDTLLKKTKMINGEQGVNLQSIIVHETRTGYAQGFKEDAYSEFLPKINLQDIEFSKAIQEEWKNKDFYNQLKDENFIFINQKEV

SEQ ID NO: 18702 - protein, 178 aa, unidentified
  source 1..178: note = Campylobacteraceae bacterium
  REGION 1..178: note = tr|A0A1V4R704|A0A1V4R704_9PROT 6-pyruvoyl tetrahydrobiopterin synthase OS=Campylobacteraceae bacterium 4484_166 OX=1956165 GN=B1H07_02935 PE=4 SV=1
MRWEISKEFEFCYGHRVWSQTLNKNFALDDCLVCRHLHGHQGKVIVHLKGDKLKDGMITDFKHLNWFKKFLDDRVDHKFILDINDPLYETMLPLYKEKKDLIYFDENYYLPDLTKIKNEPNHIREYVESFVLVDFVPTSENLSYWFISIVQKKMAKLGVEVSKVELYETSKSKSMALS

SEQ ID NO: 18703 - protein, 193 aa, unidentified
  source 1..193: note = Campylobacterales bacterium
  REGION 1..193: note = tr|A0A258X327|A0A258X327_9PROT 6-carboxytetrahydropterin synthase QueD; OS = Campylobacterales bacterium 16-40-21 OX=1970501; GN = B7Y30_04920 PE=4 SV=1
MIIRKLFKFENAHIVRGCSSERCRASVHGHSYKIEVLFESDYLDNGQMVYDFGLMKQGMKALIDSFDHSIALWSGDDVQYIEDMKRHSQRWVELPVSPSAEQFSRIIFVMIDKLLGCTQSINGEREVKLHSIIVHETDTGYAQGFHEDAYSQKMGVIDLEKIIFSEGVREEWGDPLLWEKMIANEVFINPDTV

SEQ ID NO: 18704 - protein, 149 aa, unidentified
  source 1..149: note = Scalindua sp.
  REGION 1..149: note = tr|A0A286U0Z4|A0A286U0Z4_9BACT 6-carboxy-5,6,7,8-tetrahydropterin synthase OS=Candiadtus Scalindua japonica OX=1284222 GN=SCALIN_C27_0187 PE=3 SV=1
MTLILSEVELIVKQIVFSADKKCTGFLNMYELVVEKTFAGAHNLRAYDGECERLHGHNWRVEVTLKAEKLNELGMVMDFKDIKKRLEEILSRFDHSYLNELSEFKEENPTTENVSKVIYDNLSEQLPPEIFVAKVKTWESEKCAAAYYI

SEQ ID NO: 18705 - protein, 121 aa, unidentified
  source 1..121: note = Unknown
  REGION 1..121: note = tr|A0A1F4RYR8|A0A1F4RYR8_9BACT 6-carboxy-5,6,7,8-tetrahydropterin synthase OS=candidate division WOR-1 bacterium RIFOXYB2_FULL_36_35 OX=1802578; GN = A2290_08185 PE=3 S V=1
MYELMAEDTFDAAHALRGYKGSCENLHGHTWSVQVFLNGEELDKIGLLYDFREIKSKLKLVIDEFDHKNLNDLDIFKEQNPSSENLAKIIFDKLKLEIKLVSKVTVWESQTTKASYYESDD

SEQ ID NO: 18706 - protein, 132 aa, unidentified
  source 1..132: note = Unknown
  REGION 1..132: note = tr|A0A1F4RJS3|A0A1F4RJS3_9BACT 6-pyruvoyl tetrahydrobiopterin synthase (Fragment) OS=candidate division KSB1 bacterium RBG_16_48_16 OX=1798559; GN = A2V82_11890 PE=4 SV =1
YLTRHFHFSAAHRLHSELLSDEENERVYGLCNNPNGHGHNYDLEVTVKGEPDPVTGMVIDLKELKDIVEKELIVNVDHKHLNHDVDFMRGLVPTAENIAMAFWDRLKGKLPKGELYEIKLYETPRNIVIFRG

SEQ ID NO: 18707 - protein, 122 aa, unidentified
  source 1..122: note = Abyssubacteria bacterium
  REGION 1..122: note = tr|A0A3A4P249|A0A3A4P249_9BACT 6-carboxy-5,6,7,8-tetrahydropterin synthase OS=Candidatus Abyssubacteria bacterium SURF_5 OX=2093360 GN=queD PE=3; SV = 1
MYELTIKTTFSAAHSLRDYEGPCSKVHGHNWVVEVIVSGENLQPNGILIDFGEVKEAASEVLARLDHANLNEVPPFDRLNPSSENLARWIFEEVGKRVNSKELRVSRVNIREAETSCASYFL

SEQ ID NO: 18708 - protein, 141 aa, unidentified
  source 1..141: note = Abyssubacteria bacterium
  REGION 1..141: note = tr|A0A419EQB6|A0A419EQB6_9BACT 6-carboxy-5,6,7,8-tetrahydropterin synthase OS=Candidatus Abyssubacteria bacterium SURF_17 OX=2093361 GN=queD PE=3; SV = 1
MGKNSCADGEGDSMYELTVTCTFSAAHSLRGYEGPCSRLHGHNWVIEVVVSGETLQQNGILLDFADLKKATADAVSCLDHANLNEVPPFDAANPTSENLARWIYEQVGKRINTAACTVKRVNIREAETSCASYFEETVENT

SEQ ID NO: 18709 - protein, 147 aa, unidentified
  source 1..147: note = Accumulibacter sp.
  REGION 1..147: note = tr|A0A080MAU2|A0A080MAU2_9PROT Queuosine biosynthesis protein QueD OS=Candidatus Accumulibacter sp. SK-02 OX=1453999 GN=AW06_000574 PE=4 SV=1
MLITRRLEFDAGHRIPDHLSQCRHLHGHRYAIEITLAGDIIRQDGDPANGMVMDFSEVKTLACTHLVDAWDHAFLVYAGDLPVVSFLASLPEHKTVLLDCVPTAENLAQKAFSILEAVYRDRYGRRLRLECLRLYETPNCWAEAVRE

SEQ ID NO: 18710 - protein, 147 aa, unidentified
  source 1..147: note = Accumulibacter aalborgensis
  REGION 1..147: note = tr|A0A1A8XIW2|A0A1A8XIW2_9PROT 6-carboxy-5,6,7,8-tetrahydropterin synthase OS=Candidatus Accumulibacter aalborgensis OX=1860102 GN=ACCAA_20171 PE=3; SV = 1
MLITRRLEFDAGHRIPDHRSQCRHLHGHRYALEITLAGDIIRQAGDPANGMVMDFSEVKALARQHLVDVWDHAFLVWEGDSPIVAFLASLPAHKTVLLDCVPTAENLAQRAFAILDAVYRDTYANHLCLERLRLYETPNCWAEAIRG

SEQ ID NO: 18711 - protein, 162 aa, unidentified
  source 1..162: note = Acididesulfobacter guangdongensis
  REGION 1..162: note = tr|A0A519BHV7|A0A519BHV7_9DELT Uncharacterized protein OS=Candidatus Acididesulfobacter guangdongensis; OX = 2597225 GN=EVJ46_00955 PE=4 SV=1
MIVELLGREAGLTFECMHIVPGRGDCSRIHPHFHYIDVSVDGEFDDKRRIVHLYNLKAIIARLCSTFEDKILLADYPESIQKITDKQTHYHIEINNKYYLIPKSDIFRINIPSLNIEDLAVYCIDQLITDIKNDDAFASLNYIEVVLSEGHGQRGKIKKNLR

SEQ ID NO: 18712 - protein, 162 aa, unidentified
  source 1..162: note = Acididesulfobacter diazotrophicus
  REGION 1..162: note = tr|A0A519BK57|A0A519BK57_9DELT Uncharacterized protein OS=Candidatus Acididesulfobacter diazotrophicus; OX = 2597226 GN=EVG15_10030 PE=4 SV=1
MIVELLGREAGLTFECMHIVPGKGDCSRIHPHFHYIDVSVDGEFDDKRRIVHLYNLKAIINRLCSTFEDKILLAAYPEIVQKIIDKQTHYHIEINNKYYLIPKSDIFRINIPSLNIEDIAVYCIDQLIIDIKNDDAFSSLNYIEVVLSEGHGQRGKIKKNLK

SEQ ID NO: 18713 - protein, 129 aa, unidentified
  source 1..129: note = Acidulodesulfobacterium ferriphilum
  REGION 1..129: note = tr|A0A519BCV3|A0A519BCV3_9DELT 6-carboxy-5,6,7,8-tetrahydropterin synthase OS=Candidatus Acidulodesulfobacterium ferriphilum OX=2597223 GN=queD; PE = 3 SV=1
MYELKVLSSFSSAHALRGYNGKCENIHGHNWRVETTVTSNVLNEIGLVIDFKLLKKYVDGVMEILDHKFINELDFFKEVNPSAENIARYIYEELEKIIGLNEYNECKDIRITRVDVYETSSSMASYRKN

SEQ ID NO: 18714 - protein, 162 aa, unidentified
  source 1..162: note = Acidulodesulfobacterium ferriphilum
  REGION 1..162: note = tr|A0A519B9I2|A0A519B9I2_9DELT Uncharacterized protein OS=Candidatus Acidulodesulfobacterium ferriphilum; OX = 2597223 GN=EVJ47_08725 PE=4 SV=1
MIVELIGKEADLTFECMHIVPGKGDCSRIHPHFHYVDVLVDGEFDDKRRIVHLYKLKAVTKRICAAFEDRILVANYPESVQRIEDKDSHYRIEINNKLYLIPKTDIFKIEIPSLNIEDLTVYFAQELARDLKEDELFKTLNYVEVTLSEGHGQRGKLRLDLK

SEQ ID NO: 18715 - protein, 126 aa, unidentified
  source 1..126: note = Adiutrix intracellularis
  REGION 1..126: note = tr|A0A139DQR3|A0A139DQR3_9DELT 6-carboxy-5,6,7,8-tetrahydropterin synthase OS=Candidatus Adiutrix intracellularis OX=1705730 GN=AMR96_06330 PE=3; SV = 1
MFELKVTSYFAAAHNLREFYGKCEKLHGHNWFVEVRVRVRDLDKIGIALDFGRLKIILGEILELIDHQYLNELPTFKTLNPSSENITKFIFDQLAPRVGEETGGRAGLYSVSVWESKNASVTYSSD

SEQ ID NO: 18716 - protein, 118 aa, unidentified
  source 1..118: note = Aegiribacteria bacterium
  REGION 1..118: note = tr|A0A1V4MZM5|A0A1V4MZM5_9BACT 6-carboxy-5,6,7,8-tetrahydropterin synthase OS=Candidatus Aegiribacteria bacterium MLS_C OX=1775674 GN=AVO35_02225; PE = 3 SV=1
MEVYREFSFDAAHLLPGVTPGHSCSRMHGHTFRVVVTLEGDVGAESGWVRDFGELKEACRPVIDQLDHTFLNDIPGLENPTSENLAVWIWNRLKTRLPELSMVEVGETPSTGCRYRGD

SEQ ID NO: 18717 - protein, 123 aa, unidentified
  source 1..123: note = Aerophobetes bacterium
  REGION 1..123: note = tr|A0A497E5A8|A0A497E5A8_9BACT 6-carboxy-5,6,7,8-tetrahydropterin synthase OS=Candidatus Aerophobetes bacterium OX=2030807 GN=queD PE=3 SV=1
MYEIMVEMDFSAAHQVREVGGRCENLHGHTYKVQVFLEGKDLNAVGMLVDFREVKRKVKKWVDKLDHTYLNESLKDINPTAENLARYLFERLQEEINCKGVRLSRVRVAEAEDAWASYSGEED

SEQ ID NO: 18718 - protein, 121 aa, unidentified
  source 1..121: note = Aerophobetes bacterium
  REGION 1..121: note = tr|A0A523TEB3|A0A523TEB3_9BACT 6-carboxy-5,6,7,8-tetrahydropterin synthase OS=Candidatus Aerophobetes bacterium OX=2030807 GN=queD PE=3 SV=1
MYELMVELHFDAAHRIVESGGRCERLHGHTWKVELFVQGKELDERGLVIDFAELKEIASRQVRELDHQYLNEVLPGMNPTTENIARYLFQKVQGEIDLERVKVSRVRVWEARDTCASYQED

SEQ ID NO: 18719 - protein, 150 aa, unidentified
  source 1..150: note = Amesbacteria bacterium
  REGION 1..150: note = tr|A0A0G1UKN1|A0A0G1UKN1_9BACT 6-carboxy-5,6,7,8-tetrahydropterin synthase OS=Candidatus Amesbacteria bacterium GW2011_GWC1_48_10 OX=1618365; GN = UY22_C0008G0014 PE=4SV=1
MIVTRQIEWDMGHRVTNHRSKCRNLHGHRYKMIVHVSGKLIDKSGDSSEGMVIDFQDIKKIIVENIHDVLDHGFMVWQKDHILMDFFKKQPDFKYISVPFVPTAENIARWSFERLKPLFIDKFGTNLKLVEIQLWETPNSLVICCKKDIV

SEQ ID NO: 18720 - protein, 150 aa, unidentified; identical to SEQ ID NO: 18719
  source 1..150: note = Amesbacteria bacterium
  REGION 1..150: note = tr|A0A1F5A3Z3|A0A1F5A3Z3_9BACT Uncharacterized protein OS=Candidatus Amesbacteria bacterium RIFOXYD1_FULL_47_9 OX=1797267 GN=A2576_00685 PE=4 SV=1

SEQ ID NO: 18721 - protein, 115 aa, unidentified
  source 1..115: note = Aminicenantes bacterium
  REGION 1..115: note = tr|A0A1F5B4Z5|A0A1F5B4Z5_9BACT 6-carboxy-5,6,7,8-tetrahydropterin synthase OS=Candidatus Aminicenantes bacterium RBG_19FT_COMBO_65_30 OX=1797277; GN = A2V57_07105 PE=3SV=1
MSWTLKVRDKFSAAHYLKEYKGKCEKVHGHTFQVEVSIAVRELDRTGIGFDFTEVKKVLAASLPDHTFLNEAFPFNPSAENIARHLYGELKKSYPVKSVTVWESEDASATYAEDD

SEQ ID NO: 18722 - protein, 115 aa, unidentified
  source 1..115: note = Aminicenantes bacterium
  REGION 1..115: note = tr|A0A1F5B0F7|A0A1F5B0F7_9BACT 6-carboxy-5,6,7,8-tetrahydropterin synthase OS=Candidatus Aminicenantes bacterium RBG_13_63_10 OX=1797270; GN = A2Y56_16095 PE=3 SV=1
MSWRLRVRDKFQAAHFLKEYKGRCEKVHGHTFHVEVAVAVTELDRTGIGIDFTRLKAKLAEILPDHTLLNDIYPFNPSAENLAREFFGRLKTDFPVVEVTVWESEDACATYSEDH

SEQ ID NO: 18723 - protein, 116 aa, unidentified
  source 1..116: note = Amulumruptor caecigallinarius
  REGION 1..116: note = tr|A0A4Q0U7A3|A0A4Q0U7A3_9BACT 6-carboxy-5,6,7,8-tetrahydropterin synthase OS=Candidatus Amulumruptor caecigallinarius OX=2109911 GN=C7K11_08565; PE = 3 SV=1
MYYVTKQIEISGSHSLELPYESKCVRLHGHNWVITIHCRARELNADGMVVDFSRIKQKIHGYLDHGNFNELLPFNPTAENIAKWICSQVEHCWRVDVQESAHNTATYELDDPDSVA

SEQ ID NO: 18724 - protein, 141 aa, unidentified
  source 1..141: note = Aquarickettsia rohweri
  REGION 1..141: note = tr|A0A429XER4|A0A429XER4_9RICK 6-carboxytetrahydropterin synthase OS=Candidatus Aquarickettsia rohweri OX=2602574 GN=EIC27_05990 PE=4 SV=1
MQCTQIIGFDSAHRIIGHKGKCRMLHGHRYTLEATFESEQLNDLGMVIDFSIIKQKLNNWLNSNWDHNTILNIKDQKLGNLISNITGQKIFYLNENPTAENMANFLLLEVCPKIFNDEPVRCSKIKLYETPNCYVTTLNKV

SEQ ID NO: 18725 - protein, 110 aa, unidentified
  source 1..110: note = Arthromitus sp.
  REGION 1..110: note = tr|A0A1B7LLF7|A0A1B7LLF7_9CLOT 6-carboxy-5,6,7,8-tetrahydropterin synthase OS=Candidatus Arthromitus sp. SFB-turkey OX=1840217 GN=A6P36_01330 PE=3; SV = 1
MFYVRKRIMLSCSHNLNLPYETPCNNLHGHNYVIYIHCKSKNLNENDMVVDFKEIKSKIHNKLDHKNINEVLNFHPTAENLAKWICHEITNCYKVEVYETENNLAIYEID

SEQ ID NO: 18726 - protein, 277 aa, unidentified
  source 1..277: note = Atelocyanobacterium thalassa
  REGION 1..277: note = tr|A0A086CGS4|A0A086CGS4_9CHRO 6-pyruvoyl-tetrahydropterin synthase OS=Candidatus Atelocyanobacterium thalassa isolate SIO64986 OX=1527444; GN = ucyna2_00813 PE=4 SV=1
MKCVINRRAEFSASHRYYLPEWSMTKNEEQFGANSFFPGHGHNYVLFVSLEGGINEYGMIENLSLIKKIIKQQITDQFNYSYLNNICQEFSDALPTTENIARIIWERLYPHLPIINIKLFEHPRLWAEYRGNNMQATLTTQVHFSAAHRLALPNLSLEENTKIYGKCARVHGHGHNYFLDVSVTGNIDERTGMIVDLEDLQNIVNDYIVEPFDHTFFNKDVPYFVQTIPTAENIALYIAQLLKEPIKNLGVVLHKVKLTESPNNSCEIYCSQLIETL

SEQ ID NO: 18727 - protein, 131 aa, unidentified
  source 1..131: note = Atelocyanobacterium thalassa
  REGION 1..131: note = tr|A0A086CGR9|A0A086CGR9_9CHRO 6-carboxy-5,6,7,8-tetrahydropterin synthase OS=Candidatus Atelocyanobacterium thalassa isolate SIO64986 OX=1527444; GN = ucyna2_00808 PE= 3 SV=1
MSISHSWTIYKEFRFEAAHILPHHKGKCSRLHGHSWVGRVYITKDSLYRTGSQQGMVMDFNDINNYINPILENFLDHYYLNETTGLENPTSEAVAKWIFEKLEKEGLPGLVMVEVRETCTSGARYTKSINQ

SEQ ID NO: 18728 - protein, 149 aa, unidentified
  source 1..149: note = Atribacteria bacterium
  REGION 1..149: note = tr|A0A524KSY3|A0A524KSY3_9BACT 6-carboxy-5,6,7,8-tetrahydropterin synthase OS=Candidatus Atribacteria bacterium OX=2053509 GN=E4H16_03055 PE=3 SV=1
MKKLRVSKEFHFEMAHALWKYDGLCRHIHGHSYKLLVTIIGEPIEDTSDQKLGMVLDFSDLKAAVKEPVVDFFDHSLVIYKKAGDYLPEEPNEMYDKVHLFDFQPTAENLVLYIAEKVKRRLPRGVDLYSVRLYETATSFAEWYASDNQ

SEQ ID NO: 18729 - protein, 123 aa, unidentified
  source 1..123: note = Aureabacteria bacterium
  REGION 1..123: note = tr|A0A3A4RCE6|A0A3A4RCE6_9BACT 6-carboxy-5,6,7,8-tetrahydropterin synthase OS=Candidatus Aureabacteria bacterium SURF_26 OX=2093366 GN=queD PE=3; SV = 1
MFEVTLRSQFSAAHRLENYHGKCENFHGHNWKVAVVVQRQDLDSSEMVIDFKILQDILERFLTQLDHTFLNELPFFANTNTTSERVAYVVYKHIAPDIELSGTKLTRVEVWEDEYCSAAYIPE

SEQ ID NO: 18730 - protein, 133 aa, unidentified
  source 1..133: note = Aureabacteria bacterium
  REGION 1..133: note = tr|A0A3A4R9S4|A0A3A4R9S4_9BACT 6-carboxy-5,6,7,8-tetrahydropterin synthase OS=Candidatus Aureabacteria bacterium SURF_26 OX=2093366 GN=C4541_06955; PE = 3 SV=1
MLLLTKKTRFCCSHTLRKKEWNDQKNFEVFGQCSNLHGHNYILEVTVRGDINDESGMIINLNTVGKIVNEKIVNVIDHTNLNTDIPAFTDRVPTLENMVMVFWDWLEQALPPGTLAKLTLYETENNKIEYTKE

SEQ ID NO: 18731 - protein, 285 aa, unidentified
  source 1..285: note = Azambacteria bacterium
  REGION 1..285: note = tr|A0A350QCR1|A0A350QCR1_9BACT Uncharacterized protein OS=Candidatus Azambacteria bacterium OX=2053511; GN = DCX24_00060 PE=4 SV=1
MILFVNSLTVIDFSYLDLKRGMVGESYIVDAELHGSLDDTAMVFDFAKVKKVIKQAIDQLVDHKLALPLSCDALSLTQDNTVNLVHYQSERGLISLASPAEAFAGIPSLKIDEKSVSQYLEQQIKPLLPQNVESLKLTLRPEASTGFYYHYSHGLKKHDGNCQRIAHGHRSTIQIYVDGMLSPRLNKMWAERWQDGYLGSETDLCESDSLQYLTGQPESYCFRYQASQGWFELVIPQNHCEIVPCDTTVECLADYIASELKAMDNKKMYKVVAYEGVAKGAIAQL

SEQ ID NO: 18732 - protein, 146 aa, unidentified
  source 1..146: note = [Bacteroides] periocalifornicus
  REGION 1..146: note = tr|A0A0Q4B8J6|A0A0Q4B8J6_9BACT 6-carboxy-5,6,7,8-tetrahydropterin synthase OS=Candidatus [Bacteroides] periocalifornicus OX=1702214 GN=AL399_04595; PE = 3 SV=1
MPTIRLTKEFAFEAAHFLQGYDGLCANIHGHSYRLFVTVIGQPSTDVASPKCGMLIDFGLLKQIVAERILSVLDHALMVRVGAVDGGVLAPYTRRLVELPFQPTCENLLPWIAARLAQSLPVGVSLFSLRLHETASSYAEWYAEEN

SEQ ID NO: 18733 - protein, 115 aa, unidentified
  source 1..115: note = Baumannia cicadellinicola
  REGION 1..115: note = tr|A0A088N1A5|A0A088N1A5_9GAMM 6-carboxy-5,6,7,8-tetrahydropterin synthase OS=Candidatus Baumannia cicadellinicola OX=186490 GN=IM45_507 PE=3 SV=1
MFKNFTFESAHRLPHVPVGHKCGRLHGHSFLVRIEITAEIDLHTGWIMDFSDLKAVCKPIIDKLDHYYLNDIPGLENPTSEVLAQWIWQQLRPNLQLLSSVTIKETCTSGCVYRG

SEQ ID NO: 18734 - protein, 149 aa, unidentified
  source 1..149: note = Beckwithbacteria bacterium
  REGION 1..149: note = tr|A0A1J5B9B1|A0A1J5B9B1_9BACT 6-carboxy-5,6,7,8-tetrahydropterin synthase OS=Candidatus Beckwithbacteria bacterium CG2_30_44_31 OX=1805035; GN = AUK18_00990 PE=3 SV=1
MRISRQIEWDMGHRVTNHKSKCRNLHGHRYKAEICVEGKLVNINGSSDEGMVMDFGDIKELANKYIHDILDHGFMVWVKDKPVAEFFKKNPDQKHIFVPFIPTAENIAAWIFVQLDKKIKDKYKTGLKLYSVKLWETPTSTAVCTRKDL

SEQ ID NO: 18735 - protein, 121 aa, unidentified
  source 1..121: note = Berkelbacteria bacterium
  REGION 1..121: note = tr|A0A554JAU4|A0A554JAU4_9BACT 6-carboxy-5,6,7,8-tetrahydropterin synthase OS=Candidatus Berkelbacteria bacterium Gr01-1014_85 OX=2017150; GN = CEO22_474 PE=3 SV=1
MLKTSVTKLFTFEAAHQLPDHNGKCARLHGHSYKLEVTVSGPLQNIGSSDGMVIDFADLSKIVNEQIIDQWDHRFLNDILPFRTTAENLAVETFKRLTQADLTVNRIKLWETSKAYVEVTK

SEQ ID NO: 18736 - protein, 188 aa, unidentified
  source 1..188: note = Borkfalkia ceftriaxoniphila
  REGION 1..188: note = tr|A0A4Q2KBV4|A0A4Q2KBV4_9FIRM Rubredoxin; OS = Candidatus Borkfalkia ceftriaxoniphila OX=2508949; GN = ESZ91_00895 PE=4 SV=1
MKSFTTIQLQYAHRFYGFKGEAQYLHGHTGILTIEVADTIENGVNMVFPCNEIYKTAWEVLQNFDHALILREDDPLLPAVLKVYDEQGIRGGAPTNKQKGPAFKTALATAYPECRLVVTKETMTVEGMIKMVYELLKDKLNIAKITFTSGVNGASEEFTPDKSIDRCPLCGIALNENGVCPKCGYKKR

SEQ ID NO: 18737 - protein, 121 aa, unidentified
  source 1..121: note = Brocadia sp.
  REGION 1..121: note = tr|A0A399X2S3|A0A399X2S3_9BACT 6-carboxy-5,6,7,8-tetrahydropterin synthase OS=Candidatus Brocadia sp. OX=2172549 GN=queD PE=3 SV=1
MFELIIETDFSAAHNLREYKGQCERLHGHNWKVQVILKAEKLDTLGMVMDFRDAKRVVGEIINRFDHIYLNELADFAEVNPTTENLSKILYEELRRELPAGVKVEKVTTWESDRCGASYFE

SEQ ID NO: 18738 - protein, 121 aa, unidentified
  source 1..121: note = Brocadia sinica
  REGION 1..121: note = tr|A0A136M729|A0A136M729_9BACT 6-carboxy-5,6,7,8-tetrahydropterin synthase OS=Candidatus Brocadia sinica OX=795830 GN=UZ01_02092 PE=3 SV=1
MFELVVETDFSAAHNLREYKGQCERLHGHNWKVQVVLKAEKLDKLGMVMDFRDAKRIIGEVINRFDHVYLNDLPDFKVLNPTTENLSKILYDGLKNVLPIGVGVAKVTTWESDRCGAAYFE

SEQ ID NO: 18739 - protein, 121 aa, unidentified
  source 1..121: note = Brocadiaceae bacterium
  REGION 1..121: note = tr|A0A5C6F0N5|A0A5C6F0N5_9BACT 6-carboxy-5,6,7,8-tetrahydropterin synthase OS=Candidatus Brocadiaceae bacterium B188 OX=2528032 GN=queD PE=3 SV=1
MFELIIETDFAAAHNLREYKGQCERLHGHNWKVQVILKSEKLDKSGMVMDFRDAKRIIGEIMNRFDHVYLNELADFAEINPTTENLSKILYGELRHGLPNGVKVEKVTTWESDRCGASYFE

SEQ ID NO: 18740 - protein, 121 aa, unidentified
  source 1..121: note = Brocadiaceae bacterium
  REGION 1..121: note = tr|A0A5C6DN77|A0A5C6DN77_9BACT 6-carboxy-5,6,7,8-tetrahydropterin synthase OS=Candidatus Brocadiaceae bacterium S225 OX=2528033 GN=queD PE=3 SV=1
MYELVVEKTFAGAHNLRGYDGDCEKLHGHNWRVEVTLKAEKLNELGMVVDFKIVKKKLGEILSHFDHSYLNELGEFKQENPTTENVSKAIYNSLSAQLPPEIFVAKVKTWESEKCAAAYYV

SEQ ID NO: 18741 - protein, 146 aa, unidentified
  source 1..146: note = Burkholderia pumila
  REGION 1..146: note = tr|A0A0J7JIA5|A0A0J7JIA5_9BURK 6-carboxytetrahydropterin synthase Queuosine biosynthesis QueD, PTPS-I OS=Candidatus Burkholderia pumila OX=1090375; GN = BPMI_02847 PE=4SV=1
MQITRKLEFDTGHRIPDHRSQCRTLHGHRYVLEITLQGDVVDTEGAPDHGMVMDFADVKSLAMEHLVNKWDHAFIVYEGDVKVREFLQSMSDHKTVVLDRIPTVENLAAVAFRILADVYDAHYGVNLQLKRVRLFETPNCWADVER

SEQ ID NO: 18742 - protein, 148 aa, unidentified
  source 1..148: note = Burkholderia verschuerenii
  REGION 1..148: note = tr|A0A0L0M6E2|A0A0L0M6E2_9BURK 6-carboxy-5,6,7,8-tetrahydropterin synthase OS=Candidatus Burkholderia verschuerenii OX=242163 GN=BVER_05082 PE=3; SV = 1
MQTITRKLEFDAGHRIPDHRSQCRNLHGHRYVLEITLQGDLVDVEGVPDRGMVMDFADVKSLAMEHLVNKWDHAFIVYEGDVKVREFLQTLSDHKTVVLDRIPTVENLAAVAFGILAEVYDAHYGVNLKLKRVRLYETPNCWADVERA

SEQ ID NO: 18743 - protein, 124 aa, unidentified
  source 1..124: note = Chloroploca asiatica
  REGION 1..124: note = tr|A0A2H3KHZ5|A0A2H3KHZ5_9CHLR 6-carboxy-5,6,7,8-tetrahydropterin synthase OS=Candidatus Chloroploca asiatica OX=1506545 GN=A9Q02_05690 PE=3 SV=1
MFEIGVSARFEAAHRLVGDFGPATRMHGHTYRIEVVIRGPRLQPDGTLIDITRLQTALDAIVNDLHYRDLADVPGLAQINTTAENLAHYCWQRLAQALQGSPIVTLTVRIWENPDAYAAYEDQF

SEQ ID NO: 18744 - protein, 148 aa, unidentified
  source 1..148: note = Chryseobacterium massiliae
  REGION 1..148: note = tr|A0A3D9BDX4|A0A3D9BDX4_9FLAO 6-carboxy-5,6,7,8-tetrahydropterin synthase OS=Candidatus Chryseobacterium massiliae OX=204089 GN=DRF68_06055 PE=3; SV = 1
MIRITKIFTFETAHVLYNYDGKCKNMHGHSYKLFVTVKGKPVNDLENPKNGMVVDFGDIKSIVKSEIVDVWDHAVLINGLSPHRELGEDLEEKGHKVIYCTFQPTCENMLYAIAAKIKSKLPEGISLAYLKLHETENSYGEWFAEDNQ

SEQ ID NO: 18745 - protein, 122 aa, unidentified
  source 1..122: note = Cloacimonas sp.
  REGION 1..122: note = tr|A0A1V4R6Y5|A0A1V4R6Y5_9BACT 6-carboxy-5,6,7,8-tetrahydropterin synthase OS=Candidatus Cloacimonas sp. 4484_143 OX=1956164 GN=B1H06_04770 PE=3; SV = 1
MYKLNVTSHFASAHKLLGYEGLCKNLHGHNWKVRVGIKCQNTDKIGMTIDFGDVKKALNDIMEVLDHSYLNELEPFKEENPTSENIAKYIYEEMKTKISVEGCKIADVEVWESERSSMIYYE

SEQ ID NO: 18746 - protein, 123 aa, unidentified
  source 1..123: note = Cloacimonas sp.
  REGION 1..123: note = tr|A0A3D3EVS8|A0A3D3EVS8_9BACT 6-carboxy-5,6,7,8-tetrahydropterin synthase OS=Candidatus Cloacimonas sp. OX=2053534 GN=queD PE=3 SV=1
MYLLNVSDNFSAAHRLCGYQGACSNLHGHNWKVRVGIECSKLDEIGMALDYSIIKSILKSILDQFDHEYLNDLPLLQGQNPTSENLARIIYIEMEKGLADYDAGIKEVEIYESERSSVIYSNA

SEQ ID NO: 18747 - protein, 123 aa, unidentified
  source 1..123: note = Cloacimonetes bacterium
  REGION 1..123: note = tr|A0A2N2L2S9|A0A2N2L2S9_9BACT 6-carboxy-5,6,7,8-tetrahydropterin synthase OS=Candidatus Cloacimonetes bacterium HGW-Cloacimonetes-2 OX=2013734; GN = queD PE=3 SV=1
MYKLNVTDSFSAAHRLCGYEGACKNLHGHNWKVRIAITCSQLDEIGMALDYGIIKKALAEVLESLDHQYLNDLEALNGMNPTSENLARHIFMELSKQITKPGCKVAEVEIFESERSSVVYTND

SEQ ID NO: 18748 - protein, 121 aa, unidentified
  source 1..121: note = Cloacimonetes bacterium
  REGION 1..121: note = tr|A0A523SIL1|A0A523SIL1_9BACT 6-carboxy-5,6,7,8-tetrahydropterin synthase OS=Candidatus Cloacimonetes bacterium OX=2030808 GN=queD PE=3 SV=1
MFIISIKTDFSAAHHIQGYKGNCSELHGHNYHVEVSVRAHKVNSIGMCVDFRNLKEIAETAISGLDHKNLNTLPFFKGKNPTAEHIAQFIFKRITDNLKGSFSLDSVKVWETDKYAVTYSE

SEQ ID NO: 18749 - protein, 126 aa, unidentified
  source 1..126: note = Coatesbacteria bacterium
  REGION 1..126: note = tr|A0A1W9S084|A0A1W9S084_9BACT 6-carboxy-5,6,7,8-tetrahydropterin synthase OS=Candidatus Coatesbacteria bacterium 4484_99 OX=1970774 GN=B6D57_04035; PE = 3 SV=1
MGYIIRVNSKISSSHYLRGYSGKCDRAHGHNFFVEMEIEGGELDKIGILIDFRDAKRILNEFLDKLDHTVLNETEYFKDLNPTAENIAMTIYENTADEVSDISGGKAKVSAIKVWETDENCAEYRP

SEQ ID NO: 18750 - protein, 128 aa, unidentified
  source 1..128: note = Coatesbacteria bacterium
  REGION 1..128: note = tr|A0A1F5FEU0|A0A1F5FEU0_9BACT 6-carboxy-5,6,7,8-tetrahydropterin synthase OS=Candidatus Coatesbacteria bacterium RBG_13_66_14 OX=1817816; GN = A2Y64_03770 PE=3 SV=1
MYLLTVTGSFSSAHALRDYGGPCERLHGHNWRVEVTVSARELDARGLALDFRVLRDHLGEICDRLDHRLLNELEPFDRLNPTSENLARYLAGEMESRLRDADPPVRVREVRVWESEGSSAAWRDGEPE

SEQ ID NO: 18751 - protein, 210 aa, unidentified
  source 1..210: note = Competibacter denitrificans
  REGION 1..210: note = tr|W6M9B9|W6M9B9_9GAMM Uncharacterized protein; OS = Candidatus Competibacter denitrificans Run_A_D11; OX = 1400863 GN=BN873_460008 PE=4 SV=1
MAVGRNRLHSNKRFAARYNKTVCNLGGAIRRFNGGDNMTGHDQRSWKLHIRKDNLKFSAAHMTVFPDGSKESLHGHNYEVTLEVELTAPTLAQMLSYAAFKQALRSVCDSWDEKVLLAGANPWFILLPGPEGEYNFRLCGKRYVLPMDEVAILDVDNITVENLTQLFFERFWHVLTQDQAVSWRERILAARLRIDESRGQGATYSVRFNR

SEQ ID NO: 18752 - protein, 134 aa, unidentified
  source 1..134: note = Competibacter denitrificans
  REGION 1..134: note = tr|W6M726|W6M726_9GAMM Uncharacterized protein; OS = Candidatus Competibacter denitrificans Run_A_D11; OX = 1400863 GN=BN873_300040 PE=4 SV=1
MMYAVCVRDHFMIAHSFRGQTFGPAQRLHGATYVVDLELRRPDLDPDGVVVDISKLSDCLRAVLAELNHRNLDEIPEFAGRNTTTEFLAREIFDRMAARIDEGQLGPNANGLSTMRVVLHESHTAWAAYEGPLA

SEQ ID NO: 18753 - protein, 364 aa, unidentified
  source 1..364: note = Competibacteraceae bacterium
  REGION 1..364: note = tr|A0A433HXT4|A0A433HXT4_9GAMM 6-pyruvoyl tetrahydropterin synthase OS=Candidatus Competibacteraceae bacterium OX=2053538 GN=EKK68_05275 PE=4 SV=1
MMERLYTIAAAPFEAACRVDILPPGHRSRRLHGHSFLSRIRAELPEGWGPFPGGETDDLAERLREAVAPLDYTLLNEHLPVPTDENLARWLRARLALPGITTVGIQSSRDQGVDLDGRDHAHLWRRFRFEAAHQLPKVPPGHPCGQMHGHGFEVIVHAHQPLLGQDMGMDYGQLDQCWTPLGAALDRACLNDLPGLDNPTSERLAAWLWARLQPQLPALSWITVYETATAGCHYDGRHYRIWKERRFESALRLNRAPLGDPRRRLHGHSYQIRLHLTAPLDEVMGWTVDYGEVKALFDSAYRQLDHHRLDQLAGLDDADPASLLHWIKAALAERLPPLDRIDLEQTPGCGATLCWGEAEPALPG

SEQ ID NO: 18754 - protein, 361 aa, unidentified
  source 1..361: note = Competibacteraceae bacterium
  REGION 1..361: note = tr|A0A3S0WNQ8|A0A3S0WNQ8_9GAMM 6-pyruvoyl tetrahydropterin synthase OS=Candidatus Competibacteraceae bacterium OX=2053538 GN=EKK69_00665 PE=4 SV=1
MNERIYTSAAASFEAARHIPGLPEGHRAGRLHGHGFQVRVRALLPPDWAPFPGAESDALSERLRAVAAPLDYALLNEHLPVPTDAELAHWLWARLELPGLERISLGSAPGQGVTLDAHHRVGCWRRFRFEAAHQLPNVPAGHPCGRMHGHGFEVILHAGAGAEPELDGERLESAWAPLQAELHHACLNTLPGLENPTSERLAAWIWQRLHGTLPTLSWVTVYETASAGCHYQGTQYRIWKERLFDSALSLRRAPADDSRHRLHGHSYRIRLHLRAPLDAVMGWTVDYGEVKARFEPVYRELDHQRLDALAGPDDADPASLLRWMRPVLAGRLPALERIDLEQTPGCGAVLYWGAADPLPPD

SEQ ID NO: 18755 - protein, 118 aa, unidentified
  source 1..118: note = Contendobacter odensis
  REGION 1..118: note = tr|A0A2G6PFL5|A0A2G6PFL5_9GAMM 6-carboxy-5,6,7,8-tetrahydropterin synthase OS=Candidatus Contendobacter odensis OX=1400860 GN=queD PE=3 SV=1
MYKISKEYHFSASHRLLQLPVDHPCARLHGHNYIIEVELRAETLNRFGFVRDYRELDRLKAYIDDNLDHRYLNEVLGDDCVTAEQIARYFYDWCKSKWPEVTAVCVRETPKTSAEYRP

SEQ ID NO: 18756 - protein, 127 aa, unidentified
  source 1..127: note = Cyclonatronum proteinivorum
  REGION 1..127: note = tr|A0A345UKQ9|A0A345UKQ9_9BACT 6-carboxy-5,6,7,8-tetrahydropterin synthase OS=Candidatus Cyclonatronum proteinivorum OX=1457365 GN=CYPRO_1811 PE=3; SV = 1
MPRWKLNTEFTIDSAHFIQGYDGKCGRMHGHTYKVRMTAISTKLNPSAYLKTPDMVCDFKELKWAAADFEKGGLDHAVLNEVIPVVTTAERIAEYLHTETMKRLPDGIELIVTVWETENNWVEYTAD

SEQ ID NO: 18757 - protein, 145 aa, unidentified
  source 1..145: note = Cyclonatronum proteinivorum
  REGION 1..145: note = tr|A0A345UM49|A0A345UM49_9BACT 6-pyruvoyltetrahydropterin/6-carboxytetrahydropterin synthase OS=Candidatus Cyclonatronum proteinivorum; OX = 1457365 GN=CYPRO_2305 PE=4SV=1
MVYVTRKVHFNAAHRLHNPKKSDEWNAETYGDCNHINWHGHNYVMEVTVAGMPDPDTGYVIDLGDLKRILNDKIINKCDHRNLNIDVDFLKDTIPSTENLVIKFFEQIKDDVERASSTGSRLFSVKLFETERNFAEYCPYMSLNY

SEQ ID NO: 18758 - protein, 150 aa, unidentified
  source 1..150: note = Dactylopiibacterium carminicum
  REGION 1..150: note = tr|A0A272ENF5|A0A272ENF5_9RHOO 6-carboxytetrahydropterin synthase QueD OS=Candidatus Dactylopiibacterium carminicum OX=857335 GN=queD PE=4 SV=1
MLITRRLEFDAGHRIPDHRSLCRHLHGHRYAIEVTVSGDITRMDGNPRNGMVVDFSEVKTVVREYIVDCWDHAFLAYEGDRQIIEFLASLPDHRTVILDIVPTAENLAAKAFSILAPRIAELCDKTLRLENVRIYETPNCWADAGPAAKS

SEQ ID NO: 18759 - protein, 161 aa, unidentified
  source 1..161: note = Dadabacteria bacterium
  REGION 1..161: note = tr|A0A3M1KL37|A0A3M1KL37_9BACT 6-carboxytetrahydropterin synthase OS=Candidatus Dadabacteria bacterium OX=2080303 GN=D6761_02550 PE=4 SV=1
MTLRPPVEHFRRSPDPLFVEQQHMPQPHIRITRRFHFSASHRYWQPAWTDEANEQVFGKNIHSHGHNYILEVTIEGPIDPDTGMILNLTDVKHRVNDLLEKYYDHRNLNVDHPAFASAQPTTERIALQLAQEVRELIDDGHVRLYRIRLWETEDLYAEVIC

SEQ ID NO: 18760 - protein, 143 aa, unidentified
  source 1..143: note = Dadabacteria bacterium
  REGION 1..143: note = tr|A0A520V8D7|A0A520V8D7_9BACT 6-carboxytetrahydropterin synthase OS=Candidatus Dadabacteria bacterium OX=2080303 GN=EVA30_04990 PE=4 SV=1
MAKFTTLTKKIEFSSSHRYWRDEWSEAKNLEVFGKCTSKYGHGHNYVLETTVEGPVDFETGMIINIYRLKPILKETLKQFDHKFLNKDTDYFDDLIPTTENFAKILYECIDEKLSKEECNLLKVRLYETKDLFVDYWKDKDEG

SEQ ID NO: 18761 - protein, 154 aa, unidentified
  source 1..154: note = Daviesbacteria bacterium
  REGION 1..154: note = tr|A0A0G0WGN6|A0A0G0WGN6_9BACT 6-carboxy-5,6,7,8-tetrahydropterin synthase OS=Candidatus Daviesbacteria bacterium GW2011_GWB1_41_5 OX=1618429; GN = UU67_C0081G0004 PE=4SV=1
MKILKQIEWDMGHRVMNHVSKCRNLHGHRYKAEICLEGNLIDINGDSSEGMVMDFEAIKRIAVEYIQDILDHGFMIWEKDKLLMDFFKKNKDLKHIVVPFVPTSERIAAWIFSELDTRFKDIYKTGLKLHSIKLWETPTSVALCNRSDIKNGTI

SEQ ID NO: 18762 - protein, 140 aa, unidentified
  source 1..140: note = Deianiraea vastatrix
  REGION 1..140: note = tr|A0A5B8XDR1|A0A5B8XDR1_9RICK 6-carboxy-5,6,7,8-tetrahydropterin synthase OS=Candidatus Deianiraea vastatrix OX=2163644 GN=Deia_00609 PE=4 SV=1
MINCTRILEFDAGHRLIRHEGKCRFLHGHRYKMEISFCVADKLDDIGRVIDFGVIKQILGTWIDENLDHTTILHEDDRKLGDFVENHTKQKIYYMKENPTAENIASHIFNDIVPILFHNKGIICTRIKLHETPNCSVCVD

SEQ ID NO: 18763 - protein, 122 aa, unidentified
  source 1..122: note = Delongbacteria bacterium
  REGION 1..122: note = tr|A0A348P000|A0A348P000_9BACT 6-carboxy-5,6,7,8-tetrahydropterin synthase OS=Candidatus Delongbacteria bacterium OX=2044594 GN=queD PE=3 SV=1
MYEIIVKHHFSSAHKLINYDGECKNLHGHNWKVKVFARAEELNNIGISLDFKEFKKIARDEIDKFDHVFLNEHPTFNGINPTAENIARILFQDISEKVNDGNLKIHMIEVWESDNNGVRYFQ

SEQ ID NO: 18764 - protein, 122 aa, unidentified
  source 1..122: note = Delongbacteria bacterium
  REGION 1..122: note = tr|A0A2G6P0N1|A0A2G6P0N1_9BACT 6-carboxy-5,6,7,8-tetrahydropterin synthase OS=Candidatus Delongbacteria bacterium OX=2044594 GN=queD PE=3 SV=1
MYEIFVKMHFSSAHRLISYNGECSKLHGHNWEVMVYARTSKLNEIGIALDFKEFKKSVKEEIDKFDHVYLNDLEDYKDMNPTAENIARVLYNTLSKKINTDDIKIHMVEIWESEKQGARYFE

SEQ ID NO: 18765 - protein, 175 aa, unidentified
  source 1..175: note = Dependentiae bacterium
  REGION 1..175: note = tr|A0A1V5UBB3|A0A1V5UBB3_9BACT 6-pyruvoyl tetrahydropterin synthase OS=Candidatus Dependentiae bacterium ADurb.Bin246 OX=1852839 GN=BWY33_00306 PE=4 SV=1
MWEISKEFDFCYGHRVWSQSLNVEFSLDSCLMCRHLHGHQGKVIVYLKSDTLKSGMVTDFKHLNWFKKFLDDVIDHKFIIDINDPLFKTLLPNIDKKDLISFKEGYKTVDLTNFKNELLELYESYIIVDFVPTSENISAWLLKIVQNKMDKLNIKVSKVEFLETPKSKSTFYARS

SEQ ID NO: 18766 - protein, 118 aa, unidentified
  source 1..118: note = Desantisbacteria bacterium
  REGION 1..118: note = tr|A0A1J4SBK8|A0A1J4SBK8_9BACT 6-carboxy-5,6,7,8-tetrahydropterin synthase OS=Candidatus Desantisbacteria bacterium CG1_02_38_46 OX=1817893; GN = AUJ66_05355 PE=3 SV=1
MFELKVSANFSAAHKLRKYQWKCARLHGHNWKVDVYIRSNLLNKIGMIKDAREVKKILKKFLEKLDHKYLNEMVFFKERNPTSENIARYIYDGLKKRLPQMAEVRVHESDSAAVSYRA

SEQ ID NO: 18767 - protein, 120 aa, unidentified
  source 1..120: note = Desantisbacteria bacterium
  REGION 1..120: note = tr|A0A2M7SEJ8|A0A2M7SEJ8_9BACT 6-carboxy-5,6,7,8-tetrahydropterin synthase OS=Candidatus Desantisbacteria bacterium CG_4_10_14_0_8_um_filter_48_22; OX = 1974543 GN=queDPE=3 SV=1
MFELRVGTDFSAAHSIRGHKGRCAKLHGHNWKVEVFLRSGKLDKLGMVRDAGEVKDIAEGFVNKNLDHAFLNQIDFFRKNNPSSENIAKFIFSGLKKILPNLVEVCVSESDSVRVVYRKK

SEQ ID NO: 18768 - protein, 123 aa, unidentified
  source 1..123: note = Desulfofervidus auxilii
  REGION 1..123: note = tr|A0A127AR58|A0A127AR58_9DELT 6-carboxy-5,6,7,8-tetrahydropterin synthase OS=Candidatus Desulfofervidus auxilii OX=1621989 GN=HS1_001870 PE=3 SV=1
MYSLKVVSYFSAAHRLRDYHGKCEVLHGHNWKVEVEIKAKEVGKNGMVMDFKVLKSLLRECLERLDHGYLNEIPPFDKENPTSELIARYIFKTLKDKVSSKASLGKVSVWESETTCASYWEND

SEQ ID NO: 18769 - protein, 129 aa, unidentified
  source 1..129: note = Desulforudis sp.
  REGION 1..129: note = tr|A0A3A6N812|A0A3A6N812_9FIRM 6-carboxy-5,6,7,8-tetrahydropterin synthase OS=Candidatus Desulforudis sp. OX=2093368 GN=queD PE=3 SV=1
MYELTVRASFAAAHRLCNHPTKCRHLHGHTWDVELTVAGRDLNADGMLLDFGHLKSLLREIVDGLDHSYLNEHPAFGGEGPDSNPTAENIARHIFTKVKNDLVRNHPAVRLRSVTVWESPKSSVRYTEE

SEQ ID NO: 18770 - protein, 126 aa, unidentified
  source 1..126: note = Desulforudis audaxviator
  REGION 1..126: note = tr|A0A3S8S573|A0A3S8S573_9FIRM 6-carboxy-5,6,7,8-tetrahydropterin synthase OS=Candidatus Desulforudis audaxviator OX=471827 GN=Daudx_1194 PE=3 SV=1
MFELRVRSSFAAAHRLHEYPDQCRRLHGHNWEVEAVVVGPELNAAGMLVDFALLKNELRQVVGALDHCYLNELAAFGPEKNPTAENIARHIFTELKARLAGIGPAGVLTAVTVWESPAAAATYREG

SEQ ID NO: 18771 - protein, 125 aa, unidentified
  source 1..125: note = Desulfosporosinus infrequens
  REGION 1..125: note = tr|A0A2U3LU99|A0A2U3LU99_9FIRM 6-carboxy-5,6,7,8-tetrahydropterin synthase OS=Candidatus Desulfosporosinus infrequens OX=2043169 GN=SBF1_820014; PE = 3 SV=1
MFQVCVQEHFDAAHFIRNYNGKCANLHGHRWTVVVCVEGKQLDHLGMLIDFSEVKQTIQKTLTSLDHSLLNDLSYFGPEGVNPTAEHLAQFMFVEFKKDFLLAEKRLAWVKVYESPDAWAIFKED

SEQ ID NO: 18772 - protein, 147 aa, unidentified
  source 1..147: note = Desulfovibrio trichonymphae
  REGION 1..147: note = tr|A0A1J1E3Q7|A0A1J1E3Q7_9DELT 6-carboxy-5,6,7,8-tetrahydropterin synthase OS=Candidatus Desulfovibrio trichonymphae OX=1725232 GN=queD PE=3 SV=1
MARSLWRLTVRDEFSAGHALRGYEGKCENLHGHNFAVEVTVEGRCLTPDTSLLLDFKTLKNVLKDVLEDLDHHTLNQTPPFDAVNPSSENLSRYIWQTVAAHLAGHPDRQAAAVRLVSVSVSEKSAQSATYMEIQENGESDTPSMPS

SEQ ID NO: 18773 - protein, 156 aa, unidentified
  source 1..156: note = Dojkabacteria bacterium
  REGION 1..156: note = tr|A0A3M0Z5Y4|A0A3M0Z5Y4_9BACT 6-carboxytetrahydropterin synthase OS=Candidatus Dojkabacteria bacterium OX=2099670 GN=D6810_00645 PE=4 SV=1
MKVIKELQWDMGHRITNHRSQCRNLHGHRYKAEICIEGDLVGIEGISNEGMVIDFGDIKKIAVKHIHNVLDHGFMVWNKDKVLMEYFKKNADQKHIIVSFVPTCENIAAWIFNQLDSHIKDRYKNGLRLHSIKLWETPTSVVICTRNDVKKLTKRL

SEQ ID NO: 18774 - protein, 172 aa, unidentified
  source 1..172: note = Dormibacter sp.
  REGION 1..172: note = tr|A0A2W5Z137|A0A2W5Z137_9BACT Uncharacterized protein OS=Candidatus Dormibacter sp. RRmetagenome_bin12; OX = 2599630 GN=DLM65_11970 PE=4 SV=1
MAVDEQESVASHSRLWYAAMEASLELARADIGFSAAHFSIHQGRSERLHGHNYRVSLRARGTVDEEGTVVDFSALKGALRDLCAELDERMLVPTRSPHVRVEESADGISLIEGSRRFLIPRGDAVLLALVNTTCECLAGHLLGALRGRLGSTGYRLEVRVEEIPGQGASVSE

SEQ ID NO: 18775 - protein, 150 aa, unidentified
  source 1..150: note = Dormibacteraeota bacterium
  REGION 1..150: note = tr|A0A2W6AMY7|A0A2W6AMY7_9BACT 6-pyruvoyl tetrahydrobiopterin synthase OS=Candidatus Dormibacteraeota bacterium OX=2052315 GN=DLM67_03955 PE=4; SV = 1
MLKISPDQGQASGLGSPTSLVVTRRVTFAAAHVLRRPEWEERRNQEVFGQCAGDHGHNYVLEVSVGGEPDPETGMVINLKDLDRTVKEAVVRHVDHRHLNHDVSFLEGVIPTAENLALAFWQQLDGRLGEGRLRRLRLVESENNSVEVTR

SEQ ID NO: 18776 - protein, 123 aa, unidentified
  source 1..123: note = Edwardsbacteria bacterium
  REGION 1..123: note = tr|A0A1F5RCL3|A0A1F5RCL3_9BACT 6-carboxy-5,6,7,8-tetrahydropterin synthase OS=Candidatus Edwardsbacteria bacterium GWF2_54_11 OX=1817851; GN = A2024_03975 PE=3 SV=1
MYYVSAVQHFSAAHSLRGYQGKCENLHGHNYKVEVELKGLELTKNGMVVDFTDLRAALDKVLARMDHKHLNEIKPFDRINPTAENIAKLVYEEMLLKFSAKKIKVSQVVVWESEGCKATYGPK

SEQ ID NO: 18777 - protein, 123 aa, unidentified; identical to SEQ ID NO: 18776
  source 1..123: note = Edwardsbacteria bacterium
  REGION 1..123: note = tr|A0A3D0J6J3|A0A3D0J6J3_9BACT 6-carboxy-5,6,7,8-tetrahydropterin synthase OS=Candidatus Edwardsbacteria bacterium OX=2053551 GN=queD PE=3 SV=1

SEQ ID NO: 18778 - protein, 122 aa, unidentified
  source 1..122: note = Eisenbacteria bacterium
  REGION 1..122: note = tr|A0A538TW53|A0A538TW53_9BACT 6-carboxy-5,6,7,8-tetrahydropterin synthase OS=Candidatus Eisenbacteria bacterium OX=2212470 GN=queD PE=3 SV=1
MRVELSQTFRFEAAHRLPMVPMDHKCFRLHGHSFVVDVTLAGEVDERMGWLLDFADIAAVVEPILLGELDHRTLNDVKGLENPTSERLCRWLWGRLAPALPGLGAITVHETCAARCTYRGAS

SEQ ID NO: 18779 - protein, 120 aa, unidentified
  source 1..120: note = Eisenbacteria bacterium
  REGION 1..120: note = tr|A0A538TNH8|A0A538TNH8_9BACT 6-carboxy-5,6,7,8-tetrahydropterin synthase OS=Candidatus Eisenbacteria bacterium OX=2212470 GN=queD PE=3 SV=1
MRVRLARDFTFEAAHLLPKAPAGHKCRRLHGHSFRVEVQVEGEVDPETGWLLDFGDIKDSIEPLRLQLDHYYLNEIKGLENPTSENLCAWIWERLKPKLPLLARVTVHETCEARCEYEGK

SEQ ID NO: 18780 - protein, 123 aa, unidentified
  source 1..123: note = Electronema sp.
  REGION 1..123: note = tr|A0A521G2A8|A0A521G2A8_9DELT 6-carboxy-5,6,7,8-tetrahydropterin synthase OS=Candidatus Electronema sp. GS OX=2005002 GN=CDV28_11154 PE=3 SV=1
MFDIFIKTHFSGGHHLREYPGNCERPHGHNWKVKVTVRTQQLDQLGMGVDFKVLKQQVNAVVDALDHHDLNEHPAFQDRNPSSEHIAQFLFQQLHETLTTARYQLYSIEVRETDSSGVIYYGQ

SEQ ID NO: 18781 - protein, 123 aa, unidentified
  source 1..123: note = Electrothrix aarhusiensis
  REGION 1..123: note = tr|A0A444IRP5|A0A444IRP5_9DELT 6-carboxy-5,6,7,8-tetrahydropterin synthase OS=Candidatus Electrothrix aarhusiensis OX=1859131 GN=H206_03471 PE=3; SV = 1
MFDVFIKTHFSGGHHLRNYPGNCEKPHGHNWKVKVSVRVHELDALGMGIDFKVLKEKVNGVVDELDHCDLNEHPTFQDRNPSSEHIATFLFEQLTPVLSADRYSLYSVEVRETDTSGVIYYGA

SEQ ID NO: 18782 - protein, 123 aa, unidentified
  source 1..123: note = Electrothrix communis
  REGION 1..123: note = tr|A0A444J8Z6|A0A444J8Z6_9DELT 6-carboxy-5,6,7,8-tetrahydropterin synthase OS=Candidatus Electrothrix communis OX=1859133 GN=VT98_10324 PE=3 SV=1
MYDIFIKTHFSGGHHLRDYPGNCEKPHGHNWKVKVSVRVHELDALGMGIDFKVLKEKVNKVVDELDHCDLNEHPAFQDRNPSSEHIAAFLFEQMAQVLNTDRSALYSVEVRETDSSGVIYYGA

SEQ ID NO: 18783 - protein, 287 aa, unidentified
  source 1..287: note = Endobugula sertula
  REGION 1..287: note = tr|A0A1D2QT42|A0A1D2QT42_9GAMM Uncharacterized protein OS=Candidatus Endobugula sertula OX=62101; GN = AB835_02110 PE=4 SV=1
MHLFVDNFTNIDFSYLDIRRGLVGETWLVSITLEGLLDDQGMVCDFGTVKKTVRDWLDTYIDHCLVVPGQATGLHKEQTEHCSYINWLYQDSHNKDKRLHCNSPKQAITFIDSDTVTPESMANWCIQQLSLLLTDTIHKVKLSFAPERIEHAFYHYSHGLKKHVGNCQRIAHGHRSTIAITENGKRNHELETQWCAQWQDIYIGSQEDLTATTRNEGVEYYHFTYQARQGDFELMVAAEDCYLINTDTTVELIAQHIADTLGEQYPDREFVVKAYEGIGKGAVATNR

SEQ ID NO: 18784 - protein, 153 aa, unidentified
  source 1..153: note = Endolissoclinum sp.
  REGION 1..153: note = tr|A0A1Z8S6Q6|A0A1Z8S6Q6_9PROT Uncharacterized protein OS=Candidatus Endolissoclinum sp. TMED37; OX = 1986638 GN=CBB97_21300 PE=4 SV=1
MLYFSTKTYGHDRGLSCAFRQPLATHSHCQLIHGYSLAFSFKFAARHLDDKNWVVDFGGLKELKVWLENMFDHTLAVDKDDPHIEHLMYLESKGLADVRVMDGVGCEKFAEHAFDFADTLIERITEGRCVLVSCECSEHGANSAIYEREILEV

SEQ ID NO: 18785 - protein, 150 aa, unidentified
  source 1..150: note = Endolissoclinum sp.
  REGION 1..150: note = tr|A0A1Z8RVP9|A0A1Z8RVP9_9PROT Uncharacterized protein OS=Candidatus Endolissoclinum sp. TMED37; OX = 1986638 GN=CBB97_25250 PE=4 SV=1
MAQYLSTKTYGHNIGLACVFRQPNADHSHCHLLHGYSLQFKFTFGCDELDNKNWAVDFGGLKPLKAWLEDMFDHKLALDKADPFLETFKHLESLDLAEIRMFDGVGAEKFAEHAFNFADKLIREKTDNRCYVVEVECAEHGANSAIYRRT

SEQ ID NO: 18786 - protein, 122 aa, unidentified
  source 1..122: note = Endomicrobium trichonymphae
  REGION 1..122: note = tr|A0A1E5IJ00|A0A1E5IJ00_9BACT 6-carboxy-5,6,7,8-tetrahydropterin synthase OS=Candidatus Endomicrobium trichonymphae OX=1408204 GN=ATZ36_06765 PE=3; SV = 1
MKYKLSVTRSFSSAHCLREYKGRCENLHGHNWKIRAAFYGIELDDTGVLIDFTDIKLHLSKIVNYLDHKFLNEIVPFDRINPTAENIAAFVLGRLKDIETKSAKVCEVEVWENESSSAVVSI

SEQ ID NO: 18787 - protein, 122 aa, unidentified
  source 1..122: note = Endomicrobium trichonymphae
  REGION 1..122: note = tr|A0A1E5IFF5|A0A1E5IFF5_9BACT 6-carboxy-5,6,7,8-tetrahydropterin synthase OS=Candidatus Endomicrobium trichonymphae OX=1408204 GN=ATZ36_02295 PE=3; SV = 1
MKYKLSGTRSFSSAHCLREYKGRCENLHGHNWKIRAAFYGTELDDTGMLIDFTYIKMHLNEIINYLDHKFLNEIVPFDRVNPTAENIAAFVLGRLKDIETKNAKVCEVEVWESESSSVVVSI

SEQ ID NO: 18788 - protein, 120 aa, unidentified
  source 1..120: note = Enterovibrio luxaltus
  REGION 1..120: note = tr|A0A291BB84|A0A291BB84_9GAMM 6-carboxy-5,6,7,8-tetrahydropterin synthase OS=Candidatus Enterovibrio luxaltus OX=1927128 GN=BTN50_1858 PE=3 SV=1
MHTELFKEFMFEAAHHLPHVSKGHKCGRLHGHSYHVRIYVTGEVNPYTGWIIDFAEIKIAFKPLYDRLDHYYLNDIKGLENPTSEVLAKWIWEQLLPELPCLSKIMIKETCTAGCIYTGD

SEQ ID NO: 18789 - protein, 120 aa, unidentified
  source 1..120: note = Enterovibrio escacola
  REGION 1..120: note = tr|A0A2A5T0Z8|A0A2A5T0Z8_9GAMM 6-carboxy-5,6,7,8-tetrahydropterin synthase OS=Candidatus Enterovibrio escacola OX=1927127 GN=BTN49_2529 PE=3 SV=1
MQTELFKEFMFEAAHLLPHVPKGHKCGRLHGHSFFVRIYVAGDVIPYTGWIIDFSEIKEAFKPLLDRLDHYYLNDISGLENPTSEVLAKWIWDELKPKLPCLSKVMIRETCTAGCIYIGE

SEQ ID NO: 18790 - protein, 64 aa, unidentified
  source 1..64: note = Entotheonella gemina
  REGION 1..64: note = tr|W4M913|W4M913_9BACT Uncharacterized protein (Fragment) OS=Candidatus Entotheonella gemina OX=1429439; GN = ETSY2_19010 PE=4 SV=1
DLAVFQGVNTTTEVIAKYIFDRMADHLRASPGVTVGEDGVQAMKVTLIESPNAWAAYEGTLGAA

SEQ ID NO: 18791 - protein, 136 aa, unidentified
  source 1..136: note = Entotheonella factor
  REGION 1..136: note = tr|W4LBY5|W4LBY5_9BACT 6-pyruvoyl tetrahydropterin synthase OS=Candidatus Entotheonella factor OX=1429438; GN = ETSY1_30720 PE=4 SV=1
MFSVTVRDFIMIAHSLRGEVFGPAQHLHGATYTVDLEFRRAELDANGIVIDIGLALDFLHEVLQPLKYQNLDDLSVFQGINTTTEVIAKYIFDRMADHLRASPGVTVGENGVQAMKVTLIESPNAWAAYEGALGAT

SEQ ID NO: 18792 - protein, 190 aa, unidentified
  source 1..190: note = Eremiobacter sp.
  REGION 1..190: note = tr|A0A2W5XTZ4|A0A2W5XTZ4_9BACT Uncharacterized protein OS=Candidatus Eremiobacter sp. RRmetagenome_bin22; OX = 2599629 GN=DLM53_04870 PE=4 SV=1
MHPAARRGAACNAHHLSTGKHESGKQRILSQFLRAAHASGPCASGAAALRRARPSAASLPAVERCARQVISISCSCHFDAAHQLHVPFESPCNRPHGHRYDVEITASSAQLEHGMVVDFNVLRGVVDEFDHCDLNERPEFAADELQTTAENIACVLAAKLQTAVGSRVSIDEIIVRETPNSLARWRKEQR

SEQ ID NO: 18793 - protein, 122 aa, unidentified
  source 1..122: note = Eremiobacteraeota bacterium
  REGION 1..122: note = tr|A0A2W5Y6J9|A0A2W5Y6J9_9BACT 6-carboxy-5,6,7,8-tetrahydropterin synthase OS=Candidatus Eremiobacteraeota bacterium OX=2052317 GN=queD PE=3 SV=1
MQIRKQFHFEAAHVLPHHPGKCAQLHGHSYRLEVAVRGPLQTAGPACGMILDFDELKSIVKTEVIDALDHRSLNDLMENPTCEAIVTWIWQRLRSRLGALDELVLWETPTSCAVLRASDAAG

SEQ ID NO: 18794 - protein, 118 aa, unidentified
  source 1..118: note = Erwinia haradaeae
  REGION 1..118: note = tr|A0A451CZZ2|A0A451CZZ2_9GAMM 6-carboxy-5,6,7,8-tetrahydropterin synthase OS=Candidatus Erwinia haradaeae OX=1922217 GN=queD PE=3 SV=1
MHSIFKEFQFEAAHYLPNVPEGHKCGRLHGHSFLIRLEVTGELNCYTGWVMDFSKIQSAFQPIYDQLDHSYLNIIPGLSNPTSELLVEWIWIKMKLSLPTLSAVSVRETCTSGCVYRG

SEQ ID NO: 18795 - protein, 119 aa, unidentified
  source 1..119: note = Erwinia dacicola
  REGION 1..119: note = tr|A0A1E7YZR3|A0A1E7YZR3_9GAMM 6-carboxy-5,6,7,8-tetrahydropterin synthase OS=Candidatus Erwinia dacicola OX=252393 GN=queD PE=3 SV=1
MAITLFKDFQFEAAHHLPNVPIGHKCGRLHGHSFMVRLEIIGEVDAQTGWVMDFSDIKAAFKPVYDCLDHYNLNDIPGLENPTSEVLAAWIWQQMKPVLPLLSAVMVKETCTAGCVYRG

SEQ ID NO: 18796 - protein, 116 aa, unidentified
  source 1..116: note = Falkowbacteria bacterium
  REGION 1..116: note = tr|A0A1F5S412|A0A1F5S412_9BACT 6-carboxy-5,6,7,8-tetrahydropterin synthase OS=Candidatus Falkowbacteria bacterium RIFOXYA2_FULL_38_12 OX=1797993; GN = A2257_00515 PE=3SV=1
MYILKLKTGFSAAHQLTNAYDEKCNASIHGHNWKVLVEIKTEKLINNMVIDFKKIKEIIDELDHKNLNEVLDFEPTAELIAKYIYDKLVDFLLKNKKIEIIVTVWEADNASITYFE

SEQ ID NO: 18797 - protein, 149 aa, unidentified
  source 1..149: note = Falkowbacteria bacterium
  REGION 1..149: note = tr|A0A2H0V157|A0A2H0V157_9BACT 6-carboxytetrahydropterin synthase QueD OS=Candidatus Falkowbacteria bacterium CG10_big_fil_rev_8_21_14_0_10_43_10 OX=1974567 GN=queDPE=4; SV = 1
MLITKKFTLDSAHKLINYKGKCKNLHGHTYTLLVTIKGKINKRTGMVFDFGEIKKIVKEKVIDVLDHNYINNFIEQPTAENMIVWIWNQLEAKIKLYKLELSVWKLSKGERIAPTAFCKNFILTAKSLSFKTMHPPTASECPPIYLVIE

SEQ ID NO: 18798 - protein, 121 aa, unidentified
  source 1..121: note = Fermentibacteria bacterium
  REGION 1..121: note = tr|A0A496ULI4|A0A496ULI4_9BACT 6-carboxy-5,6,7,8-tetrahydropterin synthase OS=Candidatus Fermentibacteria bacterium OX=2044591 GN=queD PE=3 SV=1
MEVYREFKFDAAHLLPNLEPEHRCSKLHGHTFRALIHLEAGVGSETGWVRDFGEIKRLCAPVIEKLDHKYLNDIPGLENPTSENIAKWVWKRLKPLLPELSMVEIKETASTGCRYRGQEDR

SEQ ID NO: 18799 - protein, 117 aa, unidentified
  source 1..117: note = Fermentibacteria bacterium
  REGION 1..117: note = tr|A0A2G6LV40|A0A2G6LV40_9BACT 6-carboxy-5,6,7,8-tetrahydropterin synthase OS=Candidatus Fermentibacteria bacterium OX=2044591 GN=queD PE=3 SV=1
MEIYRDFTFDAAHRLDRLPAEHKCSSMHGHTYKVRVYVEGTVKPETGWVMDYGELKRVCEPAVRMLDHKCLNDIEDIGHTTSENIAVWLWNRIAPDLPGLSMIEVKETPGTGCRYRG

SEQ ID NO: 18800 - protein, 128 aa, unidentified
  source 1..128: note = Filomicrobium marinum
  REGION 1..128: note = tr|A0A0D6JIA1|A0A0D6JIA1_9RHIZ 6-carboxy-5,6,7,8-tetrahydropterin synthase OS=Candidatus Filomicrobium marinum OX=1608628 GN=queD PE=3 SV=1
MRIYKDFNFEAAHYLPSAPPGHPNSRMHGHSFRARIWVEGEPDAHSGLVFHFDELSGAIADAREALDHRLLNDVEGLEAPTLERITIWLWNRLANRVPGLARVEVARDSCQEGCVYDGPDRRMPLAAE

SEQ ID NO: 18801 - protein, 134 aa, unidentified
  source 1..134: note = Filomicrobium marinum
  REGION 1..134: note = tr|A0A0D6JFE4|A0A0D6JFE4_9RHIZ Uncharacterized protein OS=Candidatus Filomicrobium marinum OX=1608628; GN = YBN1229_v1_2172 PE=4 SV=1
MFSVEVRDRIMIAHSLPDPFFGPAQKMHGATFVVDVAFFRAELTRHNVVVDIGAALQVLNDTLKPLAYQNLDELTQFTGKLTTTEFLAKHIFDEIARAARSGGLGEGSSGLAKIRVTLSETDLARASYEGPIGD

SEQ ID NO: 18802 - protein, 123 aa, unidentified
  source 1..123: note = Firestonebacteria bacterium
  REGION 1..123: note = tr|A0A1F5V2U5|A0A1F5V2U5_9BACT 6-carboxy-5,6,7,8-tetrahydropterin synthase OS=Candidatus Firestonebacteria bacterium RIFOXYC2_FULL_39_67 OX=1817861; GN = A2452_04285 PE =3 SV=1
MYELNVEDEFASAHYLRGYKGKCERVHGHNYRVMITVKAKKLNKIGLAVDFSEIKVELKKNMEILDHRLLDELPCFKKVNPSAENIAKYIFDSMNKPLKVKQVKLSKVTVWETARASASYSNE

SEQ ID NO: 18803 - protein, 123 aa, unidentified
  source 1..123: note = Firestonebacteria bacterium
  REGION 1..123: note = tr|A0A1F5UMF7|A0A1F5UMF7_9BACT 6-carboxy-5,6,7,8-tetrahydropterin synthase OS=Candidatus Firestonebacteria bacterium GWA2_43_8 OX=1817858; GN = A2044_06910 PE=3 SV=1
MFELNVEDEFASAHYLRGYKGKCERVHGHNYRVMITVKAKVLNKIGLAVDFTELKVELKKVMEILDHNLLDELPYFKKINPSAENIAKYIYDSLSKPLKARKVKLYKVTVWETARASASYTNE

SEQ ID NO: 18804 - protein, 127 aa, unidentified
  source 1..127: note = Fischerbacteria bacterium
  REGION 1..127: note = tr|A0A1F5VGV9|A0A1F5VGV9_9BACT Uncharacterized protein OS=Candidatus Fischerbacteria bacterium RBG_13_37_8 OX=1817863 GN=A2Y62_11685 PE=4 SV=1
MQEREVYEICVKKHFQARHNLKYSNGQQDAIHLHQWIIEVHILSEKLSEEGLVEDFREVDKILEGILDAINGAHINELEPFTRINPSAENLCRWFYRQLKPCIIAPCRLVKVVLYETEHYSASYREQ

SEQ ID NO: 18805 - protein, 165 aa, unidentified
  source 1..165: note = Fischerbacteria bacterium
  REGION 1..165: note = tr|A0A1F5V7D4|A0A1F5V7D4_9BACT Uncharacterized protein OS=Candidatus Fischerbacteria bacterium RBG_13_37_8 OX=1817863 GN=A2Y62_10135 PE=4 SV=1
METKNLLFSQELELTIETYFSAAHSYHREELDEEENRKLFGEYYSIYPHGHNYKLIVSVRGTVNPKDGMIINFHHLEEKINAFIMRELHYTYLNLQVEYFRYHTPTTEHICLYLWGRIGEILLPLILYKIRLYEDETLYVECKYDDEEENEKREGSGGFLLLTSV

SEQ ID NO: 18806 - protein, 149 aa, unidentified
  source 1..149: note = Fokinia solitaria
  REGION 1..149: note = tr|A0A2U8BRC7|A0A2U8BRC7_9RICK 6-pyruvoyl tetrahydropterin synthase OS=Candidatus Fokinia solitaria; OX = 1802984 GN=Fsol_00079 PE=4 SV=1
MSIESNNMISCTKKIEFDAAHRIIDHHGACKMLHGHRYVIEVTFSKFLKDFTNHDMVIDFIIIKQKLDSWIKQHWDHNTILSEQDKDLGNSIEKCTSQTIFYLKKQPTAENMAIFLMQEIIPVLFDEYGVKCTRLRLRETPSSFVEVLM

SEQ ID NO: 18807 - protein, 130 aa, unidentified
  source 1..130: note = Frackibacter sp.
  REGION 1..130: note = tr|A0A139CKI1|A0A139CKI1_9FIRM 6-carboxy-5,6,7,8-tetrahydropterin synthase OS=Candidatus Frackibacter sp. T328-2 OX=1785949 GN=AWU54_1553 PE=3 SV=1
MKKPIVLTKEFEFDAAHYLENYEGDCANLHGHRYKLAVSILGYVNEEKYLAIDFKDLKRISKELIIDKLDHQNLNEVLNFNTSCENIVYWIWETLENEFVKYDCKLYEVKLWETPDSYAVLNHQIMNEGI

SEQ ID NO: 18808 - protein, 130 aa, unidentified; identical to SEQ ID NO: 18807
  source 1..130: note = Frackibacter sp.
  REGION 1..130: note = tr|A0A1H7ZYF8|A0A1H7ZYF8_9FIRM 6-carboxy-5,6,7,8-tetrahydropterin synthase OS=Candidatus Frackibacter sp. WG12 OX=2017977 GN=SAMN04488698_10946; PE = 3 SV=1

SEQ ID NO: 18809 - protein, 127 aa, unidentified
  source 1..127: note = Frankia californiensis
  REGION 1..127: note = tr|A0A1C3PA53|A0A1C3PA53_9ACTN 6-carboxy-5,6,7,8-tetrahydropterin synthase OS=Candidatus Frankia californiensis OX=1839754 GN=FDG2_5008 PE=3 SV=1
MEYRIGKRFSFDAAHHLEGLTSGHKCARVHGHTYTVEVVLAADRLSGPGFVTDFGDLAPFSDFLDKHFDHRDLNEVMNVPPTSELVATHLAHWFIDNLEPLIPGRLVSMRVAETPGSWAEYTPPGRD

SEQ ID NO: 18810 - protein, 120 aa, unidentified
  source 1..120: note = Fukatsuia symbiotica
  REGION 1..120: note = tr|A0A2U8I810|A0A2U8I810_9GAMM 6-carboxy-5,6,7,8-tetrahydropterin synthase OS=Candidatus Fukatsuia symbiotica OX=1878942 GN=queD PE=3 SV=1
MITTLFKDFQFEAAHRLPNVAKGHKCGRLHGHSFTVRLEVTGEVDPHQGWLIDFSKLKEAFQPIWQCLDHHYLNDIPGLENPTSEILASWIWKQLKPELAELSAVIIKETCSAGCIYKGE

SEQ ID NO: 18811 - protein, 151 aa, unidentified
  source 1..151: note = Gallionella acididurans
  REGION 1..151: note = tr|A0A139BXT5|A0A139BXT5_9PROT 6-carboxy-5,6,7,8-tetrahydropterin synthase OS=Candidatus Gallionella acididurans OX=1796491 GN=AWT59_0034 PE=4 SV=1
MYITRRLEFDAGHRIPNHNSQCKHLHGHRYAIEITLSGDIITSEGLSEQGMVMDFSDVKRIAKEKLVDAWDHAFLVYRGDKPVCDFLASLPNHKTVILDTVPTAENLAQEAFNILAPAYRDTYGNHLRLEQVRLYETPNNWADCVRNRVPS

SEQ ID NO: 18812 - protein, 120 aa, unidentified
  source 1..120: note = Gastranaerophilales bacterium
  REGION 1..120: note = tr|A0A292RH54|A0A292RH54_9BACT 6-carboxy-5,6,7,8-tetrahydropterin synthase OS=Candidatus Gastranaerophilales bacterium HUM_9 OX=1916320 GN=queD; PE = 3 SV=1
MFELKAQMYFSAAHHLLNYDGECENQHGHNWLVEAFVRGTELDKSNILIDYKVLKKHLKSVLDILDHKDINELPDFKGISPSSEVLSKYIYEKMKEVVPQISKISVWETATSCASYFEEE

SEQ ID NO: 18813 - protein, 187 aa, unidentified
  source 1..187: note = Gastranaerophilales bacterium
  REGION 1..187: note = tr|A0A292R8P7|A0A292R8P7_9BACT Rubredoxin; OS = Candidatus Gastranaerophilales bacterium HUM_7; OX = 1916228 GN=CPT93_07705 PE=4 SV=1
MKSVTTFDLQYAHRFLNFKGEAQYLHGHTGTLTIEVEDSINTGVNMVFPCNEIKKMAWDILKNFDHALILREDDPLLPAIFDIYEKQGIKNGAPQNTNIGEAFKTELATAYPNCRIVVTKESMTTEGMIKIVYELLKDKLNISKITFTSGGNIATEEYKIDKTIERCPLCGIALTNGICTKCGYKKA

SEQ ID NO: 18814 - protein, 155 aa, unidentified
  source 1..155: note = Glomeribacter gigasporarum
  REGION 1..155: note = tr|G2JAM4|G2JAM4_9BURK Queuosine biosynthesis protein QueD OS=Candidatus Glomeribacter gigasporarum BEG34 OX=1070319 GN=QueD PE=4 SV=1
MLTITRQLAFDAGHRIPDHQSRCRNLHGHRYVLEITLQGSVIKTQGAPDCGMVMDFAEVKTLAMRHLVEAWDHAFLVYQDDARVRAFLETMPEHKTVIINRIPTAENLAAIAFERLAGVYDAHYGVNLRLAKVRLYETPHCWADVVRDGYTAEDR

SEQ ID NO: 18815 - protein, 121 aa, unidentified
  source 1..121: note = Goldbacteria bacterium
  REGION 1..121: note = tr|A0A2N1W702|A0A2N1W702_9BACT 6-carboxy-5,6,7,8-tetrahydropterin synthase OS=Candidatus Goldbacteria bacterium HGW-Goldbacteria-1 OX=2013807; GN = queD PE=3 SV=1
MYELMVKDTFASAHNLRDYKGKCEHLHGHNYAVEAYFKSEALEKNGLAVDFNILKAALKKVTEYLDHKYLNDDVPFFKVNNTSAENIARFIYEELEKEVKEAQVCKVSVYESEKAMVSYTK

SEQ ID NO: 18816 - protein, 149 aa, unidentified; identical to SEQ ID NO: 18734
  source 1..149: note = Gottesmanbacteria bacterium
  REGION 1..149: note = tr|A0A2H0NH91|A0A2H0NH91_9BACT 6-carboxy-5,6,7,8-tetrahydropterin synthase OS=Candidatus Gottesmanbacteria bacterium CG11_big_fil_rev_8_21_14_0_20_37_11 OX=1974575 G; N = COV53_03965 PE=3 SV=1

SEQ ID NO: 18817 - protein, 154 aa, unidentified; identical to SEQ ID NO: 18761
  source 1..154: note = Gottesmanbacteria bacterium
  REGION 1..154: note = tr|A0A1F6AVJ8|A0A1F6AVJ8_9BACT Uncharacterized protein OS=Candidatus Gottesmanbacteria bacterium RIFCSPLOWO2_01_FULL_46_21 OX=1798393 GN=A2971_00200 PE=4; SV = 1

SEQ ID NO: 18818 - protein, 120 aa, unidentified
  source 1..120: note = Gullanella endobia
  REGION 1..120: note = tr|A0A143WR28|A0A143WR28_9ENTR 6-carboxy-5,6,7,8-tetrahydropterin synthase OS=Candidatus Gullanella endobia OX=1070130 GN=queD PE=3 SV=1
MITTLYKDFTFESAHCLPYVPIGHKCGRLHGHSFLVRLEVTGEVQSHTGWIIDLAELKIAFQPILDRLDHYYLNEIPGLKNPTSEVLAKWIWQQLKPSLPVLSAITLRETCTAGCIYRGQ

SEQ ID NO: 18819 - protein, 126 aa, unidentified
  source 1..126: note = Hamiltonella defensa
  REGION 1..126: note = tr|A0A249DXA3|A0A249DXA3_9ENTR 6-carboxy-5,6,7,8-tetrahydropterin synthase OS=Candidatus Hamiltonella defensa (Bemisia tabaci) OX=672795; GN = BA171_02325 PE=3 SV=1
MNTSLFKEFQFEAAHRLPYVPEGHKCRRLHGHSFVVRLEIIGKIDAKSGWIMDFADLKAAFQPIWNKLDHQYLNDIEGLENPTSELLAVWIWDRLKPKLPQLSSITIKETCSAGCIYRGSETHSGQ

SEQ ID NO: 18820 - protein, 126 aa, unidentified
  source 1..126: note = Hamiltonella defensa
  REGION 1..126: note = tr|A0A2D3TF16|A0A2D3TF16_9ENTR 6-carboxy-5,6,7,8-tetrahydropterin synthase OS=Candidatus Hamiltonella defensa OX=138072 GN=BJP43_07300 PE=3 SV=1
MNTSLFKEFQFEAAHRLPYVPEGHKCRRLHGHSFVVRLEIIGKIDTKSGWIMDFADLKAAFQPIWNKLDHQYLNDIEGLENPTSELLAVWIWDRLKPKLPQLSSITIKETCSAGCIYRGSETHLGQ

SEQ ID NO: 18821 - protein, 134 aa, unidentified
  source 1..134: note = Hydrogenedentes bacterium
  REGION 1..134: note = tr|A0A1J4VJ04|A0A1J4VJ04_9BACT Uncharacterized protein OS=Candidatus Hydrogenedentes bacterium CG1_02_42_14 OX=1805216 GN=AUJ18_01350 PE=4 SV=1
MWQTIKIIDFSYGHRLLNYEGPCSQPHGHNGRIEIVCESNILNESGMIMDFSKIKSIIKKFVDDNWDHKMLLKREDPLLNYFLEKGEKVFVMDENPTAEILARYLFYFAKKQNLPIVEIRFHETLSSIACYRED

SEQ ID NO: 18822 - protein, 135 aa, unidentified
  source 1..135: note = Hydrogenedentes bacterium
  REGION 1..135: note = tr|A0A3M2EUS0|A0A3M2EUS0_9BACT 6-carboxytetrahydropterin synthase OS=Candidatus Hydrogenedentes bacterium OX=2030809 GN=D6679_12430 PE=4; SV = 1
MWSVIKKIEFCYGHRLMNYEGKCRHPHGHNGVIEIVCSASDLDERGMVVDFGDVKNFVKSFVDENWDHRMLLRIDDPLVEEYKKRGEPFFLFEENPTAETFARYLFDLVYEKGFPVTEVRFQETPTSVAVYRRDP

SEQ ID NO: 18823 - protein, 144 aa, unidentified
  source 1..144: note = Hydrothermae bacterium
  REGION 1..144: note = tr|A0A496U711|A0A496U711_9BACT 6-pyruvoyl tetrahydrobiopterin synthase OS=Candidatus Hydrothermae bacterium OX=2250085 GN=DRQ03_03090 PE=4 SV=1
MFEIRWERMFDSAHRIYEHEKKCRYLHGHSYRVKVLIRGELEEHGMLVDFGILKSTIHDLLDHKVILYEKDPLVPLLEKAGQKLVVLDRNPTAENLALFIASLIIRNFENVREVEVGVFETPTQSGFVKMTRENFVEVNYKEII

SEQ ID NO: 18824 - protein, 117 aa, unidentified
  source 1..117: note = Jacksonbacteria bacterium
  REGION 1..117: note = tr|A0A1G2A8I3|A0A1G2A8I3_9BACT 6-carboxy-5,6,7,8-tetrahydropterin synthase OS=Candidatus Jacksonbacteria bacterium RIFCSPLOWO2_02_FULL_44_20; OX = 1798460 GN=A3H61_0410 0 PE=3 SV=1
MQSLNVSCAFRFAAAHFLTKYRGKCENLHGHNYKLTVTVQGAVKPDGMVIDFHIIEETVQREVMTELDHSHLNDRFENPTAEHIAIWIWERLNGKLPLVKITLHETEDTYVEYSGER

SEQ ID NO: 18825 - protein, 117 aa, unidentified; identical to SEQ ID NO: 18824
  source 1..117: note = Jacksonbacteria bacterium
  REGION 1..117: note = tr|A0A3D0PIJ3|A0A3D0PIJ3_9BACT 6-carboxy-5,6,7,8-tetrahydropterin synthase OS=Candidatus Jacksonbacteria bacterium OX=2053562 GN=queD PE=3 SV=1

SEQ ID NO: 18826 - protein, 121 aa, unidentified
  source 1..121: note = Jettenia caeni
  REGION 1..121: note = tr|I3IJK9|I3IJK9_9BACT 6-carboxy-5,6,7,8-tetrahydropterin synthase OS=Candidatus Jettenia caeni OX=247490 GN=KSU1_C0308 PE=3 SV=1
MFELIVETDFSAAHNLREYKGQCERLHGHNWKVQVVLKAENLNKLGMVMDFREAKTILGEIINTFDHAYLNELPAFKVLNPTTENLSQLLYHELKSKLPAGVMVGRVTTWESDRCGAVYFE

SEQ ID NO: 18827 - protein, 121 aa, unidentified
  source 1..121: note = Jettenia ecosi
  REGION 1..121: note = tr|A0A533Q9Z5|A0A533Q9Z5_9BACT 6-carboxy-5,6,7,8-tetrahydropterin synthase OS=Candidatus Jettenia ecosi OX=2494326 GN=JETT_2250 PE=3 SV=1
MFELMVETDFSAAHNLREYKGQCERLHGHNWKVQVVLKAENLNKLGMVMDFREVKTILGEIINTFDHAYLNELPAFKVLNPTTENLSRLLYNELKSKLPAGVMVGRVTTWESDRCGAVYFE

SEQ ID NO: 18828 - protein, 155 aa, unidentified
  source 1..155: note = Kapabacteria sp.
  REGION 1..155: note = tr|A0A1M3L1Y9|A0A1M3L1Y9_9BACT 6-pyruvoyl tetrahydrobiopterin synthase OS='Candidatus Kapabacteria' thiocyanatum OX=1895771 GN=BGO89_02040 PE=4 SV=1
MVFVTRKAAFSAAHRLYNPTYTDERNEEIFDKCNNYFGHGHNYVLEVTVKGVPDPETGYVIDLKKLRDILDERIIDRVDHKHLNFDVDFLRGIIPTVENLAVMFWRRLEDHLPSGELHAIRLFESEHNYADYYGTPIEIPILPGIEEPRQERILV

SEQ ID NO: 18829 - protein, 140 aa, unidentified
  source 1..140: note = Kapabacteria sp.
  REGION 1..140: note = tr|A0A1M3KYN2|A0A1M3KYN2_9BACT 6-carboxy-5,6,7,8-tetrahydropterin synthase OS='Candidatus Kapabacteria' thiocyanatum OX=1895771 GN=BGO89_06360 PE=3; SV = 1
MRTTISKTFRWEMGHRLPTHPGLCRNIHGHSYEALVVLAGEPAADGMVMDYFDVKTMVQPIIDELDHCFLLDTSDTVLGDFFAAHPMKVVSVGFPTTAENIARMLLERIVERLPHDHRLDAVRVRVYETEKTWAEVEAGL

SEQ ID NO: 18830 - protein, 167 aa, unidentified
  source 1..167: note = Kentron sp.
  REGION 1..167: note = tr|A0A451BTL8|A0A451BTL8_9GAMM 6-pyruvoyltetrahydropterin/6-carboxytetrahydropterin synthase OS=Candidatus Kentron sp. G OX=2126341; GN = BECKG1743F_GA0114225_100032 PE =4 SV=1
MHTAPPVDFSESIGCDPPRWISNNNYYRCLFRRKFEIPPLKVYTLKVITDFAAAHSLRGYAGDCRRLHGHNWKVEVEITTTVLDQCGMGVDFKVIKKATQSIVRELDHHYLNEIPPFDKVNPTAENIAAYLFQGISRILGDGQIQVSAVTLWETERACVRYQENNTP

SEQ ID NO: 18831 - protein, 185 aa, unidentified
  source 1..185: note = Kentron sp.
  REGION 1..185: note = tr|A0A450X969|A0A450X969_9GAMM 6-pyruvoyltetrahydropterin/6-carboxytetrahydropterin synthase OS=Candidatus Kentron sp. MB OX=2138164; GN = BECKMB1821G_GA0114241_101626PE=4 SV=1
MSLEKSYLISREIDINASRRIPYQDGNDMGEKKCGNLRGHRFAITAICSSALHDPGDDQKDVFDFTFLKHAMMETIHEPCDHGLILWCEDEVLPSLIPEQDRKALLGGKDKSQWSGPPLPWSGTGTVGALYVIPYLPVTENLVRLWYDLLAPEIIERSQNRAKLEQIKVWETPNWWMAYPASFGG

SEQ ID NO: 18832 - protein, 114 aa, unidentified
  source 1..114: note = Kerfeldbacteria bacterium
  REGION 1..114: note = tr|A0A359MWZ3|A0A359MWZ3_9BACT 6-carboxy-5,6,7,8-tetrahydropterin synthase OS=Candidatus Kerfeldbacteria bacterium OX=2053565 GN=queD PE=3 SV=1
MPFSVTKEFTFAAAHALTKYHGKCENMHGHNYRLAVTVTGPLTSDDLVIDFIELKTIVQEKVINLLDHTNLNDRFPNPTCELVAQWIFQQLKPVLPVSTVMVWETDTTAVTYQE

SEQ ID NO: 18833 - protein, 147 aa, unidentified
  source 1..147: note = Kinetoplastibacterium galatii
  REGION 1..147: note = tr|M1LY17|M1LY17_9PROT 6-carboxy-5,6,7,8-tetrahydropterin synthase OS=Candidatus Kinetoplastibacterium galatii TCC219 OX=1208921; GN = ST1E_0554 PE=3 SV=1
MISISRKLEFDAGHRIPNHNGKCSNIHGHRYSLIVTLEGEVSKESSSSDHGMLMDFADVKLLALEHIINIWDHAFLVSYDDYEILNLLKSLPNHKTVILDKVPTVENLAIISFKKLKPVYSKHYRNNLSLKKVCLYETPNCWSEYIE

SEQ ID NO: 18834 - protein, 148 aa, unidentified
  source 1..148: note = Kinetoplastibacterium desouzaii
  REGION 1..148: note = tr|M1M3J4|M1M3J4_9PROT 6-pyruvoyl tetrahydrobiopterin synthase OS=Candidatus Kinetoplastibacterium desouzaii TCC079E OX=1208919; GN = CDSE_0500 PE=4 SV=1
MISITRKLEFDAGHRIPNHKGECKNIHGHRYLLEITLEGDLSEYRDKSDDGMVMDFSDIKKIAIKNLVSIWDHSFFSFYKDKQILDFLNSLPNHKTVVLDKIPTVENLALIAYNTLFPFYNKIYNKNLVLKKICIYETPNCWAEYTCN

SEQ ID NO: 18835 - protein, 123 aa, unidentified
  source 1..123: note = Kryptonium thompsoni
  REGION 1..123: note = tr|A0A0P1P4T8|A0A0P1P4T8_9BACT 6-carboxy-5,6,7,8-tetrahydropterin synthase OS=Candidatus Kryptonium thompsoni OX=1633631 GN=JGI4_01250 PE=3 SV=1
MYKISAQKRFSASHIIKDYPGECGRLHGHNWNVKVTVKAKELNDFGMAIDFKELSQILNEVIEKLDHYHLNDIPPFNEIQPTAENLAKFFYDELKSKLAQYKNVEIDSVEIWETEKYSAIYQE

SEQ ID NO: 18836 - protein, 155 aa, unidentified
  source 1..155: note = Lambdaproteobacteria bacterium
  REGION 1..155: note = tr|A0A1F6GLT9|A0A1F6GLT9_9PROT Uncharacterized protein OS=Candidatus Lambdaproteobacteria bacterium RIFOXYD2_FULL_56_26 OX=1817773 GN=A2557_09980 PE=4 SV=1
MIIRKLFKAEAAHRVAHSYTTRCQGLHGHSYLFEIFLAGQTQDQAQMLMDFKLLKDQFNNFIDSFDHTLMVWDQDQELVEMAPKLNARYMFLPYNPTAEQMARHIYAHAQEMGLPIHRVLVHETATGYAEFAGDDPIKIDLKRVVFSAQILAEYK

SEQ ID NO: 18837 - protein, 155 aa, unidentified
  source 1..155: note = Lambdaproteobacteria bacterium
  REGION 1..155: note = tr|A0A1F6GAA3|A0A1F6GAA3_9PROT Uncharacterized protein OS=Candidatus Lambdaproteobacteria bacterium RIFOXYD2_FULL_50_16 OX=1817772 GN=A2527_12485 PE=4 SV=1
MIIRKLFKAEVAHRVAMAYTARCQGVHGHSYKFEVFLTGETQDQAQMLMDFKLLKDKFNNFMDSFDHSLLVWEQDPALVEMAPKLNNRFMILPYNPTAEQMSRHIFQEAEAMGLPIKKVICHETETGYAEFDGSDPIRIDLTKVVFSKQILAEYK

SEQ ID NO: 18838 - protein, 150 aa, unidentified
  source 1..150: note = Latescibacteria bacterium
  REGION 1..150: note = tr|A0A3D2YYW3|A0A3D2YYW3_9BACT Uncharacterized protein OS=Candidatus Latescibacteria bacterium OX=2053570; GN = DIC52_00335 PE=4 SV=1
MRAPVEKITAKGHFHAAHRQLGYDGKCAYVHGHTWRGTFVVCAESFPRLEDIDMSVDFGALKDIFKSLDHRMLVSSRDEAFLHSGLFEPEGVILLPGNNPSVENVALYCMDQAVDVLQGLFPGRGIDYDLQLTIQETDNNFFTLDRSVTI

SEQ ID NO: 18839 - protein, 70 aa, unidentified
  source 1..70: note = Latescibacteria bacterium
  REGION 1..70: note = tr|A0A3D2RJ56|A0A3D2RJ56_9BACT 6-carboxytetrahydropterin synthase QueD (Fragment); OS = Candidatus Latescibacteria bacterium OX=2053570; GN = DHW45_10875 PE=4 SV=1
MEKLYAQAHFHAAHRQLNYDGKCRFVHGHTWNGEITVRTDRFPRDETLDMTLDFGRLKDILKNLDHKMLV

SEQ ID NO: 18840 - protein, 116 aa, unidentified
  source 1..116: note = Levybacteria bacterium
  REGION 1..116: note = tr|A0A2M8FC72|A0A2M8FC72_9BACT 6-carboxy-5,6,7,8-tetrahydropterin synthase OS=Candidatus Levybacteria bacterium CG_4_9_14_0_2_um_filter_35_21; OX = 1974627 GN=queD PE=3SV=1
MLITKEFRFDAAHQLLNYNGPCANLHGHTYKLQVSVAGIVQKSGMVMDFGDLKNIVNEKVISKLDHTFINKIIIQSTAENITLWIWNQLEEFLPLQKITLWETPTSFVEYVKSENK

SEQ ID NO: 18841 - protein, 118 aa, unidentified
  source 1..118: note = Liberibacter solanacearum
  REGION 1..118: note = tr|A0A1V2N955|A0A1V2N955_9RHIZ 6-carboxy-5,6,7,8-tetrahydropterin synthase OS=Candidatus Liberibacter solanacearum OX=556287 GN=AYO25_00050 PE=3; SV = 1
MKITQAFTFEAAHKLPYVPKTHKCYRMHGHSYRVELVMEGDVDPKTGFVDDFFNIEKYFAPLLEKLDHHCLNEVEDLDNPTAENIAIWIWKRLFDSLPILSSVRVYETPMSWVEYQGI

SEQ ID NO: 18842 - protein, 118 aa, unidentified
  source 1..118: note = Liberibacter europaeus
  REGION 1..118: note = tr|A0A2T4VWB4|A0A2T4VWB4_9RHIZ 6-carboxy-5,6,7,8-tetrahydropterin synthase OS=Candidatus Liberibacter europaeus OX=744859 GN=queD PE=3 SV=1
MKITQAFTFEAAHSLPNVPKNHKCYRIHGHSYRVELVMEGDVDPKTGFVDDFFNIEKYFSPLLEILDHQYLNEIPDLYNPTAENIAIWIWKRLCNDIPILSAVRVYETPMSWVEYTGV

SEQ ID NO: 18843 - protein, 134 aa, unidentified
  source 1..134: note = Lindowbacteria bacterium
  REGION 1..134: note = tr|A0A1F6LDJ6|A0A1F6LDJ6_9BACT 6-pyruvoyl tetrahydrobiopterin synthase OS=Candidatus Lindowbacteria bacterium RIFCSPLOWO2_12_FULL_62_27 OX=1817870; GN = A3G34_04345 PE= 4 SV=1
MFTVTKEIHFCYGHRLMNYDGQCKHPHGHNGRAAFEMSADRLDARGMVTDFTDIKNSMKAWIDREIDHKMLLRKDDPAVEVLRKMGEPVFVMDQNPTAESIAKLFYEKAKEMGFPVVRVSVWETDTSVASYAGR

SEQ ID NO: 18844 - protein, 135 aa, unidentified
  source 1..135: note = Macondimonas diazotrophica
  REGION 1..135: note = tr|A0A4Z0FB62|A0A4Z0FB62_9GAMM 6-carboxytetrahydropterin synthase OS=Candidatus Macondimonas diazotrophica OX=2305248 GN=E4680_05660 PE=4; SV = 1
MYGMTLTNHLMIAHRMRGERFGPAQRLHGATFEVELSLFAERLDGDGVVADMGQVAQLLAAVLAPLNYRDLDELPRFAGRNTTSEVLAAAIHADVCAQLRAGALGRDELERIRQVRVVLRENPQAWASFEGPLHP

SEQ ID NO: 18845 - protein, 126 aa, unidentified
  source 1..126: note = Macondimonas diazotrophica
  REGION 1..126: note = tr|A0A4Z0F9Y7|A0A4Z0F9Y7_9GAMM 6-carboxy-5,6,7,8-tetrahydropterin synthase OS=Candidatus Macondimonas diazotrophica OX=2305248 GN=queD PE=3 SV=1
MPGTYTLTVLTEFSASHILRGHPGPCSRLHGHNWKVEAEVVANTLNDIDLAIDFQDIKAALRAITEQLDHRHLNDLPPFDRLNPTAEQIARHIHQRLATALGGAGVCVSAITIWETDRAKVRYSET

SEQ ID NO: 18846 - protein, 123 aa, unidentified
  source 1..123: note = Magnetobacterium bavaricum
  REGION 1..123: note = tr|A0A0F3GSH2|A0A0F3GSH2_9BACT 6-carboxy-5,6,7,8-tetrahydropterin synthase OS=Candidatus Magnetobacterium bavaricum OX=29290 GN=MBAV_003044 PE=3; SV = 1
MYELMIEATFSAAHQLRGYKGKCEHLHGHNFKVQVHVQADDLNDIDIAMDFHEIKRYAKEVVEQLDHAYLNDVFPFTEINPSSENIAKWVYDSLKKKLPNDDVRLAAVTVWESETASATYYED

SEQ ID NO: 18847 - protein, 162 aa, unidentified
  source 1..162: note = Magnetoglobus multicellularis
  REGION 1..162: note = tr|A0A1V1PDE5|A0A1V1PDE5_9DELT 6-pyruvoyl-tetrahydropterin synthase OS=Candidatus Magnetoglobus multicellularis str. Araruama OX=890399; GN = OMM_07247 PE=4 SV=1
MYTVIKKINVSASHVLILPYDSPCNNLHGHNWEITVYCRSSELNKESMVIDFKTIKRIIVESMDHKNLNDEFTFLPTAENIAKWVVESIPFCYKAKVIESKDNIAIYENTPIIVDEIDTILSKLSSAYKHLKFPKNRYLELETTFKQYLKGKAITTLMTNRR

SEQ ID NO: 18848 - protein, 122 aa, unidentified
  source 1..122: note = Magnetoglobus multicellularis
  REGION 1..122: note = tr|A0A1V1PF94|A0A1V1PF94_9DELT 6-carboxy-5,6,7,8-tetrahydropterin synthase OS=Candidatus Magnetoglobus multicellularis str. Araruama OX=890399; GN = ptpS PE=3 SV=1
MYELKIIRNFAAAHQLPLSKTKCENLHGHNWKIEVIVQGNELDQSGMMVDFSILKKGVDQVLESLDHQFLNDIPFFKENSPSSENIARYIAINVEKQLHVPGIKVSRVVAWESDDACATFIP

SEQ ID NO: 18849 - protein, 164 aa, unidentified
  source 1..164: note = Magnetomorum sp.
  REGION 1..164: note = tr|A0A0N0D303|A0A0N0D303_9DELT Rubredoxin; OS = Candidatus Magnetomorum sp. HK-1 OX=1509431; GN = MHK_006780 PE=4 SV=1
MSNDKYTSIVNLDFQYAHRFMKWPREAKHLHGHSGLLTIELEDTVDPLTGFAHACKDGFKKAWEVCDHFHHATLFQEGDPLLDAVIAVYKKEGINNDPENCVPLKKIDHALAWSYPEYRIVVTKKVSTCENLCELFYELLKDKMPIKKITFRSSSMNAASKEFK

SEQ ID NO: 18850 - protein, 123 aa, unidentified
  source 1..123: note = Magnetomorum sp.
  REGION 1..123: note = tr|A0A0M9DXG7|A0A0M9DXG7_9DELT 6-carboxy-5,6,7,8-tetrahydropterin synthase OS=Candidatus Magnetomorum sp. HK-1 OX=1509431 GN=MHK_010035 PE=3 SV=1
MYELKIIRTFAAAHQLLKSRTKCENLHGHNWKIEVHVKGKNLDQSGMMIDFGILKKHVDEILESLDHQFLNELPFLKDISPSSENIARYIAETLNERIEIPDISVSRVCAWESDNACATYIPE

SEQ ID NO: 18851 - protein, 123 aa, unidentified
  source 1..123: note = Magnetoovum chiemensis
  REGION 1..123: note = tr|A0A0F2J241|A0A0F2J241_9BACT 6-carboxy-5,6,7,8-tetrahydropterin synthase OS=Candidatus Magnetoovum chiemensis OX=1609970 GN=MCHI_000736 PE=3 SV=1
MFELMIETTFAAAHQLRGYKGKCEELHGHNFKVRVYIQAEMLNEIDIAVDFHEIKDYTQEIVQQLDHSFLNDVFPFTEINPSSENIAKWIYDSLKKKLNDDNSAIAAVTVYESATAAATYYED

SEQ ID NO: 18852 - protein, 118 aa, unidentified
  source 1..118: note = Margulisbacteria bacterium
  REGION 1..118: note = tr|A0A1F6QEH5|A0A1F6QEH5_9BACT 6-carboxy-5,6,7,8-tetrahydropterin synthase OS=Candidatus Margulisbacteria bacterium GWE2_39_32 OX=1817872; GN = A2X41_03650 PE=3 SV=1
MFSLMVEDTFSAAHQLYDYKGPCENLHGHTWKIQLFVEGDVLDKAGMLVDFRVLKAILKEERDILDHSYLNKIVEFSPTSENLSKYLFERISLKMPENVHLKKVTIWESASTWASYSQ

SEQ ID NO: 18853 - protein, 118 aa, unidentified; identical to SEQ ID NO: 18852
  source 1..118: note = Margulisbacteria bacterium
  REGION 1..118: note = tr|A0A2W4I8J8|A0A2W4I8J8_9BACT 6-carboxy-5,6,7,8-tetrahydropterin synthase OS=Candidatus Margulisbacteria bacterium OX=2053573 GN=queD PE=3 SV=1

SEQ ID NO: 18854 - protein, 140 aa, unidentified
  source 1..140: note = Marinamargulisbacteria bacterium
  REGION 1..140: note = tr|A0A328RTL7|A0A328RTL7_9BACT 6-carboxy-5,6,7,8-tetrahydropterin synthase OS=Candidatus Marinamargulisbacteria bacterium SCGC AG-439-L15; OX = 2184346 GN=DID77_02530 P E=3 SV=1
MSYILSKKFKFEAAHRLAKGYVGKCANIHGHSWYVTVQLSCHNLNQQDMGIDYAEINTFNESIRKEFDHKLLLCKDDTTLLSVCKKENYEVVTFDENPTSETIAKTVYDKAKGYFSSYKNIDMHQVIVEETCTSACYYKP

SEQ ID NO: 18855 - protein, 119 aa, unidentified
  source 1..119: note = Marinamargulisbacteria bacterium
  REGION 1..119: note = tr|A0A328RPE8|A0A328RPE8_9BACT 6-carboxy-5,6,7,8-tetrahydropterin synthase OS=Candidatus Marinamargulisbacteria bacterium SCGC AAA071-K20; OX = 2184347 GN=queD PE=3 SV= 1
MYEVMVERHFAAAHFLENYVGPCANMHGHNYRIQLFVQGDSLNKDNGILVDFKDLKAHLDKFIDTIDHKVLNEVLDIHTTAECLAKYFFDIMTPHIPTHTKLTKTTLWESDTCSASYIP

SEQ ID NO: 18856 - protein, 137 aa, unidentified
  source 1..137: note = Marinimicrobia bacterium
  REGION 1..137: note = tr|A0A1J4XMJ9|A0A1J4XMJ9_9BACT Uncharacterized protein OS=Candidatus Marinimicrobia bacterium CG1_02_48_14 OX=1805240 GN=AUJ47_10285 PE=4 SV=1
MIVLNKIFTFCAAHRYHNSAFTEEENKKMFGPDVRTHGHNYTLTVSVTGEVNPDTGFLIDLGHLKKVVREHVISKVDHAMIDQDIDWFADKQPSTENLVVWIWNQIEPLLENGVLYRVRLQETPTIFTDYYGPGGLP

SEQ ID NO: 18857 - protein, 133 aa, unidentified
  source 1..133: note = Marinimicrobia bacterium
  REGION 1..133: note = tr|A0A4Y8I808|A0A4Y8I808_9BACT 6-carboxy-5,6,7,8-tetrahydropterin synthase OS=Candidatus Marinimicrobia bacterium MT.SAG.3 OX=2552982 GN=queD PE=3; SV = 1
MYKVIKAIEFCYGHRLLNYEGKCRHLHGHNAKAEIELSSEELDERGMVYDFSEIKQSVKKWIDENIDHVMLLNKDDEIIPILEELKERFLAVDGNPTAEFIAKMIFDQVDSLGFPVTSVRVWETPNSNAVYNR

SEQ ID NO: 18858 - protein, 119 aa, unidentified
  source 1..119: note = Melainabacteria bacterium
  REGION 1..119: note = tr|A0A1Q6V136|A0A1Q6V136_9BACT 6-carboxy-5,6,7,8-tetrahydropterin synthase OS=Candidatus Melainabacteria bacterium LEY3_CP_29_8 OX=1913460; GN = BHW64_03405 PE=3 SV=1
MWELKIETSFAAAHHLLNYNGECENQHGHNWKVEVFIVGNTLDKSNILMDFKVLKKYVNDVIKTLDHKDINTLDDFKDISPSSEIISKYIYEKLKTNIPIIKKVSVWETSNACASYFEN

SEQ ID NO: 18859 - protein, 134 aa, unidentified
  source 1..134: note = Melainabacteria bacterium
  REGION 1..134: note = tr|A0A3S0CK98|A0A3S0CK98_9BACT 6-carboxy-5,6,7,8-tetrahydropterin synthase OS=Candidatus Melainabacteria bacterium OX=2052166 GN=queD PE=3 SV=1
MYQVTREIHFCYGHRLLNYSGKCKNLHGHNGVAVITIESEELDGLGMVIDFSDIKAVVSQWIDDNLDHRMILMEEDPLLPLLRQQNEPVFVMKANPTAENIARLIFDVVAENGFPVTKVTLWETTSCFATYGRQ

SEQ ID NO: 18860 - protein, 162 aa, unidentified
  source 1..162: note = Methylomirabilis limnetica
  REGION 1..162: note = tr|A0A2T4U0Y8|A0A2T4U0Y8_9BACT Uncharacterized protein OS=Candidatus Methylomirabilis limnetica; OX = 2033718 GN=CLG94_01820 PE=4 SV=1
MAAFRIRVDHENLKFSSAHFVLFGNGKCETLHGHNYRAWVELEGSLQPSDYVLDFLVVKPLMKQVCERLDHKVMLPTENEDLRIDPGDSVVGVIYGNKQYSFPAEDVLLLPIHNTSAELLARYICGVLREEIKSQFGGGGVTAIKVGVQESFGQEASYEEIF

SEQ ID NO: 18861 - protein, 162 aa, unidentified
  source 1..162: note = Methylomirabilis oxyfera
  REGION 1..162: note = tr|D5MKA6|D5MKA6_9BACT Putative 6-pyruvoyl tetrahydropterin synthase OS=Candidatus Methylomirabilis oxyfera OX=671143 GN=pts PE=4 SV=1
MAAFRIRVNHENLKFSSAHFVLFGNGQCESLHGHNYRAWVELEGSLQPSDYVMDFLAVKPLLKQICERLDHRMLLPTENEDLKIREGSSVVEVIYGAKQYSFPAEDVLLLPIHNATAELLARYICGELKTEIKNRYGGEGVVTIRVGVQESFGQEASYEEAF

SEQ ID NO: 18862 - protein, 145 aa, unidentified
  source 1..145: note = Methylopumilus rimovensis
  REGION 1..145: note = tr|A0A5B8DF53|A0A5B8DF53_9PROT 6-carboxytetrahydropterin synthase QueD OS=Candidatus Methylopumilus rimovensis OX=2588535 GN=queD PE=4 SV=1
MDITTRLEFDAGHRIPNHKSNCKNLHGHRYAIEVTVTGPIHDDNKSSDFGMVIDFSDVKQIIKDLIVDRWDHAFIVYKDDKEIVNFLNTLPNHKTVIFPVVPTAENMASEAYLILSAEFNNRFNHQLKIKQIRIYETPNSWADAL

SEQ ID NO: 18863 - protein, 145 aa, unidentified
  source 1..145: note = Methylopumilus universalis
  REGION 1..145: note = tr|A0A5B8CXN7|A0A5B8CXN7_9PROT 6-carboxytetrahydropterin synthase QueD OS=Candidatus Methylopumilus universalis OX=2588536 GN=queD PE=4 SV=1
MDITTRLEFDAGHRIPNHKSNCKNLHGHRYAIEVTVTGPIHDDRKSSDFGMVIDFSDVKQIIKDLVVEPWDHAFIVYQDDKEIVNFLKTLPDHKTVIFPVVPTAENMASEAHRILNSEFNKRFDGQLKIKQIRMYETPNSWADAI

SEQ ID NO: 18864 - protein, 117 aa, unidentified
  source 1..117: note = Methyloumidiphilus alinensis
  REGION 1..117: note = tr|A0A2W4TBT2|A0A2W4TBT2_9GAMM 6-carboxy-5,6,7,8-tetrahydropterin synthase OS=Candidatus Methyloumidiphilus alinensis OX=2202197 GN=DM484_10320; PE = 3 SV=1
MYTISKQFQFSASHVLDGLPDGHPCGRLHGHNYVAEIILASETLNPVGFVVDYNSLGLFKDIIDNELDHRHLNDVLPCLSTAEHIARYLYERARMIWPEVIAVRISETPKTSAEYRP

SEQ ID NO: 18865 - protein, 117 aa, unidentified
  source 1..117: note = Methyloumidiphilus alinensis
  REGION 1..117: note = tr|A0A2W4S7N1|A0A2W4S7N1_9GAMM 6-carboxy-5,6,7,8-tetrahydropterin synthase OS=Candidatus Methyloumidiphilus alinensis OX=2202197 GN=DM484_29095; PE = 3 SV=1
MYTISKQFHFSASHIIEGLPDGHPCGRLHGHNYIAEIVLAAESLNPIGFVVDYNALSPFKDIIEKELDHRHLNNILPCPSTAEHMAKYLYDRAKAIWPEVVAVRISETPKTSAEYRS

SEQ ID NO: 18866 - protein, 160 aa, unidentified
  source 1..160: note = Microgenomates bacterium
  REGION 1..160: note = tr|A0A3A4ZKM5|A0A3A4ZKM5_9BACT 6-carboxytetrahydropterin synthase OS=Candidatus Microgenomates bacterium OX=2093373 GN=C4564_01885 PE=4; SV = 1
MTEKEVKLVRQMYTETAHRLMDYKGRCAHVHGHSWLWKVEIAGPVRQPTGFVMDFADLKQIMQKVIDPFDHALLLRNDDPLLRLGTGNAWVTPYSQERTPRLHIFEWNPTSENLCNYVAKEIQKVLSEAPHLRLIRVSVSETANNSVVVECGNAESKGGA

SEQ ID NO: 18867 - protein, 123 aa, unidentified
  source 1..123: note = Micropelagos thuwalensis
  REGION 1..123: note = tr|U2XQD2|U2XQD2_9PROT 6-carboxy-5,6,7,8-tetrahydropterin synthase OS=Candidatus Micropelagos thuwalensis OX=1397666 GN=RS24_00245 PE=3 SV=1
MQLTREFCFDAAHCLENYDPGHPNRRIHGHSFRVRVTLTGMPDNKTGQIVDLAEFGTILEHLRQQLDHHMLNEIDGLETPTLENICLWLWEHLMPDLPDLSAVEVFRDSLGQSCLYQGSRHVN

SEQ ID NO: 18868 - protein, 123 aa, unidentified
  source 1..123: note = Muproteobacteria bacterium
  REGION 1..123: note = tr|A0A1F6TLU8|A0A1F6TLU8_9PROT 6-carboxy-5,6,7,8-tetrahydropterin synthase OS=Candidatus Muproteobacteria bacterium RIFCSPHIGHO2_01_FULL_65_16; OX = 1817764 GN=A2637_03 155 PE=3 SV=1
MEIFKLFTIEAAHRLPQLPEDHKCRRLHGHSFAIEVHVTGPVQPREGWVQDFADIGRAFGPLHDELDHTYLNDIPGLENPTSENLARWIWRRLKPALPMLSQVVVRETCTAGCIYRGEDEKQE

SEQ ID NO: 18869 - protein, 119 aa, unidentified
  source 1..119: note = Muproteobacteria bacterium
  REGION 1..119: note = tr|A0A1F6U2W2|A0A1F6U2W2_9PROT 6-carboxy-5,6,7,8-tetrahydropterin synthase OS=Candidatus Muproteobacteria bacterium RIFCSPLOWO2_01_FULL_60_18; OX = 1817768 GN=A3A87_002 30 PE=3 SV=1
MEIFKIFTLEAAHHLPNVPENHKCRRLHGHSFRIEIHVAGPVQEPSGWIMDFADLSRAFQPIYEQLDHHYLNEIEGLQNPTSEHLARWIWRQLKPALPVLSKVIVRETCTAGCVYRGED

SEQ ID NO: 18870 - protein, 294 aa, unidentified
  source 1..294: note = Nealsonbacteria bacterium
  REGION 1..294: note = tr|A0A2M7BYF5|A0A2M7BYF5_9BACT TPR_REGION domain-containing protein OS=Candidatus Nealsonbacteria bacterium CG03_land_8_20_14_0_80_36_12 OX=1974701; GN = COS47_01080 PE =4 SV=1
MARLGILDNFTATHGTRCLREDMFGVEVIFSGKIRNGFVDGLDYDSPVSALRGVLSSMNGAYLDDIIGRATDENIALYILFSLRKWLPHSVRVYEGNSKYVEVSPSDLDFNEYPSYLALSKAKSLLMRERPSDAIEELNQIISMNHDFADAYNLRGRCHKYMDRYDLALLDYMRALIINPDFGEAYRNLGNAYYYLDDNDQTIPVFTKAIELMPNSALAYNNRGFAYQKLEEFELAAQDHTKAIEIDPNYAEAYGDRGDVFMALGMKDLAERDYQKARELADSGNDTYAGIVMY

SEQ ID NO: 18871 - protein, 138 aa, unidentified
  source 1..138: note = Nephrothrix sp.
  REGION 1..138: note = tr|A0A2B8A366|A0A2B8A366_9BACT 6-carboxytetrahydropterin synthase QueD OS=Candidatus Nephrothrix sp. EaCA OX=2044729 GN=CRN43_09320 PE=4 SV=1
MVYISRKEHFNAAHRLYNAAWSPEKNKEVFGICANENWHGHNFLLTVTVKGEPDPDTGFVADFKKLGDIIQREIIEAVDHKNLNLDVPFMKDKLASCETLACEMWKILEPRAATLGPGVKLHCIRLEETAKNFVEYFG

SEQ ID NO: 18872 - protein, 129 aa, unidentified
  source 1..129: note = Nitrosoglobus terrae
  REGION 1..129: note = tr|A0A1Q2SLX5|A0A1Q2SLX5_9GAMM 6-carboxy-5,6,7,8-tetrahydropterin synthase OS=Candidatus Nitrosoglobus terrae OX=1630141 GN=TAO_0727 PE=3 SV=1
MAAIYTLKILTDFASAHSLRNYPGECQRMHGHNWKLEVEVTAQVLDQQGMAMDFKTVKGHARALCAQLDHRYLNEIPPFDRINPTAENLAAFFYHSLSKKINNGQVRVSAITLWETERACVRYTEENQP

SEQ ID NO: 18873 - protein, 131 aa, unidentified
  source 1..131: note = Nitrospira inopinata
  REGION 1..131: note = tr|A0A0S4KS13|A0A0S4KS13_9BACT 6-carboxy-5,6,7,8-tetrahydropterin synthase OS=Candidatus Nitrospira inopinata OX=1715989 GN=pts PE=4 SV=1
MTITRRYRFCAAHRLHSDRLTEDENQAAFGKCNNPNGHGHNYVVLVTINGDGENEDQEIASLDRTVAETVLERFDHHDLNCDSAFTDCTTTGENLVKLIWDLLEPKLLRGKLSKVGVIETRDNYFEYAGMA

SEQ ID NO: 18874 - protein, 250 aa, unidentified
  source 1..250: note = Nitrospira nitrificans
  REGION 1..250: note = tr|A0A0S4LMN1|A0A0S4LMN1_9BACT Putative 6-pyruvoyl-tetrahydropterin synthase (Modular protein); OS = Candidatus Nitrospira nitrificans OX=1742973; GN = COMA2_30157 PE=4 SV =1
MPPVLLTKRIEFAAAHRYMRPEWDDAKNRTVFGRCYNPPAHGHNYLLELTVSGEIDPKTGMVVNLFDLKQVLLNVIEEFDHKNLNLDMPYFKDRIPTSENFAHVLWTKLAAQRDIGTLHTLRLCEDEDLYAEVTVADGPDAAAVSKRYSFNAIHESHQGRDWDCYVTVRGTIDPATGMVTDIGALDRLAADRIIKPFDRQDLRQVLGSETVRGEALAKTIWDRLAGHVSGGTLHNVRLVQTRDLSFDYAG

SEQ ID NO: 18875 - protein, 205 aa, unidentified
  source 1..205: note = Nitrotoga sp.
  REGION 1..205: note = tr|A0A3E1D0J2|A0A3E1D0J2_9PROT 6-pyruvoyltetrahydropterin/6-carboxytetrahydropterin synthase OS=Candidatus Nitrotoga sp. MKT OX=2184311; GN = DID91_2727704690 PE=4 SV=1
MQLIYYWEGCSTWMDRWAGFLQMQAEARKAGSATCLTACDCRIQVIIRTPTQHALIMQITRRLEFDAGHRIPSHTSQCRHLHGHRYAIEITLSGEIITTDGISEQGMIMDYSEVKRIAKEQLVDAWDHAFLVYRNDQAVLDFLNSLPNHKTVVLEVPPTAENLAMLAFKLLDSAYRHSYGNNLQLERVRIYETPNNWADCLRNSS

SEQ ID NO: 18876 - protein, 149 aa, unidentified
  source 1..149: note = Nitrotoga sp.
  REGION 1..149: note = tr|A0A3E1D2Y2|A0A3E1D2Y2_9PROT 6-carboxy-5,6,7,8-tetrahydropterin synthase OS=Candidatus Nitrotoga sp. SPKER OX=2184312 GN=DID92_2727745675 PE=3; SV = 1
MQITRRLEFDAGHRIPSHTSQCRHLHGHRYAIEITLSGEIITTDGLSEQGMVMDYTEVKRIAKEQLVDAWDHAFLVYRRDTAVLDFLNSLPNHKTVVLEVPPTAENLAMLAFKLLDSAYRHSYGNNLQLERVRIYETPNNWADCLRNSS

SEQ ID NO: 18877 - protein, 121 aa, unidentified
  source 1..121: note = Niyogibacteria bacterium
  REGION 1..121: note = tr|A0A2H0TCG3|A0A2H0TCG3_9BACT 6-carboxy-5,6,7,8-tetrahydropterin synthase OS=Candidatus Niyogibacteria bacterium CG10_big_fil_rev_8_21_14_0_10_46_36 OX=1974726 GN=C OU47_04065 PE=3 SV=1
MAAIYIEKKMHFEASHSLIDVNNPQNNEPRHSHLYSFTVRIKGGTDKGGMITNIRDVKRVLKKEIVDALNGRYLNDVFPEMNPTMENLAEFIYNSAKLIFPGVVRVQIWENEDSSAIYEEE

SEQ ID NO: 18878 - protein, 134 aa, unidentified
  source 1..134: note = Nomurabacteria bacterium
  REGION 1..134: note = tr|A0A1F6V9L0|A0A1F6V9L0_9BACT 6-carboxy-5,6,7,8-tetrahydropterin synthase OS=Candidatus Nomurabacteria bacterium RIFCSPHIGHO2_01_FULL_40_24b; OX = 1801739 GN=A2647_018 90 PE=3 SV=1
MKAVYLTKRFHFESAHRMLNTNFSEAENDEYFGKCQNVHGHNYVLEVTVAGIIDPEKGYFVNLHDLLSDIQNKVIDKIDHQYLNDILPGCKNKPVTIEVVSRWIWNNLNKELPQYNFYKLRLWETPDNSVEIYK

SEQ ID NO: 18879 - protein, 125 aa, unidentified
  source 1..125: note = Omnitrophica bacterium
  REGION 1..125: note = tr|A0A3A4NZT0|A0A3A4NZT0_9BACT 6-carboxy-5,6,7,8-tetrahydropterin synthase OS=Candidatus Omnitrophica bacterium OX=2035772 GN=queD PE=3 SV=1
MYEITVTRDFSSAHYLHDYEGKCANLHGHNWKVAISFRGKELARNGILIDFLDIGKALDGLLEKLDHGVINEIPPFDVMNPTAENLARWFHAEVSQKLPPGAPQPHRVTVWETPDASASFWEDEP

SEQ ID NO: 18880 - protein, 119 aa, unidentified
  source 1..119: note = Omnitrophica bacterium
  REGION 1..119: note = tr|A0A2H0Y5R9|A0A2H0Y5R9_9BACT 6-carboxy-5,6,7,8-tetrahydropterin synthase OS=Candidatus Omnitrophica bacterium CG08_land_8_20_14_0_20_41_16; OX = 1974743 GN=queD PE=3SV=1
MYKIKVEAEFSSAHNLRGYKGKCEELHGHNWKVELAAGSKNLDKVGMVLDFKFLKRKLNSVLDKLDHKYLNRVDYFKKANPTSENIAKYIYDRLGDKVPGLVSITVWESEKSCATYDGE

SEQ ID NO: 18881 - protein, 120 aa, unidentified
  source 1..120: note = Omnitrophus magneticus
  REGION 1..120: note = tr|A0A0F0CWA4|A0A0F0CWA4_9BACT 6-carboxy-5,6,7,8-tetrahydropterin synthase OS=Candidatus Omnitrophus magneticus OX=1609969 GN=OMAG_000429 PE=3 SV=1
MFTVKIKSDFSGAHNLRGYKGKCEDLHGHNWYIEVEAVSEELDSLGMVIDFKEMKKVLDSILNELDHKYLNEISYFEKINPTSENIARYLYDKISPFFQKGKISKVTVWETDSSMASYSA

SEQ ID NO: 18882 - protein, 151 aa, unidentified
  source 1..151: note = Ornithobacterium hominis
  REGION 1..151: note = tr|A0A383TVL6|A0A383TVL6_9FLAO 6-pyruvoyl tetrahydropterin synthase/QueD family protein; OS = Candidatus Ornithobacterium hominis OX=2497989; GN = SAMEA104719789_00042 PE= 4 SV=1
MKKVRVTKIFNFETSHALFGYDGKCKNIHGHSYKLFVTVLGEPVQEQTDSKNGMLIDFGELKKIVKELIVDPFDHAIILNQNSPHAALGDKLKQENHDVIMLDYQPTCENMLIHFAGILKKALPDEVELVKLKLFETENSYGEWLASDNIK

SEQ ID NO: 18883 - protein, 130 aa, unidentified
  source 1..130: note = Ozemobacter sibiricus
  REGION 1..130: note = tr|A0A367ZKI6|A0A367ZKI6_9BACT 6-carboxy-5,6,7,8-tetrahydropterin synthase OS=Candidatus Ozemobacter sibiricus OX=2268124 GN=OZSIB_1345 PE=3 SV=1
MYRISVEKSFSAAHLLPDHPGKCRQLHGHNWRVRVTAAAATLDQQGMVVDFSVLKRALAEVCDQFDHRLLNELPLLAGVVPTAEHLCRIIHGELARRLDDGRVRIALVQIWETPDNCAEFVPAGGGEGQP

SEQ ID NO: 18884 - protein, 147 aa, unidentified
  source 1..147: note = Pandoraea novymonadis
  REGION 1..147: note = tr|A0A2P6UYN0|A0A2P6UYN0_9BURK 6-carboxy-5,6,7,8-tetrahydropterin synthase OS=Candidatus Pandoraea novymonadis OX=1808959 GN=BZL35_00671 PE=3 SV=1
MITITRKLEFDAGHRIPDHRSQCRNLHGHRYVLEITLMGEMKREEGAFDNGMVMDFADVKALANEHLVSMWDHAFIVYQGDIEVRNFLTSLKDHKTVVLDCIPTVENLANIAFKMLVGIFDAYYGSNLCLTHVRLYETPNCWADVKS

SEQ ID NO: 18885 - protein, 119 aa, unidentified
  source 1..119: note = Pantoea carbekii
  REGION 1..119: note = tr|U3U725|U3U725_9GAMM 6-carboxy-5,6,7,8-tetrahydropterin synthase OS=Candidatus Pantoea carbekii OX=1235990 GN=HHS_01670 PE=3 SV=1
MTTTLFKEFKFEAAHRLPYVAKEHKCSRLHGHSFRVCLEITAELDIHAGWVIDFSELKMAFKPVYNLLDHHYLNDIPGLENPTSEVLAEWIWKRIKPTLPSLSTVIIKETCTTGCIYRG

SEQ ID NO: 18886 - protein, 148 aa, unidentified
  source 1..148: note = Paraburkholderia kirkii
  REGION 1..148: note = tr|G4M7T9|G4M7T9_9BURK 6-carboxy-5,6,7,8-tetrahydropterin synthase OS=Candidatus Paraburkholderia kirkii UZHbot1 OX=1055526; GN = BKIR_c17_4538 PE=3 SV=1
MQTITRKLEFDAGHRIPDHRSQCRNLHGHRYVLEITLQGDLVDAEGAPDRGMVMDFADVKALAMEHLVNKWDHAFIVYEGDVKVREFLQMLSDQKTVVLDRIPTVENLAAVAFNILANVYDAHYGVNLKLKRVRLYETPNCWADVERA

SEQ ID NO: 18887 - protein, 147 aa, unidentified
  source 1..147: note = Paraburkholderia sp.
  REGION 1..147: note = tr|A0A4R5MCE9|A0A4R5MCE9_9BURK 6-carboxy-5,6,7,8-tetrahydropterin synthase OS=Candidatus Paraburkholderia sp. 4M-K11 OX=2528715 GN=queD PE=3 SV=1
MTITRKLEFDAGHRIPDHRSQCRNLHGHRYVLEVTLQGDTVETEGAPDRGMVMDFADVKALANQHLVDLWDHAFIVFEGDTQVRGFLETLPGHKTVVIDRIPTVENLAAIAFEILANVYDAHYGVNLQLSKVRLYETPNCWAEVTRS

SEQ ID NO: 18888 - protein, 127 aa, unidentified
  source 1..127: note = Parcubacteria bacterium
  REGION 1..127: note = tr|A0A3M0WSX6|A0A3M0WSX6_9BACT 6-carboxy-5,6,7,8-tetrahydropterin synthase OS=Candidatus Parcubacteria bacterium OX=2053309 GN=queD PE=3 SV=1
MGLLISKRYKFEAAHYLPFVPEGHPCKRLHGHSYSFTVTLKGEVNELGFVLDYNELDVYVKGLADSLDHRLLNEIKGLENPTAENICVWLADKLNNTEIKSFLHSVKVKETEKTESILYVNRDNRSI

SEQ ID NO: 18889 - protein, 120 aa, unidentified
  source 1..120: note = Parcubacteria bacterium
  REGION 1..120: note = tr|A0A3R7CH88|A0A3R7CH88_9BACT 6-carboxy-5,6,7,8-tetrahydropterin synthase OS=Candidatus Parcubacteria bacterium OX=2053309 GN=queD PE=3 SV=1
MEIYKVFTFDAAHRLPNLPETHKCRRLHGHTFRVEIRVAGKEDDAYDWVIDFSDIAKIAAPIIEILDHNYLNDIEGLENPTSENIAKWIWRKLKPNLPILTQVVVQESPNSGVVCIGEDD

SEQ ID NO: 18890 - protein, 149 aa, unidentified
  source 1..149: note = Pelagibacter sp.
  REGION 1..149: note = tr|A0A1Z9MNM8|A0A1Z9MNM8_9PROT Uncharacterized protein OS=Candidatus Pelagibacter sp. TMED202 OX=1986810; GN = CBD62_00640 PE=4 SV=1
MTYYSTKTYGHNIGLACVFRQPNADHSHCHLLHGYSLAFRFTFGCNELDNKNWAVDFGGLKPLKAWLEDKFDHKLALDNNDPQLERLKDLENYDLAEVRMFDGVGAEMFAKHAFDFADKLIKEKTDGRCFVDSVECMEHGANSAIYRKK

SEQ ID NO: 18891 - protein, 119 aa, unidentified
  source 1..119: note = Pelagibacter sp.
  REGION 1..119: note = tr|A0A1Z9HY59|A0A1Z9HY59_9PROT 6-carboxy-5,6,7,8-tetrahydropterin synthase OS=Candidatus Pelagibacter sp. TMED166 OX=1986805 GN=CBD26_02870 PE=3; SV = 1
MILVRKYSFQAARKLTKIAPDHICANLHGHTFHITIRIEGPINKKNDFVMDFYDIDKIFNKSVFNLLDHKYLNDIKGLESPTTENLAKWIWNKLVKKLPILKEVNVFENDVYGCVYKGD

SEQ ID NO: 18892 - protein, 113 aa, unidentified
  source 1..113: note = Peregrinibacteria bacterium
  REGION 1..113: note = tr|A0A1F7AB95|A0A1F7AB95_9BACT 6-carboxy-5,6,7,8-tetrahydropterin synthase OS=Candidatus Peregrinibacteria bacterium RIFCSPLOWO2_01_FULL_39_12; OX = 1801897 GN=A3B60_03 720 PE=3 SV=1
MELSSTFHFAASHFLTQYHGKCEHMHGHNYKLIVTIEGEIKSNGMILDFKKIKEIVEEKILEKLDHTHLNNLIENPSAENIVVWIWENLKNSLPLKRLTLYETDDYFCQYEGK

SEQ ID NO: 18893 - protein, 113 aa, unidentified; identical to SEQ ID NO: 18892
  source 1..113: note = Peregrinibacteria bacterium
  REGION 1..113: note = tr|A0A1F7AD70|A0A1F7AD70_9BACT 6-carboxy-5,6,7,8-tetrahydropterin synthase OS=Candidatus Peregrinibacteria bacterium RIFCSPLOWO2_02_FULL_39_10; OX = 1801899 GN=A3I58_02 095 PE=3 SV=1

SEQ ID NO: 18894 - protein, 126 aa, unidentified
  source 1..126: note = Phaeomarinobacter ectocarpi
  REGION 1..126: note = tr|X5MP71|X5MP71_9RHIZ 6-carboxy-5,6,7,8-tetrahydropterin synthase OS=Candidatus Phaeomarinobacter ectocarpi OX=1458461 GN=BN1012_Phect2818; PE = 3 SV=1
MRITKQFTFDAAHFLPHAEEGHPNRRLHGHSFRVIVALDGMPAEDTGLIRDFGEVENILGQAQEELDHRFLNEIEGLEAPTLENITLWLWTRLAAPLPELARIEIHRDSCGEACIYEGSRHGKQKS

SEQ ID NO: 18895 - protein, 120 aa, unidentified
  source 1..120: note = Photodesmus katoptron
  REGION 1..120: note = tr|S3EHF6|S3EHF6_9GAMM 6-carboxy-5,6,7,8-tetrahydropterin synthase OS=Candidatus Photodesmus katoptron Akat1 OX=1236703 GN=queD PE=3 SV=1
MKTEIYKDFTFEAAHHLPNVPKGHKCGRLHGHSFLVRLYIQGNIDPNTGWLVDFSDIKKLFNPIYEQLDHFYLNEITGLENPTSEVLAIWIWRKLKPSLPILNKIEIKETCTTGCIYSGK

SEQ ID NO: 18896 - protein, 120 aa, unidentified
  source 1..120: note = Photodesmus blepharus
  REGION 1..120: note = tr|A0A084CMC1|A0A084CMC1_9GAMM 6-carboxy-5,6,7,8-tetrahydropterin synthase OS=Candidatus Photodesmus blepharus OX=1179155 GN=queD PE=3 SV=1
MKAELYKDFKFEAAHYLPNVPAGHKCSRLHGHSFLVRLYILGEVDPNTGWVLDFDDISTAFKAVYDRLDHRYLNEIKGLENPTSEVLAKWIWQELKSTLPLLNKVEIKETCTANCTYWGE

SEQ ID NO: 18897 - protein, 140 aa, unidentified
  source 1..140: note = Phycorickettsia trachydisci
  REGION 1..140: note = tr|A0A2P1P757|A0A2P1P757_9RICK 6-pyruvoyl-tetrahydropterin synthase OS=Candidatus Phycorickettsia trachydisci OX=2115978 GN=phytr_1500 PE=4; SV = 1
MSIFSCSITVHFDAAHRVIGHKGKCVDLHGHRYVLEVSIRARQLDQLGMVIDFSDLKQIIYGWINQNFDHTVILSTNDQELGEAISKITKQKIYYLPYNPTAENIAYHFKNDILSNILDTKDLRIGKVRLYETPSCWVEV

SEQ ID NO: 18898 - protein, 123 aa, unidentified
  source 1..123: note = Phycosocius bacilliformis
  REGION 1..123: note = tr|A0A2P2E993|A0A2P2E993_9PROT 6-carboxy-5,6,7,8-tetrahydropterin synthase OS=Candidatus Phycosocius bacilliformis OX=1445552 GN=queD PE=3 SV=1
MTRCLLTKSVTFDAAHHLHQGEADHPYRRLHGHSFRLDVSVEDEADGKDHWVRDFAELTRAIATVRDQLDHSFLNEIEGLETPTLENICVWVAKRLGPSLPNLRRVSVARPSLGEMCTLEIGV

SEQ ID NO: 18899 - protein, 493 aa, unidentified
  source 1..493: note = Poribacteria bacterium
  REGION 1..493: note = tr|A0A2E0XGV5|A0A2E0XGV5_9BACT GTP cyclohydrolase 1; OS = Candidatus Poribacteria bacterium OX=2026781 GN=folE; PE = 3 SV=1
  VARIANT 3: note = Xaa can be any naturally occurring amino acid
  VARIANT 40: note = Xaa can be any naturally occurring amino acid
  VARIANT 59: note = Xaa can be any naturally occurring amino acid
  VARIANT 297: note = Xaa can be any naturally occurring amino acid
MLXPPANSERLSPIFMHFLTRYIAFEASHFYRIPELNDQXNYQLFGHKANPNGHGHNYXLYLTVKGSVDPVNGMVLNIKKLDDTIRGYVDQHYDHKQINLQHPVFAVDPHLQPTPENIVMQIWQAFNQRLKKVEIAELRLDEDERLYTMYYGVEQMVHLTRTYEFSAAHRLHSFELSDQENSETFGKCNNPNGHGHNYVLEVTISGEVDSRTGMVVKVDDLDRIIDKQVYGRFDHKHLNLDTVEFQSLNPTSENFVQVLWDLLVADIRSLDPARSVQLYRLRLRETPKSFFDYYGNXDLMVSYNYEEDFVAVDEIIQEHFHNLIKRIGEDPNRQGLVKTPTRAALAMQYLTQGYQQDVHKIVNDAIFDEQYDDMVIVKDIEFFSICEHHILPFFGKCHVGYLPNKKIIGLSKIPRLVDAYARRLQIQERLTYQIAQTLSEVLSPKGVAVVMEAQHMCMMIRGVEKQHSSTITNVMLGDFREDSATRAEFMNCL

SEQ ID NO: 18900 - protein, 64 aa, unidentified
  source 1..64: note = Poribacteria bacterium
  REGION 1..64: note = tr|A0A2E9F6K6|A0A2E9F6K6_9BACT 6-pyruvoyl tetrahydropterin synthase (Fragment) OS=Candidatus Poribacteria bacterium OX=2026781 GN=CMK17_06235 PE=4 SV=1
MDYYLTRRVEFEAAHYYRIPELSDEENYDLFGPTSNLNSHGHNYVLLVTVKGDAVASDGMLINI

SEQ ID NO: 18901 - protein, 125 aa, unidentified
  source 1..125: note = Promineofilum breve
  REGION 1..125: note = tr|A0A160T4C2|A0A160T4C2_9CHLR 6-pyruvoyl-tetrahydropterin synthase OS=Candidatus Promineofilum breve OX=1806508 GN=CFX0092_A3233 PE=4 SV=2
MYTVAVKRDFVGQHFLIGGDWGAENERHSHHYVVEVQLEGSELDRHGYLVDIVDIEHHLEALVAHYRDRTLNELPEFAGLNPSIEHFARIFGESLSARITAANITALTLKIWENEIAWAAYRLAR

SEQ ID NO: 18902 - protein, 147 aa, unidentified
  source 1..147: note = Propionivibrio aalborgensis
  REGION 1..147: note = tr|A0A1A8XXD2|A0A1A8XXD2_9RHOO 6-carboxy-5,6,7,8-tetrahydropterin synthase OS=Candidatus Propionivibrio aalborgensis OX=1860101 GN=PROAA_290015; PE = 3 SV=1
MLITRRLEFDAGHRIPDHKSQCRHLHGHRYALEITLSGDIIVQAGDPANGMVMDFSEVKSLAKEHLIDHWDHSFLVYAGDKQLVEFLNSIPDHKTVILDCIPTSENLAVQAFSILDSVFQDTYGNHLRLERVRLYETPNCWADAGRQ

SEQ ID NO: 18903 - protein, 126 aa, unidentified
  source 1..126: note = Pseudomonas adelgestsugas
  REGION 1..126: note = tr|A0A481QMX0|A0A481QMX0_9PSED 6-carboxy-5,6,7,8-tetrahydropterin synthase OS=Candidatus Pseudomonas adelgestsugas OX=1302376 GN=queD PE=3 SV=1
MEIFKEFTFESAHRLPYVPESHKCWRLHGHSFKVAIHLVGNLDYNTGWLRDFSNIKAIFKPLHERLDHNYLNDIPGLENPTSEVLAQWIWTELKPTLPELSAVRIYETCTSGCIYRGNIATCKSKQ

SEQ ID NO: 18904 - protein, 132 aa, unidentified
  source 1..132: note = Raymondbacteria bacterium
  REGION 1..132: note = tr|A0A1F7FCA2|A0A1F7FCA2_9BACT 6-carboxy-5,6,7,8-tetrahydropterin synthase OS=Candidatus Raymondbacteria bacterium RIFOXYD12_FULL_49_13 OX=1817890; GN = A2519_18270 PE= 3 SV=1
MKITKRFQFCASHRLYNPRLSSAGNSRLFGKCNRQHGHNFILDVTVEGRVQRTSGMVIDFRQLSAIVKEQVVDYFDHTDFEHDIPEFRTMPQTVENLAVVVWQRLKQKMPARVKLARIRISESDQNWAEYEG

SEQ ID NO: 18905 - protein, 120 aa, unidentified
  source 1..120: note = Regiella insecticola
  REGION 1..120: note = tr|G2GY35|G2GY35_9ENTR 6-carboxy-5,6,7,8-tetrahydropterin synthase OS=Candidatus Regiella insecticola 5.15 OX=1005043 GN=Rin_00006860 PE=3; SV = 1
MTTTLFKDFQFEAAHRLPNVPEGHKCGRLHGHSFSLRLEVTGEVDPTFGWIMDFATLKTQFEPILQRLDHHYLNEIEGLENPTSEVLAAWIWQQLKPKLPELSAVTIKETCSTGCVYRGE

SEQ ID NO: 18906 - protein, 129 aa, unidentified
  source 1..129: note = Regiella insecticola
  REGION 1..129: note = tr|E0WSW3|E0WSW3_9ENTR 6-carboxy-5,6,7,8-tetrahydropterin synthase OS=Candidatus Regiella insecticola LSR1 OX=663321 GN=sscR PE=3 SV=1
MAYKKKATIVTTTLFKDFQFEAAHRLPNVPEGHKCGRLHGHSFSLRLEVTGEVDPTFGWIMDFAALKTQFEPILQRLDHNYLNEIEGLENPTSEVLAAWIWQQLKPKLPELSAVTIKETCSTGCVYRGE

SEQ ID NO: 18907 - protein, 149 aa, unidentified; identical to SEQ ID NO: 18734
  source 1..149: note = Roizmanbacteria bacterium
  REGION 1..149: note = tr|A0A2M8KMR8|A0A2M8KMR8_9BACT 6-carboxy-5,6,7,8-tetrahydropterin synthase OS=Candidatus Roizmanbacteria bacterium CG10_big_fil_rev_8_21_14_0_10_36_26 OX=1974851 GN= COU86_00240 PE=3 SV=1

SEQ ID NO: 18908 - protein, 148 aa, unidentified
  source 1..148: note = Roizmanbacteria bacterium
  REGION 1..148: note = tr|A0A1F7I216|A0A1F7I216_9BACT 6-carboxy-5,6,7,8-tetrahydropterin synthase OS=Candidatus Roizmanbacteria bacterium RIFCSPHIGHO2_12_FULL_39_8; OX = 1802050 GN=A3F60_0067 5 PE=3 SV=1
MTITKIIEFDMGHRIPNHKSQCRNLHGHRYKLELNIEGEVQKEVGRSEEGMVFDFIDVKTLLMNEVHSKCDHAFMFYEKDPVLAVFAKKNKSLKFVSVPFIPTAENISDWIFNILSKKIEIISKKKFHLQGIKLWETPTSSAFISKKN

SEQ ID NO: 18909 - protein, 144 aa, unidentified
  source 1..144: note = Rokubacteria bacterium
  REGION 1..144: note = tr|A0A0T6ABX4|A0A0T6ABX4_9BACT Uncharacterized protein OS=Candidatus Rokubacteria bacterium CSP1-6; OX = 1640509 GN=XU13_C0025G0018 PE=4 SV=1
MGRDALTLTRTFHFSAGHRLANPALGEAENRALYGPCFRPHGHNYLLEVTVGGRIDPRTGMAADLVMLESAVRRAVLDLVDHRDLNADVPALAGVITTGENLARAFWRLLAPALPAGALQRVAVVETANNTFEYYGETDDGDTR

SEQ ID NO: 18910 - protein, 138 aa, unidentified
  source 1..138: note = Rokubacteria bacterium
  REGION 1..138: note = tr|A0A1Q7I334|A0A1Q7I334_9BACT 6-carboxy-5,6,7,8-tetrahydropterin synthase OS=Candidatus Rokubacteria bacterium 13_1_40CM_4_67_11 OX=1805361; GN = AUH76_17890 PE=3 SV=1
MSATAYSTRRFSFAAGHKYWVESWPAAENERVFGRLTVPHGHNYTVDVTVRGPIDERTGMVIDLSELKRIVGETVVDRFDHADLNADALFRNRVPTTENIALVIWDLLAAKLGSERLWQVRVFEDPTLYVDVRAEDAV

SEQ ID NO: 18911 - protein, 114 aa, unidentified
  source 1..114: note = Saccharicenans subterraneum
  REGION 1..114: note = tr|A0A3E2BNL9|A0A3E2BNL9_9BACT 6-carboxy-5,6,7,8-tetrahydropterin synthase OS=Candidatus Saccharicenans subterraneum OX=2508984 GN=OP8BY_1905 PE=3; SV = 1
MSWKLKVRDKFSAAHYLREYKGKCEKLHGHTFQVEVEITVKELDNTGIGIDFTEIKKKLAEILPDHTLLNEAFNFNPSAENLAREIYRRMKEFYPVTAVTVWESEDAAATYTED

SEQ ID NO: 18912 - protein, 118 aa, unidentified
  source 1..118: note = Saganbacteria bacterium
  REGION 1..118: note = tr|A0A2H0Y1U9|A0A2H0Y1U9_9BACT 6-carboxy-5,6,7,8-tetrahydropterin synthase OS=Candidatus Saganbacteria bacterium CG08_land_8_20_14_0_20_45_16; OX = 2014293 GN=queD PE=3SV=1
MYQLTVEDTFDAAHALRGYAGPCENLHGHTWKVQVELQGEKLNKIGLLEDFKTIKKHLKEILCEFDHNHLNEIAIFKTQNPSSENLARIIYEKLKQKLKAISKVTVYESPTTCASYFA

SEQ ID NO: 18913 - protein, 121 aa, unidentified; identical to SEQ ID NO: 18740
  source 1..121: note = Scalindua brodae
  REGION 1..121: note = tr|A0A0B0EFJ3|A0A0B0EFJ3_9BACT 6-carboxy-5,6,7,8-tetrahydropterin synthase OS=Candidatus Scalindua brodae OX=237368 GN=SCABRO_02408 PE=3 SV=1

SEQ ID NO: 18914 - protein, 121 aa, unidentified
  source 1..121: note = Scalindua sp.
  REGION 1..121: note = tr|A0A523CJ22|A0A523CJ22_9BACT 6-carboxy-5,6,7,8-tetrahydropterin synthase OS=Candidatus Scalindua sp. AMX11 OX=2555784 GN=queD PE=3 SV=1
MYELVVNDVFAGAHSLRDYDGECEKLHGHNWRVEVTLQCEELDGLGMVFDFKEVKSILREVLAHFDHSHLNELKEFSIENPTTENVSRILFSKIGEMLPPKISVAKVKTWESDNCAAAYYI

SEQ ID NO: 18915 - protein, 124 aa, unidentified
  source 1..124: note = Schekmanbacteria bacterium
  REGION 1..124: note = tr|A0A1F7RRI7|A0A1F7RRI7_9BACT 6-carboxy-5,6,7,8-tetrahydropterin synthase OS=Candidatus Schekmanbacteria bacterium RBG_16_38_10 OX=1817879; GN = A2W05_08285 PE=3 SV=1
MFELMITSEFSAAHQLKEYGGKCEALHGHNWRVEVYVKSSVPDKIGMVMDFADIKKAANLILAELDHKNLNEIQPFRDKNPTAENISLWVFNQLLSKINSDNIKLSKVRVWETETSCASYSEES

SEQ ID NO: 18916 - protein, 125 aa, unidentified
  source 1..125: note = Schekmanbacteria bacterium
  REGION 1..125: note = tr|A0A3M1RLC1|A0A3M1RLC1_9BACT 6-carboxy-5,6,7,8-tetrahydropterin synthase OS=Candidatus Schekmanbacteria bacterium OX=2419984 GN=queD PE=3 SV=1
MYSVSIKLDFSSAHQLRNYKGKCEALHGHNWKVEAVVSGEKLNSLGMLIDFHDLKKELSAVLELLDHKNLNETEIFKEINPTAENIANWIYDEMSKKINNGNISVSEIRVWESEHSCAMYSGKRC

SEQ ID NO: 18917 - protein, 142 aa, unidentified
  source 1..142: note = Schmidhempelia bombi
  REGION 1..142: note = tr|A0A484GDC3|A0A484GDC3_9GAMM 6-carboxy-5,6,7,8-tetrahydropterin synthase OS=Candidatus Schmidhempelia bombi str. Bimp OX=1387197 GN=queD PE=3 SV=1
MYIIAKEFQFDACHMLDGHQGKCHNLHGHTYKLVIEVSGNLIKQGSSCDMVMDFADLKHIVKQHIVDPLDHAFLFFQENKNECEIAALLQRMQRKVFAFPCRTTAEGMSKFIFEQLSHYLPITMVRLWETPTSYCEYRKENQ

SEQ ID NO: 18918 - protein, 123 aa, unidentified
  source 1..123: note = Sulfobium mesophilum
  REGION 1..123: note = tr|A0A2U3QK93|A0A2U3QK93_9BACT 6-carboxy-5,6,7,8-tetrahydropterin synthase OS=Candidatus Sulfobium mesophilum OX=2016548 GN=NBG4_710002 PE=3 SV=1
MYELSIEVGFAAAHQLRGYKGKCENMHGHNWRVQISVLAERLNEIDIAMDFHDLKKMAQEVIAPLDHAFLNEVFPFTEKNPSSENIAKWIFDSMKKKINNGNLRMAAVTVWESENASASYYED

SEQ ID NO: 18919 - protein, 123 aa, unidentified
  source 1..123: note = Sulfopaludibacter sp.
  REGION 1..123: note = tr|A0A2N9MVM7|A0A2N9MVM7_9BACT 6-carboxy-5,6,7,8-tetrahydropterin synthase OS=Candidatus Sulfopaludibacter sp. SbA3 OX=2043164 GN=SBA3_3260008 PE=3; SV = 1
MFEVTIEETFAAGHALRNYRGKCENVHGHNYRCQVSIQGERLDEIGLLVDFVELKKVVHGVLDRMDHQWLNEFPPFDVLNPSAENMAKYIYDEVSSGMQGKEAIRVQSVRLWETDTASATYRP

SEQ ID NO: 18920 - protein, 141 aa, unidentified
  source 1..141: note = Sulfopaludibacter sp.
  REGION 1..141: note = tr|A0A2N9MXQ7|A0A2N9MXQ7_9BACT 6-carboxy-5,6,7,8-tetrahydropterin synthase OS=Candidatus Sulfopaludibacter sp. SbA3 OX=2043164 GN=SBA3_3690011 PE=4; SV = 1
MVITRKVEFSASHMCRDPRLSDEENRKLYGPAANPHGHGHNYVVEVSLRGQPDPVTGMVLDLKELKEILNREIVAPYDHRFLNYEVPPFDQVVPTTENIARDIWRRIEPCLSVGNGRLHSVRVYETPDLYVDYYGESPCTM

SEQ ID NO: 18921 - protein, 137 aa, unidentified
  source 1..137: note = Sulfotelmatobacter sp.
  REGION 1..137: note = tr|A0A2N9N8Q8|A0A2N9N8Q8_9BACT 6-pyruvoyl tetrahydropterin synthase OS=Candidatus Sulfotelmatobacter sp. SbA7 OX=2043160 GN=SBA7_290025 PE=4 SV=1
MKAHLTRRYKFSASHRLHSDAMSEAENAATYGKCNNPHGHGHNYALEVTVSGQVDENGMVCNLVDLDGFVEREILERFDLQNLNTLPEFAETVPTTENLSIAVYDILQRGFRLAHLERVRFEETLMNSFEYAGEENH

SEQ ID NO: 18922 - protein, 140 aa, unidentified
  source 1..140: note = Sulfotelmatobacter kueseliae
  REGION 1..140: note = tr|A0A2U3KP21|A0A2U3KP21_9BACT 6-pyruvoyl tetrahydropterin synthase OS=Candidatus Sulfotelmatobacter kueseliae OX=2042962 GN=SBA1_360018 PE=4 SV=1
MIAHLTRRYPFSASHRLNSEQMSADENRATYGKCNNPYGHGHNYTLEVTVSGPVDERTGMVCNLTDLDGVVEREVLSRYHLENLNTVQEFAKTVPTTENLCVAIFEILQRGFAQAHLDRVRLEETMMNSFEYTGGAEARK

SEQ ID NO: 18923 - protein, 139 aa, unidentified
  source 1..139: note = Sulfotelmatomonas gaucii
  REGION 1..139: note = tr|A0A2N9L4W4|A0A2N9L4W4_9BACT 6-carboxy-5,6,7,8-tetrahydropterin synthase OS=Candidatus Sulfotelmatomonas gaucii OX=2043161 GN=SBA5_150072 PE=4; SV = 1
MIFLTRRATFSASHYYWNEAWTPEKNQQVFGRCANRNGHGHNYTLEVTVAGEPDPVTGFVVDLKWLKDVMEREVLAAYDHKHLNLDAPEFAHANPTTENIVIAAWKRLEPAVTAAGGARLSRIRVYETPEIFAEYRGEA

SEQ ID NO: 18924 - protein, 125 aa, unidentified
  source 1..125: note = Sulfotelmatomonas gaucii
  REGION 1..125: note = tr|A0A2N9L276|A0A2N9L276_9BACT 6-carboxy-5,6,7,8-tetrahydropterin synthase OS=Candidatus Sulfotelmatomonas gaucii OX=2043161 GN=SBA5_100029 PE=3; SV = 1
MYEVTVEADFSSGHYLRNYRGKCENPHGHNYKVRITLAGTELDEAGLLLDFKLLKQVLRPVVERIDHQMLNDLEPFTTLNPSAENIAKYFYDETNRSLASITAGRVRVKDCTIWETDSTTATYFE

SEQ ID NO: 18925 - protein, 193 aa, Sulfuricurvum sp.
  REGION 1..193: note = tr|K7T3I5|K7T3I5_9HELI 6-pyruvoyl tetrahydrobiopterin synthase OS=Candidatus Sulfuricurvum sp. RIFRC-1 OX=1249480 GN=B649_10890 PE=4 SV=1
MIIRKLFKFENAHIVRGCSTQRCRASLHGHSYKVEVLLESDYLDNGQMVYDFGLMKQGMKELIDAFDHAIALWDGDDAEYIADMKKHSNRWVQIPVSPSAEQFSRLIFVMIDKLHWFTQMVNGEKMVRLYSIIVHETDTGYAQCFRNDAYSDKMGLIDLEKIIFSDEVREGWNDPALWERIKRGETFINPRSV

SEQ ID NO: 18926 - protein, 145 aa, unidentified
  source 1..145: note = Sumerlaea chitinovorans
  REGION 1..145: note = tr|A0A2Z4Y2J4|A0A2Z4Y2J4_9BACT 6-pyruvoyl tetrahydrobiopterin synthase OS=Candidatus Sumerlaea chitinovorans OX=2250252 GN=BRCON_0185 PE=4 SV=1
MVYLTRRVGFCASHRLFNPHLSDEENEKIYGRCSNPNGHGHNYTLEVTVCGSPEPRTGMVIDLKELKRIIVEEIVERVDHKHLNTDVDFLQGVIPTSENLVIAFWQLLERRLGGRCQLHEIRLWETANNVVSYRGEGENLVRVTG

SEQ ID NO: 18927 - protein, 145 aa, unidentified
  source 1..145: note = Sumerlaea chitinovorans
  REGION 1..145: note = tr|A0A2Z4Y849|A0A2Z4Y849_9BACT 6-carboxy-5,6,7,8-tetrahydropterin synthase OS=Candidatus Sumerlaea chitinovorans OX=2250252 GN=BRCON_2055 PE=3 SV=1
MYLVKIRMQFAAAHRLCREDLSDEENFAIYGKCANPNGHGHNYDLEVAVEGELDPATGMVVNFYDLQRVVEEHIFNKVDHKNLNKDVDFLHGVIPTAENLARCFWEVLEPHVRPARLFSITVAEGEANVVTYFGPRNRTGVSNGE

SEQ ID NO: 18928 - protein, 175 aa, unidentified
  source 1..175: note = Sumerlaeota bacterium
  REGION 1..175: note = tr|A0A353GFJ8|A0A353GFJ8_9BACT 6-pyruvoyl tetrahydrobiopterin synthase OS=Candidatus Sumerlaeota bacterium OX=2107588 GN=DDW35_03105 PE=4 SV=1
MTIAYCLVPTMNTYAIETSKEALKFSAAHLATFADGTAERLHGHNYQVRARLEGDLDKAGMVLDACVLKQWVRELCDELDEHVLVAMQNPLLEVEEDEDEVVMRYKGKTYVFPQDDCVLLSIPNTTMEYLARYLAERLRARLDMEPAADRMRELSVTVSETPGQSASWTLQFGGA

SEQ ID NO: 18929 - protein, 154 aa, unidentified
  source 1..154: note = Synechococcus spongiarum
  REGION 1..154: note = tr|A0A1T1CRP6|A0A1T1CRP6_9SYNE 6-pyruvoyl tetrahydropterin synthase OS=Candidatus Synechococcus spongiarum LMB bulk15M OX=1943582 GN=BV61_04605 PE=4 SV=1
MRSPYTCSKAFTDFPCCHRQWRHKGHCRFVHGYSRSFTFWFAATHLDEHGFVVDFSSLDPLRRQLAEQFDHTFLVNHDDPLLAEWQRLHHLGALDLRVLENVGMEATAKLVWGWANALLRRRNQGRCCCWKVEARENDSNRACYEQCPDWYDGV

SEQ ID NO: 18930 - protein, 321 aa, unidentified
  source 1..321: note = Synechococcus spongiarum
  REGION 1..321: note = tr|A0A165B1A1|A0A165B1A1_9SYNE 6-pyruvoyl tetrahydrobiopterin synthase OS=Candidatus Synechococcus spongiarum OX=431041 GN=FLM9_1123 PE=4 SV=1
MTAMVAASVAAAAIARNGTSNGTNPTAPHGEGRFCLITRRATFCASHRYWLPELSAADNEARFGCCSRAPGHGHNYELVVTMAGPLDANGMVLNLSEVKHHIRRQVTDSLDFSFLNSTWPELASKLPCTEWLCHCIWQRLKPHLPVVGIRLYEHPRLWADYFGQTMDAFLTVSTHFAAAHRLARPELSYEENVATYGKCARPHGHGHNYHLEVTVQGQMDERTGMLCDLAVLQQVVQDVVTEPFDHTFLNKDVPHFATTVPTAENIALYICDLLRQPVSRCGAQLHKVRLQESPNNAAEVYAESPVAHHLAAQTLQALASC

SEQ ID NO: 18931 - protein, 132 aa, unidentified
  source 1..132: note = Syntrophonatronum acetioxidans
  REGION 1..132: note = tr|A0A424YFH3|A0A424YFH3_9FIRM 6-carboxy-5,6,7,8-tetrahydropterin synthase OS=Candidatus Syntrophonatronum acetioxidans OX=1795816 GN=queD PE=3 SV=1
MSKDGYRLTVKISFSAAHFLREYAGKCSNLHGHTWIAECSVEGSKLNSLGMLIDFHDLEDLVKEVTDEFDHSLINDHPSFSEEGLNPTAENLAWYIYHELEKKVDRSIYDIMVKEITLWESQDAYATYKRKE

SEQ ID NO: 18932 - protein, 123 aa, unidentified
  source 1..123: note = Syntrophosphaera thermopropionivorans
  REGION 1..123: note = tr|A0A4R5JQA3|A0A4R5JQA3_9BACT 6-carboxy-5,6,7,8-tetrahydropterin synthase OS=Candidatus Syntrophosphaera thermopropionivorans OX=2593015 GN=queD; PE = 3 SV=1
MYKLSVYDYFSAAHRLRGYEGPCSNVHGHNWKVKVTFQTDTLDSLGMAIDFKVLKAKLWEILNQLDHIFLNELPIFKDINPTSENIARYIFESISESFKDSSLSLLEVELQESDKVSVIYSNA

SEQ ID NO: 18933 - protein, 117 aa, unidentified
  source 1..117: note = Tachikawaea gelatinosa
  REGION 1..117: note = tr|A0A090ARU7|A0A090ARU7_9ENTR 6-carboxy-5,6,7,8-tetrahydropterin synthase OS=Candidatus Tachikawaea gelatinosa OX=1410383 GN=ygcM PE=3 SV=1
MIIFKDFQFEAAHQLPYVSKEHKCSRLHGHSFKVRLEIFGETQKKTGWVMDFKKIKNIFKSVHNQLDHRFLNEIPGLENPTSEILAKWIWNKIKPHLPELLSVTIKETCTSGCIYKK

SEQ ID NO: 18934 - protein, 125 aa, unidentified
  source 1..125: note = Tagabacteria bacterium
  REGION 1..125: note = tr|A0A2M8L9E3|A0A2M8L9E3_9BACT 6-carboxy-5,6,7,8-tetrahydropterin synthase OS=Candidatus Tagabacteria bacterium CG10_big_fil_rev_8_21_14_0_10_40_13; OX = 1975022 GN=que D PE=3 SV=1
MSNKVLLTKEVYFSAAHKLNNYKGKCASLHGHTYKLQITVSGSIKQSGMVVDFNEIHKIIENTVTCKLDHSYLNDFFKQPTAENMVIWIWNQIANACKGLEITLEEIKLWETPTSFASYRGEKYG

SEQ ID NO: 18935 - protein, 134 aa, unidentified; identical to SEQ ID NO: 18878
  source 1..134: note = Taylorbacteria bacterium
  REGION 1..134: note = tr|A0A1G2NA78|A0A1G2NA78_9BACT 6-carboxy-5,6,7,8-tetrahydropterin synthase OS=Candidatus Taylorbacteria bacterium RIFCSPLOWO2_01_FULL_45_15b; OX = 1802319 GN=A2928_0066 5 PE=3 SV=1

SEQ ID NO: 18936 - protein, 137 aa, unidentified
  source 1..137: note = Tectomicrobia bacterium
  REGION 1..137: note = tr|A0A1F7TR65|A0A1F7TR65_9BACT 6-pyruvoyl tetrahydrobiopterin synthase OS=Candidatus Tectomicrobia bacterium RIFCSPLOWO2_12_FULL_69_37 OX=1802343; GN = A3J27_15510 PE=4SV=1
MIEITRREEFCAAHRLFNPAWSAERNEALYGLCANPHYHGHNYAVEVTLRGPVDPETGMVFDLAQLKGLMRRQVVEPLDHRNLNEDAAPYLKGRIPTAENIALAIWEHLAEHLPPGLLHRVRLFENERNFVDYLGEG

SEQ ID NO: 18937 - protein, 137 aa, unidentified; identical to SEQ ID NO: 18936
  source 1..137: note = Tectomicrobia bacterium
  REGION 1..137: note = tr|A0A1F7T352|A0A1F7T352_9BACT 6-pyruvoyl tetrahydrobiopterin synthase OS=Candidatus Tectomicrobia bacterium RIFCSPLOWO2_02_FULL_70_19 OX=1802342; GN = A3I72_02245 PE=4SV=1

SEQ ID NO: 18938 - protein, 126 aa, unidentified
  source 1..126: note = Tenderia electrophaga
  REGION 1..126: note = tr|A0A0S2T9K1|A0A0S2T9K1_9GAMM 6-carboxy-5,6,7,8-tetrahydropterin synthase OS=Candidatus Tenderia electrophaga OX=1748243 GN=Tel_01230 PE=3 SV=1
MSARYTLKIVTDFAAAHSLRQYPGDCANLHGHNWQVEAEVTATALNEVGMGMDFKQIRQATKAICERLDHTYLNELSPFDEINPTAENIAAYIYHQLAERLNGDSARVSAITIWETERACVRYTEE

SEQ ID NO: 18939 - protein, 118 aa, unidentified
  source 1..118: note = Terasakiella magnetica
  REGION 1..118: note = tr|A0A1C3RME8|A0A1C3RME8_9RHIZ 6-carboxy-5,6,7,8-tetrahydropterin synthase OS=Candidatus Terasakiella magnetica OX=1867952 GN=MTBPR1_90126 PE=3 SV=1
MFTISKQFHFSASHQLHGLADDHPCSRLHGHNYICEVVLQSDTLNSVGFVRDYRELSDLKNYIDDELDHRHLNDVLGENNTTAELMAQHLYNWAHARWSEVVAVRISETPKTWAEYRP

SEQ ID NO: 18940 - protein, 115 aa, unidentified
  source 1..115: note = Termititenax aidoneus
  REGION 1..115: note = tr|A0A388TE35|A0A388TE35_9BACT 6-carboxy-5,6,7,8-tetrahydropterin synthase OS=Candidatus Termititenax aidoneus OX=2218524 GN=queD PE=3 SV=1
MFELTVESSFSGAHQLIKSNSPCENLHGHNWRVALTVCGSEQEPDVGWVIDFKKLKEALNKELAKFDHKYLNEVLPVSPTAENIAKQIYRDLAASLPVCKVTVWETEKSSVSYSE

SEQ ID NO: 18941 - protein, 115 aa, unidentified
  source 1..115: note = Termititenax persephonae
  REGION 1..115: note = tr|A0A388TIM8|A0A388TIM8_9BACT 6-carboxy-5,6,7,8-tetrahydropterin synthase OS=Candidatus Termititenax persephonae OX=2218525 GN=queD PE=3 SV=1
MFELTVESYFSGAHQLSQSRSPCENLHGHNWRVALTVRGAEQDPEVGWLIDFKVLKKALQDELAKFDHQYLNEVLAVSPTAENIAKQIYADLKKSLPVYQVTVWETEKASVSYWE

SEQ ID NO: 18942 - protein, 135 aa, unidentified
  source 1..135: note = Thermochlorobacter aerophilum
  REGION 1..135: note = tr|A0A395LY23|A0A395LY23_9BACT Uncharacterized protein OS=Candidatus Thermochlorobacter aerophilum; OX = 1868324 GN=D0433_10970 PE=4 SV=1
MLPVRTELCLKFEFCASHSLSVREVPHEHLWRVGVHLAGETRAGMILNLPDVRRAFEDVLAPLRNTFLNENTYLSPEAQAAPTCETLSAFLFDAFNKRLATDFLSANPTVQLVSVEVAICEPDGFEWGSVKRTYA

SEQ ID NO: 18943 - protein, 149 aa, unidentified
  source 1..149: note = Thermochlorobacter aerophilum
  REGION 1..149: note = tr|A0A395M2E1|A0A395M2E1_9BACT 6-carboxytetrahydropterin synthase OS=Candidatus Thermochlorobacter aerophilum OX=1868324 GN=D0433_07655; PE = 4 SV=1
MNKVLEKPRKVYVTRKVHFNAAHRLFNPTFSDEKNCQIYDVCNNFYGHGHNYELEVTLSGIVDKETGYLFDLKVLKKILEEEILSKVDHKHLNFDVEMFRDTVPTAEVIAVVFWEVLSQKLKTMNLKGVDLYEIRVFESERNIATYRGE

SEQ ID NO: 18944 - protein, 143 aa, unidentified
  source 1..143: note = Thermochlorobacteriaceae bacterium
  REGION 1..143: note = tr|A0A081SG09|A0A081SG09_9BACT Uncharacterized protein OS=Candidatus Thermochlorobacteriaceae bacterium GBChlB OX=1519464 GN=HY22_08795 PE=4 SV=1
MQRFFETNSLFVKTELFLRFEFLASHSLSVREEPHLHLWRVVVALGGEPQNGMIISLPDLRAAFAEILAPLEHTFLNDNCLLDADAQRAPTCETLGAFFFSTFSDVLQRQFAAQNPTVALRSVEVAICEPTGFEWGSAKLSKE

SEQ ID NO: 18945 - protein, 149 aa, unidentified
  source 1..149: note = Thermochlorobacteriaceae bacterium
  REGION 1..149: note = tr|A0A081SIZ9|A0A081SIZ9_9BACT 6-pyruvoyl tetrahydrobiopterin synthase OS=Candidatus Thermochlorobacteriaceae bacterium GBChlB OX=1519464; GN = HY22_01620 PE=4 SV=1
MNQILEKPRKVYVTRKVHFNAAHRLFNPTFTDEQNCDVYDICNNFYGHGHNYDLEVTLAGIVNKDTGYLFDLKILKKLLEEEILSKVDHKHLNFDVEMFKDTVPTAEVIAVVFWDVIDRKLKTLNLEGVELYEVRVFESERNFVVYRGE

SEQ ID NO: 18946 - protein, 124 aa, unidentified
  source 1..124: note = Thermokryptus mobilis
  REGION 1..124: note = tr|A0A0S4MXW7|A0A0S4MXW7_9BACT 6-carboxy-5,6,7,8-tetrahydropterin synthase OS=Candidatus Thermokryptus mobilis OX=1643428 GN=JGI1_00573 PE=3 SV=1
MFKITVQKNFSASHIIRGYPGECGRLHGHNWKVKVVVKTEKLDRYGMAIDFKEISEILNDIIEKVDHYHLNDIPPFDKEQPTAENIAKFFYDEVKQRLSGREGVEIDFVEIWETEKYSAIYQEL

SEQ ID NO: 18947 - protein, 134 aa, unidentified
  source 1..134: note = Thiodiazotropha endoloripes
  REGION 1..134: note = tr|A0A1E2UP44|A0A1E2UP44_9GAMM 6-carboxy-5,6,7,8-tetrahydropterin synthase OS=Candidatus Thiodiazotropha endoloripes OX=1818881 GN=A3196_07035 PE=3; SV = 1
MYTVTKEIHFCYGHRLLNHKGKCRHLHGHNATAVIHLESTQLDELGMVCDFSEIGDYVKKWVNQNLDHNMLLHSDDPVLPLLQEAGESVYVMPNNPTAENIARLIFDYVEAGGYPVVQVSLHETDSALASYRKP

SEQ ID NO: 18948 - protein, 134 aa, unidentified
  source 1..134: note = Thiodictyon syntrophicum
  REGION 1..134: note = tr|A0A2K8UI13|A0A2K8UI13_9GAMM Uncharacterized protein OS=Candidatus Thiodictyon syntrophicum OX=1166950; GN = THSYN_30335 PE=4 SV=1
MYSLCVRDHVMIAHSLRGEVFGPAQRLHGATYVVDLELRRPELDHDNLVVDIGLASQALRAVLATFDYRNLDEHPDLRGQNTTTEFMARQIFEGLVARIRAGELGDAARGLGSLRVVLRESHLAWAAYEAELPV

SEQ ID NO: 18949 - protein, 364 aa, unidentified
  source 1..364: note = Thiodictyon syntrophicum
  REGION 1..364: note = tr|A0A2K8U3R0|A0A2K8U3R0_9GAMM 6-pyruvoyl tetrahydropterin synthase OS=Candidatus Thiodictyon syntrophicum OX=1166950 GN=THSYN_01050 PE=4 SV=1
MDDRVFHLAAAPFEAARRVAILPAGHRARRLHGHGFRARVRAALPAHWAPFPGGETVALGDALRACVADLDYRDLNEHLAIPTDENLARWIRARLGVPGVASVGIRSTRDQGADLDALDHAHLWRRFRFEAAHCLPRVPAGHPCGRMHGHGFEVILHADQDLAGQDMGLDFDHLGSVWAPLQAELHLGCLNDLAGLENPTSELLAHWLWQRLKPALPALSWVSVYETVTAGCHYDGAHYRIWKEQRFEAALRLTAAPAADPRRRLHGHSYLLRLHLSAPLDQVLGWTVDYGDVKALFKPVYDRLDHHRLDELPELAAADGAGLVHWIRRHCTAALPALDRIDLYETPGCGVSLCWGDLGPALPS

SEQ ID NO: 18950 - protein, 123 aa, unidentified
  source 1..123: note = Thioglobus autotrophicus
  REGION 1..123: note = tr|A0A0M3TTZ4|A0A0M3TTZ4_9GAMM 6-carboxy-5,6,7,8-tetrahydropterin synthase OS=Candidatus Thioglobus autotrophicus OX=1705394 GN=SP60_01530 PE=3 SV=1
MFVLKIVTDFASAHSLRNYPGDCSRLHGHNWQVEVLVASKVLDDVGMAIDFREIKQQTKVVVKRLDHQYLNDVAPFDELNPTAENIAKYFYEEVGQLINNQDVRVKEVTIWETLRASVTYSED

SEQ ID NO: 18951 - protein, 123 aa, unidentified
  source 1..123: note = Thioglobus sp.
  REGION 1..123: note = tr|A0A432TSW2|A0A432TSW2_9GAMM 6-carboxy-5,6,7,8-tetrahydropterin synthase OS=Candidatus Thioglobus sp. OX=2026721 GN=queD PE=3 SV=1
MFVLKIVTDFASAHSLRNYPGNCSRLHGHNWQVEVSVESEVLDEIGVAIDFREIKKQTKEVVNRLDHQYLNEIPPFDELNPTAENIAKYFYEEVGQLINNKDVHVSEVIIWETPRASVAYSEK

SEQ ID NO: 18952 - protein, 120 aa, unidentified
  source 1..120: note = Thiomargarita nelsonii
  REGION 1..120: note = tr|A0A0A6P5H1|A0A0A6P5H1_9GAMM 6-carboxy-5,6,7,8-tetrahydropterin synthase OS=Candidatus Thiomargarita nelsonii OX=1003181 GN=PN36_04740 PE=3 SV=1
MEIYKKFSIEAAHHLPNVPADHKCNRLHGHSFQVTIHVCGEIGAQTGWVIDFADIKKAFAPLYEQLDHHYLNEIEGLENPTSENMARWIWLRLKPNLPSLCQITIQETCTSACVFRGEGF

SEQ ID NO: 18953 - protein, 120 aa, unidentified
  source 1..120: note = Thiomargarita nelsonii
  REGION 1..120: note = tr|A0A0A6NYH3|A0A0A6NYH3_9GAMM 6-carboxy-5,6,7,8-tetrahydropterin synthase OS=Candidatus Thiomargarita nelsonii OX=1003181 GN=THIOM_002926 PE=3 SV=1
MEIYKKFSIEAAHRLPNVPADHKCNRLHGHSFQVTIHVCGEIGAQTGWVIDFADIKKAFAPLYEQLDHHYLNEIEGLENPTSENMARWIWLRLKPKLPCLCQITIQETCTSACVFRGEAF

SEQ ID NO: 18954 - protein, 118 aa, unidentified
  source 1..118: note = Tokpelaia hoelldoblerii
  REGION 1..118: note = tr|A0A1U9JSK4|A0A1U9JSK4_9RHIZ 6-carboxy-5,6,7,8-tetrahydropterin synthase OS=Candidatus Tokpelaia hoelldoblerii OX=1902579 GN=queD PE=3 SV=1
MFRITKEFHFSASHQLAALPASHPCARLHGHNYRVVVELAATALDTHGFVRDYHDLAIFKEHIDTHFDHRHLNDVLHSDCPTAEQLAKYFYDWCKERLPEIAAVRVSETPKTWAEYRP

SEQ ID NO: 18955 - protein, 272 aa, unidentified
  source 1..272: note = Viridilinea mediisalina
  REGION 1..272: note = tr|A0A2A6RGA0|A0A2A6RGA0_9CHLR 6-pyruvoyl tetrahydropterin synthase OS=Candidatus Viridilinea mediisalina OX=2024553 GN=CJ255_16425 PE=4 SV=1
MLTATRRFEFSAAHRYWRDDWSQAENQRVFGKCISPYGHGHNYTLDVTITGTLDPRTGMVMNMTELKALVNEVLEEFDHKHLNEDTPYFKDQLPTTENLVRVLWQLIAAHLPTVARLAHLRIYEQPDLWADYDGAEETTFARAYSFAAAHRLHAPALSAEENRAVYGKCNNPNGHGHNYTLEVSVTGPHDPATGMVIDLEAMDRSVRAVLDQLDFCHLDHEVAAFADKPSTAENIVVYLWDELAPRFEGRLSHLKLWETRKNVFTYTGPHSV

SEQ ID NO: 18956 - protein, 272 aa, unidentified
  source 1..272: note = Viridilinea halotolerans
  REGION 1..272: note = tr|A0A426U4V7|A0A426U4V7_9CHLR 6-pyruvoyl tetrahydropterin synthase OS=Candidatus Viridilinea halotolerans OX=2491704 GN=EI684_05865 PE=4 SV=1
MLTATRRFEFSAAHRYWRDDWSHAENERVFGKCISPYGHGHNYRLEVTITGTLDAATGMVMNMTDLKALVNTVLEEFDHKHLNEDTPYFKEQMPTTENLVRVLWQLIAARLPTVARLAHLRLYEQSDLWADYDGADETIFARAYTFASAHRLHAPSLSDAENRAIYGKCNNPNGHGHNYTLEVSIAGTVDAATGMVIDLEALDRTVRSVLDQLDFHHLDRELAAFADKPSTAENIVVYLWGELAPRFEGRLCHLKLWETRNNTFTYSGPHAA

SEQ ID NO: 18957 - protein, 125 aa, unidentified
  source 1..125: note = Wallbacteria bacterium
  REGION 1..125: note = tr|A0A352M730|A0A352M730_9BACT 6-carboxy-5,6,7,8-tetrahydropterin synthase OS=Candidatus Wallbacteria bacterium OX=2053640 GN=queD PE=3 SV=1
MYEISAKFSISSAHFLSDYEGKCRSLHGHNWKITVYLEGAELDNLGMLVDFNVLKKYFKIIEGELDHRSLNEHEYFSRKNPTAENISEYIFNRMAALLEADNIDSAEVSKVSVYETENCEAVYYK

SEQ ID NO: 18958 - protein, 125 aa, unidentified; identical to SEQ ID NO: 18957
  source 1..125: note = Wallbacteria bacterium
  REGION 1..125: note = tr|A0A1F7WJ54|A0A1F7WJ54_9BACT 6-carboxy-5,6,7,8-tetrahydropterin synthase OS=Candidatus Wallbacteria bacterium GWC2_49_35 OX=1817813; GN = A2008_13845 PE=3 SV=1

SEQ ID NO: 18959 - protein, 121 aa, unidentified
  source 1..121: note = Woesebacteria bacterium
  REGION 1..121: note = tr|A0A2H0BJE8|A0A2H0BJE8_9BACT 6-carboxy-5,6,7,8-tetrahydropterin synthase OS=Candidatus Woesebacteria bacterium CG22_combo_CG10-13_8_21_14_all_39_10 OX=1975059 GN=q ueD; PE = 3 SV=1
MLIAKEFTFDAAHKLLNYDGPCANLHGHTYKLQIVLSGSVQKNGMVIDFVDFKKIVTERVISKLDHKFINKIIKQSTAENIAIWIWNQLEKNLPIYEIRLWETPTSFVMYRGPDQEKETGR

SEQ ID NO: 18960 - protein, 151 aa, unidentified
  source 1..151: note = Woesebacteria bacterium
  REGION 1..151: note = tr|A0A1F8C1S4|A0A1F8C1S4_9BACT Uncharacterized protein OS=Candidatus Woesebacteria bacterium RIFCSPLOWO2_01_FULL_44_14 OX=1802525 GN=A2975_04425 PE=4; SV = 1
MKVTKQIEWDMGHRVTNHHSKCQNIHGHRYRAEICMEGKLVDIEGISEEGMVIDFGDIKKIAMEHVHDVLDHGFMVWRKDKEVMKFFEDNPKQKHIIVDFVPTSENIAAWIFKELDGRFIDKFKTDLRLCWVKLWETPTSVAICTREDLEK

SEQ ID NO: 18961 - protein, 125 aa, unidentified
  source 1..125: note = Wolfebacteria bacterium
  REGION 1..125: note = tr|A0A2A4SK90|A0A2A4SK90_9BACT 6-carboxy-5,6,7,8-tetrahydropterin synthase OS=Candidatus Wolfebacteria bacterium OX=2030812 GN=queD PE=3 SV=1
MPKKVSVTKFYTFEAAHQLVNHEGKCKNEHGHSYKLEVTVTGTPKQADGSPDEGMIIDFDEMSKIVKKVIDPFDHHNINKAVDYPTTVENIANDIFDRLYKTDLPVSKVRLWETATGSATVEYVE

SEQ ID NO: 18962 - protein, 121 aa, unidentified
  source 1..121: note = Yonathbacteria bacterium
  REGION 1..121: note = tr|A0A1G2S3I5|A0A1G2S3I5_9BACT 6-carboxy-5,6,7,8-tetrahydropterin synthase OS=Candidatus Yonathbacteria bacterium RIFCSPHIGHO2_01_FULL_51_10; OX = 1802723 GN=A2675_0313 0 PE=3 SV=1
MRTTITKSFTFEAAHLLPDHPGKCAKLHGHSYRLEVSVEGPVQTTGPEAGMVMDFTRLSDAVEREIVSVWDHVYLNDVVPFVPTAELIAQEAFRRLANAGIPVSRVELWETPKARAVVEED

SEQ ID NO: 18963 - protein, 120 aa, unidentified
  source 1..120: note = Yonathbacteria bacterium
  REGION 1..120: note = tr|A0A1G2SJM0|A0A1G2SJM0_9BACT 6-carboxy-5,6,7,8-tetrahydropterin synthase OS=Candidatus Yonathbacteria bacterium RIFOXYD1_FULL_52_36 OX=1802730; GN = A2591_00645 PE=3SV=1
MKTSVVKSFTFEAAHALPNHDGKCKNLHGHSYRLEVFVEGPIQTSGPGEGMVMDFARLSEVVEREIVIQWDHQYLNDVVTFVTTAELLAEEVFRRLASAGISVSRIELWETPKARAVVER

SEQ ID NO: 18964 - protein, 147 aa, unidentified
  source 1..147: note = Candidimonas bauzanensis
  REGION 1..147: note = tr|A0A1M5ZIS2|A0A1M5ZIS2_9BURK 6-carboxy-5,6,7,8-tetrahydropterin synthase; OS = Candidimonas bauzanensis OX=658167; GN = SAMN04488135_11556 PE=3 SV=1
MTSITRKLEFDAGHRIPDHRSQCRNLHGHRYVLEITLEGEVIAAPGQSDNGMVMDFSEIKSIARKHIIDQWDHAFLVFKGDTAVVDFLESLENHKTVIIDSIPTAENLAHLAFDTLAPHYARQFGGSLRLSRIRLYETPNCWVDVLA

SEQ ID NO: 18965 - protein, 147 aa, Candidimonas sp.
  REGION 1..147: note = tr|A0A432DKA8|A0A432DKA8_9BURK 6-carboxy-5,6,7,8-tetrahydropterin synthase; OS = Candidimonas sp. SYP-B2681 OX=2497686 GN=queD PE=3 SV=1
MTSITRKLEFDAGHRIPDHRSQCRNLHGHRYVLEITLEGEVIAAPGESDNGMVMDFSEIKAIAKEHIVDRWDHAFLVFRGDTAVVDFLESLGNHKTVIVDSIPTAENLAHLAFDTLAPEYAHKFGGNLHLSRVRLYETPNCWVDVVA

SEQ ID NO: 18966 - protein, 150 aa, Candidimonas sp.
  REGION 1..150: note = tr|A0A522PDX4|A0A522PDX4_9BURK 6-carboxytetrahydropterin synthase QueD OS=Candidimonas sp. OX=1912597 GN=queD PE=4 SV=1
MITVTRRLEFDAGHRIPDHHSQCRNLHGHRYVIEITLEGEVLDAPGQSDNGMVMDFSAIKSIAKEHVVDPWDHAFLVYKHDTPVVNFLRELEGHKTVLVDKVPTAENLAQLAFNLLEPHFIHRYGVFLKLTRIRLYETPNCWVDANKSTA

SEQ ID NO: 18967 - protein, 150 aa, Capnocytophaga canimorsus
  REGION 1..150: note = tr|F9YRN7|F9YRN7_CAPCC Queuosine biosynthesis protein queD OS=Capnocytophaga canimorsus (strain 5); OX = 860228 GN=Ccan_03940 PE=4 SV=1
MSTIRITKKFEFEAGHALYGYDGKCKNLHGHSYKLHVTVVGKPINDPNNVKYGMVIDFGDLKRIVKQEIIDEFDHAMIFNANSPHLELANELKAKGHHIILVDYQPTSENLVADFANRIKKYLPENVTLFSLRLQETESSYAEWFASDNL

SEQ ID NO: 18968 - protein, 150 aa, Capnocytophaga canimorsus
  REGION 1..150: note = tr|A0A0B7H6A9|A0A0B7H6A9_9FLAO 6-carboxytetrahydropterin synthase OS=Capnocytophaga canimorsus OX=28188 GN=queD PE=4 SV=1
MSTIRITKKFEFEAGHALYGYDGKCKNLHGHSYKLHVTVVGKPINDPNNVKYGMVIDFGDLKRIVKQEIIDEFDHAMIFNANSPHLELANELKAKGHYIILVDYQPTSENLVADFANRIKRYLPENVTLFSLRLQETESSYAEWFASDNL

SEQ ID NO: 18969 - protein, 150 aa, unidentified
  source 1..150: note = Capnocytophaga canis
  REGION 1..150: note = tr|A0A0B7ID79|A0A0B7ID79_9FLAO 6-carboxytetrahydropterin synthase OS=Capnocytophaga canis; OX = 1848903 GN=CCAND38_500021 PE=4 SV=1
MAKIRITKKFDFEAGHALYGYDGKCKNLHGHSYKLHVTVIGEPITNPSDVKFGMVIDFGDLKKIVKREIIDVFDHAMVFNGNSPHLTLAQELIDKEHHIITVDYQPTSENLVVDFAERIKKHLPSNVTLFSLRLQETESSYAEWFANDNL

SEQ ID NO: 18970 - protein, 150 aa, Capnocytophaga cynodegmi
  REGION 1..150: note = tr|A0A0B7HHT3|A0A0B7HHT3_9FLAO Queuosine biosynthesis protein queD OS=Capnocytophaga cynodegmi; OX = 28189 GN=CCYN2B_50156 PE=4 SV=1
MANIRITKKFEFEAGHALYGYDGKCKNLHGHSYKLHVTVVGKPINDPNNVKYGMVIDFGDLKRIVKQEIIDEFDHAMIFNANSPHLELANELKAKGHHIILVDYQPTSENLVADFANRIKKYLPENVALFSLRLQETESSYAEWFASDNL

SEQ ID NO: 18971 - protein, 150 aa, Capnocytophaga cynodegmi
  REGION 1..150: note = tr|A0A0B7HF25|A0A0B7HF25_9FLAO 6-carboxytetrahydropterin synthase QueD OS=Capnocytophaga cynodegmi OX=28189 GN=queD PE=4 SV=1
MANIRITKKFEFEAGHALYGYDGKCKNLHGHSYKLHVTVVGKPINDPNNVKYGMVIDFGDLKRIVKQEIIDEFDHAMIFNANSPHLELANELKAKGHHIILVDYQPTSENLVADFANRIKKYLPENVTLFSLRLQETESSYAEWFASDNL

SEQ ID NO: 18972 - protein, 150 aa, Capnocytophaga gingivalis
  REGION 1..150: note = tr|C2M5I3|C2M5I3_CAPGI Putative queuosine biosynthesis protein QueD OS=Capnocytophaga gingivalis; OX = 553178 GN=CAPGI0001_2057 PE=4 SV=1
MTKIRITKKFEFEAGHALYGYDGKCKNIHGHSYKLWVTVVGSPIEDSSHVKNGMVIDFGDIKEIVNEHIIKEADHTIFFNGNSPHRALAEKLQGEGHRIVLLPYQPTSEMLIADFAQRLQQHLPENISLYSLRLQETESSFAEWFASDNQ

SEQ ID NO: 18973 - protein, 150 aa, Capnocytophaga gingivalis
  REGION 1..150: note = tr|A0A250FLL1|A0A250FLL1_9FLAO 6-carboxytetrahydropterin synthase QueD OS=Capnocytophaga gingivalis OX=1017 GN=CGC50_01410 PE=4 SV=1
MTKIRITKKFEFEAGHALYGYDGKCKNIHGHSYKLWVTVIGSPIEDSSHVKNGMVIDFGDIKEIVNEHIIKEADHTIFFNGNSPHRALAEKLQGEGHRIVLLPYQPTSEMLIADFAQRLQQHLPENISLYSLRLQETESSFAEWFSSDNQ

SEQ ID NO: 18974 - protein, 150 aa, Capnocytophaga granulosa
  REGION 1..150: note = tr|A0A381E5M4|A0A381E5M4_9FLAO 6-pyruvoyl tetrahydropterin synthase/QueD family protein; OS = Capnocytophaga granulosa OX=45242 GN=NCTC12948_01901; PE = 4 SV=1
MTKIRITKKFEFEAGHALYGYDGKCKNIHGHSYKLWVTVIGSPIEDASHVKNGMVIDFGDIKEIVNEYIVKEADHTIFFNGNSPHKALAEKLQAEGHKVVLLPYQPTSEMLIVDFAHRLQKHLPAHISLYSLRLQETESSYAEWYASDNL

SEQ ID NO: 18975 - protein, 150 aa, Capnocytophaga haemolytica
  REGION 1..150: note = tr|A0A125S2H4|A0A125S2H4_9FLAO 6-pyruvoyl tetrahydropterin synthase OS=Capnocytophaga haemolytica; OX = 45243 GN=AXF12_02030 PE=4 SV=1
MAKIRITKKFDFEAGHALYGYDGKCKNLHGHSYKLWVTVIGEPIADAENIKCGMVIDFGDLKRIVNDKIIEQFDHAMVFNAQSPHRVLADELQAKGHRIIKVDYQPTSENLVVDFAQRIAEELPSHITLFSVRLQETDSSYAEWYARDNE

SEQ ID NO: 18976 - protein, 361 aa, Capnocytophaga leadbetteri
  REGION 1..361: note = tr|A0A250FD23|A0A250FD23_9FLAO Beta-phosphoglucomutase OS=Capnocytophaga leadbetteri; OX = 327575 GN=pgmB PE=4 SV=1
MIRITKKFDFEAGHALYGYDGKCKNLHGHSYKLLVTVIGTPINDPHNVKNGMVIDFGDLKRIVQEQIITPFDHAMVFNSNSPHQELAESLRTKGHNIISVPYQPTSENLVIDFAQRIQQQLPPNVQLYSIRLCETESSYAEWFASDNPQPVCALPDADGYIFDLDGVLVDTAKYHYLAWKEIAKEFGFELTPEHNEQLKGIGREVSLHKILSWAGKSLSEEIFAQTALRKNESYLQKISYIDHKELLPGVLPLLQQLKSKGKKIALGSASRNARLVLERTGILPYFDAIVDGTMVSKAKPDPEVFLKAAEALHLSADRCCVLEDAPAGIQAAKAAGMTAIGVGSPEILKGADKVISSLANG

SEQ ID NO: 18977 - protein, 361 aa, Capnocytophaga leadbetteri
  REGION 1..361: note = tr|A0A2T5XVF2|A0A2T5XVF2_9FLAO Beta-phosphoglucomutase/queuosine biosynthesis protein QueD,TIGR03367 OS=Capnocytophaga leadbetteri OX=327575; GN = C8P65_10440 PE=4 SV=1
MIRITKKFDFEAGHALYGYDGKCKNLHGHSYKLLVTVIGTPINDPHNVKNGMVIDFGDLKHIVQEQIITPFDHAMVFNSNSPHQELAESLRAKGHNIISVPYQPTSENLVIDFAQRIQQQLPPNVQLHSIRLCETESSYAEWFASDNPQPVCTLPDVDGYIFDLDGVLVDTAKYHYLAWKEIAKEFGFELTPEHNEQLKGIGREVSLHKILSWAGKSLSEEVFAQTALRKNESYLQKISHIDHKELLPGVLPLLQQLKSKGKKIALGSASRNARLVLERTGILPYFDAIVDGTMVSKAKPDPEVFLKAAEALHLNADRCCVLEDAPAGIQAAKAAGMTAIGVGSPEILKGADKVINSLANG

SEQ ID NO: 18978 - protein, 150 aa, Capnocytophaga ochracea
  REGION 1..150: note = tr|E4MT03|E4MT03_CAPOC Putative queuosine biosynthesis protein QueD OS=Capnocytophaga ochracea F0287; OX = 873517 GN=queD PE=4 SV=1
MIRITKKFDFEAGHALYGYDGKCKNLHGHSYKLYVTVIGEPITDPHNVKNGMVIDFGDLKRIVQEQIIEAFDHAMVFNEHSPHKALAEELRAKGHRIITVPYQPTSENLVTDFARRIAYQLPAGVELFSVRLCETESSYAEWFASDNSAY

SEQ ID NO: 18979 - protein, 147 aa, Capnocytophaga ochracea
  REGION 1..147: note = tr|C7M7L8|C7M7L8_CAPOD 6-carboxy-5,6,7,8-tetrahydropterin synthase; OS = Capnocytophaga ochracea (strain ATCC 27872 / DSM 7271 / JCM 12966 / NCTC 12371 / VPI 2845) OX=5 21097 GN=Coch_0617; PE = 3 SV=1
MIRITKKFDFEAGHALYGYDGKCKNLHGHSYKLYVTVIGEPITDPHNVKNGMVIDFGDLKRIVQEQIIEAFDHAMVFNEHSPHKALAEELRTKGHRIITVPYQPTSENLVTDFARRIAYQLPAGVELFSVRLCETESSYAEWFASDN

SEQ ID NO: 18980 - protein, 148 aa, Capnocytophaga sp.
  REGION 1..148: note = tr|L1P8G9|L1P8G9_9FLAO 6-carboxy-5,6,7,8-tetrahydropterin synthase; OS = Capnocytophaga sp. oral taxon 326 str. F0382 OX=1035193; GN = HMPREF9073_02884 PE=3 SV=1
MIRITKKFDFEAGHALFGYDGKCKNLHGHSYKLYVTVIGEPINNPNNVKNGMVIDFGDLKRIVQEQIIDAFDHAMVFNELSPHKALADELRAKGHRIITVPYQPTSENLVTDFAQRIAYQLPAGVALFSVRLCETESSYAEWFASDNK

SEQ ID NO: 18981 - protein, 150 aa, Capnocytophaga sp.
  REGION 1..150: note = tr|U2AUF1|U2AUF1_9FLAO Putative queuosine biosynthesis protein QueD OS=Capnocytophaga sp. oral taxon 863 str. F0517 OX=1227266 GN=HMPREF1551_01427 PE=4 SV=1
MTKIRITKKFEFEAGHALYGYDGKCKNIHGHSYKLWVTVIGSPIEDASHVKNGMVIDFGDIKELVNEYIIKEADHTIFFNGNSPHKALAEKLQAEGHRVVPLPYQPTSEMLIVDFAQRLQKHLPMHIALHSLRLQETESSYAEWYASDNL

SEQ ID NO: 18982 - protein, 150 aa, Capnocytophaga sputigena
  REGION 1..150: note = tr|A0A2A3N7T9|A0A2A3N7T9_CAPSP 6-carboxytetrahydropterin synthase QueD OS=Capnocytophaga sputigena OX=1019 GN=CDC50_04445 PE=4 SV=1
MIRITKKFDFEAGHALFGYDGKCKNLHGHSYKLYVTVIGEPINNPHNVKNGMVIDFGDLKRIVQEQIIDAFDHAMVFNELSPHKALADELRAKGHRIITVPYQPTSENLVTDFAQRIAYQLPAGVTLFSIRLCETESSYAEWFASDNSAY

SEQ ID NO: 18983 - protein, 150 aa, unidentified
  source 1..150: note = Capnocytophaga stomatis
  REGION 1..150: note = tr|A0A250G324|A0A250G324_9FLAO 6-carboxytetrahydropterin synthase QueD OS=Capnocytophaga stomatis OX=1848904 GN=queD PE=4 SV=1
MTKIRITKKFEFEAGHALYGYDGKCKNLHGHSYKLHVTVIGTPIDNPNDVKHGMVIDFGDLKRIVKREIIDEFDHAMIFNANSPHLELANELKAKGHHIILVDYQPTSENLVVDFAERIKKYLPENVALFSLRLQETESSYAEWFASDNP

SEQ ID NO: 18984 - protein, 122 aa, unidentified
  source 1..122: note = Caproiciproducens galactitolivorans
  REGION 1..122: note = tr|A0A4Z0YII0|A0A4Z0YII0_9FIRM 6-pyruvoyl tetrahydropterin synthase OS=Caproiciproducens galactitolivorans OX=642589 GN=CAGA_07960 PE=4 SV=1
MWNKAYKYTFKLHISHNPVSVSKQSAHFHTIKIILYLQNFNNKFSKYDVIEKIIQNYFKIYEGAYLNETASFYELDPTIENIGRVFYSHLKSIVRENGFELLTLEISETPTRIFSISEKEIF

SEQ ID NO: 18985 - protein, 159 aa, unidentified
  source 1..159: note = Caproiciproducens galactitolivorans
  REGION 1..159: note = tr|A0A4Z0YKV9|A0A4Z0YKV9_9FIRM 6-pyruvoyl tetrahydropterin synthase OS=Caproiciproducens galactitolivorans OX=642589 GN=CAGA_07920 PE=4 SV=1
MGFEQYKFKFYLNANHAIQINGRTGEVHPHTWEISIIAVKRNDRFVRFNDMEAVIDAMFDKYQDKLINEVEPFNEINPTLENICEVFRDKIDRILKNEGWELKRIEVSETPARSYVMTYADDTSSLEKPALSGLDKDAQEQYITNIINEYLHPENGALS

SEQ ID NO: 18986 - protein, 270 aa, unidentified
  source 1..270: note = Capsulimonas corticalis
  REGION 1..270: note = tr|A0A402CP07|A0A402CP07_9BACT 6-pyruvoyl tetrahydropterin synthase OS=Capsulimonas corticalis; OX = 2219043 GN=CCAX7_02190 PE=4 SV=1
MTIALCRRARFSAGDTGSLTGRAGGHDYSCELAVAGEIDPDSGMVVNIRDIDAVMKAEIVSWLDGKILDHDVPALRDTPATPENLTRFIWERCTGKIPPQGRLVRVTLWESDERWAMLSSVSRRKDEPLLTATRMYDFSASHRLHSQKLSEEENAEIFGKCNWENGHGHNYEIEVTLSGEPDSRTGEIAPMALLDQIVEEEVLRPFDHKHLNYDVPEFSGLNPTSENVTKVIWEKLANRLANAPLGPARLYRVLVRETPRNVFKYYGEEP

SEQ ID NO: 18987 - protein, 121 aa, unidentified
  source 1..121: note = Capsulimonas corticalis
  REGION 1..121: note = tr|A0A402CXI6|A0A402CXI6_9BACT 6-carboxy-5,6,7,8-tetrahydropterin synthase; OS = Capsulimonas corticalis OX=2219043 GN=CCAX7_31600 PE=3; SV = 1
MFEIRVEKTIACAHRLFDYNGPCEELHGHNYRIEVAYAGTELDRFGMLIDFTDVKRVFNGVLETLDHKYLNDLPAFKDLSPSAENIAKHVYDELKRETFERGTLVSVSVWETPTQVAVYRE

SEQ ID NO: 18988 - protein, 136 aa, Carboxydocella sporoproducens
  REGION 1..136: note = tr|A0A1T4LNP2|A0A1T4LNP2_9FIRM 6-carboxy-5,6,7,8-tetrahydropterin synthase; OS = Carboxydocella sporoproducens DSM 16521 OX=1121270; GN = SAMN02745885_00230 PE=3 SV=1
MFEVAIKESFAAAHLIRNYPGDCARLHGHTWFVEVGIYGEELDDLGMLIDFSKLKQIVRSYLKKLDHQLINDLPEFREGELNPTAENLAFYLYHQINQVIKKEWPDKKIALGWVKVWESPTAWAIYRRGKNENISG

SEQ ID NO: 18989 - protein, 136 aa, Carboxydocella thermautotrophica; identical to SEQ ID NO: 18988
  REGION 1..136: note = tr|A0A2R4N0F9|A0A2R4N0F9_9FIRM 6-carboxy-5,6,7,8-tetrahydropterin synthase; OS = Carboxydocella thermautotrophica OX=178899 GN=CFE_1351; PE = 3 SV=1

SEQ ID NO: 18990 - protein, 120 aa, Carboxydothermus hydrogenoformans
  REGION 1..120: note = tr|Q3ADI6|Q3ADI6_CARHZ 6-carboxy-5,6,7,8-tetrahydropterin synthase; OS = Carboxydothermus hydrogenoformans (strain ATCC BAA-161 / DSM 6008 / Z-2901) OX=246194 GN=CHY_09 51 PE=3 SV=1
MFKISVSTTFDAAHFLKDYDGKCANLHGHTWRVEAEVEGQTTNDLGLLIDFGMIKDYLKDITSRLDHKLLNDVLQVNPTAENIARYIFKELKAKLIVYPEIKLCSVKVWESPNNAATYME

SEQ ID NO: 18991 - protein, 120 aa, Carboxydothermus islandicus
  REGION 1..120: note = tr|A0A1L8D4X2|A0A1L8D4X2_9THEO 6-carboxy-5,6,7,8-tetrahydropterin synthase; OS = Carboxydothermus islandicus OX=661089 GN=ciss_20540; PE = 3 SV=1
MFKISVSTTFDAAHFLKDYDGKCANLHGHTWRVEAEVEGQTTNDLGLLIDFGMIKDYLKDITSRLDHKLLNDVLQDNPTAENIARYIFKELKAKLVVYPEIKLCAVKVWESPNNAATYLE

SEQ ID NO: 18992 - protein, 120 aa, unidentified
  source 1..120: note = Carboxydothermus pertinax
  REGION 1..120: note = tr|A0A1L8CUD2|A0A1L8CUD2_9THEO 6-carboxy-5,6,7,8-tetrahydropterin synthase; OS = Carboxydothermus pertinax OX=870242 GN=cpu_10280 PE=3; SV = 1
MFKISVSTTFDAAHFLKDYDGKCANLHGHTWRVEAEVEGQTTNDLGLLIDFGMIKDYLKEITSRLDHKLLNDVLPVNPTAENIARYIYQELKPKLMVYPEIKLCAIKVWESPNNSATFME

SEQ ID NO: 18993 - protein, 149 aa, unidentified
  source 1..149: note = Carboxylicivirga sp.
  REGION 1..149: note = tr|A0A553GQ94|A0A553GQ94_9BACT 6-carboxytetrahydropterin synthase OS=Carboxylicivirga sp. M1479 OX=2594476 GN=FNN09_05390 PE=4 SV=1
MAKIRLTKEFRFEMAHALWNYDGLCKNLHGHSYILNVTVLGKPIEDESNPKLGMVMDFGDLKCIVNEEIVDKLDHAIVLSKNAPSEQLLALPQMGQRHEIVDYQPTCENMLVDFAERIKKRLPMNIELFSLKLNETATSYAEWYASDNE

SEQ ID NO: 18994 - protein, 133 aa, Castellaniella sp.
  REGION 1..133: note = tr|A0A522TPL9|A0A522TPL9_9BURK 6-carboxytetrahydropterin synthase OS=Castellaniella sp.; OX = 1955812 GN=EPN31_10945 PE=4 SV=1
MYSLTVRDQMMIAHSFTGAAFGPAQNLHGATYVVDVTFGRPALDADGLVVDIGAARSVLGEILVEFNLRNLDDLPDLAGHNTTTEFMARVVFDRVRQAIRSGRLGTGAQGLVRLSVVLHESPFAWAAYEADLQ

SEQ ID NO: 18995 - protein, 136 aa, unidentified
  source 1..136: note = Catalinimonas alkaloidigena
  REGION 1..136: note = tr|A0A1G9NB76|A0A1G9NB76_9BACT 6-pyruvoyltetrahydropterin/6-carboxytetrahydropterin synthase OS=Catalinimonas alkaloidigena OX=1075417; GN = SAMN05421823_108237 PE=4 SV =1
MKVAVYRKEHFNAAHRLHNPAWSEEENQRTFGKCNLPNFHGHNYDLYVRVTGEIDPVTGYVIDLKYLSDLIRQHVTSRFDHRNLNLDVPEFRELNPTAENIAVVIYNLLRPHIDPKHDLNITLYETERNFVEYPVD

SEQ ID NO: 18996 - protein, 138 aa, unidentified
  source 1..138: note = Catalinimonas alkaloidigena
  REGION 1..138: note = tr|A0A1G9GWR0|A0A1G9GWR0_9BACT 6-pyruvoyltetrahydropterin/6-carboxytetrahydropterin synthase OS=Catalinimonas alkaloidigena OX=1075417; GN = SAMN05421823_104239 PE=4 SV =1
MMYVSRKEHFNAAHKLYNPAWSEEKNREVFGPCANTNWHGHNFELIVTVKGEPDPETGFVINLKDLSSVVRREVIDKVDHRNLNMDVDFMQGKMASCEILVIEMWKILAPAIRSIAPQAQLHSLRLYETPRNFVEYFG

SEQ ID NO: 18997 - protein, 125 aa, Catellatospora citrea
  REGION 1..125: note = tr|A0A419XJJ4|A0A419XJJ4_9ACTN 6-carboxy-5,6,7,8-tetrahydropterin synthase; OS = Catellatospora citrea OX=53366 GN=C8E86_2739 PE=3 SV=1
MFTISKTFRFEASHRLAGLPEGHKCARLHGHSYAVTVELDADYLDPPGFVMDFAQLSPLGDYLKIAFDHQHLNDVLTVQPTSENLARLFTEWCVGHLPLAESVSAVTVRVSETTSSWAQYRWRRP

SEQ ID NO: 18998 - protein, 132 aa, Catellatospora citrea
  REGION 1..132: note = tr|A0A419XHS8|A0A419XHS8_9ACTN 6-pyruvoyl-tetrahydropterin synthase OS=Catellatospora citrea OX=53366 GN=C8E86_2119 PE=4 SV=1
MFSVTVRDHMMIAHSFRGEVFGPAQRLHGATFVVDATFKRAELDPDDIVVDIAAASQELNAVVGALNLRNLDDDPAFAGVNTTTEKLAQVIADRLAARVHAGAFGENARGLAGIAVTLHESHIAWASYERPL

SEQ ID NO: 18999 - protein, 295 aa, Catenovulum agarivorans
  REGION 1..295: note = tr|W7QQQ6|W7QQQ6_9ALTE Uncharacterized protein; OS = Catenovulum agarivorans DS-2 OX=1328313 GN=DS2_04110; PE = 4 SV=1
MHLFVNDLTVIDFSYLDAKRGIVGESWIVDVSLIGNLNDQNMVLDFGVVKSQIKRIIDSEFDHKLHIAEDSSALISKNITDDDNLDVVYKTQGLEFIYMSAPPSAYCFVQDQQICIDSVKPLIRATIMRHMPENVKDIQITLRPENIAQEYYHYSHGLKKHDGNCQRIVHGHRSKVTVMVDDEPNRDWQLYWARRWQDIYIGSEEDLDPALLELFTQQHHLSADNYYAFSYAASQGEFRLVCPKSCADVIDRDSTVECLAEFMLEVMQAQKPEQNIAVLAYEGVSKGAIAQSVVG

SEQ ID NO: 19000 - protein, 200 aa, unidentified
  source 1..200: note = Catenovulum maritimum
  REGION 1..200: note = tr|A0A0J8GMS2|A0A0J8GMS2_9ALTE QueD like protein; OS = Catenovulum maritimum OX=1513271 GN=XM47_16045 PE=4 SV=1
MELVVVIMMIILLMVAAVSLKMTQSGAPFPYQKKNALFTEPERAFMLKLEHAVGDQYRIVNRVRLSDLVTVRTGTDKRSEQNAKVKAASKMLDFVLIDRNTLEPIAAIDLVNMESKTGYKTKQDWFVKGALDTVNLPHIRIKLKAGYKSSEIRECLASKIKNQQLSPLNVRKVKPKGLTRPIGNMLTKHINEQADRAAVA

SEQ ID NO: 19001 - protein, 291 aa, unidentified
  source 1..291: note = Catenovulum maritimum
  REGION 1..291: note = tr|A0A0J8JP64|A0A0J8JP64_9ALTE Uncharacterized protein OS=Catenovulum maritimum OX=1513271 GN=XM47_03905; PE = 4 SV=1
MHLFVNDLTVIDFSYLDTARGIVGESWIVDVALIGQLNEQNMVLDFGVVKSQIKRIIDDEFDHKLHIPEDSSALIQKDSKDGQLSVTFKMDSLDLIHMSAPDSAYCFVQSENISIEEVLPLIRSTVMRHMPENVKDIEITLRAENITQEYYHYSHGLKKHDGNCQRIVHGHRSKVTVFKNGQADKDWQSYWQKRWQDIYLGSEEDLNQELSTDFCLQNNVLADNYYGFSYTANQGLFELVCPKAISDLIDRDSTVECLAEFMLEVMQQQEPEAEFKVLAYEGVSKGAIAYS

SEQ ID NO: 19002 - protein, 291 aa, Catenovulum sp.
  REGION 1..291: note = tr|A0A2S0VTX9|A0A2S0VTX9_9ALTE Uncharacterized protein OS=Catenovulum sp. CCB-QB4 OX=2172099; GN = C2869_15060 PE=4 SV=1
MHLFVNDLSVIDFSYLDSQRGIVGESWIVDVILVGNLNEQNMVLDFGLVKSQIKTIIDDEFDHKLHIPEESTGLIANHHDLDSQAISFRLDNGEHIYVSAPASSYCFAPTDKITIESLLPVIKSRLMLDMPSNVKDLIITLRPEKIDSPFYHYSHGLKKHEGNCQRIVHGHRSKIIVKSAGNENTDYQTYWAKRWQDIYIGSESDLDLELAHRYCAQHGLSSDDYYGFSYTASQGDFELVVSKRITDIMDRDTTVECIAEFMLETMQNKYPTETFEVHAYEGVSKGAIAFS

SEQ ID NO: 19003 - protein, 122 aa, unidentified
  source 1..122: note = Caulobacter flavus
  REGION 1..122: note = tr|A0A2N5CNJ3|A0A2N5CNJ3_9CAUL 6-carboxy-5,6,7,8-tetrahydropterin synthase OS=Caulobacter flavus OX=1679497 GN=C1707_25570 PE=3 SV=1
MSEPVFEITKAAHFDAAHYIEQGPGDHRYRRLHGHSFRVEASVKGAMQAAGWVADLESLDVALKAVATELDHGLLNDRPGLESPTLERICLYFAERLKPQFPGLSRVVLSRPTIGESCALSL

SEQ ID NO: 19004 - protein, 121 aa, Caulobacter henricii
  REGION 1..121: note = tr|A0A0P0P1T0|A0A0P0P1T0_9CAUL 6-carboxy-5,6,7,8-tetrahydropterin synthase OS=Caulobacter henricii OX=69395 GN=AQ619_14585 PE=3 SV=1
MMPVFEITKAATFDAAHYIEQGPADHRYRKLHGHSFKVEASVKGQMQDAGWVADLEGLDTALKSVAAELDHGLLNDRPGLESPTLERLCLYFAERLTPAFPGLSRVEISRPTIGERCALSL

SEQ ID NO: 19005 - protein, 122 aa, Caulobacter mirabilis
  REGION 1..122: note = tr|A0A2D2AVC8|A0A2D2AVC8_9CAUL 6-carboxy-5,6,7,8-tetrahydropterin synthase OS=Caulobacter mirabilis OX=69666 GN=CSW64_05570 PE=3 SV=1
MTEPIFEITKTATFDAAHYIEQGPGDHRYRRLHGHSFSVEASVRGPAQPAGWVADLDELDKALKAVAEELDHGLLNDREGLEVPTLERICLYFADRLRPTFPGLSRIVVSRPTIGERCALAL

SEQ ID NO: 19006 - protein, 122 aa, unidentified
  source 1..122: note = Caulobacter radicis
  REGION 1..122: note = tr|A0A2T9JD54|A0A2T9JD54_9CAUL 6-carboxy-5,6,7,8-tetrahydropterin synthase OS=Caulobacter radicis OX=2172650 GN=DDF65_12985 PE=3 SV=1
MSEPVFEITKAAHFDAAHYIEQGPGDHRYRRLHGHSFRVEASVKGSMQAAGWVADLESLDVALKAVAAELDHGLLNDRPGLESPTLERICLYFAERLKPQFPGLSRVVLSRPTIGESCALTL

SEQ ID NO: 19007 - protein, 122 aa, unidentified
  source 1..122: note = Caulobacter radicis
  REGION 1..122: note = tr|A0A2T9JRK3|A0A2T9JRK3_9CAUL 6-carboxy-5,6,7,8-tetrahydropterin synthase OS=Caulobacter radicis OX=2172650 GN=DDF62_19565 PE=3 SV=1
MSEPVFEITKAAHFDAAHYIEQGPGDHRYRRLHGHSFRVEASVKGPMLAAGWVADLESLDVALKAVATELDHGLLNDRPGLESPTLERICLYFAERLKPQFPGLSRVVLSRPTIGESCALTL

SEQ ID NO: 19008 - protein, 121 aa, unidentified
  source 1..121: note = Caulobacter rhizosphaerae
  REGION 1..121: note = tr|A0A561NXG8|A0A561NXG8_9CAUL 6-carboxy-5,6,7,8-tetrahydropterin synthase OS=Caulobacter rhizosphaerae OX=2010972 GN=FHW61_101504 PE=3 SV=1
MKPVFEITKAAHFDAAHYIEQGPADHRYRKLHGHSFKVEASVRGTMQDAGWVADLDSLDGALKAVAAELDHGLLNDRPGLESPTLERICLYFAERLTPQFPGLSRVVISRPTIGESCALAL

SEQ ID NO: 19009 - protein, 172 aa, Caulobacter segnis
  REGION 1..172: note = tr|A0A2W5V4X0|A0A2W5V4X0_9CAUL 6-pyruvoyl tetrahydrobiopterin synthase OS=Caulobacter segnis; OX = 88688 GN=DI526_10685 PE=4 SV=1
MAYRSVKTYGAERGLSCAYRQWAADSHCQLLHGYSLGFSFDFAAEQLDARGWVVDFGKSGFGAIRDWLHYMFDHTLLVAADDPSRLEFERLQRLGLAQVRVVPGVSAEALAAHVFEHAQGLVVSATKGRCWIASVECREHGANAAVFENPDRVLRQVSAEALTLALRDGVAG

SEQ ID NO: 19010 - protein, 169 aa, Caulobacter segnis
  REGION 1..169: note = tr|D5VJE4|D5VJE4_CAUST 6-pyruvoyl tetrahydrobiopterin synthase OS=Caulobacter segnis (strain ATCC 21756 / DSM 7131 / JCM 7823 / NBRC 15250 / LMG 17158 / TK0059) OX=5 09190 GN=Cseg_1880 PE=4 SV=1
MAYRSVKTYGAERGLSCAYRQWAADSHCQLLHGYSLGFVFDFAAEQLDARGWVVDFGKAGFGAIREWLHHMFDHTLLVAADDPSRSEFERLQRLGLAQVRIVPGVSAEALAAHVFEHAQGLVDAATKGRCWVASVECREHGANAAVFENPQGVLRQVSAEALSLALKGL

SEQ ID NO: 19011 - protein, 121 aa, Caulobacter sp.
  REGION 1..121: note = tr|A0A3S9VC75|A0A3S9VC75_9CAUL 6-carboxy-5,6,7,8-tetrahydropterin synthase OS=Caulobacter sp. FWC26 OX=69665 GN=CSW63_05750 PE=3 SV=1
MKPVFEITKAAYFDAAHYIEQGPSDHRYRRLHGHSFKVEASVRGPMQEAGWVADLDRLDVALKAVAAELDHGLLNDKPGLEVPTLERLCLYFAERLTASFPGLSRVVLSRPTIGETCSLAL

SEQ ID NO: 19012 - protein, 121 aa, Caulobacter sp.
  REGION 1..121: note = tr|A0A0Q6V5M6|A0A0Q6V5M6_9CAUL 6-carboxy-5,6,7,8-tetrahydropterin synthase OS=Caulobacter sp. Root343 OX=1736520 GN=ASC70_06625 PE=3 SV=1
MKPVFEITKAAHFDAAHYIEQGPADHRYRKLHGHSFKVEASVKGQMQDAGWVADLDGLDAALKAVAIELDHGLLNDRPGLETPTLERLCLYFAERLKVQFPGLSRVVLSRPTIGESCALTL

SEQ ID NO: 19013 - protein, 121 aa, Caulobacter vibrioides
  REGION 1..121: note = tr|R0EH33|R0EH33_CAUVI 6-carboxy-5,6,7,8-tetrahydropterin synthase OS=Caulobacter vibrioides OR37 OX=1292034 GN=OR37_02750 PE=3 SV=1
MKPVFEITKAAYFDAAHFIEQGPPDHRYRRLHGHSFKVEASVKGEMAEAGWVADLESLDVALKAIAAELDHGLLNEKPGLDVPSLERLCLYFAERLKGTFPSLSRVVLSRPTIGETCSLAL

SEQ ID NO: 19014 - protein, 121 aa, Caulobacter vibrioides
  REGION 1..121: note = tr|Q9A3P4|Q9A3P4_CAUVC 6-carboxy-5,6,7,8-tetrahydropterin synthase OS=Caulobacter vibrioides (strain ATCC 19089 / CB15) OX=190650 GN=CC_3158; PE = 3 SV=1
MKPVFEITKAAYFDAAHYIEQGPSDHRYRRLHGHSFKVEVSVRGEMLDAGWVADLDTLDVALKAVAVELDHGLLNDKPGLEVPTLERLCLYFAERLRSQFPGLSRVALSRPTIGETCVLSL

SEQ ID NO: 19015 - protein, 122 aa, unidentified
  source 1..122: note = Caulobacter zeae
  REGION 1..122: note = tr|A0A2N5D896|A0A2N5D896_9CAUL 6-carboxy-5,6,7,8-tetrahydropterin synthase OS=Caulobacter zeae OX=2055137 GN=SGCZBJ_18235 PE=3 SV=1
MSEPVFEITKAAHFDAAHYIEQGPGDHRYRRLHGHSFRVEASVKGVMQPAGWVADLESLDVALKAVATELDHGLLNDRPGLESPTLERICLYFAERLKPQFPGLSRVVLSRPTIGESCALSL

SEQ ID NO: 19016 - protein, 123 aa, unidentified
  source 1..123: note = Caulobacteraceae bacterium
  REGION 1..123: note = tr|A0A4Q3SCA5|A0A4Q3SCA5_9CAUL 6-carboxy-5,6,7,8-tetrahydropterin synthase; OS = Caulobacteraceae bacterium OX=1978230 GN=EON95_00885; PE = 3 SV=1
MTTPQFEITKAATFDAAHHFPNGPEGSPYTRLHGHSFRVEATVRGEISGPMGWVTDLGELDAALKAVAAQLDHGLLNEKPGLETPTLEHLCLYFAAALKDRYPGLCRVVISRPTISESCSLAV

SEQ ID NO: 19017 - protein, 124 aa, unidentified
  source 1..124: note = Caulobacteraceae bacterium
  REGION 1..124: note = tr|A0A4Q3SYG1|A0A4Q3SYG1_9CAUL 6-carboxy-5,6,7,8-tetrahydropterin synthase; OS = Caulobacteraceae bacterium OX=1978230 GN=EON94_02210; PE = 3 SV=1
MTQPVFEITKAATFDAAHYFADGPEHRPYANLHGHSFKVEATVRGVQQEPVGWVADLADLDAELKAVAAQLDHGLLNEKPGLERPTLEHLCLYFAERLKVRFPGLSRIVVSRPTISESCALNVA

SEQ ID NO: 19018 - protein, 170 aa, unidentified
  source 1..170: note = Caulobacterales bacterium
  REGION 1..170: note = tr|A0A258C858|A0A258C858_9PROT 6-pyruvoyl tetrahydrobiopterin synthase OS=Caulobacterales bacterium 32-67-6 OX=1970502 GN=B7Z13_11770 PE=4 SV=1
MTWIATKTYGAERGLSCALRQWSAESHCALIHGYSLGFRFTFAAEQLDARGWVVDFGTGGFGQIRTWLHQVFDHALLVAKDDPALPDLMRLSELGLARVQVVPGASCERLAEFVWAAADPMISQATKGRCWVAEVECIEHGANSATYRNPDSVLRGLRTEVLSQLLTEAG

SEQ ID NO: 19019 - protein, 122 aa, unidentified
  source 1..122: note = Caulobacterales bacterium
  REGION 1..122: note = tr|A0A1F8I9U7|A0A1F8I9U7_9PROT 6-carboxy-5,6,7,8-tetrahydropterin synthase; OS = Caulobacterales bacterium RIFCSPHIGHO2_12_FULL_68_13; OX = 1797586 GN=A3E24_08545 PE=3 SV= 1
MPVFEITKQATFDAAHHFPNEPEGSIYRRVHGHSFTVEATIRSETLDAEHNWVADLGALDRALRAAAEQLDHGMLNEHEGLELPSLENLCLWFAKTLKPAWPGLCRVQVARPTINERCVLSL

SEQ ID NO: 19020 - protein, 140 aa, unidentified
  source 1..140: note = Caviibacterium pharyngocola
  REGION 1..140: note = tr|A0A2M8RVY5|A0A2M8RVY5_9PAST 6-carboxy-5,6,7,8-tetrahydropterin synthase; OS = Caviibacterium pharyngocola OX=28159 GN=queD PE=3 SV=1
MFKVSKEFSFDMAHLLDGHDGKCQNLHGHTYKLQVEVQGELHSSGAKKGMVIDFADVKQIVKQQILDPMDHAFIYDTTSERECKIAALLTELQSKTFGIPTRTTAEEMARFIFNRLKPILPISAVRLWETPTSFCEYREE

SEQ ID NO: 19021 - protein, 136 aa, unidentified
  source 1..136: note = Cecembia calidifontis
  REGION 1..136: note = tr|A0A4Q7P7V5|A0A4Q7P7V5_9BACT 6-pyruvoyltetrahydropterin/6-carboxytetrahydropterin synthase OS=Cecembia calidifontis OX=1187080 GN=BC751_1698; PE = 4 SV=1
MKVSVFRKEHFNAAHKLHNPKWSDEKNQEVFGKCNNPNYHGHNYELIVKLDGPVDPETGYVYDMKVLSDLIKEHVLNKFDHKNLNLDTDEFKEVNPSAENIAVVIWNILRQKIDLKFDLTIRLYETERNFVEYSGD

SEQ ID NO: 19022 - protein, 136 aa, unidentified
  source 1..136: note = Cecembia calidifontis
  REGION 1..136: note = tr|A0A4V2F6Y0|A0A4V2F6Y0_9BACT 6-carboxy-5,6,7,8-tetrahydropterin synthase OS=Cecembia calidifontis OX=1187080 GN=BC751_3517 PE=3 SV=1
MLSITKIFTFETAHRISSYQGACQHIHGHSYKLHVTITGEEVGEDDMLLDFKILKQIVKDVIVDPIDHAIMLKRNEVNERDFGKMEEKIFWMASEPTAERMLEWMANQLQQKLPNQIHLKRLRLFETENSFAEWEK

SEQ ID NO: 19023 - protein, 136 aa, unidentified
  source 1..136: note = Cecembia lonarensis
  REGION 1..136: note = tr|K1KXK3|K1KXK3_9BACT 6-pyruvoyl tetrahydropterin synthase/QueD family protein OS=Cecembia lonarensis LW9; OX = 1225176 GN=B879_02585 PE=4 SV=1
MKVSVFRKEHFNAAHRLHNPNWSDEKNLAVFGKCNNYNYHGHNYDLIVKLDGPVDPDTGYVFDMKVLSDLIKENVLNKFDHKNLNLDTDEFKNLNPTAENIAVVIWNILRVKIDLKFDLTIRLYETERNFVEYSGS

SEQ ID NO: 19024 - protein, 139 aa, unidentified
  source 1..139: note = Cecembia lonarensis
  REGION 1..139: note = tr|K1LZ83|K1LZ83_9BACT 6-pyruvoyl tetrahydropterin synthase/QueD family protein OS=Cecembia lonarensis LW9; OX = 1225176 GN=B879_01915 PE=4 SV=1
MIYVCRKEHFNAAHKLWNPNWTEEKNIEVFGPCANVNWHGHNFELIVTVKGLPDPETGFVVDLKALSVLIKELVIDKVDHKNLNLDVPFMLGKMASCENLVMEFWKILEPAVNAIVPQGRLYKLTLYETPRNFVEYLGE

SEQ ID NO: 19025 - protein, 136 aa, unidentified
  source 1..136: note = Cecembia rubra
  REGION 1..136: note = tr|A0A2P8E6Q4|A0A2P8E6Q4_9BACT 6-carboxy-5,6,7,8-tetrahydropterin synthase OS=Cecembia rubra OX=1485585 GN=CLV48_104292 PE=3 SV=1
MRVSVFRKEHFNAAHRLHNPKWSYEKNQEVFGKCNNPNYHGHNYELIVKLAGPVDPETGYVYDMKILSDLIKEHVLNKFDHKNLNLDTDEFKELNPTAENIAVVIWNILRKKIDLKFDLTIRLYETERNFVEYSGD

SEQ ID NO: 19026 - protein, 135 aa, unidentified
  source 1..135: note = Cecembia rubra
  REGION 1..135: note = tr|A0A2P8EE81|A0A2P8EE81_9BACT 6-carboxy-5,6,7,8-tetrahydropterin synthase OS=Cecembia rubra OX=1485585 GN=CLV48_101723 PE=3 SV=1
MLSITKIFTFESAHRITDYDGPCCQVHGHSYVLHVTVSGKELENDMLLDFKLLKSILQEGVISQFDHALILKENEKNRLDFGGFDQKILWMDDEPTAERMLLWIKDRIIPKLPPKVNLESLNLYETATCYATWTP

SEQ ID NO: 19027 - protein, 120 aa, Cedecea davisae
  REGION 1..120: note = tr|S3IMB2|S3IMB2_9ENTR 6-carboxy-5,6,7,8-tetrahydropterin synthase OS=Cedecea davisae DSM 4568 OX=566551 GN=HMPREF0201_03750 PE=3 SV=1
MMSTTLFKDFTFEAAHHLPNVPEGHKCGRLHGHSFMVRLEITGEVDPHTGWIIDFSELKAAFKPTYDRLDHYYLNDIPGLENPTSEVLAKWIWDQMKPVMPLLSAVMIKETCTAGCVYRG

SEQ ID NO: 19028 - protein, 120 aa, Cedecea davisae
  REGION 1..120: note = tr|S3JKS8|S3JKS8_9ENTR 6-carboxy-5,6,7,8-tetrahydropterin synthase OS=Cedecea davisae DSM 4568 OX=566551 GN=HMPREF0201_04082 PE=3 SV=1
MKTTLYKDFTFEAAHRLPNVPEGHKCGRLHGHSFVVRLEITGEVDKHTGWIIDFAELKAIFKPTLDRLDHNYLNDILGLENPTSEVLAAWIWDQIKPQLPILSAVVVKETCTAGCVYRGE

SEQ ID NO: 19029 - protein, 121 aa, Cedecea lapagei
  REGION 1..121: note = tr|A0A447UY33|A0A447UY33_9ENTR 6-carboxy-5,6,7,8-tetrahydropterin synthase OS=Cedecea lapagei OX=158823 GN=queD PE=3 SV=1
MMSTTLFKDFTFEAAHRLPHVPEGHKCGRLHGHSFMVRLEITGEVDPYTGWIMDFSELKAAFKPTYDRLDHYYLNDIPGLENPTSEVLAKWIWDQMKPVVPLLSAVMIKETCTAGCVYRGE

SEQ ID NO: 19030 - protein, 120 aa, Cedecea lapagei
  REGION 1..120: note = tr|A0A2N0CSH3|A0A2N0CSH3_9ENTR 6-carboxy-5,6,7,8-tetrahydropterin synthase OS=Cedecea lapagei OX=158823 GN=queD PE=3 SV=1
MSTTLFKDFIFEAAHRLPHVPEGHKCGRLHGHSFMVRLEITGEVDPHTGWIMDFSELKAAFKPTYDRLDHYYLNDIPGLENPTSEVLAKWIWDQMKPLVPLLSSVMIKETCTAGCVYRGE

SEQ ID NO: 19031 - protein, 120 aa, Cedecea neteri
  REGION 1..120: note = tr|A0A089URK2|A0A089URK2_9ENTR 6-carboxy-5,6,7,8-tetrahydropterin synthase OS=Cedecea neteri OX=158822 GN=queD PE=3 SV=1
MSTTLFKDFTFEAAHRLPHVPEGHKCGRLHGHSFMVRLEITGEVDPYTGWIMDFSELKAAFKPTYDRLDHYYLNDIPGLENPTSEVLAKWIWDQMKPVVPLLSAVMIKETCTAGCVYRGE

SEQ ID NO: 19032 - protein, 121 aa, Cedecea neteri; identical to SEQ ID NO: 19029
  REGION 1..121: note = tr|A0A2X2T3X7|A0A2X2T3X7_9ENTR 6-carboxy-5,6,7,8-tetrahydropterin synthase OS=Cedecea neteri OX=158822 GN=queD PE=3 SV=1

SEQ ID NO: 19033 - protein, 121 aa, Cedecea sp.
  REGION 1..121: note = tr|A0A1X7KG06|A0A1X7KG06_9ENTR 6-carboxy-5,6,7,8-tetrahydropterin synthase OS=Cedecea sp. NFIX57 OX=1566286 GN=SAMN03159353_100979 PE=3 SV=1
MMSTTLFKDFTFEAAHRLPHVPEGHKCGRLHGHSFMVRLEITGEVDPYTGWIMDFSELKAAFKPTYDRLDHYYLNDIPGLENPTSEVLAKWIWDQMKPVVPLLSAVMIKETCTAGCIYRGE

SEQ ID NO: 19034 - protein, 290 aa, Celerinatantimonas diazotrophica
  REGION 1..290: note = tr|A0A4R1J860|A0A4R1J860_9GAMM 6-pyruvoyl tetrahydropterin synthase-like protein; OS = Celerinatantimonas diazotrophica OX=412034; GN = EV690_3510 PE=4 SV=1
MKLFVKDLTVIDSTFLCPDRGLVGESWIVDIELSGELNQMNMLLDFGVVKKTIKKIIDTYVDHKLLAPKRSPQCQIHEQDDGRVQLSFSRSGQSDIFLCCPEQAFCFVDCIEITEAALVHHLIETLRPHLPDNINDLTISLRNEHIEGPYYHYSHGLKKHQGNCQRIAHGHRSMIEILVDDELDDELCASWAMKWRNIYLGSSEDCVAVSHLSFAAQAKLDNHYGFAYQAPQGFFELAVPMHECDLLPCDTTVENLAHHIATQVKLAHPNQCIRVHAYEGVGKGAIEELP

SEQ ID NO: 19035 - protein, 131 aa, Cellulomonas composti
  REGION 1..131: note = tr|A0A511J9H7|A0A511J9H7_9CELL 6-carboxy-5,6,7,8-tetrahydropterin synthase; OS = Cellulomonas composti OX=266130 GN=CCO02nite_13040 PE=3; SV = 1
MSPARRDEEKANVHEISKRFTVEAAHHLPRVPDGHPCRRLHGHSYVIELGLRGELDESGWVRDFAEIGAAFEPVRLRLDHRLLNDVDGLANPTSEVLAQWVFEAVVPALPELAWVRIEETRSSGCVYRRDG

SEQ ID NO: 19036 - protein, 120 aa, Cellulomonas sp.
  REGION 1..120: note = tr|A0A1I3T357|A0A1I3T357_9CELL 6-carboxy-5,6,7,8-tetrahydropterin synthase; OS = Cellulomonas sp. KH9 OX=1855324 GN=SAMN05216467_0292; PE = 3 SV=1
MNMELSKEFTFEAAHRLPNLPADHKCSRLHGHSYKVKIEVSGPLDEQLGWVIDFGEIKTAWKELEDSLDHRYLNEIPGLENPTSEVLAVWIWDRLKGDLSGLLSAVGVHETCTSACTYRG

SEQ ID NO: 19037 - protein, 132 aa, Cellulomonas sp.
  REGION 1..132: note = tr|A0A542HER1|A0A542HER1_9MICO 6-pyruvoyl-tetrahydropterin synthase OS=Cellulomonas sp. SLBN-39 OX=664911 GN=FBY26_2240 PE=4 SV=1
MFSVTVRDHMMVAHSLRGEVFGPAQRLHGATFIVDATFRSASLDADGVVVDIGRATEQLRAVLGELTYRNLDDDPGFAGVNTTTEALAKVVADALATRASEGELGPAAEHLAGIAVTLRESHVAWASYERDL

SEQ ID NO: 19038 - protein, 151 aa, Cellulophaga algicola
  REGION 1..151: note = tr|E6X824|E6X824_CELAD 6-pyruvoyl tetrahydropterin synthase OS=Cellulophaga algicola (strain DSM 14237 / IC166 / ACAM 630) OX=688270 GN=Celal_1308 PE=4 SV=1
MSNIRITKQFNFETGHALYGYDGKCRNVHGHSYKLSVTVIGRPITDTTHVKLGMVIDFSDLKKIVKEEIVDQFDHATVFNKNTPHVELAKELTDRGHMVILADYQPTSENMVIDFSARIKSRLPENIQLHSLRLQETDTSFAEWYASDNPL

SEQ ID NO: 19039 - protein, 138 aa, Cellulophaga algicola
  REGION 1..138: note = tr|E6X857|E6X857_CELAD 6-carboxy-5,6,7,8-tetrahydropterin synthase; OS = Cellulophaga algicola (strain DSM 14237 / IC166 / ACAM 630) OX=688270 GN=Celal_2392 PE=3 SV=1
MKVKVSRKAHFNAAHRLYNPDWSFEKNDTIFGLCNNPNFHGHNYELIVSVTGKIDPETGFVIDVKILKDLIKSEIEDAFDHKNLNVEVPEFKNLNPTAENIAVVIYDKLRPHITSDKDLEVVLYETPRNFVTYRGDNE

SEQ ID NO: 19040 - protein, 138 aa, Cellulophaga baltica
  REGION 1..138: note = tr|A0A1G7JBN6|A0A1G7JBN6_9FLAO 6-pyruvoyltetrahydropterin/6-carboxytetrahydropterin synthase OS=Cellulophaga baltica OX=76594; GN = SAMN04487992_1095 PE=4 SV=1
MKVKVSRKAHFNAAHRLYNPDWSFEKNDAIFGLCNNPNFHGHNYELIVSITGKIDPETGFVIDVKILKDLIKSEIENAFDHKNLNVEVPEFKNLNPTAENIAVVIYDKLRPHFESDKDLEVILYETPRNFVTYTGNNE

SEQ ID NO: 19041 - protein, 149 aa, Cellulophaga baltica
  REGION 1..149: note = tr|A0A1G7FC16|A0A1G7FC16_9FLAO 6-carboxy-5,6,7,8-tetrahydropterin synthase; OS = Cellulophaga baltica OX=76594 GN=SAMN04487992_103146; PE = 3 SV=1
MSNIRITKQFNFETGHALYGYDGKCRNVHGHSYKLSVTVIGRPITDTSHVKLGMVIDFGDLKKIVKEEIVDQFDHATVFNKNTPHVELAKELTDRGHMVILANYQPTSENMVIDFSARIISRLPENIQLHSLRLQETDTSFAEWYASDN

SEQ ID NO: 19042 - protein, 149 aa, Cellulophaga fucicola
  REGION 1..149: note = tr|A0A1K1Q304|A0A1K1Q304_9FLAO 6-carboxy-5,6,7,8-tetrahydropterin synthase; OS = Cellulophaga fucicola OX=76595 GN=SAMN05660313_02289; PE = 3 SV=1
MSNIRITKQFSFETGHALYGYDGKCRNVHGHSYKLSVTVIGSPITDTTNVKLGMVIDFSDLKKIVKEEIVDVYDHATVFNKNTPHVELAHELTQRGHSVILADYQPTSENMVIDFAAKIKARLPENINLHSLRLQETDSSFAEWYALDN

SEQ ID NO: 19043 - protein, 136 aa, Cellulophaga fucicola
  REGION 1..136: note = tr|A0A1K1R5H3|A0A1K1R5H3_9FLAO 6-carboxy-5,6,7,8-tetrahydropterin synthase; OS = Cellulophaga fucicola OX=76595 GN=SAMN05660313_03321; PE = 3 SV=1
MKVKVSRKAHFNAAHRLHNKSWDAEKNKAVFGLCSNPNYHGHNYELIVSVAGEIDPETGFVMDMKVLKDLIKEKVENALDHKNLNIEVPEFKELNPTAENIAVVIWNKLRSEIDASKELEIVLYETPRNYVTYSGQ

SEQ ID NO: 19044 - protein, 135 aa, Cellulophaga lytica
  REGION 1..135: note = tr|F0RA18|F0RA18_CELLC 6-carboxy-5,6,7,8-tetrahydropterin synthase; OS = Cellulophaga lytica (strain ATCC 23178 / DSM 7489 / JCM 8516 / NBRC 14961 / NCIMB 1423 / VKM B- 1433 / Cy l20); OX = 867900 GN=Celly_0512 PE=3 SV=1
MKVKVSRKAHFNSAHRLHNKDWDAEKNKAVFGLCSNPNYHGHNYELIVSVAGEIDPTTGFVMDMKVLKDLIKEKIEKALDHKNLNIEVPEFKELNPTAENIAVVIWNKLRPEIDATKDLEVVLYETPRNYVTYSG

SEQ ID NO: 19045 - protein, 149 aa, Cellulophaga lytica
  REGION 1..149: note = tr|F0RG65|F0RG65_CELLC 6-carboxy-5,6,7,8-tetrahydropterin synthase; OS = Cellulophaga lytica (strain ATCC 23178 / DSM 7489 / JCM 8516 / NBRC 14961 / NCIMB 1423 / VKM B- 1433 / Cy l20); OX = 867900 GN=Celly_1203 PE=3 SV=1
MSNIRITKQFSFETGHALYGYDGKCRNVHGHSYKLSVTVIGAPIADNTNVKWGMVIDFGDLKKIVKEEIVDVYDHATVFNKNTPHIELANELMQRGHSVILADYQPTSENMVIDFAAKIKARLPENISLHSLKLQETDSSFAEWYAADN

SEQ ID NO: 19046 - protein, 135 aa, Cellulophaga sp.; identical to SEQ ID NO: 19044
  REGION 1..135: note = tr|A0A559N6W3|A0A559N6W3_9FLAO 6-carboxy-5,6,7,8-tetrahydropterin synthase; OS = Cellulophaga sp. RHA_52 OX=1250036 GN=JM80_1604 PE=3; SV = 1

SEQ ID NO: 19047 - protein, 149 aa, Cellulophaga sp.
  REGION 1..149: note = tr|A0A559N4W5|A0A559N4W5_9FLAO 6-carboxy-5,6,7,8-tetrahydropterin synthase; OS = Cellulophaga sp. RHA_52 OX=1250036 GN=JM80_0892 PE=3; SV = 1
MSNIRITKQFSFETGHALYGYDGKCRNVHGHSYKLSVTVIGAPIADNTNVKWGMVIDFGDLKKIVKEEIVDVYDHATVFNKNTPHMELANELMQRGHSVILADYQPTSENMVIDFAAKIKARLPENISLHSLKLQETDSSFAEWYAADN

SEQ ID NO: 19048 - protein, 138 aa, Cellulophaga tyrosinoxydans
  REGION 1..138: note = tr|A0A1W2BZC7|A0A1W2BZC7_9FLAO 6-carboxy-5,6,7,8-tetrahydropterin synthase; OS = Cellulophaga tyrosinoxydans OX=504486; GN = SAMN05660703_2709 PE=3 SV=1
MKVKVSRKAHFNAAHRLYRPDWSFEKNDAIFGLCNNPNFHGHNYELIVSVTGEIDPETGFVIDVKVLKDLIKSEIEDAFDHKNLNIEVPEFKNLNPTAENIAVVIWDKLRPHIDNSKDLEVVLYETPRNFVTYVGNTL

SEQ ID NO: 19049 - protein, 149 aa, Cellulophaga tyrosinoxydans
  REGION 1..149: note = tr|A0A1W1YYK0|A0A1W1YYK0_9FLAO 6-carboxy-5,6,7,8-tetrahydropterin synthase; OS = Cellulophaga tyrosinoxydans OX=504486; GN = SAMN05660703_0985 PE=3 SV=1
MNTIRITKQFNFETGHALFGYDGKCRNVHGHSYKLSVTVIGSPIKDTSHVKLGMVIDFGDLKKIVKEEIVDQFDHATVFNKNTPHIELAKELTDRGHVVILADYQPTSENMVIDFADRIKARLPKNIQLHSLKLQETDTSFAEWYASDN

SEQ ID NO: 19050 - protein, 283 aa, Cellvibrio japonicus
  REGION 1..283: note = tr|B3PKJ5|B3PKJ5_CELJU Uncharacterized protein; OS = Cellvibrio japonicus (strain Ueda107) OX=498211; GN = CJA_2463 PE=4 SV=1
MLLFVDNLTNVDFSFLDPQRGLLGETWLANVRLQGELDGQGMVCDFGTVKKVIRHWLDAELDHRLAVPAKSSQIVIKEEGDFLDITFQFGSQGEQLHTRSPRDAIALVDAEVLTAETIAAWCIRQLQSHFPESIDRLELDFTHELIEGAWYHYSHGLKKHQGNCQRIAHGHRSRIDIWCDGEKSATLERHWADCWRDIYIGTREDIVSTAEYKGTAYYHFAYTSAQGPFELTLPQRCCYLIDTDSTVEFIAQHIAQESRVLQPQASIRVKAYEGIHKGAIAEA

SEQ ID NO: 19051 - protein, 283 aa, Cellvibrio mixtus
  REGION 1..283: note = tr|A0A266Q789|A0A266Q789_9GAMM Uncharacterized protein OS=Cellvibrio mixtus OX=39650 GN=CBP51_01155 PE=4; SV = 1
MLLFVDNLTNVDFSFLDPQRGLLGETWLANVRLHGELDEQGMVCDFGTVKKVMRHWLDTELDHRLAVPIRSPQIRIEEEGDFLSIHWSFGNKNEFLHTRSPRDAIALVDAEILTAETVAEWCISQLKQQFPLSVARLELDFTLEAMNGAYYHYSHGLKKHKGNCQRIAHGHRSRIDIWANGKKSPKLEQRWADEWTDIYLATRDDLIAKPKHAGVDYYQFAYEAEQGPFDITLPQRCCYLIDTDTTVEFIAHHIAQKTRQENPETSIRVKAYEGINKGAIAEA

SEQ ID NO: 19052 - protein, 283 aa, Cellvibrio sp.
  REGION 1..283: note = tr|A0A1U9N8G6|A0A1U9N8G6_9GAMM Uncharacterized protein OS=Cellvibrio sp. PSBB023 OX=1945512; GN = B0D95_05985 PE=4 SV=1
MLLFVDNLTNVDFSFLDPQRGLLGETWLANVRLHGELDEQGMVCDFGTVKKVMRHWLDTELDHRLAVPIRSPQIRIEEEGDFLSIHWQFGTSGEFLHTRSPRDAIALVDAEILTAETVAEWCISQLKQQFPLSVARLELDFTLEAMNGAYYHYSHGLKKHKGNCQRIAHGHRSRIDIWANGKKSPKLEQRWADEWTDIYLATRDDLIAKPKHAGVDYYQFAYEAEQGSFDITLPQRCCYLIDTDTTVEFIAHHIAQKTRQENPETSIRVKAYEGINKGAIAEA

SEQ ID NO: 19053 - protein, 125 aa, Cellvibrio sp.
  REGION 1..125: note = tr|A0A4R7BJE7|A0A4R7BJE7_9GAMM 6-pyruvoyltetrahydropterin/6-carboxytetrahydropterin synthase OS=Cellvibrio sp. YR554 OX=2135765 GN=C8K91_10230; PE = 4 SV=1
MYTVAVTRDFIANHFLIGGDWGNENFPHAHHYVVEVSIESDQLDKHGYLVDIVEIEAALDKVVGYFRDCVLNDKEEFSGLNPSIEHFSRILNEKIITLIHPPGTGSLNIKLWENATCWAAYRKQF

SEQ ID NO: 19054 - protein, 165 aa, unidentified
  source 1..165: note = Cellvibrionaceae bacterium
  REGION 1..165: note = tr|A0A2E2XN48|A0A2E2XN48_9GAMM 6-pyruvoyl tetrahydropterin synthase OS=Cellvibrionaceae bacterium; OX = 2026723 GN=CL693_19915 PE=4 SV=1
MKNITTIDIEKEYLHFSSAHFTIFSADERERLHGHNFFVSASVTAEVQDDGMCFNYNHLKQTLRRQCEALDEYVLLPKHSPHLNIVEGPVYFKADFAEDTMFFMKNETLLLPVVNVTIEELARYFLAELRTNPIYSDNDAIHEMVIRVSSGPGQWGSARWERASG

SEQ ID NO: 19055 - protein, 282 aa, unidentified
  source 1..282: note = Cellvibrionaceae bacterium
  REGION 1..282: note = tr|A0A545SMD4|A0A545SMD4_9GAMM Uncharacterized protein OS=Cellvibrionaceae bacterium R142 OX=2591008; GN = FKG94_27565 PE=4 SV=1
MHLFVDNLTNVDFSYLCPERGLLGETWLAHVQMDGKLDEQGMVCDFGEVKKVTRLWLDAEVDHRLLVPADADNLTLTETGDQLQLVWRFGDGLSLQCRSPRQAICLVEAPVITPANLARWSVAQLAPQFPRSVARLQVGFSEENIDGPFYHYSHGLKKHAGNCQRIAHGHRSRIDIWQNGRPAPALEHQWAERWQDIYIGTREDLIAAPELDGVPCYQFSYAAQQGDFELILPQACCYLIDTDSTVEYIASHIAATLKLQHPNTVIKVKAYEGLGKGAIAEH

SEQ ID NO: 19056 - protein, 161 aa, unidentified
  source 1..161: note = Cellvibrionales bacterium
  REGION 1..161: note = tr|A0A1Z8MSP0|A0A1Z8MSP0_9GAMM 6-pyruvoyl tetrahydropterin synthase OS=Cellvibrionales bacterium TMED21 OX=1986745 GN=CBB81_10125 PE=4 SV=1
  VARIANT 159: note = Xaa can be any naturally occurring amino acid
MTRLTTLHITKEAHKFSAAHYTIFSVTERERLHGHNYFVSVRLVAQMGDNGFSADYNVYKRRIKMLCDRYDEYILVAGQSLYQTVDQVGEEYHVTFDNRVLKFPVDETWILPITNVTVEELAHFMLQELLTLEHDPDLVEVELTVSSGSGQASSATWTXDR

SEQ ID NO: 19057 - protein, 164 aa, unidentified
  source 1..164: note = Cellvibrionales bacterium
  REGION 1..164: note = tr|A0A350J1X3|A0A350J1X3_9GAMM 6-pyruvoyl tetrahydropterin synthase OS=Cellvibrionales bacterium; OX = 2026722 GN=DCE61_02950 PE=4 SV=1
MSHRLTTINICKEALKFSGAHFTIFSATDRERLHGHNFRVRAEVTAPVDDNGMCFNYQEIKTRLRTICNALDEYMLLPGKSPHLKIEHIDKQYHVHFNDEVMVFIADDTRILDIRNTTVEEFSYYILDQMVSADTFFIENDVANITIGVSSGDGQWGSSTWVAS

SEQ ID NO: 19058 - protein, 126 aa, Centipeda periodontii
  REGION 1..126: note = tr|F5RP99|F5RP99_9FIRM 6-carboxy-5,6,7,8-tetrahydropterin synthase OS=Centipeda periodontii DSM 2778 OX=888060 GN=HMPREF9081_2085 PE=3 SV=1
MYTLRVEGAFEAAHRVVNYPGKCDRLHGHNWVVEATFQGTQLDELGMLIDFKIAKKALAAVLDDFDHYYLNDFPPFNEGVNPTAENLARIIFERLAAREEVAASPAELTALTVWESPKSSVTYTKD

SEQ ID NO: 19059 - protein, 179 aa, Cesiribacter andamanensis
  REGION 1..179: note = tr|M7N854|M7N854_9BACT Queuosine biosynthesis protein QueD OS=Cesiribacter andamanensis AMV16 OX=1279009; GN = ADICEAN_01495 PE=4 SV=1
MNTIRISRTCAFYASYALQASDGHCKPIQAHYYKLRVTLLGTPKAAGPAGHGGLCMHFDDLKRFIEAFVVKPWEGALLLHQDAPAGLIESWKKIDKKLVLLPYQPTCENLLLDIRTTLLEHLPPGAILHSLRLSETDATYMEWNSADNTYLGYADEENEPEVNHALIMDSLSKANTSHW

SEQ ID NO: 19060 - protein, 164 aa, Cesiribacter andamanensis
  REGION 1..164: note = tr|M7N2G8|M7N2G8_9BACT Queuosine biosynthesis protein QueD OS=Cesiribacter andamanensis AMV16 OX=1279009; GN = ADICEAN_03382 PE=4 SV=1
MKVSKKFRWEGAHRIAWHTEGCQHLHGHSYVLWVEVEGPTGDKGMLMDFKVLKKVLKPLIAAWDHATLIARDDVRLKEAIDHLDSKFYLLPYDSTAENMCRYITDYLLQQGAAELAAHRIHTLTVRIQETESCFAELRTPVDVETLASHLAPGSWSATPMVQAQ

SEQ ID NO: 19061 - protein, 194 aa, unidentified
  source 1..194: note = Cetia pacifica
  REGION 1..194: note = tr|A0A3N1YLA2|A0A3N1YLA2_9PROT 6-pyruvoyltetrahydropterin/6-carboxytetrahydropterin synthase OS=Cetia pacifica OX=1424653 GN=EDC58_1366 PE=4; SV = 1
MIIRKLYKFENAHIVRNCTSRRCSRSIHGHSYKVEVKLSSNFLDKGQMVYDFGLMKLSIKELIDSFDHAITIWSEDNEEYKNFAKKFSERWIELPVNPSAEQFSRVFFLIVDRVLECMEFRNEEKEVKVHSVVVHETDTGYAECFREDAYNFKNMGEIRLEDIVFSDRIKEEWSDKNLWDKLLKKEKLTPPSEV

SEQ ID NO: 19062 - protein, 187 aa, Cetobacterium somerae
  REGION 1..187: note = tr|U7VE72|U7VE72_9FUSO Uncharacterized protein; OS = Cetobacterium somerae ATCC BAA-474 OX=1319815; GN = HMPREF0202_00663 PE=4 SV=1
MRSITTFDLQYAHRFYQFKGEAQYLHGHTGLLTIEVEDSINEGVNMVYPCNEIQKTAWDVLKNFDHALILREDDPLLPAILKVYEETGIKDGTPQNTMKGITFKNELATAYPDSRLVVTKETLTVEGMIKIVYELLKDKLNIAKITFTSGVNAASAEYNTKNNIERCPLCGISLDENHSCPKCGYKK

SEQ ID NO: 19063 - protein, 290 aa, Chamaesiphon minutus
  REGION 1..290: note = tr|K9UQ32|K9UQ32_CHAP6 6-pyruvoyl-tetrahydropterin synthase OS=Chamaesiphon minutus (strain ATCC 27169 / PCC 6605) OX=1173020 GN=Cha6605_5428 PE=4 SV=1
MKCIINRRAQFSASHRYWLPELSEAENQAEFGLCAQPYGHGHNYVLYISLYGDIDEYGMVLNLSDVKHVIKKEVTAPLDYSFLNDVWPEFQATLPTTENIARVIWHKLAPHFPLVRIQLYEHPELYAEYTGKDMEASLTIGTHFSAAHRLALDSLTLEQNSEIYGKCARVNGHGHNYHLEVTVTGQIDERTGMIVDLVKLHELVDKHAVEPLDHTFLNKDIPHFAKVVPTAENIAVYIGYQIEQPIQALGAQLHKVKLIESPNNSCELLWSQDFSNLAARQLAAVALAGV

SEQ ID NO: 19064 - protein, 290 aa, unidentified
  source 1..290: note = Chamaesiphon polymorphus
  REGION 1..290: note = tr|A0A2T1F7E6|A0A2T1F7E6_9CYAN 6-pyruvoyl tetrahydropterin synthase OS=Chamaesiphon polymorphus CCALA 037 OX=2107692 GN=C7B77_27850 PE=4 SV=1
MKCIINRRAQFSASHRYWLPELSEAENQAEFGLCAQPYGHGHNYVLYISLYGDIDEYGMVLNLSDVKHVIKKEVTAPLDYSFLNDVWPEFQATLPTTENIARVIWHKLAPHFPLVRIQLYEHPELYAEYTGKDMEASLTIGTHFSAAHRLALDSLTLEQNSEIYGKCARVNGHGHNYHLEVTVTGQIDARTGMIVDLVKLHELVDKYAVEPLDHTFLNKDIPHFAKVVPTAENIAVYIGYQIEQPIQALGAQLHKVKLIESPNNSCELLWSQDFSNLATRQLASVALAGV

SEQ ID NO: 19065 - protein, 120 aa, unidentified
  source 1..120: note = Chania multitudinisentens
  REGION 1..120: note = tr|W0LBM1|W0LBM1_9GAMM 6-carboxy-5,6,7,8-tetrahydropterin synthase OS=Chania multitudinisentens RB-25 OX=1441930 GN=Z042_17765 PE=3 SV=1
MATTLFKDFMFEAAHRLPHVPAGHKCGRLHGHSFMVRLEVTGEVDAYTGWVMDFAELKAVFNPIWERLDHHYLNEIPGLENPTSEVLAAWIWQQLKPQLPALTAVIVKETCTAGCVYKGE

SEQ ID NO: 19066 - protein, 118 aa, Chelativorans sp.
  REGION 1..118: note = tr|Q11B06|Q11B06_CHESB 6-carboxy-5,6,7,8-tetrahydropterin synthase; OS = Chelativorans sp. (strain BNC1) OX=266779 GN=Meso_4052; PE = 3 SV=1
MFRITKQFHFSASHQLLRLADDHPCKRLHGHNYIVEIELAADALDENGFVRDYHDLAAFQRYVDETLDHRHLNDVFGHDAVTAEWLAKHFFDWCRERLPETSCVRVSETPKTWAEYRP

SEQ ID NO: 19067 - protein, 135 aa, Chelatococcus sambhunathii
  REGION 1..135: note = tr|A0A0K6H096|A0A0K6H096_9RHIZ 6-pyruvoyl-tetrahydropterin synthase OS=Chelatococcus sambhunathii OX=363953 GN=Ga0061061_101386 PE=4 SV=1
MYAVEVRDHVMIAHSFRGDLFGPAQALHGATFIVDVAFFRKELTAEGVVVDIGRAHEALKTVLSPLNYRNLDDLPQFAGCNTTTEFLSRHIFDAMAKAARGGALGPGGEGIDHIRVTLHESHVARAWFEGPVARA

SEQ ID NO: 19068 - protein, 135 aa, Chelatococcus sp.
  REGION 1..135: note = tr|A0A0K2D9N3|A0A0K2D9N3_9RHIZ 6-pyruvoyl tetrahydropterin synthase OS=Chelatococcus sp. CO-6; OX = 1702325 GN=AL346_02765 PE=4 SV=1
MYAVEVRDHVMIAHSFRGDLFGPAQALHGATFIVDVAFFRKELTSEGVVVDIDRAHEALKAVLSPLNYRNLDDLPQFAGRNTTTEFLSRHIFDAMAEAARSGALGPGGEGIDHIRVTLHESHVARAWFEGPVARA

SEQ ID NO: 19069 - protein, 133 aa, Chelatococcus sp.
  REGION 1..133: note = tr|A0A2W6YV33|A0A2W6YV33_9RHIZ Uncharacterized protein OS=Chelatococcus sp. OX=1953771 GN=DI527_00080; PE = 4 SV=1
MYSVEVRDRIMIGHSLPDPFFGPAQAMHGATFVVDVAFFSERLTRHNVVVDIGAALDVLAETLKPLKYQNLDALPQFSGILTTTEFLCRHIFDGIVAAAKAGALGEDAAGLARIRVTLHETDLARASFEGPLA

SEQ ID NO: 19070 - protein, 142 aa, Chelonobacter oris
  REGION 1..142: note = tr|A0A0A3ATV4|A0A0A3ATV4_9PAST 6-carboxy-5,6,7,8-tetrahydropterin synthase; OS = Chelonobacter oris OX=505317 GN=OA57_06615 PE=3 SV=1
MFKISKEFSFDMAHMLDGHDGKCKNLHGHTYKLQVELCAPLLTDPAKCGMVMDYSDLKRIVDDLILKPMDHAFIFDQNSEKERKVADLLQTLDSKVFALPYRTTAEQMSQFIFQRLQQAGLPVSAVRLWETPTSYCEYTDPA

SEQ ID NO: 19071 - protein, 150 aa, unidentified
  source 1..150: note = Chishuiella changwenlii
  REGION 1..150: note = tr|A0A1M6YT00|A0A1M6YT00_9FLAO 6-pyruvoyltetrahydropterin/6-carboxytetrahydropterin synthase OS=Chishuiella changwenlii OX=1434701; GN = SAMN05443634_10729 PE=4 SV=1
MKIIRLTKAFTFETAHALHGYDGKCKNIHGHSYKLFVTVKGIPSEDVNDVKLGMVMDFGDLKKIINKEVVNLFDHAILLNQNSPHKALGDKLIAEGHHVVFTDYQPSCENMILWMVDKIKAQLPTNIELVALKLHETENSYGEWLAEDNQ

SEQ ID NO: 19072 - protein, 136 aa, unidentified
  source 1..136: note = Chishuiella changwenlii
  REGION 1..136: note = tr|A0A1M6VY49|A0A1M6VY49_9FLAO 6-carboxy-5,6,7,8-tetrahydropterin synthase OS=Chishuiella changwenlii OX=1434701 GN=SAMN05443634_10481 PE=3 SV=1
MKVTVNRKAHFNAAHRLFNKDWSDEKNFEVFGKCSYPNYHGHNYEIIVAVKGDVDPTTGFVMNLDLLRSIIEEEVEEYLDHKNLNIDIKEFQSVNPSAENIVILIWNKIRAKLAAELELKVTLYETPRNFVEYTGE

SEQ ID NO: 19073 - protein, 163 aa, Chitinimonas sp.
  REGION 1..163: note = tr|A0A2G3K8W4|A0A2G3K8W4_9BURK 6-pyruvoyl tetrahydropterin synthase OS=Chitinimonas sp. BJB300; OX = 1559339 GN=CSQ89_01585 PE=4 SV=1
MRQDRLAIRIDRDDIGFAAAHFTIFSATEREGLHGHNFTVGMEVVARGEENGMIFDYRLLKSRLRALCAELDERMLLPARSAHLQISRIGNDIECRFADDKFTFPYRDVVMLELPNITLEALAEWFLGRLLVTTDLPREYLAEMSVSVASSRGQQARRQAILS

SEQ ID NO: 19074 - protein, 197 aa, Chitinimonas sp.
  REGION 1..197: note = tr|A0A516SE42|A0A516SE42_9MICO 6-carboxytetrahydropterin synthase OS=Chitinimonas sp. R3-44 OX=2594795 GN=FNU76_08670 PE=4 SV=1
MLIRKLFKFENAHIVRNCSSDRCRHSIHGHSYKVEVLLQANALDHGQMVYDFGLMKGTIRDVIDAFDHAICFWDRDEADYIAWAKRYSQRWIAMPVSPSAEQFSRLFFVLIDAILANTRMANGEQDVTLHSVIAHETETGYAQCFREDAYNPRMGDIKLEEVVFSDQCRAEWHDPAMLEKLQRGEKFTNPTIALQVR

SEQ ID NO: 19075 - protein, 203 aa, Chitinimonas taiwanensis
  REGION 1..203: note = tr|A0A1K2HGX2|A0A1K2HGX2_9BURK 6-pyruvoyltetrahydropterin/6-carboxytetrahydropterin synthase OS=Chitinimonas taiwanensis DSM 18899 OX=1121279; GN = SAMN02745887_01862 P E=4 SV=1
MLIRKLFKFENAHIVRNCSSERCRYSIHGHSYKVEVLLEAHAFDHGQMVYDFGLMKGTIRDVIDAFDHAICFWDKDEADYIAWAKRYSARWISMPVSPSAEQFSRMFFIIIDAILQNTRMANGEQDVALHSVIAHETETGYAQCFRADAYNPRMGNIALADVVFSEQCQAEWKDPAMYEKLLHKQPFINQALPLQVPVDDAAG

SEQ ID NO: 19076 - protein, 205 aa, Chitiniphilus sp.
  REGION 1..205: note = tr|A0A4U0QCA9|A0A4U0QCA9_9NEIS 6-carboxytetrahydropterin synthase OS=Chitiniphilus sp. HX-2-15 OX=2571148 GN=FAZ21_01775 PE=4 SV=1
MLIRKLFKFENAHIVRNCSSDRCRRSIHGHSYKVEVLLEAHALDHGQMVYDFGLMKGSIRDVIDAFDHAVCFWDKDDPEYIRLCQQFSARWIALPVSPSAEQFARLFFVTIDALLKQTQMRNGESDDVRLHSVIAHETDTGYAQAFREDAYNPRMGEIRLAEIVFSEQVKAEWHDPRMMEKLLAGECFVNPEVLLQVPVPGGESR

SEQ ID NO: 19077 - protein, 125 aa, unidentified
  source 1..125: note = Chitinivibrio alkaliphilus
  REGION 1..125: note = tr|U7D5F0|U7D5F0_9BACT 6-carboxy-5,6,7,8-tetrahydropterin synthase; OS = Chitinivibrio alkaliphilus ACht1 OX=1313304; GN = CALK_2357 PE=3 SV=1
MYEVSTEQSFSAAHYLRNYNGACENLHGHNWKVRVTVRTEVLDSIGLAIDFKILKKNLKDLLDTLDHTCINETVFTESYGNPSSENLSKYLFIEMRKRLSPDFPDLEIGRVDVWETPGNCASYYE

SEQ ID NO: 19078 - protein, 163 aa, unidentified
  source 1..163: note = Chitinivibrio alkaliphilus
  REGION 1..163: note = tr|U7D527|U7D527_9BACT 6-pyruvoyl-tetrahydropterin synthase OS=Chitinivibrio alkaliphilus ACht1 OX=1313304; GN = CALK_2530 PE=4 SV=1
MSHDTYRSIIKLDFQYAHRFMNYPGEASYLHGHSGYLTLEIEGKLNEHNYAYPVKEAQKLAWEVADNFHHGTIFQEGDPLFDLVLQGYDQTGMKGTTNRFGEPAKVLDHELIKSYPESRVSVSKGPSTCEWFCTVFYELLKDKLNIKRVQFRSSSLNCASLEL

SEQ ID NO: 19079 - protein, 137 aa, Chitinophaga arvensicola
  REGION 1..137: note = tr|A0A1I0QQX9|A0A1I0QQX9_9BACT 6-pyruvoyltetrahydropterin/6-carboxytetrahydropterin synthase OS=Chitinophaga arvensicola OX=29529; GN = SAMN04488122_1669 PE=4 SV=1
MIYLTRVENFNAAHKLSNPGWSKEKNEEVFGKCANENWHGHNYELHVTIKGNPDPETGFVFNAKTLGVIIRDAVIEKIDHRNLNMDVDFMKDKFTSAENLSIAIWDQLAKHLPAEVQLHCIKLYETPRIYVEYYGGK

SEQ ID NO: 19080 - protein, 148 aa, Chitinophaga arvensicola
  REGION 1..148: note = tr|A0A1I0RVE9|A0A1I0RVE9_9BACT 6-pyruvoyltetrahydropterin/6-carboxytetrahydropterin synthase OS=Chitinophaga arvensicola OX=29529; GN = SAMN04488122_3467 PE=4 SV=1
MEIKRDDHQTMLTFITRRERFNAAHRMYRQDLTEEENFQLFGKCANPHYHGHNYELFVTVKGDVDPERPYIIDLKELKVIINDYIIEKLDHKNLNLDVDFMAGKMASTELLCVEIFKQLKVPIEGYEGVLLHSVRLAETENNSAECFG

SEQ ID NO: 19081 - protein, 137 aa, unidentified
  source 1..137: note = Chitinophaga barathri
  REGION 1..137: note = tr|A0A3N4MB97|A0A3N4MB97_9BACT 6-carboxytetrahydropterin synthase OS=Chitinophaga barathri OX=1647451 GN=EG028_22220 PE=4 SV=1
MIYLTRVEHFNAAHKLFNPQWSKEQNLEVFGKCANDNWHGHNYELHVTIKGEPDPETGFVFNAKTLGILIKDVIVEKLDHKNLNMDVDFMKDKFTSAENVAIAIWEQLEQHLPGTVQLHCIKLHETPKIYVEYFGGK

SEQ ID NO: 19082 - protein, 137 aa, unidentified
  source 1..137: note = Chitinophaga barathri
  REGION 1..137: note = tr|A0A3N4MVX2|A0A3N4MVX2_9BACT 6-carboxytetrahydropterin synthase OS=Chitinophaga barathri OX=1647451 GN=EG028_20325 PE=4 SV=1
MTFLTRREQFNAAHRMYRQDLTEEENFRLFGKCANPNYHGHNYDLFVTVKGEVDHERPCIMDLKELKVIINDHVIEKLDHRNLNLDVDFMAGKMASTELLCIEIFKQLKGPIEAYAGVCLHSVRLAETENNSTECFG

SEQ ID NO: 19083 - protein, 137 aa, unidentified
  source 1..137: note = Chitinophaga caeni
  REGION 1..137: note = tr|A0A291QTN7|A0A291QTN7_9BACT 6-pyruvoyl tetrahydrobiopterin synthase OS=Chitinophaga caeni; OX = 2029983 GN=COR50_08995 PE=4 SV=1
MIYLTRVEHFNAAHKLSNPSWSKEENQNVFGKCANENWHGHNYELHVTVKGEPHPETGFVFNAKTLGTLINDVIIEKVDHRNLNVDVDFMAGKFTSAENFAIAIWEQLEKHLPAGATLHCIKLFETPKIYVEYFGGK

SEQ ID NO: 19084 - protein, 140 aa, unidentified
  source 1..140: note = Chitinophaga costaii
  REGION 1..140: note = tr|A0A1C4BVT2|A0A1C4BVT2_9BACT 6-pyruvoyltetrahydropterin/6-carboxytetrahydropterin synthase OS=Chitinophaga costaii OX=1335309; GN = GA0116948_103276 PE=4 SV=1
MIYLTRVENFNAAHKLSNPAWSDEKNEAVFGKCANVNWHGHNYELHVTIKGNPDPDTGFVFNAKILGEIIKNEVIEKIDHRNLNMDVAFMAGKFTSAENLAIGIWDQLAPHLPASVQLHSIKLYETPRIYVEYFGTHSGL

SEQ ID NO: 19085 - protein, 141 aa, unidentified
  source 1..141: note = Chitinophaga cymbidii
  REGION 1..141: note = tr|A0A512RSR5|A0A512RSR5_9BACT 6-carboxy-5,6,7,8-tetrahydropterin synthase; OS = Chitinophaga cymbidii OX=1096750 GN=CCY01nite_50000; PE = 3 SV=1
MLQVTKIFRFEMAHALQGHAGACRHVHGHSYQLHVTVRQEREQEGYLPGAGMLIDFKELKKLVKEAVIRRLDHQLLLSGDYLAANPGILRQENLLVLEAEPSAENLLLFVRNAIREKLPAGIALAKLKLYETADSYAEWVL

SEQ ID NO: 19086 - protein, 137 aa, unidentified
  source 1..137: note = Chitinophaga cymbidii
  REGION 1..137: note = tr|A0A512RJV5|A0A512RJV5_9BACT 6-carboxy-5,6,7,8-tetrahydropterin synthase; OS = Chitinophaga cymbidii OX=1096750 GN=CCY01nite_22390; PE = 4 SV=1
MIYLTRVEHFNAAHKLFNPQWSKEQNLEVFGKCANDNWHGHNYELHVTVKGEPDPETGFVFNAKTLGVLIKDVIVEKLDHKNLNMDVDFMKDKFTSAENVAIAIWEQLQQHLPDTVQLHCIRLHETPKIYVEYYGGK

SEQ ID NO: 19087 - protein, 137 aa, unidentified
  source 1..137: note = Chitinophaga dinghuensis
  REGION 1..137: note = tr|A0A327VKW5|A0A327VKW5_9BACT 6-pyruvoyltetrahydropterin/6-carboxytetrahydropterin synthase OS=Chitinophaga dinghuensis OX=1539050; GN = CLV59_11146 PE=4 SV=1
MIYLTRVENFNAAHKLSNPNWSAEKNEEVFGKCANVNWHGHNYELHVTIKGNPDPETGFVFNAKTLGVIIRDVIIEKIDHRNLNLDVDFMAGKFTSAENLAIAIWDQLALHLPSEIELHCIKLYETPRIYVEYFGGK

SEQ ID NO: 19088 - protein, 137 aa, Chitinophaga eiseniae
  REGION 1..137: note = tr|A0A1T4QAS2|A0A1T4QAS2_9BACT 6-pyruvoyltetrahydropterin/6-carboxytetrahydropterin synthase OS=Chitinophaga eiseniae OX=634771; GN = SAMN04488128_102262 PE=4 SV=1
MIYLTRVENFNAAHKLSNPAWSKEKNEEVFGKCANDNWHGHNYELHVTIKGNPDPETGFVFNAKTLGVIIRDAVIEKIDHRNLNLDVDFMAGKFTSAENLAIAIWDQLTPHLPAEVQLHCIKLYETPRIYVEYYGGK

SEQ ID NO: 19089 - protein, 143 aa, Chitinophaga eiseniae
  REGION 1..143: note = tr|A0A1T4MAR1|A0A1T4MAR1_9BACT 6-pyruvoyltetrahydropterin/6-carboxytetrahydropterin synthase OS=Chitinophaga eiseniae OX=634771; GN = SAMN04488128_1011020 PE=4 SV=1
MLQLTKIFSFETAHALHTYDGKCKNVHGHSYKLHVTIKGRNNSGAYLPAPGILVDFKVIKSLVHETIVQHFDHRLILSAAYMQAHPGCSTQENLWVWDMEPSAENMVLYMERVLQAALPEEVALAGLRLYETSDSYAEWVPAG

SEQ ID NO: 19090 - protein, 137 aa, Chitinophaga filiformis
  REGION 1..137: note = tr|A0A1G7GMA4|A0A1G7GMA4_CHIFI 6-pyruvoyltetrahydropterin/6-carboxytetrahydropterin synthase OS=Chitinophaga filiformis OX=104663; GN = SAMN04488121_10182 PE=4 SV=1
MIYLTRVENFNAAHKLSNPAWSKEKNEEVFGKCANENWHGHNYELHVTVKGTPDPETGFVFNAKTLGVLIKDYIVEKVDHRNLNVDVDFMAGKFTSAENLAIGIWDQLTPHLPAGVELHCIKLYETPRIYVEYFGGK

SEQ ID NO: 19091 - protein, 137 aa, unidentified
  source 1..137: note = Chitinophaga flava
  REGION 1..137: note = tr|A0A365Y1Z9|A0A365Y1Z9_9BACT 6-pyruvoyl tetrahydrobiopterin synthase OS=Chitinophaga flava; OX = 2259036 GN=DF182_08680 PE=4 SV=1
MIYLTRVENFNAAHKLSNPGWSKEKNEEVFGKCANDNWHGHNYELHVTVKGNPDPETGFVFNAKTLGVIIRDSVIEKVDHRNLNLDVDFMTGKFTSAENLAIAIWEQLAPHLPAEVQLHCIKLYETPRIYVEYYGGK

SEQ ID NO: 19092 - protein, 143 aa, unidentified
  source 1..143: note = Chitinophaga flava
  REGION 1..143: note = tr|A0A365XSG0|A0A365XSG0_9BACT 6-carboxytetrahydropterin synthase QueD OS=Chitinophaga flava OX=2259036 GN=DF182_21265 PE=4 SV=1
MLQLTKIFSFETAHALHRYNGKCRNIHGHSYKLHVTVRDKAHQGEYLPAPGILVDFKDIKAVVQSHIVEHFDHRLILSADYVVAHPFCETQENLWVWEMEPSAENMVLYMQKVLQDVLPAEVSLASLRLYETSDSYAEWVAPV

SEQ ID NO: 19093 - protein, 137 aa, Chitinophaga ginsengisegetis; identical to SEQ ID NO: 19079
  REGION 1..137: note = tr|A0A1T5NM47|A0A1T5NM47_9BACT 6-pyruvoyltetrahydropterin/6-carboxytetrahydropterin synthase OS=Chitinophaga ginsengisegetis OX=393003; GN = SAMN05660461_2173 PE=4 SV=1

SEQ ID NO: 19094 - protein, 137 aa, Chitinophaga ginsengisoli
  REGION 1..137: note = tr|A0A2P8GGM8|A0A2P8GGM8_9BACT 6-pyruvoyltetrahydropterin/6-carboxytetrahydropterin synthase OS=Chitinophaga ginsengisoli OX=363837; GN = CLV42_103103 PE=4 SV=1
MIYLTRVENFNAAHKLSNPAWSKEKNEEVFGKCANENWHGHNYELHVTVKGTPDPETGFVFNAKTLGVLIKDYIVEKVDHRNLNIDVDFMAGIFTSAENLAIGIWDQLTPHLPAGVELHCIKLYETPRIYVEYFGGK

SEQ ID NO: 19095 - protein, 137 aa, Chitinophaga japonensis
  REGION 1..137: note = tr|A0A562TCE3|A0A562TCE3_CHIJA 6-pyruvoyltetrahydropterin/6-carboxytetrahydropterin synthase OS=Chitinophaga japonensis OX=104662 GN=LX66_0116; PE = 4 SV=1
MIYLTRVENFNAAHKLSNPAWSKEKNLEVFGKCANDNWHGHNYELHVTIKGNPDKETGFVFNAKTLGDIIKDTIVEKVDHRNLNLDVDFMAGKFTSAENLAIAIWDELASHLPAEVQLHCIKLYETPRIYVEYYGGK

SEQ ID NO: 19096 - protein, 137 aa, unidentified
  source 1..137: note = Chitinophaga jiangningensis
  REGION 1..137: note = tr|A0A1M6W4B8|A0A1M6W4B8_9BACT 6-pyruvoyltetrahydropterin/6-carboxytetrahydropterin synthase OS=Chitinophaga jiangningensis OX=1419482; GN = SAMN05444266_101479 PE=4 SV =1
MIYLTRVENFNAAHKLSNPNWSAEKNEEVFGKCANVNWHGHNYELHVTIKGNPDPETGFVFNAKTLGVIIKDVVIEKIDHRNLNMDVDFMAGKFTSAENLAIAIWDQLSQHLPAEVMLHCIKLYETPRIYVEYYGGK

SEQ ID NO: 19097 - protein, 137 aa, Chitinophaga niabensis
  REGION 1..137: note = tr|A0A1N6HEC8|A0A1N6HEC8_9BACT 6-pyruvoyltetrahydropterin/6-carboxytetrahydropterin synthase OS=Chitinophaga niabensis OX=536979; GN = SAMN04488055_3331 PE=4 SV=1
MIYLTRVEHFNAAHKLFNPHWSKEQNLEVFGKCANDNWHGHNYDLHVTVKGNPDPETGFVFNAKTLGVLIKDLIIEKMDHKNLNLDVDFMAGKFTSAENVAIAIWEQLEKALPETVQLHCIKLHETAKIYVEYFGGK

SEQ ID NO: 19098 - protein, 137 aa, Chitinophaga niastensis
  REGION 1..137: note = tr|A0A2P8HVE2|A0A2P8HVE2_9BACT 6-pyruvoyltetrahydropterin/6-carboxytetrahydropterin synthase OS=Chitinophaga niastensis OX=536980; GN = CLV51_1011478 PE=4 SV=1
MIYLTRVENFNAAHKLSNPGWSKEKNEEVFGKCANENWHGHNYELHVTIKGNPDPQTGFVFNAKTLGDIIKDVVIEKIDHRNLNMDVDFMVGKFTSAENLSIAIWDQLAKHLPTDVQLHCIKLYETPRIYVEYYGGK

SEQ ID NO: 19099 - protein, 136 aa, unidentified
  source 1..136: note = Chitinophaga parva
  REGION 1..136: note = tr|A0A2T7BNK8|A0A2T7BNK8_9BACT 6-pyruvoyl tetrahydrobiopterin synthase OS=Chitinophaga parva; OX = 2169414 GN=DCC81_07130 PE=4 SV=1
MIYLTRVENFNAAHKLSNPAWSDEQNVAVFGKCANVNWHGHNYELHVTVKGTPDKDTGFVFNAKTLGDLIKIHVIEKVDHRNLNMDVDFMKGKFTSAENLAIGIWDQLTPHLPEGVQLHCIKLYETPRIYVEYFGA

SEQ ID NO: 19100 - protein, 137 aa, Chitinophaga pinensis
  REGION 1..137: note = tr|A0A5C6LZH8|A0A5C6LZH8_9BACT 6-carboxytetrahydropterin synthase OS=Chitinophaga pinensis OX=79329 GN=FEF09_02735 PE=4 SV=1
MIYLTRVENFNAAHKLSNPAWSKEKNEEVFGKCANENWHGHNYELHVTVKGTPDPETGFVFNAKTLGVLIKDFIVEKIDHRNLNMDVDFMVGKFTSAENLAIGIWDQLTPHLPEGVQLHCIKLYETPRIYVEYFGVK

SEQ ID NO: 19101 - protein, 151 aa, Chitinophaga pinensis
  REGION 1..151: note = tr|C7PFN0|C7PFN0_CHIPD Uncharacterized protein; OS = Chitinophaga pinensis (strain ATCC 43595 / DSM 2588 / NCIB 11800 / UQM 2034) OX=485918 GN=Cpin_6030 PE=4 SV=1
MKQIVRLTKIFRFEMAHALSGYKGLCRHIHGHSYQLEVTIKGQPDNTPGRSSEGMVLDFGDLKAIVQEEIIAPLDHALMLKEGSVLSLGGVDNELFARIVWTPWQPTCENMVLDFAGRIIAQLPDGVTLCRLKLYETHTSYAEWYASDNID

SEQ ID NO: 19102 - protein, 137 aa, unidentified
  source 1..137: note = Chitinophaga polysaccharea
  REGION 1..137: note = tr|A0A561Q5C0|A0A561Q5C0_9BACT 6-pyruvoyltetrahydropterin/6-carboxytetrahydropterin synthase OS=Chitinophaga polysaccharea OX=1293035; GN = FHW36_1011477 PE=4 SV=1
MIYLTRVENFNAAHKLSNPGWSKEKNEEVFGKCANENWHGHNYELHVTIKGNPDPDTGFVFNAKTLGVIIRDAVIEKIDHRNLNMDVDFMAGKFTSAENLSIAIWDQLAKHLPAEVQLHCIKLYETPRIYVEYYGGK

SEQ ID NO: 19103 - protein, 137 aa, Chitinophaga rupis
  REGION 1..137: note = tr|A0A1H8BT99|A0A1H8BT99_9BACT 6-pyruvoyltetrahydropterin/6-carboxytetrahydropterin synthase OS=Chitinophaga rupis OX=573321; GN = SAMN04488505_106311 PE=4 SV=1
MIYLTRVENFNAAHKLSNPAWSKEKNQEVFGKCANDNWHGHNYELHVTIKGTPDPETGFVFNAKTLGDVIKDVIVEKVDHRNLNMDVDFMAGKFTSAENLAIAIWDELAKNLPPAAQLHCIKLYETPRIYVEYYGGQ

SEQ ID NO: 19104 - protein, 136 aa, Chitinophaga sancti
  REGION 1..136: note = tr|A0A1K1PC17|A0A1K1PC17_9BACT 6-pyruvoyltetrahydropterin/6-carboxytetrahydropterin synthase OS=Chitinophaga sancti OX=1004; GN = SAMN05661012_01801 PE=4 SV=1
MIYLTRVENFNAAHKLSNPAWSKEKNKEVFGKCANENWHGHNYELHVTVKGEPDPETGFVFNAKTLGDLIEEYVVEEVDHRNLNIDVAFMAGKFTSAENLAIGIWEQLARHLPEGVQLHCVKLYETPRIYVEYYGG

SEQ ID NO: 19105 - protein, 141 aa, Chitinophaga sancti
  REGION 1..141: note = tr|A0A1K1S6K8|A0A1K1S6K8_9BACT 6-carboxy-5,6,7,8-tetrahydropterin synthase; OS = Chitinophaga sancti OX=1004 GN=SAMN05661012_04873 PE=3; SV = 1
MLQITKIFNFETAHALHGYAGKCRNLHGHSYKLHVTVSSKTPEEGYLGGTGILMDFKDLKKLVNEKVVDKFDHRLILSKAYLAANPNLGELENLEIWDMEPSAENIILYIKEELKGGFPEDVELVKLVLYETSDSYAEWIK

SEQ ID NO: 19106 - protein, 137 aa, Chitinophaga skermanii
  REGION 1..137: note = tr|A0A327Q274|A0A327Q274_9BACT 6-pyruvoyltetrahydropterin/6-carboxytetrahydropterin synthase OS=Chitinophaga skermanii OX=331697 GN=LX64_04811; PE = 4 SV=1
MIYLTRVEHFNAAHKLSNPGWSKEENKEVFGKCANENWHGHNYELHVTVKGEPHPETGFVFNAKTLGTLIHDVIIEQVDHRNLNVDVPFMAGKFTSAENFAIAIWEQLEQHLPEGAALHCIKLYETPKIYVEYYGGK

SEQ ID NO: 19107 - protein, 141 aa, Chitinophaga sp.
  REGION 1..141: note = tr|A0A5B9WQU7|A0A5B9WQU7_9BACT 6-carboxytetrahydropterin synthase OS=Chitinophaga sp. XS-30 OX=2604421 GN=FW415_15950 PE=4 SV=1
MLQVTKIFRFETAHALYGYAGSCRFIHGHSYVLHVTVRSTQQEDVYLPAPGILLDFKELKKLVQETVITHLDHQLVLSSAYVDANPGMAQEDNLLVMEAEPSAENLLLFIRNAIRGKLPAGTELAGLKLFETQDSFAEWVL

SEQ ID NO: 19108 - protein, 137 aa, Chitinophaga sp.
  REGION 1..137: note = tr|A0A5B9WTD0|A0A5B9WTD0_9BACT 6-carboxytetrahydropterin synthase OS=Chitinophaga sp. XS-30 OX=2604421 GN=FW415_23875 PE=4 SV=1
MIYLTRVEHFNAAHKLFNPQWSKEQNLEVFGKCANDNWHGHNYELHVTIKGEPDPETGFVFNAKTLGVLIKDVIVEKLDHKNLNMDVDFMKDKFTSAENVAIAIWEQLEQHLPETVQLHCIRLHETPKIYVEYYGGK

SEQ ID NO: 19109 - protein, 137 aa, Chitinophaga terrae
  REGION 1..137: note = tr|A0A1H4DBS3|A0A1H4DBS3_9BACT 6-pyruvoyltetrahydropterin/6-carboxytetrahydropterin synthase OS=Chitinophaga terrae Kim and Jung 2007; OX = 408074 GN=SAMN05660909_03023PE=4 SV=1
MIYLTRVENFNAAHKLSNPGWSKEKNEEVFGKCANENWHGHNYELHVTIKGNPDPETGFVFNAKTLGVIIKDTIIEKIDHRNLNLDVDFMKGKFTSAENLAIAIWDQLSKHLPAEVQLHCIKLYETPRIYVEYYGGK

SEQ ID NO: 19110 - protein, 137 aa, unidentified
  source 1..137: note = Chitinophagaceae bacterium
  REGION 1..137: note = tr|A0A3C0IUS5|A0A3C0IUS5_9BACT 6-carboxy-5,6,7,8-tetrahydropterin synthase; OS = Chitinophagaceae bacterium OX=1869212 GN=DCL43_13150; PE = 3 SV=1
MKKVAVFRKEHFNAAHRLHNPALTDAENARVFGKCNNVHYHGHNYELIVKVVGDIDPITGYVIDMKVLSDIIKIEVLDRFDHKNLNLDVPEFASINPTAENIAVVIYDLLRKQIPSEHSLKITLYETERNFVEYPAE

SEQ ID NO: 19111 - protein, 136 aa, unidentified
  source 1..136: note = Chitinophagaceae bacterium
  REGION 1..136: note = tr|A0A1Z5SIL2|A0A1Z5SIL2_9BACT 6-pyruvoyl tetrahydrobiopterin synthase OS=Chitinophagaceae bacterium IBVUCB1 OX=1985173 GN=CAP35_02670 PE=4 SV=1
MVYLTRVEHFNAAHRLYNNDWSDEQNREVFGKCANANWHGHNYELHVTVKGTPHPDTGFIFNAKTLGELIRDVIVERVDHRNLNLDVDFMKGKFTSAENFAIAIWDELQPHIQSNGASLHCIKLLETPRIYVEYFG

SEQ ID NO: 19112 - protein, 143 aa, Chlamydia sp.
  REGION 1..143: note = tr|A0A1M3BER8|A0A1M3BER8_9CHLA 6-carboxy-5,6,7,8-tetrahydropterin synthase OS=Chlamydia sp. 32-24 OX=1895742 GN=BGO10_10245 PE=4 SV=1
MTKIACVRKIHFCSGHRVLNHEGKCANAHGHNYYAHIFAEANNLDELGRVIDFSVLKEMIGGWIDKHWDHNFLVCDKDEEMLRALQLITSPKKPFICPFNPTAENMAIYLLEVICPQELKNTNVTVTKVIISETDNCYAEATL

SEQ ID NO: 19113 - protein, 116 aa, unidentified
  source 1..116: note = Chlamydiales bacterium
  REGION 1..116: note = tr|A0A212KPE4|A0A212KPE4_9CHLA 6-carboxy-5,6,7,8-tetrahydropterin synthase (Fragment); OS = Chlamydiales bacterium SCGC AB-751-O23 OX=1871322; GN = queD PE=4 SV=1
DTWETLVVQLKHHKGKCAIPHGHSYKLEVALKGDTLREKGEEKNMLMDFSFIAKAVKPLIEKYLDHKWLNDTLETDSPTAEFIAQWIYQQLSSKLPSLHKVTVWETKSCKVSYLEN

SEQ ID NO: 19114 - protein, 122 aa, unidentified
  source 1..122: note = Chloracidobacterium sp.
  REGION 1..122: note = tr|A0A257B5K8|A0A257B5K8_9BACT 6-carboxy-5,6,7,8-tetrahydropterin synthase; OS = Chloracidobacterium sp. CP2_5A OX=2012633 GN=queD PE=3; SV = 1
MLVELAKTFTFEAAHRLPHVPPDHKCRRLHGHSYRAEIVVRGEVDPELGWLLDFDQIKQAFEPLRQQLDHYYLNEIPGLENPTSEILARWIWERLSPALPCLYRVSIAETCTSACHYYGEAT

SEQ ID NO: 19115 - protein, 128 aa, unidentified
  source 1..128: note = Chloracidobacterium sp.
  REGION 1..128: note = tr|A0A257B839|A0A257B839_9BACT 6-carboxy-5,6,7,8-tetrahydropterin synthase; OS = Chloracidobacterium sp. CP2_5A OX=2012633 GN=queD PE=3; SV = 1
MHNRFYEVMVETQFSAAHALRRYQGQGESLHGHNWRIQVFVRGAQLDENHILIDFQAVRRATEEVMEYLDHKHLNEVPPFDQELNPSTENIAAFVFRQVAARINTDRCQVSLVRAWETPATMAAYGVG

SEQ ID NO: 19116 - protein, 128 aa, unidentified
  source 1..128: note = Chloracidobacterium thermophilum
  REGION 1..128: note = tr|G2LJC8|G2LJC8_CHLTF 6-carboxy-5,6,7,8-tetrahydropterin synthase; OS = Chloracidobacterium thermophilum (strain B) OX=981222; GN = Cabther_A2073 PE=3 SV=1
MNRHFYEVMVETQFSAAHALRHYRGQGESVHGHNWRIQVFVRGEKLDGNHILVDFRAVREATEEVMHYLDHKHLNELPPFDRELNPSTENIAAFVFHQVAKRINTPHYQVTLVRAWETPTTMAAYGLA

SEQ ID NO: 19117 - protein, 125 aa, unidentified
  source 1..125: note = Chloracidobacterium thermophilum
  REGION 1..125: note = tr|G2LI92|G2LI92_CHLTF 6-carboxy-5,6,7,8-tetrahydropterin synthase; OS = Chloracidobacterium thermophilum (strain B) OX=981222; GN = Cabther_A0793 PE=3 SV=1
MRVELAKTFTFEAAHHLPHVPPHHKCRRLHGHSYRVEIVVRGEVDPELGWLMDFDAIRQAFEPIRQQLDHYYLNDIPGLENPTSEILARWIWERLAPALPCLYRVSIAETCTSACHYYGEAPDNA

SEQ ID NO: 19118 - protein, 142 aa, Chlorobaculum limnaeum
  REGION 1..142: note = tr|A0A1D8CWL8|A0A1D8CWL8_CHLLM 6-pyruvoyl tetrahydropterin synthase OS=Chlorobaculum limnaeum; OX = 274537 GN=BIU88_03520 PE=4 SV=1
MLISRKIEIDYGHTLPNSFSFCNQLHGHRGVIVATVEGPVIERDGDAEEGMVMDFKFLRQIMDEHIHDLLDHGFAVWKEDKEDLEFILRRNSRVLVTDEPPTAEYLAKWAFNQIMGKLPEGVTLKNLRWYETPNNWADYDGQ

SEQ ID NO: 19119 - protein, 149 aa, Chlorobaculum limnaeum
  REGION 1..149: note = tr|A0A1D8D675|A0A1D8D675_CHLLM 6-carboxy-5,6,7,8-tetrahydropterin synthase; OS = Chlorobaculum limnaeum OX=274537 GN=BIU88_07215 PE=3; SV = 1
MNDILEKPRKIYVTRKIEFNAAHRLFNPELSDEENRRLYGKCSGTYGHGHNYLLEITLSGIIDRKTGYLFDLKELKKILEEEIVARFDHRHLNHEVSELAGHVPTTEILAVTVWEILESRLETITKKEVSLHEVKIHETGKNSVTYLGE

SEQ ID NO: 19120 - protein, 150 aa, Chlorobaculum parvum
  REGION 1..150: note = tr|B3QPA6|B3QPA6_CHLP8 Uncharacterized protein; OS = Chlorobaculum parvum (strain NCIB 8327) OX=517417; GN = Cpar_1357 PE=4 SV=1
MNTTPRDTMLISRKIEIDYGHTLPNSFTFCNQLHGHRGVIVASVEGPVINRDGDAEQGMVMDFKFLREIMDKQIHDVLDHGFAVWKEDKEDLEFILKRNTRVLVTDEPPTAEYLAKWAFNQISDKLPEGVTLKNLRWYETPNNWADFTGE

SEQ ID NO: 19121 - protein, 149 aa, Chlorobaculum parvum
  REGION 1..149: note = tr|B3QP42|B3QP42_CHLP8 Uncharacterized protein; OS = Chlorobaculum parvum (strain NCIB 8327) OX=517417; GN = Cpar_1292 PE=4 SV=1
MNDILEKPRKIYVTRTIEFNAAHRLFNPELSEEENRSLYGKCSGKYGHGHNYLLEITLSGPINRKTGYLFDLKKLKTILEEEIVTRFDHRHMNFEVKELQNHVPTTEILAVVVWDILETRLETITKQEVSLHEVKIHETGKNSVTYRGE

SEQ ID NO: 19122 - protein, 149 aa, Chlorobaculum sp.
  REGION 1..149: note = tr|A0A4Q1DFA8|A0A4Q1DFA8_9CHLB 6-carboxy-5,6,7,8-tetrahydropterin synthase; OS = Chlorobaculum sp. 24CR OX=2508878 GN=EST62_02965 PE=3; SV = 1
MNDILEKPRKIYVTRQIEFNAAHRLFNPELSDEENLRLYGKCSGAYGHGHNYLLEITLSGLIDRKTGYLFDLKELKKILEEEIVARFDHRHLNHEVSELAGHVPTTEILAVVVWDILELRLQTITKQEVSLHEVKIHETGKNSVTYLGE

SEQ ID NO: 19123 - protein, 120 aa, Chlorobaculum sp.
  REGION 1..120: note = tr|A0A4Q1D2P6|A0A4Q1D2P6_9CHLB 6-carboxytetrahydropterin synthase (Fragment); OS = Chlorobaculum sp. 24CR OX=2508878 GN=EST62_10660 PE=4; SV = 1
MLISRKIEIDYGHTLPNSFSFCNQLHGHRGVIVATVEGPVIERHGDAEEGMVMDFKFLRQIMDEHIHDLLDHGFAVWKEDKEDLEFILRRNSRVLVTDEPPTAEYLAKWAFRQIEGKLPE

SEQ ID NO: 19124 - protein, 149 aa, Chlorobaculum tepidum
  REGION 1..149: note = tr|Q8KEA7|Q8KEA7_CHLTE 6-carboxy-5,6,7,8-tetrahydropterin synthase; OS = Chlorobaculum tepidum (strain ATCC 49652 / DSM 12025 / NBRC 103806 / TLS) OX=194439 GN=CT0782 P E=3 SV=1
MNDIVEKPRKIYVTRQIEFNAAHRLFNPELSDEENQQLYGKCSGKYGHGHNYLLEITLSGIIDRKTGYLFDLKELKKILEEEIVARFDHRHLNHEVNELAGHVPTTEILAVIVWEILDSRLKTITKQEVSLHEVIIHETGKNSVTYRGE

SEQ ID NO: 19125 - protein, 178 aa, Chlorobaculum tepidum
  REGION 1..178: note = tr|Q8KCI4|Q8KCI4_CHLTE 6-pyruvoyl tetrahydrobiopterin synthase, putative OS=Chlorobaculum tepidum (strain ATCC 49652 / DSM 12025 / NBRC 103806 / TLS) OX=194439 GN=CT 1437 PE=4 SV=1
MPSMIDLSGYPDSSVFYGKIYVHFVNISVNTTLRDTMLISRKIEIDYGHTLPNSFTFCNQLHGHRGVIVATVEGPVIDRAGDAEEGMVIDFKFLRQIMDEHIHDQLDHGFAVWKEDKEDLEFILKRNTRVLVTDAPPTAECLARWAFNQISGKLPEGVILKNLRWYETPNNWADYTGG

SEQ ID NO: 19126 - protein, 149 aa, Chlorobaculum thiosulfatiphilum
  REGION 1..149: note = tr|A0A5C4S4R5|A0A5C4S4R5_CHLTI 6-carboxy-5,6,7,8-tetrahydropterin synthase; OS = Chlorobaculum thiosulfatiphilum OX=115852; GN = FGF66_08890 PE=3 SV=1
MNDILEKPRKIYVTRQIEFNAAHRLFNPELSDEENRRLYGKCSGAFGHGHNYLLEITLSGIIDRKTGYLFDLKELKKILEEQIVARFDHRHLNHEVSELAGHVPTTEILAVTVWEILESQLETITKKEVRLHEVKIHETGKNSVTYRGE

SEQ ID NO: 19127 - protein, 142 aa, Chlorobaculum thiosulfatiphilum
  REGION 1..142: note = tr|A0A5C4S5D0|A0A5C4S5D0_CHLTI 6-carboxytetrahydropterin synthase OS=Chlorobaculum thiosulfatiphilum OX=115852 GN=FGF66_09030 PE=4 SV=1
MLISRKIEIDYGHTLPNSFSFCNQLHGHRGVIVATVEGPVIERHGDAEEGMVMDFKFLRQIMDEHIHDLLDHGFAVWKEDKEDLEFILRRNSRVLVTDEPPTAEYLAKWAFRQISGKLPEGVRLKNLRWYETPNNWADYDDE

SEQ ID NO: 19128 - protein, 149 aa, unidentified
  source 1..149: note = Chlorobi bacterium
  REGION 1..149: note = tr|A0A3M1LSL4|A0A3M1LSL4_9BACT 6-carboxy-5,6,7,8-tetrahydropterin synthase OS=Chlorobi bacterium OX=2268192 GN=D6747_06160 PE=3 SV=1
MNTVRIAKEFRWEMGHRLPLHSGQCSNIHGHSYRLRIALDGIPDANGMVMDFYDLAALAQPIVDMLDHAFLCSSDDETLLRFFRDHPEFKVVTVPFPTTVENICRWIAEHLGQQLRRYQNVTRLHVRLHETATAFAECEVPLSTTPSAP

SEQ ID NO: 19129 - protein, 148 aa, unidentified
  source 1..148: note = Chlorobi bacterium
  REGION 1..148: note = tr|A0A4P5USZ2|A0A4P5USZ2_9BACT 6-carboxy-5,6,7,8-tetrahydropterin synthase OS=Chlorobi bacterium OX=2268192 GN=LBMAG36_03540 PE=3 SV=1
MVYVTRKMHFSASHRLYNPTFEPEKNNLIFDKCNNLNGHGHNYTLEVTVKGVPDPETGYVIDLKYLRDLLDLHIVDKVDHKHLNYDVDFLQGIIPTAENIAVSFWRILDPKIVQGKLHSIKLFESDQNFVEYFGDPITIPIYTTVESN

SEQ ID NO: 19130 - protein, 142 aa, unidentified
  source 1..142: note = Chlorobium chlorochromatii
  REGION 1..142: note = tr|Q3ATI1|Q3ATI1_CHLCH 6-pyruvoyl tetrahydrobiopterin synthase, putative OS=Chlorobium chlorochromatii (strain CaD3) OX=340177 GN=Cag_0421 PE=4; SV = 1
MRISRKIEIDYGHTLPNSFSFCNQLHGHRGVVVATVEGNIISQEQHSQQGMVMDFKFLKDIMVEQIHDKLDHGFAVWKHDTEDLEFITRRNTRVLITDEPPTAECLARWAFHQMQPHLPAGVTLQRIRWYETPNNWADYEGE

SEQ ID NO: 19131 - protein, 148 aa, unidentified
  source 1..148: note = Chlorobium chlorochromatii
  REGION 1..148: note = tr|Q3ATM9|Q3ATM9_CHLCH 6-carboxy-5,6,7,8-tetrahydropterin synthase OS=Chlorobium chlorochromatii (strain CaD3) OX=340177 GN=Cag_0373 PE=3; SV = 1
MNDLLEKPRKIYVSRSIEFNAAHRLCNPTLTEEENCAIYGKCNNPHGHGHNYLLTITLSGTINRQTGFLFDLKALKAILEEEIVERFDHKHLNYDVPELSNCIPTTEILAVLIWDILAQRFTTINPAITLHEVHLYETGKNAVRYYGE

SEQ ID NO: 19132 - protein, 149 aa, unidentified
  source 1..149: note = Chlorobium ferrooxidans
  REGION 1..149: note = tr|Q0YQ67|Q0YQ67_9CHLB 6-carboxy-5,6,7,8-tetrahydropterin synthase OS=Chlorobium ferrooxidans DSM 13031 OX=377431 GN=CferDRAFT_0344 PE=3; SV = 1
MNELLEKPRRVYVSRKIEFNAAHRLFNPDFTDEENGEIYGKCSNKNGHGHNYLLEITLYGVVDPATGFLFDLKELKAILEEEIIERFDHRNLNLDVPELRECVPTTEVLAVLIWDILEQRLRNINNREIALHEVKIYETGKNSVRYLGE

SEQ ID NO: 19133 - protein, 171 aa, unidentified
  source 1..171: note = Chlorobium ferrooxidans
  REGION 1..171: note = tr|Q0YPI9|Q0YPI9_9CHLB Uncharacterized protein; OS = Chlorobium ferrooxidans DSM 13031 OX=377431; GN = CferDRAFT_0177 PE=4 SV=1
MGRFAKNHFFCVHFACYREKEKENLFTNPMRISRKIEIDYGHTLPNSFSFCNQLHGHRGVVVATVEGRLIDREGDGEEGMVMDFKFLKEVMVEHIHDKLDHGFAVWKHDHEDLDFILKRNSRVLVTEEPPTAECLAKWAFNQIRCNLPEGVALKQIRWYETPNNWAEYEGE

SEQ ID NO: 19134 - protein, 143 aa, Chlorobium limicola
  REGION 1..143: note = tr|B3EE06|B3EE06_CHLL2 Uncharacterized protein; OS = Chlorobium limicola (strain DSM 245 / NBRC 103803 / 6330) OX=290315 GN=Clim_1666 PE=4 SV=1
MQISRKIEIDYGHTLPNSFSFCNQLHGHRGAIVATVEGPMINRKGEKEEGMVMDFKFLKDIMVRHIHDILDHGFAVWKDDREDLEFIMKRNSRVLVTDEPPTAECLAKWAFNQIKNHLPEGVILKQVRWYETPNNWADYEGIQ

SEQ ID NO: 19135 - protein, 142 aa, Chlorobium limicola
  REGION 1..142: note = tr|A0A101JPD5|A0A101JPD5_CHLLI 6-pyruvoyl tetrahydropterin synthase OS=Chlorobium limicola OX=1092; GN = ASB62_03770 PE=4 SV=1
MRISRKIEIDYGHTLPNSFSFCNQLHGHRGVVIATVEGPVIDRSGDGEEGMVMDFKFLKDIMIRYIHDVLDHGFAVWKHDREDLEFIMKRNTRILVTEEPPTAECLAKWAFNQILEKLPAGVEMKEVTWYETPNNWATFTGE

SEQ ID NO: 19136 - protein, 152 aa, Chlorobium phaeobacteroides
  REGION 1..152: note = tr|A1BF48|A1BF48_CHLPD Uncharacterized protein; OS = Chlorobium phaeobacteroides (strain DSM 266) OX=290317; GN = Cpha266_0977 PE=4 SV=1
MLHMNAPLQRKRKIYVTRTIGFNAAHRLFNPDFSDQENHKIYGKCSNEHGHGHNYELEITLYGTIDPQTGFLFDLKQLKSILEEEITERFDHKHLNFDVREMQDCVPTTELLAVVIWDILDLRLQQFNNREITLYEVKIYETGKNAVRYLGQ

SEQ ID NO: 19137 - protein, 143 aa, Chlorobium phaeobacteroides
  REGION 1..143: note = tr|A1BHI6|A1BHI6_CHLPD Uncharacterized protein; OS = Chlorobium phaeobacteroides (strain DSM 266) OX=290317; GN = Cpha266_1847 PE=4 SV=1
MRISRKIEIDYGHTLPNSFSFCNQLHGHRGVIVATVEGKMIERTGGDEEGMVMDFKFLKEIMVEHIHDKLDHGFAVWKEDHEDLEFILKRNSRVLITDEPPTAECLAKWAFNQLRHRLPEGVLLREVRWYETPNNWADYDGIQ

SEQ ID NO: 19138 - protein, 141 aa, Chlorobium phaeovibrioides
  REGION 1..141: note = tr|A4SFK9|A4SFK9_CHLPM Uncharacterized protein; OS = Chlorobium phaeovibrioides (strain DSM 265 / 1930); OX = 290318 GN=Cvib_1256 PE=4 SV=1
MQISRKIEIDYGHTLPNHYSFCNQLHGHRGVIVATVEGPVVAETGDSREGMVMDFKFLKDIMVERIHNKLDHGFAVWKDDHEDLEFILKRNTRVLVTDEPPTAEFLAKWAFGQIKNHLPEAVTLTNLRWYETPNNWADYNG

SEQ ID NO: 19139 - protein, 157 aa, Chlorobium phaeovibrioides
  REGION 1..157: note = tr|A0A3S0NIG4|A0A3S0NIG4_CHLPH 6-carboxytetrahydropterin synthase OS=Chlorobium phaeovibrioides OX=1094 GN=EKD02_08165 PE=4 SV=1
MKKKKSPPPPAPANRPRKLYVTRTIEFNAAHRLFNPEFSDEKNREIYGKCANAHGHGHNYLLEITLGGIMDPDTGFLFDLKELKGILEEEVMARFDHRHLNHDVPELNDLVPTTEVLAVLIWDILEQRFQNIDNREISLQAVKIHETGKNSVSYLGE

SEQ ID NO: 19140 - protein, 146 aa, Chlorobium sp.
  REGION 1..146: note = tr|A0A4R0QM39|A0A4R0QM39_9CHLB 6-carboxytetrahydropterin synthase OS=Chlorobium sp. N1; OX = 2491138 GN=E0L29_01640 PE=4 SV=1
MRISRKIEIDYGHTLPNHFSFCNQLHGHRGVVVATVEGPVVEQRGDSQEGMVMDFKFLKEIMVKHVHDRLDHGFAVWKEDHEDLEFILKRNTRVLVTDEPPTAEYLAKWAFGEIRNHLPEGIALKNLRWYETPNNWADYDGQGEKE

SEQ ID NO: 19141 - protein, 149 aa, Chlorobium sp.
  REGION 1..149: note = tr|A0A533TR82|A0A533TR82_CHLSQ 6-carboxy-5,6,7,8-tetrahydropterin synthase OS=Chlorobium sp. OX=1095 GN=FDX18_03795 PE=3 SV=1
MNDLLQKPRKIYVSRSIEFNAAHRLFNPQFSEAENLAIYGKCSNLYGHGHNYLLEITISGIVDRNTGFLFDLKELKTILEEEIIARFDHKHLNHDVPELQECVPTTEVLAVLIWDILEQRVRNINNGEFTLHEVKIYETGKNAVRYLGE

SEQ ID NO: 19142 - protein, 90 aa, unidentified
  source 1..90: note = Chloroflexi bacterium
  REGION 1..90: note = tr|A0A2M7K0C2|A0A2M7K0C2_9CHLR 6-carboxytetrahydropterin synthase QueD (Fragment); OS = Chloroflexi bacterium CG_4_8_14_3_um_filter_45_15; OX = 1973939 GN=queD PE=4 SV=1
MYQLFIEEHFDAAHRLRNYQGKCENLHGHRYKVIARVEGEKINNSGMVYDFAQLKYYLREILARFDHAYLNEVPPFDQIEPSCENLAASI

SEQ ID NO: 19143 - protein, 126 aa, unidentified
  source 1..126: note = Chloroflexi bacterium
  REGION 1..126: note = tr|A0A1F8PEK0|A0A1F8PEK0_9CHLR 6-pyruvoyl tetrahydropterin synthase OS=Chloroflexi bacterium RBG_16_51_16 OX=1797644 GN=A2Y54_07735 PE=4 SV=1
MYTLALRREFIARHFLIGGDWGPENFPNSHHYVLELRLKGPELDEHGYLCDLVEVEKWLNEKVAYFSEKMLNEMPEFHEINPSLEHFARILCTSLAEQIKSTAITGVTVILWENTSAWASFEINRY

SEQ ID NO: 19144 - protein, 130 aa, Chloroflexus aggregans
  REGION 1..130: note = tr|B8G7W6|B8G7W6_CHLAD Putative 6-pyruvoyl tetrahydropterin synthase OS=Chloroflexus aggregans (strain MD-66 / DSM 9485) OX=326427 GN=Cagg_1237 PE=4 SV=1
MYEIGVSAQFEAAHRLEGNFGPATRMHGHTYRLEAIVTGERLQPDGTLVDMSQLQAAVQRVVADLHYRDLGTVEGLRDINTTAEHVAYYCWRRIAAALSGAGLTTLTVRIWENPQVYAAYSETLVSSDGT

SEQ ID NO: 19145 - protein, 130 aa, Chloroflexus aggregans
  REGION 1..130: note = tr|A0A2J6XB74|A0A2J6XB74_9CHLR 6-carboxytetrahydropterin synthase OS=Chloroflexus aggregans OX=152260 GN=C0184_03070 PE=4 SV=1
MYEVCVSAQFEAAHRLEGNFGPATRMHGHTYRLEAIVTGERLQPDGTLFDISQLQAAVQAIVADLHYRDLGTVEGLRDVNTTAEQVAYYCWRRIAAALSGTDLTTLAVRIWENPQVYAAYSETLASSAGT

SEQ ID NO: 19146 - protein, 126 aa, Chloroflexus aurantiacus
  REGION 1..126: note = tr|A9WC20|A9WC20_CHLAA 6-carboxy-5,6,7,8-tetrahydropterin synthase; OS = Chloroflexus aurantiacus (strain ATCC 29366 / DSM 635 / J-10-fl) OX=324602 GN=Caur_0159 PE=3 SV =1
MYEVGVIAQFEAAHRLEGNFGPATRMHGHTYRLEAIVSGERLQADGTLFDITRLQEAVNAIVADLHYRDLGTVAGLENVNTTAENVARYCWDRIAAAIRGVGLMTLTVRIWENPQAFASYQSRLEG

SEQ ID NO: 19147 - protein, 274 aa, Chloroflexus aurantiacus
  REGION 1..274: note = tr|A9WIW9|A9WIW9_CHLAA Uncharacterized protein; OS = Chloroflexus aurantiacus (strain ATCC 29366 / DSM 635 / J-10-fl) OX=324602 GN=Caur_2640 PE=4 SV=1
MVVATRRFEFSAAHRYWRDDWSAEENERVFGPYTSPYGHGHNYTLDVSITGELDERTGMVMNMTELKAIVNEVLEEFDHKHLNYDTPYFRDQVPTTENLVRVLWRLIAARLPAHARLKHLRLYEQPDLWAEYDGVGETQFARLYTFAAAHRLHAPALSDEENLAIYGKCNNPNGHGHNYTLEVTVQGPIDPATGMLVDLEWLDRTVHSVIDRLHLRHLDREIPAFADRPSTAENIIVYLWNELAPLLEGRLALLRLWETRKNIFSYAGPSVIPA

SEQ ID NO: 19148 - protein, 125 aa, unidentified
  source 1..125: note = Chloroflexus islandicus
  REGION 1..125: note = tr|A0A178MBJ9|A0A178MBJ9_9CHLR 6-pyruvoyl tetrahydropterin synthase OS=Chloroflexus islandicus; OX = 1707952 GN=A6A03_13705 PE=4 SV=1
MYEIGVNAQFEAAHRLEGNFGPATRMHGHTYRLEAIVTGPHLQPDGTLFDITRLHEAVNAIVADLHYRDLGTVEGLHNVNTTAEHVARYCWERIAAALRGSGLTTLTVRIWENPQAYAAYGSALE

SEQ ID NO: 19149 - protein, 274 aa, unidentified
  source 1..274: note = Chloroflexus islandicus
  REGION 1..274: note = tr|A0A178MI46|A0A178MI46_9CHLR 6-pyruvoyl tetrahydropterin synthase OS=Chloroflexus islandicus; OX = 1707952 GN=A6A03_08565 PE=4 SV=1
MVIATRRFEFSAAHRYWRDDWSAAENERVFGPYTSPYGHGHNYILDVSITGQLDERTGMVMNMTELKAIVNEVLEEFDHKHLNFDTPYFRDQVPTTENFVRVLWRLIAARLPAHARLAHLRLYEQPDLWADYDGVGETQFSRLYMFASAHRLHAPALNDAENREIYGKCNNPNGHGHNYTLEVTVQGEIDPATGMLVDMAWLDQTVHSVIDPLHLHHLDNEIAAFADRPSTAENIIVYLWNELAPRLAGRLALLRLWETRKNIFSYAGPVSVPA

SEQ ID NO: 19150 - protein, 288 aa, Chlorogloea sp.
  REGION 1..288: note = tr|A0A2T1ES11|A0A2T1ES11_9CHRO 6-pyruvoyl tetrahydropterin synthase OS=Chlorogloea sp. CCALA 695; OX = 2107693 GN=C7B70_01200 PE=4 SV=1
MQCIVNRRAQFSASHRYWLPELSEAENNQLFGLCTRNPGHGHNYVLYVAISGELDSYGMVMNLSEVKQVIKREITDYLDYSYLNDAWSEFQQTLPTTENIARIIWQKLESHLPLVNIQLFEHPQLWADYQGNGMEAYLTISTHFSAAHRLAHPDLSYDENVKIYGKCARPNGHGHNYHLEVTVKGEVNPRTGMLVDLGALQSAIDEQVIEPFDHTFLNKDIAYFNDVVPTAENIAVRIQDLLRLPIQELGAQLHKIKLIESPNNSCEVYCVQPQTKVSSSSDAVLTSV

SEQ ID NO: 19151 - protein, 140 aa, Chlorogloeopsis fritschii
  REGION 1..140: note = tr|A0A433N6D4|A0A433N6D4_CHLFR 6-carboxy-5,6,7,8-tetrahydropterin synthase; OS = Chlorogloeopsis fritschii PCC 6912 OX=211165; GN = PCC6912_39980 PE=3 SV=1
MTWLLGKEFRFEAAHYLPNHDGKCARLHGHSWKGVVYVIGTTLIESGTKEGMLIDYSDVKGAIAPLLENYLDHHYLNETTGLEVPTSERLAKWIYEKLEYTLPGLWGVRIDETCTSTCLYTKSSNPALILSDGFTMGGIA

SEQ ID NO: 19152 - protein, 290 aa, Chlorogloeopsis fritschii
  REGION 1..290: note = tr|A0A3S1A035|A0A3S1A035_CHLFR 6-pyruvoyltetrahydropterin synthase OS=Chlorogloeopsis fritschii PCC 6912 OX=211165 GN=PCC6912_42410 PE=4 SV=1
MQCVVNRRAQFSASHRYWLPELSEAENVEKFGACSRFPGHGHNYVLFVSLVGELDKYGMVLNLSDVKQVIKQEVTSQLDFSYLNDVWAEFQQTLPTTENIARAIWQRLAPHLPLVRIQLFENSELWADYMGNGMEAYLTVSTHFSAAHRLAHPNLSNEENFEIYGKCARPNGHGHNYHLEVTVKGEIDPRTGMIVDLGALNQVIEDYVVEPFDHTFLNKDIPYFAEVVPTAENIALHISNLLRSPVQDLGAKLFKVKLIESPNNSCEIYCTEPESNIVSAAQNQPALIGL

SEQ ID NO: 19153 - protein, 142 aa, Chloroherpeton thalassium
  REGION 1..142: note = tr|B3QY96|B3QY96_CHLT3 Uncharacterized protein; OS = Chloroherpeton thalassium (strain ATCC 35110 / GB-78); OX = 517418 GN=Ctha_2613 PE=4 SV=1
MFRISRKIEIDYGHTLPKHYGFCNQLHGHRGVIVATVEGELNQAQNASDQGMVIDFKFLSHILKTKIHDVLDHGFAVWRDSKEDYEMVTKRNTKVLATELPPTAEVLAKWAFKQIESDLPEGVRLVNLRWYETPNNWADYSG

SEQ ID NO: 19154 - protein, 153 aa, Chloroherpeton thalassium
  REGION 1..153: note = tr|B3QUQ1|B3QUQ1_CHLT3 Uncharacterized protein; OS = Chloroherpeton thalassium (strain ATCC 35110 / GB-78); OX = 517418 GN=Ctha_0486 PE=4 SV=1
MNTEFNRILKEKHTVFVTRKVHFSAAHRLFNPEFSDAENELIYDRCNNIYGHGHNYELEVTLKGPVDKATGYVFDLKKLDKILSEEILSKVDHKHLNFDVEMLKDMIPSAEVLSIVFWNAIQNRLSELGYTQVALYEVKLFESERNFVRYRGD

SEQ ID NO: 19155 - protein, 290 aa, Chondrocystis sp.
  REGION 1..290: note = tr|A0A1Z4RTF4|A0A1Z4RTF4_9CHRO Uncharacterized protein OS=Chondrocystis sp. NIES-4102 OX=2005460; GN = NIES4102_27750 PE=4 SV=1
MKCTINRRAQFSASHRYWLPDIDEAENQRLFGACSRFPGHGHNYVLYVSLAGELDQYGMVENLSWVKQVIKKEVTSQLNYSHLNDTWSEFQQTLPTTENIARVIWQKLAPYLPLVNIQLFETPELWADYQGNNMEATLTIKTHFSAAHRLAIPSLSFEENQEIYGKCARPNGHGHNYHLEVTVAGNIDERTGMLVDLGALQQVIDEYVVEPFDHTFLNKDIPYFAEVVPTAENIAVRIADLLRSPIKELGAELDKIKLIESPNNSCEINCRVYQATSNTSATQEPAMISQ

SEQ ID NO: 19156 - protein, 120 aa, Chondromyces apiculatus
  REGION 1..120: note = tr|A0A017SZA8|A0A017SZA8_9DELT 6-carboxy-5,6,7,8-tetrahydropterin synthase; OS = Chondromyces apiculatus DSM 436 OX=1192034 GN=CAP_7263; PE = 3 SV=1
MNTRLVHEFRFEAAHRLPKVPRGHRCERLHGHSFRVEIAIEGRVREETGWVIDFYDLEKAWAPLHEKLDHHYLNEVPGLENPTSEIIAHWIWEQLTPSLPGLCRVTVFETCEARCEYEGG

SEQ ID NO: 19157 - protein, 120 aa, Chondromyces crocatus
  REGION 1..120: note = tr|A0A0K1E600|A0A0K1E600_CHOCO 6-carboxy-5,6,7,8-tetrahydropterin synthase; OS = Chondromyces crocatus OX=52 GN=CMC5_001100 PE=3 SV=1
MNIRLVHEFRFEAAHRLPRVPPGHKCERLHGHSFRAEIAIRGPVREETGWVVDFADLEAAWAPLHAQLDHNYLNEIPGLENPTSEILSRWIWDRLSPALPGLCRVTVYETCEARCEYEGD

SEQ ID NO: 19158 - protein, 368 aa, unidentified
  source 1..368: note = Chromatiaceae bacterium
  REGION 1..368: note = tr|A0A3D4RW30|A0A3D4RW30_9GAMM 6-pyruvoyl tetrahydropterin synthase OS=Chromatiaceae bacterium; OX = 2049432 GN=DIW77_07305 PE=4 SV=1
MSERLFHVAAAPFEAARRVLTVPDQHPAHRLHGHSFVARLRAELPPGWAAFAGGETDALKAALDHCIATLDYSDLNQHLAIPTDENLARWVRRCLHVPGIKSVGIQSTRDQGANLDADEHASIWRRFRFEAAHQLPNVRRGHPCGRMHGHGFEVVLHAKQAQSDADRGIDLDALDVLWEPIQEELQYACLNDIPGLENPTSEMIAGWLWRRLKPQLPALCWITVYETITAGCHYDGTHYRIWKERRFESALRLMQAPQGDRRRRLHGHSYLLRLHLSAPLDQVLGWTVDYGDVKQCFEPVYKQLDHHLLNELPGLDRSDPASLARWMRETIGARLPRLDRIDLHQTPGCGAVLCWGASGPADAALVEG

SEQ ID NO: 19159 - protein, 137 aa, unidentified
  source 1..137: note = Chromatiaceae bacterium
  REGION 1..137: note = tr|A0A3D4RZJ5|A0A3D4RZJ5_9GAMM 6-carboxytetrahydropterin synthase OS=Chromatiaceae bacterium OX=2049432 GN=DIW77_18745 PE=4 SV=1
MYSLCVRDHIMIAHSFQGQIFGPAQRLHGATFIVDCEFRREQLDADGLVVDIGKASEVLHRLLDQLNYRNLDEDPEFAGQNTTTEFMARAIFERMAALIAAGELGPGAVGLSSLRVVLSESHLAWAAYEAPLNRAAG

SEQ ID NO: 19160 - protein, 127 aa, unidentified
  source 1..127: note = Chromatiales bacterium
  REGION 1..127: note = tr|A0A257SYC9|A0A257SYC9_9GAMM 6-carboxy-5,6,7,8-tetrahydropterin synthase; OS = Chromatiales bacterium 21-64-14 OX=1970504; GN = B7Z66_00770 PE=3 SV=1
MAAPYTLRILTDFASAHTLQGYPGACARMHGHNWKLEVEVEATGLDDMGMGVDFKIIKGAARELSDQLDHRYLNEIEPFDRINPTAENLAAWFYQGLSGKLNDGRVRVSAVTLWETDRACVRYAEER

SEQ ID NO: 19161 - protein, 83 aa, unidentified
  source 1..83: note = Chromatiales bacterium
  REGION 1..83: note = tr|A0A524K454|A0A524K454_9GAMM 6-pyruvoyl tetrahydropterin synthase family protein (Fragment); OS = Chromatiales bacterium OX=2026725 GN=E4H19_14905 PE=4; SV = 1
MEIFKEFIFEAAHRLPNVPPGHKCARLHGHSWRGAIYIRGPVDPHTGWIMDFGEIKQRFAPIYDMLDHHYLNDVPGLENPTSE

SEQ ID NO: 19162 - protein, 167 aa, Chromatium okenii
  REGION 1..167: note = tr|A0A2S7XU40|A0A2S7XU40_9GAMM 6-pyruvoyl tetrahydropterin synthase OS=Chromatium okenii OX=61644; GN = CXB77_02920 PE=4 SV=1
MPNQKPLIRIEISKEYLNFSAGHFTLFSATERENLHGHNFQVQAAVTTTVGADGLAFDYVLLKRVLKTLCDQWDERVLLPQQSPYLRLEQRDGMLLAHFADEQIPFLHRDVLTLPLRNVTIEELAALLLARLREHPDLASRDLRAIELGVSSGLGQWAFSSWEQQTA

SEQ ID NO: 19163 - protein, 167 aa, Chromatium okenii
  REGION 1..167: note = tr|A0A2S7XQA9|A0A2S7XQA9_9GAMM 6-pyruvoyl tetrahydropterin synthase OS=Chromatium okenii OX=61644; GN = CXB77_08395 PE=4 SV=1
MPNQKPLIRIEISKEYLNFSAGHFTLFSATERENLHGHNFQVQAAVTTTVGADGLAFDYVLLKRVLKTLCDQLDERVLLPQQSPYLRLEQRDGMLLAHFADEQIPFLHRDVLALPLRNVTIEELSALLLARLREHPDLAAHEICAIELGVSSGLGQWAFSSWEQQTA

SEQ ID NO: 19164 - protein, 118 aa, Chromatocurvus halotolerans
  REGION 1..118: note = tr|A0A4R2L3D7|A0A4R2L3D7_9GAMM 6-carboxy-5,6,7,8-tetrahydropterin synthase; OS = Chromatocurvus halotolerans OX=1132028 GN=EV688_101131; PE = 3 SV=1
MDIYKDFHFEAAHRLPNVPEGHKCARLHGHSFHVRITVSGEAPEPAGWVMDFADLKAGFRPLLEQLDHYYLNDIPGLENPTSENLCRWIWQRLQPALPALSCVEIRETCTSGCRYRGE

SEQ ID NO: 19165 - protein, 164 aa, Chromatocurvus halotolerans
  REGION 1..164: note = tr|A0A4R2KQQ8|A0A4R2KQQ8_9GAMM 6-pyruvoyltetrahydropterin/6-carboxytetrahydropterin synthase OS=Chromatocurvus halotolerans OX=1132028; GN = EV688_106145 PE=4 SV=1
MNNQEPQLATLYIDKESHKFSAAHYTIFSATERERLHGHNYSVSAKIVAPMGNNGFAADYNVYKNRIKRLCDELDEYMILPEHSPHQTLEDGGTHYRVAFANDTLHFLKSDTLVLPIVNATVEEFSRYLLARVIADSRGEDLREVQICVASGPGQKGCTTWTAG

SEQ ID NO: 19166 - protein, 160 aa, Chromatocurvus sp.
  REGION 1..160: note = tr|A0A2N5Y0N6|A0A2N5Y0N6_9GAMM 6-pyruvoyl tetrahydropterin synthase OS=Chromatocurvus sp. F02; OX = 1905677 GN=CWI75_12525 PE=4 SV=1
MERLTTLYIDKESHKFSAAHYTIFSAYERERLHGHNYSVSARIVAPMGDNGFAADYNVYKRRLKALCDALDEYMVLAEDSPYQRIEDLGHAYRVYFAEDEMFFLKSDTRVLPIRNATVEEFSGYLLQQLLLVSEGDDLREIELCVASGPGQKGCASWRKP

SEQ ID NO: 19167 - protein, 119 aa, Chromatocurvus sp.
  REGION 1..119: note = tr|A0A2N5Y336|A0A2N5Y336_9GAMM 6-carboxy-5,6,7,8-tetrahydropterin synthase; OS = Chromatocurvus sp. F02 OX=1905677 GN=queD PE=3 SV=1
MDIYKEFHFEAAHRLPNVPPGHKCARLHGHSFQVRLTVSGEAREPSGWVMDFGDLKRAFQPVLDRLDHYYLNDIPGLENPTSENIARWIWQQLASALPQLAQVEIRETCTSGCIYRGQD

SEQ ID NO: 19168 - protein, 339 aa, unidentified
  source 1..339: note = Chromobacterium amazonense
  REGION 1..339: note = tr|A0A2S9X2Y6|A0A2S9X2Y6_9NEIS 6-pyruvoyl tetrahydrobiopterin synthase OS=Chromobacterium amazonense; OX = 1382803 GN=BUE93_15595 PE=4 SV=1
MHASYLLAGAGFEAARQLPAAAGKASRPHGHSFRVLVRSESQCGDAAALESAVHGALSPLDYTDLNAQLADSGDLALARHIAQALPHPAAIKLQGAPDRGVTVDGPHAFCWLNASFEAAHHLPHVPVGHKCGRLHGHGFGVRLVADAARCGIQELEQAWAPLFHRLNHRYLNDIAGLDNPTSEVLALWLHQQLKPTMPGLAWVEVRETHTAGSQFDGQRFRIWKEQRFESAMPFDEAGNYTGHSYLVRLMLAGDIDRAMGWLLDFGDVKDRFKPIYRQLDHNPLDKLAGLRRHDNAAVAEWIHAQLSPLVPELDRIDLMESERAGVSLHFHQDMRWPLL

SEQ ID NO: 19169 - protein, 339 aa, Chromobacterium haemolyticum
  REGION 1..339: note = tr|A0A2T5NUB9|A0A2T5NUB9_9NEIS 6-pyruvoyl tetrahydrobiopterin synthase OS=Chromobacterium haemolyticum OX=394935 GN=DBB33_06355 PE=4 SV=1
MHTSNLIAGARFEAARQVNGASDLTARPHGHSFRVIARADAQYPGHEQLQAALDAAVAPLDYADLNRQLAQCDDLALAAHLRAALPCPATLSLQSSPQRGVALDGDTALNWIQVQFEAAHQLPHVPAGHKCGRLHGHGFGVRLAADARLSGHPRLEAAWKPLFLELNHRYLNDIAGLDNPTSEVLAQWLHQRLADTLPGLAWVEVRETHSAGSQFDGQRFRIWKEQRFESARPFDDKGAYTGHSYLVRLMLSGELDQAMGWLLDFGDVKDRFKPLYRQLDHNPLDQLSGVRGGDSVSVAEWVHAHLSPLVPELARIDLMQQELRGVSLMFRDAMRWPLL

SEQ ID NO: 19170 - protein, 339 aa, Chromobacterium haemolyticum
  REGION 1..339: note = tr|A0A1W0CG17|A0A1W0CG17_9NEIS 6-pyruvoyl tetrahydrobiopterin synthase OS=Chromobacterium haemolyticum OX=394935 GN=B0T45_19915 PE=4 SV=1
MHTSNLIAGARFEAARQVNGASDLTARPHGHSFRVIARADAQYPGHEQLQAALDAAVAPLDYADLNRQLTQCDDLALAAHLRTALPCPATLSLQSSPQRGVALDGDTALNWIQVQFEAAHQLPHVPAGHKCGRLHGHGFGVRLAADARLSGHPRLEAAWKPLFLELNHRYLNDIAGLDNPTSEVLAQWLHQRLADTLPGLAWVEVRETHSAGSQFDGQRFRIWKEQRFESARPFDDKGAYTGHSYLVRLILSGELDQAMGWLLDFGDVKDRFKPLYRQLDHNPLDQLSGVRGGDSVSVAEWVHAHLSPLVPELARIDLMEQELRGVSLMFRDAMRWPLL

SEQ ID NO: 19171 - protein, 339 aa, Chromobacterium sp.
  REGION 1..339: note = tr|A0A2T5NKQ5|A0A2T5NKQ5_9NEIS 6-pyruvoyl tetrahydrobiopterin synthase OS=Chromobacterium sp. Panama; OX = 2161826 GN=DB032_14345 PE=4 SV=1
MHTSSLIAGACFEAARQVSGASDLTARPHGHSFRVIARADAQYPAHERLQAALDAAVAPLDYADLNRQLSQCDDLALAAHLAAALPCPAALSLQSSPQRGVTLDGDLALNWIQVQFEAAHQLPHVPAGHKCGRLHGHGFGVRLAADARLSGHPRLEAAWRPLFQELNHRYLNDIAGLDNPTSEVLAQWLHQRLADTLPGLAWVEVRETHSAGSQFDGRRFRIWKEQRFESARPFNDQGAYTGHSYLVRLMLSGELDQAMGWLLDFGDVKDRFKPIYRQLDHNPLDRLSGVRGGDSASVAEWVHAHLSPLVPELARIDLMEQELRGVSLMFRDDMRWPLL

SEQ ID NO: 19172 - protein, 339 aa, Chromobacterium sp.
  REGION 1..339: note = tr|A0A0J6KNK0|A0A0J6KNK0_9NEIS 6-pyruvoyl tetrahydrobiopterin synthase OS=Chromobacterium sp. LK1; OX = 1628193 GN=VI26_00520 PE=4 SV=1
MHTSSLISGARFEAARQVAGAPDRTARPHGHSFRVIARADAQYPGHERLQAALDAAVAPLDYADLNRQLAQCDDLALAAHLRAALPCPAALSLQSSPQRGVTLDGDIAFNWIQVQFEAAHQLPHVPAGHKCGRLHGHGFGVRLAADAGLSDHARLEAAWLPLFGELNHRYLNDIAGLDNPTSEVLAQWLHQRLADTLPGLAWVEVRETHSAGSQFDGQRFRIWKEQRFESARPFNDQGAYTGHSYLVRLMLTGKLDQTMGWLLDFGDVKDRFKPIYRQLDHNPLDRLSGVRGGDSASVAEWVHAHLAPLVPELARIDLMEQEQRGVSLMFHDDMRWPLL

SEQ ID NO: 19173 - protein, 339 aa, unidentified
  source 1..339: note = Chromobacterium sphagni
  REGION 1..339: note = tr|A0A1S1X160|A0A1S1X160_9NEIS 6-pyruvoyl tetrahydrobiopterin synthase OS=Chromobacterium sphagni; OX = 1903179 GN=BI347_06160 PE=4 SV=1
MHACYMMADAGFEAARRLHAAPGREARLHGHSFRLSARCEAQYTDQAALQAALQAAVAPLDYADLNAVLAACDDLALARHVAHALPHPAAIKLQGAPDRGVMLDGARTLVWLNVSFEAAHYLPHVPAGHKCGRLHGHGFGVRLAADAASCNQHDLARAWAPLHRRLDQHYLNDIAGLDNPTSEVLAHWLHQQLQGELPGLAWVEVRETHSAGSQFDGQRFRIWKEQRFESAMPFDAAGNYTGHSYLVRLMLAGDIDRTMGWLLDFGDVKDRFKPIYRQLDHNPLDKLSGLRSRDNAAVAEWIHAQLSPLVPELARIDLMENEHAGVSLHFNQDMRWPLL

SEQ ID NO: 19174 - protein, 339 aa, unidentified
  source 1..339: note = Chromobacterium vaccinii
  REGION 1..339: note = tr|A0A2L2BFU4|A0A2L2BFU4_9NEIS 6-pyruvoyl tetrahydrobiopterin synthase OS=Chromobacterium vaccinii; OX = 1108595 GN=CFN79_22060 PE=4 SV=1
MHASYLIAGAGFEAARRLPADHGQAARPHGHSFRLSVRSDAQNTSQEALQAAVQAAVAPLDYTDLNAALAASDDLSLARHIADALPHPAAIQLRGAPDRGVMLDGARALSWINSSFEAAHYLPHVPPGHKCGRLHGHGFGVRIVADAALSGQHDLARAWATLHGRLNHRYLNDIPGLDNPTSEVLAQWLHQQLRDAVPGLAWVEVRETHSAGSQFDGKTFRIWKEQRFESAMPFDAEGNYTGHSYLVRLMLSGGIDRTMGWLLDFGDVKDRFKPIYRQLDHNPLDKLAGLRRADNAAVAEWIHAQLAPLVPELSRIDLMESDDAGVSLHFRQDMRWPLL

SEQ ID NO: 19175 - protein, 339 aa, unidentified
  source 1..339: note = Chromobacterium vaccinii
  REGION 1..339: note = tr|A0A1D9LFH4|A0A1D9LFH4_9NEIS 6-pyruvoyl tetrahydrobiopterin synthase OS=Chromobacterium vaccinii; OX = 1108595 GN=BKX93_08300 PE=4 SV=1
MHASYLIAVAGFEAARRLPADHGQAARPHGHSFRLSVRSDAQNTSQDALQAAVQAAVAPLDYTDLNAALAASDDLSLARHIADTLPHPAAIQLRGAPDRGVMLDDARALSWINSSFEAAHYLPHVPPGHKCGRLHGHGFGVRIVADAALSGQHDLARAWATLHGRLNHRYLNDIPGLDNPTSEVLAQWLHQQLRDAVPGLAWVEVRETHSAGSQFDGKTFRIWKEQRFESAMPFDADGHYTGHSYLVRLMLSGGIDRAMGWLLDFGDVKDRFKPIYRQLDHNPLDKLAGLRRADNAAVAEWIHAQLAPLVPELSRIDLMESDDAGVSLHFRQDMRWPLL

SEQ ID NO: 19176 - protein, 239 aa, Chromobacterium violaceum
  REGION 1..239: note = tr|Q7NSB8|Q7NSB8_CHRVO Probable 6-pyruvoyltetrahydrobiopterin synthase OS=Chromobacterium violaceum (strain ATCC 12472 / DSM 30191 / JCM 1249 / NBRC 12614 / NCIMB 91 31 / NCTC 9757) OX=243365 GN=CV_3508 PE=4; SV = 1
MMLDGPRALSWIASSFEAAHHLPHVPPGHKCGRLHGHGFGVRIVADAAQCGQRELARAWAPLHRRLNHHYLNDIAGLDNPTSEVLAQWLHQQLSDAVPGLAWVEVRETHSAGSQFDGKTFRIWKEQRFESAIPFDADGNYTGHSYLVRLMLSGGIDRTMGWLLDFGDVKDRFKPIYRQLDHNPLDKLAGVRGADSAAVAEWIHAQLSPLVPELSRIDLMESDDAGVSLHFRQDMRWPLL

SEQ ID NO: 19177 - protein, 339 aa, Chromobacterium violaceum
  REGION 1..339: note = tr|A0A381FVT6|A0A381FVT6_CHRVL 6-carboxy-5,6,7,8-tetrahydropterin synthase; OS = Chromobacterium violaceum OX=536 GN=queD PE=4 SV=1
MHASYLIAGAGFEAARRLPADHGQAARPHGHSFRLSVRSDAQNTSQDALQAAVQAAVAPLDYTDLNAALAASDDLSLARHIADTLPHPAAIQLRGAPDRGVMLDDARALSWINSSFEAAHYLPHVPPGHKCGRLHGHGFGVRIVADAALSGQHDLARAWATLHGRLNHRYLNDIPGLDNPTSEVLAQWLHQQLRDAVPGLAWVEVRETHSAGSQFDGKTFRIWKEQRFESAMPFDADGHYTGHSYLVRLMLSGGIDRAMGWLLDFGDVKDRFKPIYRQLDHNPLDKLAGLRRADNAAVAEWIHAQLAPLVPELSRIDLMESDDAGVSLHFRQDMRWPLL

SEQ ID NO: 19178 - protein, 279 aa, Chromohalobacter canadensis
  REGION 1..279: note = tr|A0A285VZI0|A0A285VZI0_9GAMM 6-pyruvoyl tetrahydropterin synthase OS=Chromohalobacter canadensis; OX = 141389 GN=SAMN05421509_11256 PE=4 SV=1
MTLFVNHLTHIDASLWSPTHGLMGASWHVDAELDGELGSDGMLFDFGEVKPWIKSRLDEGLDHTLLVPTEAPGIQVFDCAEGLCLRTQFPYPMELRGPRQSFTLLPWSEITPEQLATHLSTELSRRPPAKVEAIRLRLRDEDIETAAYTYSHGLKHHVGNCQRIAHGHRSRLHIWRNGQRDPELERQWAQTLDACYLIHDEDLAPQVDESLDTLSVAYRADQGRFHLTLPRERCHLLSTPTTIEHIAAWLAEKIALETHSRIRVQAFEGIDKGAIAEAS

SEQ ID NO: 19179 - protein, 132 aa, Chromohalobacter canadensis
  REGION 1..132: note = tr|A0A285VJH3|A0A285VJH3_9GAMM 6-pyruvoyl-tetrahydropterin synthase OS=Chromohalobacter canadensis OX=141389 GN=SAMN05421509_103260 PE=4 SV=1
MFSLTVRDHFMIAHSFNGEIFGPAQRLHGATYVVDVAFKRPELDRDDLIVDIGLASQTLSRVLGKLNFNNLDEVPEFQGRNTTTEFMAKVIFERLAHAIRNGELGETGHGLTGLGVTLHESHIAWASYEGAL

SEQ ID NO: 19180 - protein, 279 aa, Chromohalobacter japonicus
  REGION 1..279: note = tr|A0A1Q8TB13|A0A1Q8TB13_9GAMM 6-pyruvoyl tetrahydropterin synthase-related protein; OS = Chromohalobacter japonicus OX=223900 GN=BTW10_12315; PE = 4 SV=1
MTLFVNHLTHIDASLWSPEHGLTGVSWHVDAELEGELGPDGMLFDFGEVKPWIKSRLDEGLDHTLLVPTQAPGIQVFDCAEGLCLRTQCPYPMELRGPRQSFTLLPWPEITTEQVATHLSTELSRRPPAKVETIRLRLRDEDIETAAYTYSHGLKHHSGNCQRIAHGHRSRLHIWRNGRRDPELESQWAQALDACYLIHDEDLAPQADESLDTLSVAYRADQGRFHLTLPRERCHLLSTPTTIEHIAAWLAEKIAQETHSRIRVQAFEGIDKGAIAESA

SEQ ID NO: 19181 - protein, 132 aa, Chromohalobacter japonicus
  REGION 1..132: note = tr|A0A1Q8TBC0|A0A1Q8TBC0_9GAMM Uncharacterized protein OS=Chromohalobacter japonicus OX=223900; GN = BTW10_11900 PE=4 SV=1
MFTLTVRDHFMIAHSFNGEIFGPAQRLHGATYVVDVAFKRPELDRDDLVVDIGLASQTLSRVLSELNFNNLDDVPEFQGHNTTTEFMAKVVFERLAHAIRQGELGETGHGLTALGVTLHESHIAWANYEGAI

SEQ ID NO: 19182 - protein, 279 aa, Chromohalobacter marismortui
  REGION 1..279: note = tr|A0A4R7NQ30|A0A4R7NQ30_9GAMM 6-pyruvoyl tetrahydropterin synthase-like protein OS=Chromohalobacter marismortui OX=42055 GN=C8E00_103220 PE=4 SV=1
MTLFVNHLTHIDASVWSPTHGLMGASWHVDAELDGELGPDGMLFDFGEVKPWIKARLDSGLDHTLLVPTQAPGLQVFDCAEGLCLRTQLPYHMELRGPRQSFTLLPWSDITVADVAAHLSTELSRRPPAQVETIRLRLREEEIETAAYSYSHGLKHHAGNCQRIAHGHRSRLHIWRDGRRAPELERQWAQALDASYLIHEEDLAPQADECRETLSVAYSADQGRFHLTLPRERCHLLATPTTIEHIAAWLADKIARETHGRIRVQAFEGIDKGAIAESS

SEQ ID NO: 19183 - protein, 132 aa, Chromohalobacter marismortui
  REGION 1..132: note = tr|A0A4R7NVE7|A0A4R7NVE7_9GAMM 6-pyruvoyl-tetrahydropterin synthase OS=Chromohalobacter marismortui OX=42055 GN=C8E00_10176 PE=4 SV=1
MFSLTVRDHFMIAHSFNGEIFGPAQRLHGATYVVDVAFKRPELDHDDLIVDIGLASQTLSRVLSELNFNNLDDVPEFQGRNTTTEFMAKVVFERLAHAIRQGELGETGHGLTALDVTLHESHIAWAKYEGAL

SEQ ID NO: 19184 - protein, 289 aa, Chromohalobacter salexigens
  REGION 1..289: note = tr|A0A317QXM9|A0A317QXM9_CHRSL 6-pyruvoyl-tetrahydropterin synthase OS=Chromohalobacter salexigens OX=158080 GN=DFO74_11262 PE=4 SV=1
MTLFVNHLTHIDASLWSPEHGLTGVSWHVDAELDGELGPDGMLFDFGEVKPWIKSRLDAGLDHTLLVPTEAAGIQVVDCAEGLCLRTQFPYRMEVRGPRQSFTLLPWPEITADRLAVHLSSELSRRPPAKVDTIRLRLRDEEIETAAYTYSHGLKHHTGNCQRIAHGHRSRLHIWRDGRRDAALEAQWAQALDASYLIHDEDLDTPFDEQPLDELSVAYQAAQGRFSLKLPKQRCHLLSTPTTIEHIAAWLADTIARDTGSRIRVQAFEGIDKGAMADAMPPATTHDDA

SEQ ID NO: 19185 - protein, 132 aa, Chromohalobacter salexigens
  REGION 1..132: note = tr|A0A317QVE4|A0A317QVE4_CHRSL 6-pyruvoyl-tetrahydropterin synthase OS=Chromohalobacter salexigens OX=158080 GN=B4O83_06805 PE=4 SV=1
MFSLTVRDHFMIAHSFNGDIFGPAQRLHGATYVVDVAFKRPELDRDDLIVDIGLASQTLSRVLGELNFNNLDEIPEFQGRNTTTEFMAKVIFERLAHAIRDGELGETGHGLTGLGVTLHESHIAWASYEGAL

SEQ ID NO: 19186 - protein, 288 aa, unidentified
  source 1..288: note = Chroococcales cyanobacterium
  REGION 1..288: note = tr|A0A3N5J589|A0A3N5J589_9CHRO 6-carboxytetrahydropterin synthase OS=Chroococcales cyanobacterium metabat2.561 OX=2485785 GN=EHM73_03275 PE=4; SV = 1
MDCIINRRARFSASHRYYLPEWDEAENQRLFGLSSRFPGHGHNYELYVSLYKELNLYGMVENLSTVKQVIKREITSQLDYSYLNQVWPEFQQTLPTTENIARVIWQRLAPYLPLVKIQLFEHPELWAEYQGKDMEATLTIKTHFSAAHRLALPQLTLEQNSEIYGKCARVNGHGHNYHLEVSVAGEIDPRTGMIVDLGDLQKAIDELVVEPFDHTFLNKDIPYFAEVVPTAENIALHIAQLLGERIRQLGAELDKVKLIESPNNSAEIHCRGSVQAPRQLLEKTLTAV

SEQ ID NO: 19187 - protein, 289 aa, unidentified
  source 1..289: note = Chroococcales cyanobacterium
  REGION 1..289: note = tr|A0A2G7GGB4|A0A2G7GGB4_9CHRO 6-pyruvoyl tetrahydropterin synthase OS=Chroococcales cyanobacterium IPPAS B-1203 OX=2049454 GN=CSQ79_18820 PE=4 SV=1
MQCIVNRRAQFSASHRYWLPELSEAENTQRFGLCSQTPGHGHNYVLYVSLAGELDEYGMVQNLSEVKQVIKREVTSQLDFSSLNDVWTEFQKTLPTTENIARVIWQRLAPYLPLVRIQLFEHPELWAEYQGNDMEAYLTLSTHFSAAHRLARPDLSYEENSEIYGKCARPNGHGHNYHLEITVKGDIDVRTGMLVDLGALQKIVDDLVIEPLDHTFLNKDVAYFTEVVPTAENIAAYISNVLRSPIQELGATLHKVKLIESPNNSCEIYCDQADKAVTNESLEFKELVH

SEQ ID NO: 19188 - protein, 288 aa, unidentified
  source 1..288: note = Chroococcidiopsis cubana
  REGION 1..288: note = tr|A0A433VLI8|A0A433VLI8_9CYAN 6-pyruvoyltetrahydropterin synthase OS=Chroococcidiopsis cubana SAG 39.79 OX=388085 GN=DSM107010_51550 PE=4 SV=1
MQCIVNRRAQFSASHRYWLPELSETENQQQFGLCSRFPGHGHNYVLFVSLLGELDEYGMVLNLSDVKHVIKREVTSQLDFSYLNDVWQEFQQTLPTTENIARVIWQKLASHLPIVKIQLFEHPQLWAEYQGNGMEAYLTISTHFSAAHRLAHPDLNQQENTEIYGKCARPNGHGHNYHLEVTVKGEIHPRTGMIVDLSALNQAIEDLVIEPLDHTFLNKDIAYFAKVVPTAENIAVYISNVLQQPVRELGAELHKVKLIESPNNSCEVYCTPADSIKSATREPALAQV

SEQ ID NO: 19189 - protein, 289 aa, unidentified
  source 1..289: note = Chroococcidiopsis sp.
  REGION 1..289: note = tr|A0A2S6V9Y5|A0A2S6V9Y5_9CYAN 6-pyruvoyl tetrahydropterin synthase OS=Chroococcidiopsis sp. TS-821; OX = 1378066 GN=B1A85_13620 PE=4 SV=1
MQCIVNRRAQFSASHRYWLPELSEAENKQRFGLCARAPGHGHNYVLYVSLSGELDEYGMVQNLSEVKKVIKREVTSQLDFSHLNDVWTEFQQTLPTTENIARVIWHRLAPYLPLVRIQLFEHPELWAEYQGNGMEAYLTLSTHFSAAHRLARPDLSYEENLEIYGKCARPNGHGHNYHLEVTVKGDIDRRTGMLVDLGALQQIVEDLVVEPLDHTFLNKDIAYFAEVVPTAENIAVYISNILRSPIQELGATLHKVKLIESPNNSCEIYCDRTVQEVTGHRSEVRELVH

SEQ ID NO: 19190 - protein, 288 aa, unidentified
  source 1..288: note = Chroococcidiopsis sp.
  REGION 1..288: note = tr|A0A2P8QTB3|A0A2P8QTB3_9CYAN 6-pyruvoyl tetrahydropterin synthase OS=Chroococcidiopsis sp. CCALA 051 OX=869949 GN=C7Y66_08990 PE=4 SV=1
MQCIVNRRAQFSASHRYWLPELSETENQQQFGLCSRFPGHGHNYVLFVSLLGELDEYGMVLNLSDVKHVIKREVTSQLDFSYLNDVWQEFQQTLPTTENIARVIWQKLASHLPIVKIQLFEHPQLWAEYQGNGMEAYLTISTHFSAAHRLAHPDLNQQENTEIYGKCARPNGHGHNYHLEVTVKGKIHPRTGMIVDLSALNQAIEDLVIEPLDHTFLNKDIAYFAKVVPTAENIAVYISNVLQQPVRELGAELHKVKLIESPNNSCEVYCTPADSIKSATREPALAQV

SEQ ID NO: 19191 - protein, 288 aa, unidentified; identical to SEQ ID NO: 19188
  source 1..288: note = Chroococcidiopsis thermalis
  REGION 1..288: note = tr|K9TSU0|K9TSU0_CHRTP Uncharacterized protein; OS = Chroococcidiopsis thermalis (strain PCC 7203) OX=251229; GN = Chro_0325 PE=4 SV=1

SEQ ID NO: 19192 - protein, 289 aa, unidentified
  source 1..289: note = Chroogloeocystis siderophila
  REGION 1..289: note = tr|A0A1U7HM32|A0A1U7HM32_9CHRO 6-pyruvoyl tetrahydropterin synthase OS=Chroogloeocystis siderophila 5.2 s.c.1 OX=247279 GN=NIES1031_14990 PE=4 SV=1
MQCIVNRRAQFSASHRYWLPELSEAENTQRFGLCARTPGHGHNYILYVSLAGELDEYGMVQNLSEVKQVIKREVTSQLDFSHLNDVWTEFQQTLPTTENIARVIWQRLAPYLSLVRIQLFEHPELWAEYQGNGMEAYLTLSTHFSAAHRLARPDLSYEENSEIYGKCARPNGHGHNYHLEVTVKGEIDPRTGMLVDLGALQQIIDDLVVEPLDHTFLNKDIAYFAEVVPTAENIAVYISNVLRSPIQELGATLHKVKLIESPNNSCEIYCDQTIQGVRDQQSEVRELVH

SEQ ID NO: 19193 - protein, 148 aa, unidentified
  source 1..148: note = Chryseobacterium angstadtii
  REGION 1..148: note = tr|A0A0J7IH29|A0A0J7IH29_9FLAO 6-pyruvoyl tetrahydropterin synthase OS=Chryseobacterium angstadtii; OX = 558151 GN=ACM46_07485 PE=4 SV=1
MIRITKIFTFETAHVLYNYDGKCKNMHGHSYKLFVTVKGKVINDLENSKNGMVVDFGDIKSIVKSEIVDVWDHAVLVNALSPHKELGEDLESKGHKVIYCSFQPTCENMLYAIAAKIKSKLPAEVSLAYLKLHETENSYGEWFAEDNK

SEQ ID NO: 19194 - protein, 148 aa, Chryseobacterium antarcticum
  REGION 1..148: note = tr|A0A3S4USU0|A0A3S4USU0_9FLAO 6-carboxy-5,6,7,8-tetrahydropterin synthase; OS = Chryseobacterium antarcticum OX=266748; GN = NCTC13489_01192 PE=3 SV=1
MIRITKIFTFETAHVLYNYDGKCKNMHGHSYKLFVTVKGTPINDLDHPKNGMVLDFGDIKKIVKSEILNVWDHAVMLNGISPHKQFGENLEQQGHKVIYCDYQPTCENMLYDIAAKIKSQLSAKVSLAYLKLHETENSYGEWFAEDQV

SEQ ID NO: 19195 - protein, 148 aa, Chryseobacterium aquaticum
  REGION 1..148: note = tr|A0A0Q3HUL7|A0A0Q3HUL7_9FLAO 6-pyruvoyl tetrahydropterin synthase OS=Chryseobacterium aquaticum; OX = 452084 GN=AR438_04570 PE=4 SV=1
MIRITKIFTFETAHVLYNYDGKCKNMHGHSYKLFVTVKGKPINDLENPKNGMVVDFGDIKAIVKAEIVDVWDHAVLINGVSPHREMGEELENKGQKVIYCNFQPTCENMLYAIAAKIKSKLPEDVSLAYLKLHETENSYGEWFAEDNQ

SEQ ID NO: 19196 - protein, 148 aa, Chryseobacterium aquifrigidense
  REGION 1..148: note = tr|A0A543EN25|A0A543EN25_9FLAO 6-carboxy-5,6,7,8-tetrahydropterin synthase; OS = Chryseobacterium aquifrigidense OX=558021 GN=FB551_2700; PE = 3 SV=1
MIRITKIFTFETAHVLYNYDGKCKNMHGHSYKLFVTVKGKPINDIENPKNGMVVDFGDIKSIVKSEIVDVWDHAVLVNALSPHKELGDDLEQKGHKVIYCSFQPTCENMLYAIAAKIKSRLPEGISLAYLKLHETENSYGEWFAEDNQ

SEQ ID NO: 19197 - protein, 147 aa, unidentified
  source 1..147: note = Chryseobacterium arachidiradicis
  REGION 1..147: note = tr|A0A420DBS4|A0A420DBS4_9FLAO 6-carboxy-5,6,7,8-tetrahydropterin synthase; OS = Chryseobacterium arachidiradicis OX=1617282; GN = BXY58_1175 PE=3 SV=1
MIRITKIFTFETAHVLYNYDGKCKNMHGHSYKLYVTVKGHPINNLDDPKNGMVVDFGDIKKIVKEEIVDVWDHAVLVNGASPHLSLGEGLQHQGHKVIFCDYQPTCENMLYDIAEKIKSNLPDHVQLAYLKLHETENSYGEWLAEEN

SEQ ID NO: 19198 - protein, 148 aa, unidentified
  source 1..148: note = Chryseobacterium arachidis
  REGION 1..148: note = tr|A0A1M4ZAQ2|A0A1M4ZAQ2_9FLAO 6-carboxy-5,6,7,8-tetrahydropterin synthase; OS = Chryseobacterium arachidis OX=1416778; GN = SAMN05443633_103101 PE=3 SV=1
MIRITKIFTFETAHVLYNYDGKCKNMHGHSYKLFVTVKGKPINDLENPKNGMVVDFGDIKSIVKSEIVDVWDHAVLINGLSPHRELGEGLENQGHKVIYCTFQPTCENMLYAIAAKIKSKLPEGISLAYLKLHETENSYGEWFAEDNQ

SEQ ID NO: 19199 - protein, 148 aa, Chryseobacterium arthrosphaerae
  REGION 1..148: note = tr|A0A1B8ZU58|A0A1B8ZU58_9FLAO 6-carboxy-5,6,7,8-tetrahydropterin synthase; OS = Chryseobacterium arthrosphaerae OX=651561; GN = BBI00_12635 PE=3 SV=1
MIRITKIFTFETAHVLYNYDGKCKNMHGHSYKLFVTVKGRPINDIENPKNGMVVDFGDIKSIVKSEIVDVWDHAVLVNALSPHKELGDDLEQKGHKVIYCSFQPTCENMLYAIASKIKSKLPEGISLAYLKLHETENSYGEWFAEDNQ

SEQ ID NO: 19200 - protein, 148 aa, Chryseobacterium arthrosphaerae
  REGION 1..148: note = tr|A0A3S0QW15|A0A3S0QW15_9FLAO 6-carboxy-5,6,7,8-tetrahydropterin synthase; OS = Chryseobacterium arthrosphaerae OX=651561; GN = EJ377_05915 PE=3 SV=1
MIRITKIFTFETAHVLYNYDGKCKNMHGHSYKLFVTVKGKPINDIENPKNGMVVDFGDIKSIVKSEIVDVWDHAVLVNALSPHKELGDDLEQKGHKVIYCSFQPTCENMLYAIASKIKSKLPEGISLAYLKLHETENSYGEWFAEDNQ

SEQ ID NO: 19201 - protein, 148 aa, unidentified
  source 1..148: note = Chryseobacterium artocarpi
  REGION 1..148: note = tr|A0A1B8ZG43|A0A1B8ZG43_9FLAO 6-carboxy-5,6,7,8-tetrahydropterin synthase; OS = Chryseobacterium artocarpi OX=1414727 GN=BBI01_11595; PE = 3 SV=1
MIRITKIFTFETAHVLYNYDGKCKNMHGHSYKLFVTVKGKPINDIENPKNGMVVDFGDIKSIVKSEIVDVWDHAVLVNALSPHKELGDDLEQKGHKVIYCSFQPTCENMLYAIAAKVKAKLPEGISLAYLKLHETENSYGEWFAEDNQ

SEQ ID NO: 19202 - protein, 147 aa, Chryseobacterium balustinum
  REGION 1..147: note = tr|A0A3G6TFF5|A0A3G6TFF5_9FLAO 6-carboxy-5,6,7,8-tetrahydropterin synthase; OS = Chryseobacterium balustinum OX=246 GN=EB354_01235 PE=3; SV = 1
MIRITKIFTFETAHVLYNYDGKCKNMHGHSYKLFVTVKGKPVNDLENPKNGMVVDFGDIKDIVKSEIVDVWDHAVLINGVSPHRELGEGLENQGHKVIYCTFQPTCENMLYAIAAKVKSKLPEGISLAYLKLHETENSYGEWFAEDN

SEQ ID NO: 19203 - protein, 148 aa, unidentified
  source 1..148: note = Chryseobacterium bernardetii
  REGION 1..148: note = tr|A0A3G6TXK7|A0A3G6TXK7_9FLAO 6-carboxy-5,6,7,8-tetrahydropterin synthase; OS = Chryseobacterium bernardetii OX=1241978 GN=EG339_00570; PE = 3 SV=1
MIRITKIFTFETAHVLYNYDGKCKNMHGHSYKLFVTVKGKPINDIDNPKNGMVVDFGDIKSIVKSEIVDVWDHAVLLNALTPHKELGDDLEQKGHKVIYCSFQPTCENMLYAIAAKIKSRLPEGISLAYLKLHETENSYGEWFAEDNK

SEQ ID NO: 19204 - protein, 148 aa, Chryseobacterium bovis
  REGION 1..148: note = tr|A0A1U7PSS7|A0A1U7PSS7_9FLAO 6-carboxy-5,6,7,8-tetrahydropterin synthase; OS = Chryseobacterium bovis DSM 19482 OX=1121284; GN = SAMN05660493_01315 PE=3 SV=1
MIRITKIFTFETAHVLYNYDGKCKNMHGHSYKLFVTVKGNPINNLDDHKNGMVVDFGEIKDIVKKEVVDVWDHAVLVNGNSPHKILGENLQSAGHKVIFCDYQPTCENMLYDIAAKIKSNLSGNIELAYLKLHETENSYGEWLAEENP

SEQ ID NO: 19205 - protein, 148 aa, unidentified
  source 1..148: note = Chryseobacterium carnipullorum
  REGION 1..148: note = tr|A0A1M7KQM7|A0A1M7KQM7_9FLAO 6-carboxytetrahydropterin synthase QueD; OS = Chryseobacterium carnipullorum OX=1124835 GN=queD PE=4; SV = 1
MIRITKIFTFETAHVLYNYDGKCKNMHGHSYKLFVTVKGRVINDLENSKNGMVVDFGDIKSIVKSEIVDLWDHAVLVNALSPHKELGEDLENKGHKVIYCSFQPTCENMLYAIAAKIKSKLPAEVSLAYLKLHETENSYGEWFAEDNK

SEQ ID NO: 19206 - protein, 148 aa, unidentified
  source 1..148: note = Chryseobacterium carnis
  REGION 1..148: note = tr|A0A3G8XR07|A0A3G8XR07_9FLAO 6-carboxytetrahydropterin synthase OS=Chryseobacterium carnis OX=1241979 GN=EIB73_05505 PE=4 SV=1
MIRITKIFTFETAHVLYNYDGKCKNMHGHSYKLFVTVKGTPINDLDHPKNGMVVDFGDIKKIVKSEILNVWDHAVMLNENSPHKQLGEDLDQQGHKVIYCDYQPTCENMLYDIAAKIKKQLPETVSLAYLKLHETENSYGEWFAEDNS

SEQ ID NO: 19207 - protein, 148 aa, Chryseobacterium chaponense
  REGION 1..148: note = tr|A0A1N7N596|A0A1N7N596_9FLAO 6-pyruvoyltetrahydropterin/6-carboxytetrahydropterin synthase OS=Chryseobacterium chaponense OX=713588; GN = SAMN05421789_1129 PE=4 SV=1
MIRITKIFTFETAHVLYNYDGKCKNMHGHSYKLFVTVKGIPINDLDHQKNGMVVDFGDIKKIVKSEIIDVWDHAVMLNGISPHKQLGEDLEEKGHKVIYCDYQPTCENMLYDIAQKIKSQLPQTVTLAYLKLHETENSYGEWFAEDQD

SEQ ID NO: 19208 - protein, 148 aa, unidentified
  source 1..148: note = Chryseobacterium contaminans
  REGION 1..148: note = tr|A0A1M7E4N7|A0A1M7E4N7_9FLAO 6-carboxy-5,6,7,8-tetrahydropterin synthase; OS = Chryseobacterium contaminans OX=1423959; GN = SAMN05444407_10719 PE=3 SV=1
MIRITKIFTFETAHVLYNYDGKCKNMHGHSYKLFVTVKGKPINDIDNPKNGMVVDFGDIKSIVKSEIVDVWDHAVLLNALTPHKELGDDLEQKGHKVIYCSFQPTCENMLYAIAAKIKSRLPEGISLAYLKLHETENSYGEWFAEDNQ

SEQ ID NO: 19209 - protein, 148 aa, Chryseobacterium culicis; identical to SEQ ID NO: 19196
  REGION 1..148: note = tr|A0A2S9D1U3|A0A2S9D1U3_9FLAO 6-carboxy-5,6,7,8-tetrahydropterin synthase; OS = Chryseobacterium culicis OX=680127 GN=CQ022_10530 PE=3; SV = 1

SEQ ID NO: 19210 - protein, 147 aa, Chryseobacterium culicis
  REGION 1..147: note = tr|A0A1H6H2G7|A0A1H6H2G7_9FLAO 6-carboxy-5,6,7,8-tetrahydropterin synthase; OS = Chryseobacterium culicis OX=680127 GN=SAMN05421593_0637; PE = 3 SV=1
MIRITKIFTFETAHVLYNYDGKCKNMHGHSYKLFVTVKGKPINDIENPKNGMVVDFGDIKSIVKSEIVDVWDHAVLVNALSPHKELGDDLEQKGHKVIYCSFQPTCENMLYAIAAKIKSRLPEGISLAYLKLHETENSYGEWFAEDN

SEQ ID NO: 19211 - protein, 148 aa, Chryseobacterium daecheongense
  REGION 1..148: note = tr|A0A3N0W6G5|A0A3N0W6G5_9FLAO 6-carboxytetrahydropterin synthase QueD; OS = Chryseobacterium daecheongense OX=192389 GN=queD PE=4; SV = 1
MIRITKIFTFETAHVLYNYDGKCKNMHGHSYKLFVTVKGKPVNDLNNPKNGMVVDFGDIKTIVKSEIVDVWDHAVLINALSPHKELGEDLEQKGHKVIYCTFQPTCENMLYAIAAKIKSRLPEGVSLAYLKLHETENSYGEWYAEDNR

SEQ ID NO: 19212 - protein, 148 aa, Chryseobacterium defluvii
  REGION 1..148: note = tr|A0A495SM21|A0A495SM21_9FLAO 6-pyruvoyltetrahydropterin/6-carboxytetrahydropterin synthase OS=Chryseobacterium defluvii OX=160396; GN = BCF58_0460 PE=4 SV=1
MIRITKIFTFETAHVLYNYDGKCKNMHGHSYKLFVTVKGKPVNDLNNPKNGMVVDFGDIKTIVKSEIVDVWDHAVLINALSPHKELGEDLEQKGHKVIYCTFQPTCENMLYAIAAKIKSRLPEGVSLAYLKLHETENSYGEWFAEDNR

SEQ ID NO: 19213 - protein, 148 aa, Chryseobacterium elymi
  REGION 1..148: note = tr|A0A3D9DP89|A0A3D9DP89_9FLAO 6-carboxytetrahydropterin synthase QueD; OS = Chryseobacterium elymi OX=395936 GN=DRF60_05305 PE=4; SV = 1
MIRITKIFTFETAHVLYNYDGKCKNMHGHSYKLFVTVKGRPVNDLENPKNGMVVDFGDIKSIVKSEIVDLWDHAVLVNALSPHKELGEDLENKGHKVIYCSFQPTCENMLYAIAAKIKSRLPAEVSLAYLKLHETENSYGEWFAEDNK

SEQ ID NO: 19214 - protein, 148 aa, Chryseobacterium flavum
  REGION 1..148: note = tr|A0A3D9CNX2|A0A3D9CNX2_9FLAO 6-carboxytetrahydropterin synthase QueD; OS = Chryseobacterium flavum OX=415851 GN=DRF59_07325 PE=4; SV = 1
MIRITKIFTFETAHVLYNYDGKCKNMHGHSYKLFVTVKGKPINDIENPKNGMVVDFGDIKSIVKSEIVDVWDHAVLVNALSPHKELGDDLEQKGHKVIYCSFQPTCENMLYAIAAKIKSKLPAGISLAYLKLHETENSYGEWFAEDNQ

SEQ ID NO: 19215 - protein, 148 aa, Chryseobacterium formosense
  REGION 1..148: note = tr|A0A085Z544|A0A085Z544_9FLAO 6-pyruvoyl tetrahydropterin synthase OS=Chryseobacterium formosense; OX = 236814 GN=IX39_02520 PE=4 SV=1
MIRITKIFTFETAHVLYNYDGKCKNMHGHSYKLFVTVKGKPVNDLENPKNGMVVDFGDIKSIVKSEIVDVWDHAVLINGLSPHKNLGESLEDQGHKVIYCTFQPTCENMLYAIAAKIKSKLPEGISLAYLKLHETENSYGEWFAEDNQ

SEQ ID NO: 19216 - protein, 148 aa, unidentified
  source 1..148: note = Chryseobacterium frigidisoli
  REGION 1..148: note = tr|A0A1I3FRF2|A0A1I3FRF2_9FLAO 6-pyruvoyltetrahydropterin/6-carboxytetrahydropterin synthase OS=Chryseobacterium frigidisoli OX=1125876; GN = SAMN05443292_1573 PE=4 SV= 1
MIRITKIFTFETAHVLYNYDGKCKNMHGHSYKLFVTVKGNPINNLDDTKNGMVMDFGDLKAIVNSQIVNEWDHAVMLNGNSPHKILGETLEKDGHKVIYCDFQPTCENMLYEIASKIKNNLPSEIQLAYLKLNETENSYGEWFAEDQI

SEQ ID NO: 19217 - protein, 148 aa, unidentified
  source 1..148: note = Chryseobacterium gallinarum
  REGION 1..148: note = tr|A0A0G3LZF6|A0A0G3LZF6_9FLAO 6-carboxy-5,6,7,8-tetrahydropterin synthase; OS = Chryseobacterium gallinarum OX=1324352 GN=OK18_03165; PE = 3 SV=1
MIRITKIFTFETAHVLYNYDGKCKNMHGHSYKLFVTVKGRPINDIENPKNGMVVDFGDIKSIVKSEIVDVWDHAVLVNALSPHKELGDDLETRGHKVIYCSFQPTCENMLYAIAAKIKSKLPDGISLAYLKLHETENSYGEWFAEDNQ

SEQ ID NO: 19218 - protein, 160 aa, Chryseobacterium gambrini
  REGION 1..160: note = tr|A0A1N7LV32|A0A1N7LV32_9FLAO 6-pyruvoyltetrahydropterin/6-carboxytetrahydropterin synthase OS=Chryseobacterium gambrini OX=373672; GN = SAMN05421785_102521 PE=4 SV=1
MNGTNQIPYLCRMIRITKIFTFETAHVLYNYDGKCKNMHGHSYKLFVTVKGKPVNDLENPKNGMVVDFGDIKSIVKSEIVDVWDHAVLINGLSPHRELGEDLEEKGHKVIYCTFQPTCENMLYAIAAKIKSKLLEGISLAYLKLHETENSYGEWFAEDNQ

SEQ ID NO: 19219 - protein, 148 aa, unidentified
  source 1..148: note = Chryseobacterium geocarposphaerae
  REGION 1..148: note = tr|A0A2M9CAT8|A0A2M9CAT8_9FLAO 6-pyruvoyltetrahydropterin/6-carboxytetrahydropterin synthase OS=Chryseobacterium geocarposphaerae OX=1416776; GN = CLV73_1950 PE=4 SV=1
MIRITKIFTFETAHVLYNYDGKCKNMHGHSYKLFVTVKGKPINDLENPKNGMVVDFGDIKTIVKSEIVDVWDHAVMINALSPHKELGEGLENQGHKVIYCSFQPTCENMLYAIAAKIKSRLPEGISLAYLKLHETENSYGEWFAEDNQ

SEQ ID NO: 19220 - protein, 148 aa, unidentified
  source 1..148: note = Chryseobacterium glaciei
  REGION 1..148: note = tr|A0A172XWR9|A0A172XWR9_9FLAO 6-pyruvoyl tetrahydropterin synthase OS=Chryseobacterium glaciei; OX = 1685010 GN=A0O34_13330 PE=4 SV=1
MIRITKIFTFETAHVLYNYDGKCKNMHGHSYKLFVTVKGKPVNDLENPKNGMVVDFGDIKSIVKPEIVDVWDHAVLINGLSPHRQLGESLESQGHKVIYCNFQPTCENMLYAIAAKIKSKLPEGISLAYLKLHETENSYGEWLAEDNQ

SEQ ID NO: 19221 - protein, 122 aa, Chryseobacterium gleum
  REGION 1..122: note = tr|A0A4U8WE55|A0A4U8WE55_9FLAO Queuosine biosynthesis protein QueD OS=Chryseobacterium gleum OX=250; GN = NCTC12078_01179 PE=4 SV=1
MHGHSYKLFVTVKGKPINDLDHPKNGMVVDFGDIKTIVKSEIVDVWDHAVLINGLSPHKQLGEDLEEKGHKVIYCTFQPTCENMLYAIAAKIKSKLPEGISLAYLKLHETENSYGEWFAEDN

SEQ ID NO: 19222 - protein, 154 aa, Chryseobacterium gleum
  REGION 1..154: note = tr|A0A3S5E2W3|A0A3S5E2W3_9FLAO Queuosine biosynthesis protein QueD OS=Chryseobacterium gleum OX=250; GN = NCTC11432_02447 PE=4 SV=1
MSYLCSMIRITKIFTFETAHVLYNYDGKCKNMHGHSYKLFVTVKGKPINDIDNPKNGMVVDFGDIKSIVKSEIVDVWDHAVLVNALSPHKELGDDLEQKGHKVIYCSFQPTCENMLYAIAAKIKSKLPEGISLAYLKLHETENSYGEWFAEDNQ

SEQ ID NO: 19223 - protein, 148 aa, Chryseobacterium greenlandense
  REGION 1..148: note = tr|A0A117KC79|A0A117KC79_9FLAO 6-pyruvoyl tetrahydropterin synthase OS=Chryseobacterium greenlandense OX=345663 GN=AR686_04855 PE=4 SV=1
MIRITKIFTFETAHVLYNYDGKCKNMHGHSYKLFVTVKGKPINDLENPKNGMVVDFGDIKAIVKAEIVDVWDHAVLINGVSPHREMGEELENKGQKVIYCNFQPTCENMLYAIAAKIKSKLPADVSLAYLKLHETENSYGEWFAEDNQ

SEQ ID NO: 19224 - protein, 148 aa, Chryseobacterium hagamense
  REGION 1..148: note = tr|A0A511YPL1|A0A511YPL1_9FLAO 6-carboxy-5,6,7,8-tetrahydropterin synthase; OS = Chryseobacterium hagamense OX=395935 GN=CHA01nite_28720; PE = 3 SV=1
MIRITKIFTFETAHVLYNYDGKCKNMHGHSYKLFVTVKGRPVNDLENPKNGMVVDFGDIKSIVKSEIVDVWDHAVLINGLSPHRELGEDMEEKGHKVIYCTFQPTCENMLYAIAAKIKSKLPEGISLAYLKLHETENSYGEWFAEDNQ

SEQ ID NO: 19225 - protein, 152 aa, Chryseobacterium haifense
  REGION 1..152: note = tr|A0A246BB66|A0A246BB66_9FLAO 6-carboxytetrahydropterin synthase QueD; OS = Chryseobacterium haifense DSM 19056 OX=1450526; GN = AP75_03475 PE=4 SV=1
MIRITKIFTFETAHVLYNYDGKCKNMHGHSYKLFVTVKGKPINNLDDPKNGMVVDFGDIKKIVNSEIIDVWDHAVLVNGYSPHQELGQDLEGKGHKVIFCNYQPTCENMLYDIAEKIQNKLPKEVQLAYLKLHETENSYGEWFAEENKENFS

SEQ ID NO: 19226 - protein, 148 aa, Chryseobacterium haifense
  REGION 1..148: note = tr|A0A3N0WTT0|A0A3N0WTT0_9FLAO 6-carboxy-5,6,7,8-tetrahydropterin synthase; OS = Chryseobacterium haifense OX=421525 GN=EGH90_05590 PE=3; SV = 1
MIRITKIFTFETAHVLYNYDGKCKNMHGHSYKLFVTVKGKPINNLDDPKNGMVVDFGDIKKIVNSEIIDVWDHAVLVNGVSPHKDLGQDLEGKGHKVIFCNYQPTCENMLYDIAEKIQNKLPKEVQLAYLKLHETENSYGEWFAEENN

SEQ ID NO: 19227 - protein, 147 aa, unidentified
  source 1..147: note = Chryseobacterium halperniae
  REGION 1..147: note = tr|A0A085BFN7|A0A085BFN7_9FLAO 6-pyruvoyl tetrahydropterin synthase OS=Chryseobacterium halperniae; OX = 421072 GN=IO89_13880 PE=4 SV=1
MIRITKIFTFETAHVLYNYDGKCKNMHGHSYKLFVTVKGEPIDDLENQKNGMVVDFGDIKKIVKDEIVDLWDHSVLVNGASPHKTLGESLQDQGHKVIFCDYQPTCENMLYEIASKIKSKLPSHVQLAYLKLHETENSYGEWLAEEN

SEQ ID NO: 19228 - protein, 147 aa, Chryseobacterium hispanicum
  REGION 1..147: note = tr|A0A3D9CXJ7|A0A3D9CXJ7_9FLAO 6-carboxy-5,6,7,8-tetrahydropterin synthase; OS = Chryseobacterium hispanicum OX=358687 GN=queD PE=3 SV=1
MIRITKIFTFETAHVLYNYDGKCKNMHGHSYKLFVTVKGNPINDLEHNKNGMVVDFGDIKKIVKEEVVDVWDHAVLVNGASPHRILGENLQNEGHKVIFCDYQPTCENMLYDIASKIQSKLPSEIQLAYLKLHETENSYGEWLAEEN

SEQ ID NO: 19229 - protein, 147 aa, Chryseobacterium hominis
  REGION 1..147: note = tr|A0A1H6K2S1|A0A1H6K2S1_9FLAO 6-pyruvoyltetrahydropterin/6-carboxytetrahydropterin synthase OS=Chryseobacterium hominis OX=420404; GN = SAMN05421793_1189 PE=4 SV=1
MIRITKIFNFETAHVLYNYDGKCKNMHGHSYKLFVTVKGNPIKDLDHHKNGMVVDFGDIKKIVKEEIVDIWDHAVLVNGDSPHKLLGESLENQGHKVIFCEYQPTCENMLYDIAAKIQSKLPNHVQLAYLKLHETENSYGEWIAEEN

SEQ ID NO: 19230 - protein, 147 aa, Chryseobacterium hominis
  REGION 1..147: note = tr|A0A3N0X8P9|A0A3N0X8P9_9FLAO 6-carboxytetrahydropterin synthase OS=Chryseobacterium hominis OX=420404 GN=EGH73_06770 PE=4 SV=1
MIRITKIFNFETAHVLYNYDGKCKNMHGHSYKLFVTVKGNPIKDLDHHKNGMVVDFGDIKKIVKEEIVDIWDHAVLVNGDSPHKLLGESLENQGHKVIFCKYQPTCENMLYDIAAKIKSKLPTHVQLAYLKLHETENSYGEWIAEEN

SEQ ID NO: 19231 - protein, 148 aa, Chryseobacterium humi
  REGION 1..148: note = tr|A0A1H5Z6Y0|A0A1H5Z6Y0_9FLAO 6-carboxy-5,6,7,8-tetrahydropterin synthase; OS = Chryseobacterium humi OX=493375 GN=SAMN05421847_2025; PE = 3 SV=1
MIRITKIFTFETAHILYGYDGKCKNMHGHSYKLFVTVKGNPINDLDHSKNGMVMDFGDLKKIVNSQIVNEWDHAVMLNANSPHKGLGQNLEKEGHKVIYCDFQPTCENMLYEIAKKIKNKLPLEIQLAYLKLHETENSFGEWFAEDQV

SEQ ID NO: 19232 - protein, 148 aa, Chryseobacterium hungaricum
  REGION 1..148: note = tr|A0A1G7I7V7|A0A1G7I7V7_9FLAO 6-carboxy-5,6,7,8-tetrahydropterin synthase; OS = Chryseobacterium hungaricum OX=454006; GN = SAMN05421825_1010 PE=3 SV=1
MIRITKIFTFETAHVLYNYDGKCKNMHGHSYKLFVTVKGIPINDLDDHKNGMVVDFGDIKKIVKEEIVDVWDHAVLVNGASPHRLLGESLQNQGHKVIFCDYQPTCENMLYDMASKIKSKLPGHVQLSYLKLHETENSYGEWLAEENK

SEQ ID NO: 19233 - protein, 148 aa, Chryseobacterium indologenes
  REGION 1..148: note = tr|A0A1Z3W4V7|A0A1Z3W4V7_9FLAO 6-carboxy-5,6,7,8-tetrahydropterin synthase; OS = Chryseobacterium indologenes OX=253 GN=EGX91_10035 PE=3; SV = 1
MIRITKIFTFETAHVLYNYDGKCKNMHGHSYKLFVTVKGKPINDIENPKNGMVVDFGDIKSIVKSEIVDVWDHAVLVNALSPHKELGDDLEQRGHKVIYCSFQPTCENMLYAIASKIKSKLPEGISLAYLKLHETENSYGEWFAEDNQ

SEQ ID NO: 19234 - protein, 148 aa, Chryseobacterium indologenes; identical to SEQ ID NO: 19196
  REGION 1..148: note = tr|A0A411DK12|A0A411DK12_9FLAO 6-carboxy-5,6,7,8-tetrahydropterin synthase; OS = Chryseobacterium indologenes OX=253 GN=EU348_05660 PE=3; SV = 1

SEQ ID NO: 19235 - protein, 147 aa, Chryseobacterium indoltheticum; identical to SEQ ID NO: 19202
  REGION 1..147: note = tr|A0A381FNE4|A0A381FNE4_9FLAO 6-carboxy-5,6,7,8-tetrahydropterin synthase; OS = Chryseobacterium indoltheticum OX=254 GN=EG340_16430; PE = 3 SV=1

SEQ ID NO: 19236 - protein, 148 aa, Chryseobacterium jejuense
  REGION 1..148: note = tr|A0A2X2WYX4|A0A2X2WYX4_9FLAO 6-carboxy-5,6,7,8-tetrahydropterin synthase; OS = Chryseobacterium jejuense OX=445960 GN=NCTC13492_02969; PE = 3 SV=1
MIRITKIFTFETAHVLYNYDGKCKNMHGHSYKLFVTVKGKPINDIDNPKNGMVVDFGDIKSIVKSEIVDVWDHAVLLNALTPHKELGDDLEQKGHKVIYCSFQPTCENMLYAIAAKVKSRLPEGISLAYLKLHETENSYGEWFAEDNQ

SEQ ID NO: 19237 - protein, 148 aa, Chryseobacterium jeonii
  REGION 1..148: note = tr|A0A0C1CUS2|A0A0C1CUS2_9FLAO 6-carboxy-5,6,7,8-tetrahydropterin synthase; OS = Chryseobacterium jeonii OX=266749 GN=OA86_12580 PE=3; SV = 1
MIRITKIFTFETAHVLYNYDGKCKNMHGHSYKLFVAVKGNPINDLDHPKNGMVVDFGDIKKIVKSEILNVWDHAVMLNGTSPHKKLGEDLENQGHKVIYCDYQPTCENMLYDIANKIKKQLPETVSLAYLKLHETENSYGEWFAEDQD

SEQ ID NO: 19238 - protein, 148 aa, Chryseobacterium joostei
  REGION 1..148: note = tr|A0A1N7I4Q4|A0A1N7I4Q4_9FLAO 6-carboxy-5,6,7,8-tetrahydropterin synthase; OS = Chryseobacterium joostei OX=112234 GN=EG359_10070 PE=3; SV = 1
MIRITKIFTFETAHVLYNYDGKCKNMHGHSYKLFVTVKGKPINDIENPKNGMVVDFGDIKSIVKSEIVDVWDHAVLLNALTPHKELGDDLEQKGHKVIYCSFQPTCENMLYAIAAKVKSRLPEGISLAYLKLHETENSYGEWFAEDNQ

SEQ ID NO: 19239 - protein, 148 aa, Chryseobacterium koreense
  REGION 1..148: note = tr|A0A0J7J2E6|A0A0J7J2E6_9FLAO 6-carboxy-5,6,7,8-tetrahydropterin synthase; OS = Chryseobacterium koreense CCUG 49689 OX=1304281; GN = ACM44_01550 PE=3 SV=1
MIRITKIFTFETAHVLYNYDGKCKNMHGHSYKLFVTVKGNPINDLENPKNGMVVDFGDIKKIVKEEIIDVWDHAVLINALSPHKELGEDLEQKGHKVIYCNFQPTCENMLYEISVKVKNRLPNHVQLAYLKLHETENSYGEWVAEENI

SEQ ID NO: 19240 - protein, 148 aa, unidentified
  source 1..148: note = Chryseobacterium kwangjuense
  REGION 1..148: note = tr|A0A135WL36|A0A135WL36_9FLAO 6-carboxy-5,6,7,8-tetrahydropterin synthase; OS = Chryseobacterium kwangjuense OX=267125 GN=AU378_07735; PE = 3 SV=1
MIRITKIFTFETAHVLYNYDGKCKNMHGHSYKLFVTVKGRPVNDLENPKNGMVVDFGDIKSIVKSEIVDVWDHAVLVNALSPHKELGEDLENKGHKVIYCSFQPTCENMLYAIAAKIKSKLPAEVSLAYLKLHETENSYGEWFAEDNK

SEQ ID NO: 19241 - protein, 148 aa, unidentified
  source 1..148: note = Chryseobacterium lactis
  REGION 1..148: note = tr|A0A3G6RKQ3|A0A3G6RKQ3_9FLAO 6-carboxy-5,6,7,8-tetrahydropterin synthase; OS = Chryseobacterium lactis OX=1241981 GN=EG341_16910 PE=3; SV = 1
MIRITKIFTFETAHVLYNYDGKCKNMHGHSYKLFVTVKGKPINDMENPKNGMVVDFGDIKSIVKSEIVDVWDHAVLLNALSPHKELGDELEQRGHKVIYCSFQPTCENMLYAIASKIKSKLPEGISLAYLKLHETENSYGEWFAEDNQ

SEQ ID NO: 19242 - protein, 148 aa, Chryseobacterium lathyri; identical to SEQ ID NO: 19213
  REGION 1..148: note = tr|A0A511YBD6|A0A511YBD6_9FLAO 6-carboxytetrahydropterin synthase QueD; OS = Chryseobacterium lathyri OX=395933 GN=CLA01_25560 PE=4; SV = 1

SEQ ID NO: 19243 - protein, 123 aa, unidentified
  source 1..123: note = Chryseobacterium limigenitum
  REGION 1..123: note = tr|A0A1K2II20|A0A1K2II20_9FLAO 6-pyruvoyltetrahydropterin/6-carboxytetrahydropterin synthase OS=Chryseobacterium limigenitum OX=1612149; GN = SAMN05216324_10315 PE=4 SV =1
MHGHSYKLFVTVKGKPVNDLENPKNGMVVDFGDIKSIVKPEIVDVWDHAVLINGLSPHRELGESLESQGHKVIYCNFQPTCENMLYAIAAKIKSKLPEGISLAYLKLHETENSYGEWFAEDNQ

SEQ ID NO: 19244 - protein, 148 aa, Chryseobacterium luteum
  REGION 1..148: note = tr|A0A085Z1G0|A0A085Z1G0_9FLAO 6-pyruvoyl tetrahydropterin synthase OS=Chryseobacterium luteum; OX = 421531 GN=IX38_19325 PE=4 SV=1
MIRITKIFTFETAHVLYNYDGKCKNMHGHSYKLFVTVKGKVINDLGNPKNGMVVDFGDIKSIVKSEIVDLWDHAVLVNALSPHKELGEDLENKGHKVIYCSFQPTCENMLYAIAAKIKSKLPAEVSLAYLKLHETENSYGEWFAEDNK

SEQ ID NO: 19245 - protein, 169 aa, Chryseobacterium molle
  REGION 1..169: note = tr|A0A1M6T921|A0A1M6T921_9FLAO 6-pyruvoyltetrahydropterin/6-carboxytetrahydropterin synthase OS=Chryseobacterium molle OX=216903; GN = SAMN05444371_2710 PE=4 SV=1
MFSSVTNLLPENIPPFFNYLCSMIRITKIFTFETAHVLYNYDGKCKNMHGHSYKLYVTVKGNPINDLDSHKNGMVVDFGDIKKIVKQEIVDVWDHAVMVNGSSPHKSLGESLENQGHKVIFCNYQPTCENMLYDIASKIRAKLPQHIQLAYLKLHETENSYGEWLAEDN

SEQ ID NO: 19246 - protein, 148 aa, unidentified; identical to SEQ ID NO: 18744
  source 1..148: note = Chryseobacterium mucoviscidosis
  REGION 1..148: note = tr|A0A202CGI6|A0A202CGI6_9FLAO 6-carboxy-5,6,7,8-tetrahydropterin synthase; OS = Chryseobacterium mucoviscidosis OX=1945581; GN = B0E34_01105 PE=3 SV=1

SEQ ID NO: 19247 - protein, 148 aa, unidentified; identical to SEQ ID NO: 19208
  source 1..148: note = Chryseobacterium nakagawai
  REGION 1..148: note = tr|A0A448LM93|A0A448LM93_9FLAO 6-carboxy-5,6,7,8-tetrahydropterin synthase; OS = Chryseobacterium nakagawai OX=1241982; GN = NCTC13529_04413 PE=3 SV=1

SEQ ID NO: 19248 - protein, 148 aa, unidentified
  source 1..148: note = Chryseobacterium nakagawai
  REGION 1..148: note = tr|A0A3N2F4X4|A0A3N2F4X4_9FLAO 6-pyruvoyltetrahydropterin/6-carboxytetrahydropterin synthase OS=Chryseobacterium nakagawai OX=1241982; GN = EDF65_0040 PE=4 SV=1
MIRITKIFTFETAHVLYNYDGKCKNMHGHSYKLFVTVKGKPINDIENPKNGMVVDFGDIKSIVKSEIVDVWDHSVLLNALTPHKELGDDLEQKGHKVIYCSFQPTCENMLYAIAAKIKSRLPEGISLAYLKLHETENSYGEWFAEDNQ

SEQ ID NO: 19249 - protein, 148 aa, unidentified
  source 1..148: note = Chryseobacterium nematophagum
  REGION 1..148: note = tr|A0A3M7L8U2|A0A3M7L8U2_9FLAO 6-carboxy-5,6,7,8-tetrahydropterin synthase; OS = Chryseobacterium nematophagum OX=2305228 GN=queD PE=3; SV = 1
MIRITKIFTFETAHVLYNYDGKCKNMHGHSYKLFVTVKGKPINDLNNPKNGMVVDFGDIKSIVKSEIVDVWDHAVLINGLSPHKELGEDLENKGHKVIYCTFQPTCENMLSAIAAKIKSKLPAEVSLAYLKLHETENSYGEWFAEDNS

SEQ ID NO: 19250 - protein, 148 aa, unidentified
  source 1..148: note = Chryseobacterium nematophagum
  REGION 1..148: note = tr|A0A3M7THA0|A0A3M7THA0_9FLAO 6-carboxy-5,6,7,8-tetrahydropterin synthase; OS = Chryseobacterium nematophagum OX=2305228 GN=queD PE=3; SV = 1
MIRITKIFTFETAHVLYNYDGKCKNMHGHSYKLFVTVKGKPVNDLNNPKNGMVVDFGDIKSIVKSEIVDVWDHAVLINGLSPHKELGEDLENKGHKVIYCTFQPTCENMLSAIAAKIKSKLPPEVSLAYLKLHETENSYGEWFAEDNS

SEQ ID NO: 19251 - protein, 148 aa, unidentified
  source 1..148: note = Chryseobacterium oleae
  REGION 1..148: note = tr|A0A1I4WLQ0|A0A1I4WLQ0_9FLAO 6-pyruvoyltetrahydropterin/6-carboxytetrahydropterin synthase OS=Chryseobacterium oleae OX=491207; GN = SAMN05421594_1317 PE=4 SV=1
MIRITKIFTFETAHVLYNYDGKCKNMHGHSYKLFVTVKGKVINDLENSKNGMVVDFGDIKSIVKSEIVDLWDHAVLVNALSPHKELGEDLENKGHKVIYCSFQPTCENMLYAIAAKIKSKLPAEVSLAYLKLHETENSYGEWFAEDNK

SEQ ID NO: 19252 - protein, 148 aa, Chryseobacterium oncorhynchi; identical to SEQ ID NO: 19238
  REGION 1..148: note = tr|A0A316WNC1|A0A316WNC1_9FLAO 6-carboxy-5,6,7,8-tetrahydropterin synthase; OS = Chryseobacterium oncorhynchi OX=741074 GN=C1638_019875; PE = 3 SV=1

SEQ ID NO: 19253 - protein, 148 aa, Chryseobacterium oranimense; identical to SEQ ID NO: 19240
  REGION 1..148: note = tr|A0A1M5MBE5|A0A1M5MBE5_9FLAO 6-carboxy-5,6,7,8-tetrahydropterin synthase; OS = Chryseobacterium oranimense OX=421058; GN = SAMN05421866_1393 PE=3 SV=1

SEQ ID NO: 19254 - protein, 148 aa, Chryseobacterium piperi
  REGION 1..148: note = tr|A0A086BIX9|A0A086BIX9_9FLAO 6-carboxy-5,6,7,8-tetrahydropterin synthase; OS = Chryseobacterium piperi OX=558152 GN=IQ37_08680 PE=3; SV = 1
MIRITKIFTFETAHVLYNYDGKCKNMHGHSYKLFVTVKGKPINDLENPKNGMVVDFGDIKSIVKSEIVDVWDHAVLINGLSPHKELGEDLEGRGHKVIYCTFQPTCENMLYAIAAKIKSKLPAEVSLAYLKLHETENSYGEWFAEDNV

SEQ ID NO: 19255 - protein, 148 aa, Chryseobacterium piscicola
  REGION 1..148: note = tr|A0A2S7KJM7|A0A2S7KJM7_9FLAO 6-carboxy-5,6,7,8-tetrahydropterin synthase; OS = Chryseobacterium piscicola OX=551459 GN=B0A70_00580; PE = 3 SV=1
MIRITKIFTFETAHVLYNYDGKCKNMHGHSYKLFVTVKGKPINDLENPKNGMVVDFGDIKSIVKAEIVDVWDHSVLINGVSPHREMGEELENKGQKVIYCNFQPTCENMLYAIAAKIKSKLPVDVSLAYLKLHETENSYGEWFAEDNQ

SEQ ID NO: 19256 - protein, 123 aa, Chryseobacterium piscicola
  REGION 1..123: note = tr|A0A1N7MC96|A0A1N7MC96_9FLAO 6-pyruvoyltetrahydropterin/6-carboxytetrahydropterin synthase OS=Chryseobacterium piscicola OX=551459; GN = SAMN05421796_104153 PE=4 SV=1
MHGHSYKLFVTVKGKPINDLENPKNGMVVDFGDIKSIVKAEIVDVWDHSVLINGVSPHREMGEELENKGQKVIYCNFQPTCENMLYAIAAKIKSKLPVDVSLAYLKLHETENSYGEWFAEDNQ

SEQ ID NO: 19257 - protein, 147 aa, Chryseobacterium piscium; identical to SEQ ID NO: 19202
  REGION 1..147: note = tr|A0A3D9BMR2|A0A3D9BMR2_9FLAO 6-carboxy-5,6,7,8-tetrahydropterin synthase; OS = Chryseobacterium piscium OX=333702 GN=DRF62_08455 PE=3; SV = 1

SEQ ID NO: 19258 - protein, 148 aa, unidentified
  source 1..148: note = Chryseobacterium polytrichastri
  REGION 1..148: note = tr|A0A1M6W7Z3|A0A1M6W7Z3_9FLAO 6-pyruvoyltetrahydropterin/6-carboxytetrahydropterin synthase OS=Chryseobacterium polytrichastri OX=1302687; GN = SAMN05444267_100921 PE= 4 SV=1
MIRITKIFTFETAHVLYNYDGKCKNMHGHSYKLLVTVKGKPVNDLENPKNGMVVDFGDIKSIVKPEIVDVWDHAVLINGLSPHRELGESLESQGHKVIYCNFQPTCENMLYAIAAKIKSKLPEGISLAYLKLHETENSYGEWFAEDNQ

SEQ ID NO: 19259 - protein, 123 aa, unidentified
  source 1..123: note = Chryseobacterium rhizoplanae
  REGION 1..123: note = tr|A0A521CP99|A0A521CP99_9FLAO 6-pyruvoyltetrahydropterin/6-carboxytetrahydropterin synthase OS=Chryseobacterium rhizoplanae OX=1609531; GN = SAMN06265171_103232 PE=4 S V=1
MHGHSYKLFVTVKGKPINDIENPKNGMVVDFGDIKSIVNSEIVDVWDHAVLVNALSPHKELGDDLEQKGHKVIYCSFQPTCENMLYAIAAKIKSKLPDGISLAYLKLHETENSYGEWFAEDNQ

SEQ ID NO: 19260 - protein, 147 aa, Chryseobacterium rhizosphaerae
  REGION 1..147: note = tr|A0A3D9DFA4|A0A3D9DFA4_9FLAO 6-carboxy-5,6,7,8-tetrahydropterin synthase; OS = Chryseobacterium rhizosphaerae OX=395937 GN=DRF57_07560; PE = 3 SV=1
MIRITKIFTFETAHVLYNYDGKCKNMHGHSYKLFVTVKGRPINDIENPKNGMVVDFGDIKSIVKSEIVDVWDHSVLVNALSPHKELGDDLEQKGHKVIYCSFQPTCENMLYAIAAKVKSKLPEGISLAYLKLHETENSYGEWFAEDN

SEQ ID NO: 19261 - protein, 160 aa, Chryseobacterium scophthalmum
  REGION 1..160: note = tr|A0A1N6G8H3|A0A1N6G8H3_9FLAO 6-pyruvoyltetrahydropterin/6-carboxytetrahydropterin synthase OS=Chryseobacterium scophthalmum OX=59733; GN = SAMN05421769_1952 PE=4 SV=1
MILLHIEFSYLCTMIRITKIFTFETAHVLYNYDGKCKNMHGHSYKLFVTVKGKPINDLENPKNGMVVDFGDIKDIVKSEIVDVWDHAVLINGVSPHRELGEGLENQGHKVIYCTFQPTCENMLYAIAAKVKSKLPEGISLAYLKLHETENSYGEWFAEDN

SEQ ID NO: 19262 - protein, 148 aa, unidentified
  source 1..148: note = Chryseobacterium sediminis
  REGION 1..148: note = tr|A0A5B2UDQ0|A0A5B2UDQ0_9FLAO 6-carboxytetrahydropterin synthase OS=Chryseobacterium sediminis OX=1679494 GN=FW780_09870 PE=4 SV=1
MIRITKIFTFETAHVLYNYDGKCKNMHGHSYKLFVTVKGKPINDIENPKNGMVVDFGDIKSIVNSEIVDVWDHAVLVNALSPHKELGDDLEQKGHKVIYCSFQPTCENMLYAIAAKVKSKLPDGISLAYLKLHETENSYGEWFAEDNQ

SEQ ID NO: 19263 - protein, 148 aa, unidentified
  source 1..148: note = Chryseobacterium shandongense
  REGION 1..148: note = tr|A0A3G6N0K1|A0A3G6N0K1_9FLAO 6-carboxy-5,6,7,8-tetrahydropterin synthase; OS = Chryseobacterium shandongense OX=1493872 GN=EG350_15705; PE = 3 SV=1
MIRITKIFTFETAHVLYNYDGKCKNMHGHSYKLFVTVKGKPINDLEHPKNGMVVDFGDIKSIVKSEIVDVWDHAVLINGLSPHKELGEDLEGKGHKVIYCTFQPTCENMLYAIAAKIKSKLPEGISLAYLKLHETENSYGEWFAEDNQ

SEQ ID NO: 19264 - protein, 148 aa, Chryseobacterium shigense; identical to SEQ ID NO: 19205
  REGION 1..148: note = tr|A0A1N7INF0|A0A1N7INF0_9FLAO 6-pyruvoyltetrahydropterin/6-carboxytetrahydropterin synthase OS=Chryseobacterium shigense OX=297244; GN = NCTC13533_00631 PE=4 SV=1

SEQ ID NO: 19265 - protein, 148 aa, Chryseobacterium soldanellicola
  REGION 1..148: note = tr|A0A1H1DHM4|A0A1H1DHM4_9FLAO 6-pyruvoyltetrahydropterin/6-carboxytetrahydropterin synthase OS=Chryseobacterium soldanellicola OX=311333; GN = SAMN05421664_2485 PE=4 S V=1
MIRITKIFTFETAHVLYNYDGKCKNMHGHSYKLFVTVKGKPVNDLENPKNGMVVDFGDIKSIVKSEIVDVWDHAVLINGISPHKELGESLENQGHKVIYCTFQPTCENMLYAIAAKIKSKLPAGVSLAYLKLHETENSYGEWFAEDNQ

SEQ ID NO: 19266 - protein, 147 aa, Chryseobacterium soli
  REGION 1..147: note = tr|A0A086A990|A0A086A990_9FLAO 6-carboxy-5,6,7,8-tetrahydropterin synthase; OS = Chryseobacterium soli OX=445961 GN=IW15_05505 PE=3 SV=1
MIRITKIFTFETAHVLYNYDGKCKNMHGHSYKLFVTVKGKPINDMENPKNGMVVDFGDIKTIVKSEIVDVWDHAVLLNALSPHKELGEDLEEKGHKVIYCSFQPTCENMLYAIAAKIKSKLPADISLAYLKLHETENSYGEWFAEDN

SEQ ID NO: 19267 - protein, 148 aa, Chryseobacterium solincola
  REGION 1..148: note = tr|A0A0C1CJ17|A0A0C1CJ17_9FLAO 6-carboxy-5,6,7,8-tetrahydropterin synthase; OS = Chryseobacterium solincola OX=510955 GN=OA84_10185 PE=3; SV = 1
MIRITKIFTFETAHVLYNYDGKCKNMHGHSYKLFVTVKGNPIDDLENPKNGMVVDFGDIKKIVKSEILSVWDHAVLLNGLSPHKNLGEDLEKQGHKVIYCDYQPTCENMLYDIAKKVQFHLPKNVSLAYLKLHETENSYGEWFAEDQV

SEQ ID NO: 19268 - protein, 147 aa, Chryseobacterium sp.
  REGION 1..147: note = tr|A0A368N550|A0A368N550_9FLAO 6-carboxy-5,6,7,8-tetrahydropterin synthase; OS = Chryseobacterium sp. YLOS41 OX=2058346 GN=DQ356_00100; PE = 3 SV=1
MIRITKIFTFETAHVLYNYDGKCKNMHGHSYKLFVTVKGTPINDLNHPKNGMVIDFGDIKKIVKEEITEIWDHAVLVHGGSPHIELGQDLEQKGHKVIYCDFQPTCENMLYAIASRIKSRLPDGISLAYLKLHETENSYGEWIAEEN

SEQ ID NO: 19269 - protein, 148 aa, Chryseobacterium sp.
  REGION 1..148: note = tr|A0A316X912|A0A316X912_9FLAO 6-carboxytetrahydropterin synthase OS=Chryseobacterium sp. ISE14 OX=475075 GN=C1631_009715 PE=4 SV=1
MIRITKIFTFETAHVLYNYDGKCKNMHGHSYKLFVTVKGKPINDIDSPKNGMVVDFGDIKSIVKSEIVDVWDHAVLVNALSPHKELGDDLEQKGHKVIYCSFQPTCENMLYAIASKVKSKLPEGISLAYLKLHETENSYGEWFAEDNQ

SEQ ID NO: 19270 - protein, 148 aa, Chryseobacterium taeanense
  REGION 1..148: note = tr|A0A1G8E5Y2|A0A1G8E5Y2_9FLAO 6-pyruvoyltetrahydropterin/6-carboxytetrahydropterin synthase OS=Chryseobacterium taeanense OX=311334; GN = SAMN05421846_101428 PE=4 SV=1
MIRITKIFTFETAHVLYNYDGKCKNMHGHSYKLFVTVKGKPVNDLENPKNGMVVDFGDIKSIVKSEIVDVWDHAVLINGLSPHKELGEDLEEKGHKVIYCTFQPTCENMLYAIAAKIKSKLPEEISLTYLKLHETENSYGEWFAEDNQ

SEQ ID NO: 19271 - protein, 123 aa, Chryseobacterium taichungense
  REGION 1..123: note = tr|A0A1H7VWZ3|A0A1H7VWZ3_9FLAO 6-pyruvoyltetrahydropterin/6-carboxytetrahydropterin synthase OS=Chryseobacterium taichungense OX=295069; GN = SAMN05421856_101316 PE=4 S V=1
MHGHSYKLFVTVKGKPVNDLENPKNGMVVDFGDIKSIVKSEIVDVWDHAVLINGLSPHKELGEDLEEKGHKVIYCTFQPTCENMLYAIAAKIKSKLPEGISLAYLKLHETENSYGEWLAEDNQ

SEQ ID NO: 19272 - protein, 122 aa, unidentified; identical to SEQ ID NO: 19221
  source 1..122: note = Chryseobacterium taihuense
  REGION 1..122: note = tr|A0A1G9N0K2|A0A1G9N0K2_9FLAO 6-pyruvoyltetrahydropterin/6-carboxytetrahydropterin synthase OS=Chryseobacterium taihuense OX=1141221; GN = SAMN05216273_106157 PE=4 SV= 1

SEQ ID NO: 19273 - protein, 148 aa, Chryseobacterium taiwanense
  REGION 1..148: note = tr|A0A0B4D0I3|A0A0B4D0I3_9FLAO 6-carboxy-5,6,7,8-tetrahydropterin synthase; OS = Chryseobacterium taiwanense OX=363331 GN=RM51_13690; PE = 3 SV=1
MIRITKIFTFETAHVLYNYDGKCKNMHGHSYKLFVTVKGKPINDLENPKNGMVVDFGEIKTIVKSEIVDVWDHAVMINGLSPHKELGESLENQGHKVIYCTFQPTCENMLYAIASKIKSRLPEGISLAYLKLHETENSYGEWFAEDNQ

SEQ ID NO: 19274 - protein, 148 aa, unidentified; identical to SEQ ID NO: 19263
  source 1..148: note = Chryseobacterium takakiae
  REGION 1..148: note = tr|A0A1M4Z0B5|A0A1M4Z0B5_9FLAO 6-carboxy-5,6,7,8-tetrahydropterin synthase; OS = Chryseobacterium takakiae OX=1302685; GN = SAMN05444408_10918 PE=3 SV=1

SEQ ID NO: 19275 - protein, 122 aa, unidentified
  source 1..122: note = Chryseobacterium taklimakanense
  REGION 1..122: note = tr|A0A239XRX4|A0A239XRX4_9FLAO Queuosine biosynthesis protein QueD OS=Chryseobacterium taklimakanense OX=536441 GN=SAMEA4412677_02018 PE=4 SV=1
MHGHSYKLFVTVKGKPIDDLNNPKNGMVVDFGDIKKIVKEEVVDVWDHAVLINALSPHKELGEDLERKGHKVIYCNYQPTCENMLYDIAEKIKKHLTQHVQLAYLKMHETENSYGEWFAEEN

SEQ ID NO: 19276 - protein, 147 aa, unidentified
  source 1..147: note = Chryseobacterium taklimakanense
  REGION 1..147: note = tr|A0A3G8WNI7|A0A3G8WNI7_9FLAO 6-carboxytetrahydropterin synthase QueD; OS = Chryseobacterium taklimakanense OX=536441 GN=queD PE=4; SV = 1
MIRITKIFTFETAHVLYNYDGKCKNMHGHSYKLFVTVKGKPIDDLNNPKNGMVVDFGDIKKIVKEEVVDVWDHAVLINALSPHKELGEDLERKGHKVIYCNYQPTCENMLYDIAEKIKKHLPQHVQLAYLKMHETENSYGEWFAEEN

SEQ ID NO: 19277 - protein, 148 aa, Chryseobacterium treverense
  REGION 1..148: note = tr|A0A1I3JAD7|A0A1I3JAD7_9FLAO 6-pyruvoyltetrahydropterin/6-carboxytetrahydropterin synthase OS=Chryseobacterium treverense OX=631455; GN = SAMN05421638_0052 PE=4 SV=1
MIRITKIFTFETAHVLYNYDGKCKNMHGHSYKLFVTVKGNPIDNLENPKNGMVVDFGDIKKIVKSEILSVWDHAVLLNGLSAHKNLGEDLEKQGHKVIYCDYQPTCENMLYDIAKKVQFHLPKNVSLAYLKLHETENSYGEWFAEDQL

SEQ ID NO: 19278 - protein, 148 aa, Chryseobacterium ureilyticum; identical to SEQ ID NO: 19196
  REGION 1..148: note = tr|A0A1N7M1W7|A0A1N7M1W7_9FLAO 6-carboxy-5,6,7,8-tetrahydropterin synthase; OS = Chryseobacterium ureilyticum OX=373668; GN = SAMN05421786_102189 PE=3 SV=1

SEQ ID NO: 19279 - protein, 148 aa, unidentified
  source 1..148: note = Chryseobacterium viscerum
  REGION 1..148: note = tr|A0A316WJY6|A0A316WJY6_9FLAO 6-carboxytetrahydropterin synthase OS=Chryseobacterium viscerum OX=1037377 GN=C1634_010645 PE=4 SV=1
MIRITKIFTFETAHVLYNYDGKCKNMHGHSYKLFVTVKGKPINDIENPKNGMVVDFGDIKSIVKSEIVDVWDHSVLVNALSPHKELGDDLEQKGHKVIYCSFQPTCENMLYAIAAKVKSKLPDGISLAYLKLHETENSYGEWFAEDNQ

SEQ ID NO: 19280 - protein, 148 aa, Chryseobacterium wanjuense
  REGION 1..148: note = tr|A0A1I0MUW8|A0A1I0MUW8_9FLAO 6-carboxy-5,6,7,8-tetrahydropterin synthase; OS = Chryseobacterium wanjuense OX=356305; GN = SAMN05421841_0205 PE=3 SV=1
MIRITKIFTFETAHVLYNYDGKCKNMHGHSYKLFVTVKGKPINDLENPKNGMVVDFGDIKTIVKSEIVDVWDHAVLINALSPHKELGEDLEQKGHKVIYCTFQPTCENMLYAIAAKIKSRLPEGISLAYLKLHETENSYGEWFAEDNQ

SEQ ID NO: 19281 - protein, 147 aa, unidentified
  source 1..147: note = Chryseobacterium xixisoli
  REGION 1..147: note = tr|A0A4R8I9Y8|A0A4R8I9Y8_9FLAO 6-pyruvoyltetrahydropterin/6-carboxytetrahydropterin synthase OS=Chryseobacterium xixisoli OX=1476462; GN = B0I22_0457 PE=4 SV=1
MIRITKIFTFETAHVLYNYDGKCKNMHGHSYKLFVTVKGNPINDLENQKNGMVVDFGDIKKIVKEEVVDVWDHAVMVNGASPHKLLGESLENQGHRVIFCDYQPTCENMLYDIASKIQSKLPASVQLAYLKLHETENSYGEWLAEEN

SEQ ID NO: 19282 - protein, 147 aa, unidentified
  source 1..147: note = Chryseobacterium zeae
  REGION 1..147: note = tr|A0A1N6HD50|A0A1N6HD50_9FLAO 6-pyruvoyltetrahydropterin/6-carboxytetrahydropterin synthase OS=Chryseobacterium zeae OX=1416779; GN = SAMN05444409_2396 PE=4 SV=1
MIRITKIFTFETAHVLYNYDGKCKNMHGHSYKLFVTVKGNPINNLDDPKNGMVVDFGDIKKIVKEEIVDIWDHAVLVNGASPHKSLGENLQNEGHKVIFCDYQPTCENMLYDIASKIKSKLPSEIQLAYLKLHETENSYGEWLAEEN

SEQ ID NO: 19283 - protein, 135 aa, unidentified
  source 1..135: note = Chryseolinea flava
  REGION 1..135: note = tr|A0A364Y565|A0A364Y565_9BACT 6-carboxytetrahydropterin synthase OS=Chryseolinea flava; OX = 2059302 GN=DQQ10_11220 PE=4 SV=1
MKVKVSRKEHFNAAHRLFNPAWTAEENMKVFGKCSNPNYHGHNYELVVSVTGLPDPNTGYVYDMKVLSDIIKDNVLRKFDHRNLNLDIAEFNGVNPTAENIAAVIWKILREKIDTNLELKITLYETERNFVEYPA

SEQ ID NO: 19284 - protein, 139 aa, unidentified
  source 1..139: note = Chryseolinea flava
  REGION 1..139: note = tr|A0A364XZK8|A0A364XZK8_9BACT 6-carboxytetrahydropterin synthase OS=Chryseolinea flava; OX = 2059302 GN=DQQ10_17905 PE=4 SV=1
MIYVSRKEHFNAAHKLYNPKWTKEKNVEVFGPCANENWHGHNFDLIVTVKGIPDPESGFVVDLKKLSTLIRNEVIEKLDHKNLNTDVDFMKDKLASCENLIVEIWKILNSHLPSITSRGKLHCIRLYETPRNYVEYYGE

SEQ ID NO: 19285 - protein, 139 aa, unidentified
  source 1..139: note = Chryseolinea serpens
  REGION 1..139: note = tr|A0A1M5X1D0|A0A1M5X1D0_9BACT 6-pyruvoyltetrahydropterin/6-carboxytetrahydropterin synthase OS=Chryseolinea serpens OX=947013; GN = SAMN04488109_6235 PE=4 SV=1
MVYVSRKEHFNAAHKLYNPKWSPERNVEVFGPCANDNWHGHNFELIVTVKGKPDPDTGFVVDLKQLSTLIRKEVIDKLDHKNLNLDVDFMTGKLASCENLIIEIWRILHAHLPSITPNGKLHSLRLFETPRNYVDYFGE

SEQ ID NO: 19286 - protein, 136 aa, unidentified
  source 1..136: note = Chryseolinea serpens
  REGION 1..136: note = tr|A0A1M5L2X8|A0A1M5L2X8_9BACT 6-pyruvoyltetrahydropterin/6-carboxytetrahydropterin synthase OS=Chryseolinea serpens OX=947013; GN = SAMN04488109_0955 PE=4 SV=1
MKVKVSRREHFNAAHRLHNPAWTAEKNQQVFGKCNNPNYHGHNYELVVSLIGEPNPDTGYVYDLKVLSDLIKENVLKKFDHKNLNLDTEYFKDINPTAENIAVMIWRILRQKIDSNLELKITLYETERNFVEYPAA

SEQ ID NO: 19287 - protein, 136 aa, unidentified
  source 1..136: note = Chryseolinea sp.
  REGION 1..136: note = tr|A0A385SMR5|A0A385SMR5_9BACT 6-carboxytetrahydropterin synthase OS=Chryseolinea sp. KIS68-18 OX=2321403 GN=D4L85_21885 PE=4 SV=1
MKVKVSRREHFNAAHRLHNPAWTAEKNQQVFGKCNNPNYHGHNYELVVSLIGEPHPETGYVYDLKVLSDLIKESVLKKFDHKNLNLDTEYFKDINPTAENIAVMIWRILRQKIDSNLELKITLYETERNFVEYPAA

SEQ ID NO: 19288 - protein, 139 aa, unidentified
  source 1..139: note = Chryseolinea sp.
  REGION 1..139: note = tr|A0A385SEX2|A0A385SEX2_9BACT 6-carboxytetrahydropterin synthase OS=Chryseolinea sp. KIS68-18 OX=2321403 GN=D4L85_03785 PE=4 SV=1
MVYVSRKEHFNAAHKLYNPKWSQERNVEVFGPCANDNWHGHNFELIVTVKGQPDPDTGFVVDLKQLSNLIRKEVIDKLDHKNLNLDVDFMTGKLASCENLIIEIWRILHTHLPSITPHGKLHSLRLYETPRNYVDYFGE

SEQ ID NO: 19289 - protein, 115 aa, unidentified
  source 1..115: note = Chrysiogenales bacterium
  REGION 1..115: note = tr|A0A524JV60|A0A524JV60_9BACT 6-carboxy-5,6,7,8-tetrahydropterin synthase; OS = Chrysiogenales bacterium OX=2528039 GN=E4H23_08140 PE=3; SV = 1
MSWDLVVRQKFSAAHYLEHYRGKCEKMHGHTFEIEVHFQTNELDKSGISIDFSAIKEYLRGLVPDHKVLNELYEFSPSAENLARHFFEQIKLKYPVIKVMVWESDDAGAAYAEDQ

SEQ ID NO: 19290 - protein, 66 aa, unidentified
  source 1..66: note = Chrysiogenales bacterium
  REGION 1..66: note = tr|A0A524Q4G1|A0A524Q4G1_9BACT 6-pyruvoyl tetrahydropterin synthase family protein (Fragment); OS = Chrysiogenales bacterium OX=2528039 GN=E4G96_02955 PE=4; SV = 1
MYRLTIHDYFSSAHQLKGYRGECEGVHGHNWKVEVEVEGEGLNDIGLLVDFHDLKAILKEVIDPLD

SEQ ID NO: 19291 - protein, 151 aa, unidentified
  source 1..151: note = Chthoniobacter flavus
  REGION 1..151: note = tr|B4D1V3|B4D1V3_9BACT 6-pyruvoyl-tetrahydropterin synthase-like protein OS=Chthoniobacter flavus Ellin428; OX = 497964 GN=CfE428DRAFT_2891 PE=4 SV=1
MPYRICKTIDIENGHMLSKHPDKCQFPHGHTRKVEFVLEAAELDRNEMVCDFKIIKDAVGQWLDTFDHALCMNTSDPAYAEFKQRYGDRVIGFENQDPTTEVLARTIFDHASKALSAYSQKQDSRYPLRLDARLVTVRVWETATSWAEYAE

SEQ ID NO: 19292 - protein, 333 aa, unidentified
  source 1..333: note = Chthoniobacterales bacterium
  REGION 1..333: note = tr|A0A2W5ZM82|A0A2W5ZM82_9BACT Uncharacterized protein (Fragment) OS=Chthoniobacterales bacterium; OX = 2201154 GN=DLM52_08905 PE=4 SV=1
MLLTVSKRVDFSASRRLFSPNVSAEENRRLFGGETGARYGTGRNYTAYFVFAGEPDATTGMLINISEIKARAGAIIDDRYDHRFLNEDNESFRETVPTVENVARQLLHDIAPSFENNPAQLVAVHLRETPTRSATAYKNGAIEGNFWFDFSAARRTLSPRLSDAENQHLFGVSTHEHGHNYRARLTLRSDDAAPVFPVTQVEELMTNLRAELDHKNLSRDVAALRDRPTTTESLARFILQSGSSLDSLARVRLHERDDFFAEAQRDGRVFLGMRRSFSASHRLHVSSFTDEKNAELFGKCNNLRGHGHWYVTESTIGGEYDQRTGALFSFAGL

SEQ ID NO: 19293 - protein, 405 aa, unidentified
  source 1..405: note = Chthoniobacterales bacterium
  REGION 1..405: note = tr|A0A2W5YW15|A0A2W5YW15_9BACT Uncharacterized protein OS=Chthoniobacterales bacterium OX=2201154; GN = DLM73_03080 PE=4 SV=1
MLLTVSKRLEFSASRRLFVKEWSDAENLAAFGPETAARHGTGRNYAAYFIFSGTVDPATGMLMNISEIKERAGQVLRDGFDHKFLNADNSTFSNVPPTAENIARELFVDATPLFQDSKAQLMACHLSESDERSATFFAKGTTESNHWFEFSAARQTMSPLLSAEENEKLFGAAASPFGHGHNYRARVTFRSEAGSSSDGSSASQEIKSALASVQRELDHKNLNREVPGLTNQRITTEKLARYIHGRVAEKLPVHRVRLHERRDFFAEYWKGGSYFLGLQVPFSAAHRLHSHVLSTEENLALYGKCNNPLGHGHLYVTEATIGGIFDERSGTLSDFIAFQSGIADAIQPWQDKHLDFEMEEFRNKPSTGENIVQALWPRFDSRLDGRLVRLRLWETANNRFTLRKL

SEQ ID NO: 19294 - protein, 267 aa, Chthonomonas calidirosea
  REGION 1..267: note = tr|S0ESN2|S0ESN2_CHTCT 6-pyruvoyl-tetrahydropterin synthase OS=Chthonomonas calidirosea (strain DSM 23976 / ICMP 18418 / T49) OX=1303518 GN=CCALI_00091 PE=4 SV=1
MLIMTRRLYFAAAHRDIQGSELTGHTYTLDVAVSGHINERTGLLVNIKELDRIVKEHVLNQIDGKCLNDRLSFFQAHLATPENIATYIAGTVHPFLPSDIHLHSVRLQPTPVLYTEWLSSLKEVSHMLLTKIYEFSASHRLHSDSLSAEENRTLFGKCNNPNGHGHNYELEVTICGPINPITGRVLPPERLDAVVEREVLSRYDHRYLNLDVPEFAHVVPSAEMIVKTIWERLRPCIPAPARLYRLRLYETPRNLFEYSEEDDKEQR

SEQ ID NO: 19295 - protein, 126 aa, Chthonomonas calidirosea
  REGION 1..126: note = tr|S0EU80|S0EU80_CHTCT 6-carboxy-5,6,7,8-tetrahydropterin synthase; OS = Chthonomonas calidirosea (strain DSM 23976 / ICMP 18418 / T49) OX=1303518 GN=CCALI_01012 PE=3 S V=1
MELFKEFYIEAAHRLPHVPEGHKCARLHGHSFRITIYVSGSPDPQLGWVMDFADIGEAFRPLYDMLDHRYLNEIEGLENPTSENLARWIWQRLKPRLPGLCRIVIQETCTSGCTYTGEQDHDTSVV

SEQ ID NO: 19296 - protein, 118 aa, unidentified
  source 1..118: note = Ciceribacter sp.
  REGION 1..118: note = tr|A0A4Q2TEU0|A0A4Q2TEU0_9RHIZ 6-carboxy-5,6,7,8-tetrahydropterin synthase; OS = Ciceribacter sp. F8825 OX=2509717 GN=queD PE=3 SV=1
MYRITKEFHFSASHQLKGLPADHQCARLHGHNYVVEVELSAAELDEHGFVRDYHELAPLKRYIDEAFDHRHLNDVLGHDKVTAECLARHFYDWCKVRLPETSAVRVSETPKTWAEYRP

SEQ ID NO: 19297 - protein, 117 aa, Citreicella sp.
  REGION 1..117: note = tr|D0DDU1|D0DDU1_9RHOB 6-carboxy-5,6,7,8-tetrahydropterin synthase OS=Citreicella sp. SE45 OX=501479 GN=queD PE=3 SV=1
MFRIRKEFHFSASHRLEHLPPDHQCARLHGHNYVVVVELAAETLNADGFVRDYHDLADLKTYIDGQFDHRHLNDVLEVPSTAEHMARHFFDWCRARWPETSAVLVSETPKTWAEYRP

SEQ ID NO: 19298 - protein, 120 aa, Citrobacter amalonaticus
  REGION 1..120: note = tr|A0A515AK03|A0A515AK03_CITAM 6-carboxy-5,6,7,8-tetrahydropterin synthase OS=Citrobacter amalonaticus OX=35703 GN=queD PE=3 SV=1
MSTTLFKDFTFEAAHRLPHVPEGHKCGRLHGHSFMVRLEITGEVCPHTGWIMDFAELKAAFKPTYERLDHYYLNDIPGLENPTSEVLAKWIWDQVKPAVPLLSAVMVKETCTAGCVYRGE

SEQ ID NO: 19299 - protein, 120 aa, Citrobacter amalonaticus
  REGION 1..120: note = tr|A0A0X8S2H4|A0A0X8S2H4_CITAM 6-carboxy-5,6,7,8-tetrahydropterin synthase OS=Citrobacter amalonaticus OX=35703 GN=queD PE=3 SV=1
MSTTLFKDFTFEAAHRLPHVPEGHKCGRLHGHSFMVRLEITGEVCPHTGWIMDFAELKAAFKPTYDRLDHYYLNDIPGLENPTSEVLAKWIWDQVKPAVPLLSAVMVKETCTAGCVYRGE

SEQ ID NO: 19300 - protein, 120 aa, Citrobacter braakii
  REGION 1..120: note = tr|A0A4R0LRS9|A0A4R0LRS9_CITBR 6-carboxy-5,6,7,8-tetrahydropterin synthase OS=Citrobacter braakii OX=57706 GN=queD PE=3 SV=1
MTTTLFKDFTFEAAHRLPHVPEGHKCGRLHGHSFMVRLEITGEVDPHTGWIMDFSELKAAFKPTYNRLDHYYLNDIPGLENPTSEVLAKWIWDQVKPVVPLLSAVMVKETCTAGCVYRGE

SEQ ID NO: 19301 - protein, 120 aa, Citrobacter braakii
  REGION 1..120: note = tr|A0A1R0FZ92|A0A1R0FZ92_CITBR 6-carboxy-5,6,7,8-tetrahydropterin synthase OS=Citrobacter braakii OX=57706 GN=queD PE=3 SV=1
MSTTLFKDFTFEAAHRLPHVPEGHKCGRLHGHSFMVRLEITGEVDPHTGWIMDFSELKAAFKPTYNRLDHYYLNDIPGLENPTSEVLAKWIWDQVKPVVPLLSAVMVKETCTAGCVYRGE

SEQ ID NO: 19302 - protein, 121 aa, Citrobacter farmeri
  REGION 1..121: note = tr|A0A223JVH1|A0A223JVH1_9ENTR 6-carboxy-5,6,7,8-tetrahydropterin synthase OS=Citrobacter farmeri OX=67824 GN=queD PE=3 SV=1
MMTTTLFKDFTFEAAHRLPHVPEGHKCGRLHGHSFMVRLEVTGEVCPHTGWIIDFAELKAAFKPTYDRLDHYYLNDIPGLENPTSEVLAKWIWDQVKPAIPLLSAVMIKETCTAGCVYRGE

SEQ ID NO: 19303 - protein, 121 aa, Citrobacter farmeri
  REGION 1..121: note = tr|A0A223JYS9|A0A223JYS9_9ENTR 6-carboxy-5,6,7,8-tetrahydropterin synthase OS=Citrobacter farmeri OX=67824 GN=queD PE=3 SV=1
MKTTLYKDFTFEAAHRLPNVSEGHKCGRLHGHSFVVRLEITGEVDPNTGWIIDFAELKAIFKPTLDRLDHYYLNDIPGLENPTSEVLAEWVWQQIKPQLPLLSAVIVKETCTAGCIYRGEL

SEQ ID NO: 19304 - protein, 120 aa, Citrobacter freundii
  REGION 1..120: note = tr|A0A0P8KDJ9|A0A0P8KDJ9_CITFR 6-carboxy-5,6,7,8-tetrahydropterin synthase OS=Citrobacter freundii OX=546 GN=AN672_08440 PE=3 SV=1
MSTTLFKDFTFEAAHRLPHVPEGHKCGRLHGHSFMVRLEITGEVDPHTGWIMDFAELKAAFKPTYNRLDHYYLNDIPGLENPTSEVLAKWIWDQIKPVVPLLSAVMVKETCTAGCVYRGE

SEQ ID NO: 19305 - protein, 120 aa, Citrobacter freundii
  REGION 1..120: note = tr|A0A064DKJ8|A0A064DKJ8_CITFR 6-carboxy-5,6,7,8-tetrahydropterin synthase OS=Citrobacter freundii MGH 56 OX=1439318 GN=AF42_03208 PE=3 SV=1
MSTTLFKDFTFEAAHRLPHVPEGHKCGRLHGHSFMVRLEITGEVDPHTGWIMDFSELKAAFKPTYDRLDHYYLNDIPGLENPTSEVLAKWIWDQVKPVVPLLSAVMVKETCTAGCVYRGE

SEQ ID NO: 19306 - protein, 120 aa, Citrobacter gillenii
  REGION 1..120: note = tr|A0A3E2KPT5|A0A3E2KPT5_9ENTR 6-carboxy-5,6,7,8-tetrahydropterin synthase OS=Citrobacter gillenii OX=67828 GN=queD PE=3 SV=1
MSTTLFKDFTFEAAHHLPHVPEGHKCGRLHGHSFMVRLEITGEVDPHTGWIMDFSELKAAFKPTYNRLDHYYLNDIPGLENPTSEVLAKWIWDEMKPLVPLLSAVMVKETCTAGCVYRGE

SEQ ID NO: 19307 - protein, 120 aa, Citrobacter koseri
  REGION 1..120: note = tr|A8ANX3|A8ANX3_CITK8 6-carboxy-5,6,7,8-tetrahydropterin synthase OS=Citrobacter koseri (strain ATCC BAA-895 / CDC 4225-83 / SGSC4696); OX = 290338 GN=CKO_04120 PE=3 S V=1
MSTTLFKDFTFEAAHRLPHVPEGHKCGRLHGHSFMVRLEITGDVDPHTGWIMDFAELKAAFKPTYDRLDHYYLNDIPGLENPTSEVLAKWIWDQVKPAVPLLSAVMVKETCTAGCVYRGE

SEQ ID NO: 19308 - protein, 120 aa, Citrobacter koseri; identical to SEQ ID NO: 19307
  REGION 1..120: note = tr|A0A336PYX9|A0A336PYX9_CITKO 6-carboxy-5,6,7,8-tetrahydropterin synthase OS=Citrobacter koseri OX=545 GN=queD PE=3 SV=1

SEQ ID NO: 19309 - protein, 120 aa, Citrobacter murliniae
  REGION 1..120: note = tr|A0A4S3S338|A0A4S3S338_9ENTR 6-carboxy-5,6,7,8-tetrahydropterin synthase OS=Citrobacter murliniae OX=67829 GN=queD PE=3 SV=1
MTTTLFKDFTFEAAHRLPHVPEGHKCGRLHGHSFMVRLEITGEVDPHTGWIMDFSELKAAFKPTYDRLDHYYLNDIPGLSNPTSEVLAKWIWDEVKPVVPLLSAVMVKETCTAGCVYRGE

SEQ ID NO: 19310 - protein, 120 aa, unidentified
  source 1..120: note = Citrobacter pasteurii
  REGION 1..120: note = tr|A0A0A1RUH5|A0A0A1RUH5_9ENTR 6-carboxy-5,6,7,8-tetrahydropterin synthase OS=Citrobacter pasteurii OX=1563222 PE=3 SV=1
MSTTLFKDFTFEAAHHLPHVPEGHKCGRLHGHSFMVRLEITGEVDPHTGWIMDFAELKAAFKPTYDRLDHYYLNDIPGLENPTSEVLSRWIWEQVKPVVPLLSAVMVKETCTAGCVYRGE

SEQ ID NO: 19311 - protein, 120 aa, unidentified
  source 1..120: note = Citrobacter portucalensis
  REGION 1..120: note = tr|A0A4P7UVN9|A0A4P7UVN9_9ENTR 6-carboxy-5,6,7,8-tetrahydropterin synthase OS=Citrobacter portucalensis OX=1639133 GN=queD PE=3 SV=1
MSTTLFKDFTFEAAHHLPHVPEGHKCGRLHGHSFMVRLEITGEVDPHTGWIMDFAELKAAFKPTYDRLDHYYLNDIPGLENPTSEVLAKWIWDQVKPVVPLLSAVMVKETCTAGCVYRGE

SEQ ID NO: 19312 - protein, 121 aa, Citrobacter rodentium
  REGION 1..121: note = tr|A0A482PNG3|A0A482PNG3_CITRO 6-carboxy-5,6,7,8-tetrahydropterin synthase OS=Citrobacter rodentium OX=67825 GN=queD PE=3 SV=1
MMTTTLFKDFTFEAAHRLPHVPEGHKCGRLHGHSFMVRLEITGEVDPHTGWIIDFAELKAAFKPTYDRLDHHYLNEIPGLSNPTSEVLAKWIWDEVKPTMPLLSAVMVKETCTAGCVYRGE

SEQ ID NO: 19313 - protein, 120 aa, Citrobacter sp.
  REGION 1..120: note = tr|A0A4U6GP12|A0A4U6GP12_9ENTR 6-carboxy-5,6,7,8-tetrahydropterin synthase OS=Citrobacter sp. wls716 OX=2576420 GN=queD PE=3 SV=1
MSTTLFKDFTFEAAHRLPHVPEGHKCGRLHGHSFMVRLEITGEVDPHTGWIMDFSELKAAFKPTYDRLDHYYLNDIPGLENPTSEVLAKWIWEQVKPVVPLLSAVMVKETCTAGCVYRGE

SEQ ID NO: 19314 - protein, 120 aa, Citrobacter sp.; identical to SEQ ID NO: 19305
  REGION 1..120: note = tr|A0A4P6WP30|A0A4P6WP30_9ENTR 6-carboxy-5,6,7,8-tetrahydropterin synthase OS=Citrobacter sp. LY-1 OX=2546350 GN=queD PE=3 SV=1

SEQ ID NO: 19315 - protein, 120 aa, Citrobacter werkmanii
  REGION 1..120: note = tr|A0A422V964|A0A422V964_9ENTR 6-carboxy-5,6,7,8-tetrahydropterin synthase OS=Citrobacter werkmanii OX=67827 GN=queD PE=3 SV=1
MSTTLFKDFTFEAAHRLPHVPEGHKCGRLHGHSFMVRLEITGEVDPHTGWIMDFAELKAAFKPTYDRLDHYYLNDIPGLENPTSEVLAKWIWDQVKPVVPLLSAVMVKETCTAGCVYRGE

SEQ ID NO: 19316 - protein, 120 aa, Citrobacter werkmanii; identical to SEQ ID NO: 19315
  REGION 1..120: note = tr|A0A090U157|A0A090U157_9ENTR 6-carboxy-5,6,7,8-tetrahydropterin synthase OS=Citrobacter werkmanii NBRC 105721 OX=1114921 GN=queD PE=3 SV=1

SEQ ID NO: 19317 - protein, 120 aa, Citrobacter youngae; identical to SEQ ID NO: 19315
  REGION 1..120: note = tr|D4BH08|D4BH08_9ENTR 6-carboxy-5,6,7,8-tetrahydropterin synthase OS=Citrobacter youngae ATCC 29220 OX=500640 GN=queD PE=3 SV=1

SEQ ID NO: 19318 - protein, 120 aa, Citrobacter youngae; identical to SEQ ID NO: 19313
  REGION 1..120: note = tr|A0A549VC26|A0A549VC26_9ENTR 6-carboxy-5,6,7,8-tetrahydropterin synthase OS=Citrobacter youngae OX=133448 GN=queD PE=3 SV=1

SEQ ID NO: 19319 - protein, 123 aa, unidentified
  source 1..123: note = Cloacibacillus porcorum
  REGION 1..123: note = tr|A0A1B2I7B1|A0A1B2I7B1_9BACT 6-carboxy-5,6,7,8-tetrahydropterin synthase; OS = Cloacibacillus porcorum OX=1197717 GN=BED41_12575 PE=3; SV = 1
MLLCRDFKFDAAHNLIHYHGKCERLHGHTYHLRVTLEGEPDAEGMIFDFVDLKKAVNELVLSKLDHAYINDILPQPTAEYIAVWIFRALDGPLSRANCRLHEIRLWETESSSVICRREDVKDA

SEQ ID NO: 19320 - protein, 188 aa, unidentified
  source 1..188: note = Cloacibacillus porcorum
  REGION 1..188: note = tr|A0A1B2I6B8|A0A1B2I6B8_9BACT Rubredoxin; OS = Cloacibacillus porcorum OX=1197717 GN=BED41_10820 PE=4; SV = 1
MKSIAKLDLQYAHRFYGFKGEAQYLHGHTGILTIEVEGSVNPGVNMVFPCNEIQKTAWDVLKNFDHALILREDDPLLPAVLDVYEKQGIRNGAPSNTMKGPAFKTELATAYPECRLVVTKETMTVEGMIKIVYDLLKDKLNIVKLTFSSGVNEASEEYEPHLNVDRCPLCGIALDENGVCPKCGYRKA

SEQ ID NO: 19321 - protein, 123 aa, Cloacibacillus sp.
  REGION 1..123: note = tr|A0A1Y4GD18|A0A1Y4GD18_9BACT 6-carboxy-5,6,7,8-tetrahydropterin synthase; OS = Cloacibacillus sp. An23 OX=1965591 GN=B5F39_06290 PE=3; SV = 1
MLLCRDFKFDAAHNLIHYHGKCERLHGHTYHLRVTLEGEPDAEGMIYDFVDLKKAVTELVLDRLDHAYINDVIPQPTAEYISRWIFRELDAPLRRDNCRLFEVQLWETEGSSVICRREDVKDA

SEQ ID NO: 19322 - protein, 123 aa, Cloacibacterium normanense
  REGION 1..123: note = tr|A0A1E5UE45|A0A1E5UE45_9FLAO 6-pyruvoyl tetrahydropterin synthase family protein; OS = Cloacibacterium normanense OX=237258 GN=BHF72_2307 PE=4; SV = 1
MHGHSYKLFVTVKGTPINDINNVKNGMVVDFGDIKKIVKEEIVEVWDHAVLLNALTPHKELGEDLANKGHKVIECNYQPTCENMLYEIAEKIKNKLPSHVQLAYLKLHETENSYGEWFAEENS

SEQ ID NO: 19323 - protein, 148 aa, Cloacibacterium normanense
  REGION 1..148: note = tr|A0A2S7I2I4|A0A2S7I2I4_9FLAO 6-carboxy-5,6,7,8-tetrahydropterin synthase; OS = Cloacibacterium normanense OX=237258 GN=queD PE=3 SV=1
MIRITKIFTFETAHVLYNYDGKCKNMHGHSYKLFVTVKGTPINDINNVKNGMVVDFGDIKKIVKEEIVDVWDHAVLLNALTPHKELGEDLAQKGHKVIECNYQPTCENMLYEIAEKIKNKLPSHVQLAYLKLHETENSYGEWFAEENS

SEQ ID NO: 19324 - protein, 126 aa, unidentified
  source 1..126: note = Cloacimonas acidaminovorans
  REGION 1..126: note = tr|B0VJG6|B0VJG6_CLOAI 6-carboxy-5,6,7,8-tetrahydropterin synthase OS=Cloacimonas acidaminovorans (strain Evry) OX=459349 GN=CLOAM1792 PE=3; SV = 1
MFYLNVIETFSAAHLLRGYEGACSKLHGHNWKVRVCVKTKEQDEIGMAMDFGVLKTILSNILNNLDHSYLNEIVPFTERNPTSENLAKYIYECMEKELQDKPVAISEVEVYESEKSSVIYKNDQIC

SEQ ID NO: 19325 - protein, 127 aa, unidentified
  source 1..127: note = Clostridia bacterium
  REGION 1..127: note = tr|A0A523C2D6|A0A523C2D6_9FIRM 6-carboxy-5,6,7,8-tetrahydropterin synthase OS=Clostridia bacterium OX=2044939 GN=queD PE=3 SV=1
MYRLRVKDHFQAAHQLPDHPGKCSRLHGHTYQVEICVAGNDLGAGGMLMDLGELKQVVSQALTPLDHSYLNEVPELQGKLPTAENLCRYLYDCLQAEMPAQVLVEEVQVWESDHAGAGYRGEDGCGQ

SEQ ID NO: 19326 - protein, 140 aa, unidentified
  source 1..140: note = Clostridiaceae bacterium
  REGION 1..140: note = tr|A0A316N5S5|A0A316N5S5_9CLOT 6-carboxy-5,6,7,8-tetrahydropterin synthase; OS = Clostridiaceae bacterium OX=1898204 GN=queD PE=3 SV=1
MYQLTIEQSFDSAHFLAGYQGKCGNIHGHRWRVLLVIQEEKLREEQQQRGMCVDFSTLKDELKEVADQYDHSFLIEKDTLKERTLEALKEEGFSWVELEFRPTAENFAKHFYDLFSQKGYDVARVQVYETPNNCATYTES

SEQ ID NO: 19327 - protein, 139 aa, unidentified; identical to SEQ ID NO: 17474
  source 1..139: note = Clostridiales bacterium
  REGION 1..139: note = tr|A0A1Q6ND25|A0A1Q6ND25_9FIRM 6-carboxy-5,6,7,8-tetrahydropterin synthase; OS = Clostridiales bacterium 42_27 OX=1897045 GN=BHV90_10440; PE = 3 SV=1

SEQ ID NO: 19328 - protein, 427 aa, unidentified
  source 1..427: note = Clostridiales bacterium
  REGION 1..427: note = tr|A0A1M2Z9I2|A0A1M2Z9I2_9FIRM Uncharacterized protein OS=Clostridiales bacterium 43-6 OX=1895747; GN = BGN88_00480 PE=4 SV=1
MSKQEYRFIFYLDAMHSIITNGVRGSEHQHTWKIGLTVFKLNDNFIEFHEFEQVIKEFLSIYQNKNFDRLPYFEDCVPTIENITEYFKVQLESLLFLRGWQLLRIEISDSPNRTYIYKTDHEAPEKHRNLSTDPVGKFFAPKPLIDKTEAPASPAGPTAVQPPVSEPPYTKPSEYTEHFAAEIPEPQANVSTSLNVIPDAPLIPETLLRDEEAVLNNNLEQYVDDRFNQFFEKISKRHDFTTPIPEPLPTTASPKVPPLQAEPKPLEQPKPAAERISIPKPSYSYTIPNIDAKPIDGFASTNLTLQEPADPPSTFEEIPLSVSKDETQKLFKNIEHAFSDFHTSLQPEPTPSDNRIFDSQKIRIETNNYKKKREIEYEQPVLYRELETLIQNERSRIKKRKRLLLLLISLLALSVSAVVILKILHII

SEQ ID NO: 19329 - protein, 132 aa, unidentified
  source 1..132: note = Clostridioides difficile
  REGION 1..132: note = tr|A0A449NLH8|A0A449NLH8_CLODI 6-carboxy-5,6,7,8-tetrahydropterin synthase; OS = Clostridioides difficile OX=1496 GN=queD PE=3 SV=1
MIKYATVICNFESGHFLAMGKKTREENSDIYGKCVNMHGHNYKLHVTVRGDISENGMIINFSKIKEIINKKIVQVFDHKVINDVINEIPTAENMCCIIWNILNKEFNLLGIVLSEIILFETDKSYVTFKEQI

SEQ ID NO: 19330 - protein, 130 aa, Clostridium aceticum
  REGION 1..130: note = tr|A0A0G3WDD3|A0A0G3WDD3_9CLOT 6-carboxy-5,6,7,8-tetrahydropterin synthase OS=Clostridium aceticum OX=84022 GN=queD PE=3 SV=1
MYNKLIDVTKTFTFDSAHHLENYDGDCKYLHGHTYKLEITVRGKTDDCGMVIDFSELKAIVKKEVIKPLDHRYLNEVLDFNPTCENMIVWIFNKLEGLLKKERYWLQKIVLWETPTSFATLEKEQYDVES

SEQ ID NO: 19331 - protein, 141 aa, Clostridium acetireducens
  REGION 1..141: note = tr|A0A1E8EYF7|A0A1E8EYF7_9CLOT 6-carboxy-5,6,7,8-tetrahydropterin synthase OS=Clostridium acetireducens DSM 10703 OX=1121290 GN=CLOACE_13880 PE=3; SV = 1
MYILKTEHSFDSAHFLAGYKGKCSNIHGHRWKVEVEIKSPTLVEGGQLDGMVIDFGDFKKDVKEMIDCYDHALIIQKDTMRNETLNYIKEDGFKVIEVDFRPTAENFAKFFFEIMKSKGYKVHRTTVFETPTNSAMYEEVI

SEQ ID NO: 19332 - protein, 118 aa, Clostridium acetobutylicum
  REGION 1..118: note = tr|Q97G44|Q97G44_CLOAB 6-pyruvoyl-tetrahydropterin synthase related protein OS=Clostridium acetobutylicum (strain ATCC 824 / DSM 792 / JCM 1419 / LMG 5710 / VKM B-17 87) OX=272562 GN=CA_C2526 PE=4 SV=1
MRTGYKFKFYLNARHVAIIDGRASNIHPHTWELLINVGAKEDYTISFGEVEKEVQAYLANYEGSFLNEKEEFKDINPTMESIGKVLIPYIKDIISKKEMKFISMEISENPTRTYVIEE

SEQ ID NO: 19333 - protein, 153 aa, Clostridium acetobutylicum
  REGION 1..153: note = tr|Q97FY9|Q97FY9_CLOAB 6-pyruvoyl-tetrahydropterin synthase related domain conserved membrane protein; OS = Clostridium acetobutylicum (strain ATCC 824 / DSM 792 / JCM1419 / LMG 5710 / VKM B-1787) OX=272562 GN=CA_C2
MKYNQYRFKFYLNAAHSIFLNGVLGDKHPHTWEITINTIKINDSFVIFNDVEKKIDKYLQGFQDIYLNDTEPFNKINPTLENICVYFKETLGKLLSKNGWVLLSIEISETPTRSYIIDVGDEVKYESAYEDNTSQMKYLKDAVKNKIERMKKI

SEQ ID NO: 19334 - protein, 143 aa, Clostridium acidisoli
  REGION 1..143: note = tr|A0A1W1XK78|A0A1W1XK78_9CLOT 6-carboxy-5,6,7,8-tetrahydropterin synthase OS=Clostridium acidisoli DSM 12555 OX=1121291 GN=SAMN02745134_02138 PE=3; SV = 1
MFILKSEIEFDSAHFLSGYEGKCANIHGHRYRLIVKIKGDKLKTSGNDRAMVEDFSFIKSTLKEIHDLFDHKIIIEDDEIGKDLINKLKTVPQEFKYELVQYRPTVEEMSRNIFFIIKGKGINIYEVELFETPTNSCIYREDD

SEQ ID NO: 19335 - protein, 187 aa, unidentified
  source 1..187: note = [Clostridium] aldenense
  REGION 1..187: note = tr|A0A3E2WPU7|A0A3E2WPU7_9FIRM Rubredoxin; OS = [Clostridium] aldenense OX=358742 GN=DWX59_07585 PE=4; SV = 1
MRSITTLDLQYAHRFFGFKGEAQYLHGHTGILTIEVEDSIEPGVNMVFPCNEIQKTAWEVLKNFDHALILREDDPLLPAILKVYEEQGIRDGALTNKMKGPAFKTELATAYPECRLVVTKETMTVEGMIKIVYDLLKDKLNIAKITFSSGVNAATQEYQPSRTIDRCPLCGIALNENGVCPKCGYKK

SEQ ID NO: 19336 - protein, 187 aa, unidentified
  source 1..187: note = [Clostridium] aldenense
  REGION 1..187: note = tr|A0A413W0L5|A0A413W0L5_9FIRM Rubredoxin; OS = [Clostridium] aldenense OX=358742 GN=DW886_24365 PE=4; SV = 1
MRSITTLDLQYAHRFFGFKGEAQYLHGHTGILTIEVEDSIEPGVNMVFPCNEIQKTAWEVLKNFDHALILREDDPLLPAILKVYEEQGIRDGAPTNKMKGPAFKTELATAYPECRLVVTKETMTVEGMIKIVYDLLKDKLNIAKITFSSGVNAATQEYQPSRTIDRCPLCGIALNENGVCPKCGYKK

SEQ ID NO: 19337 - protein, 139 aa, unidentified
  source 1..139: note = [Clostridium] algidixylanolyticum
  REGION 1..139: note = tr|A0A419T7J8|A0A419T7J8_9FIRM 6-carboxy-5,6,7,8-tetrahydropterin synthase; OS = [Clostridium] algidixylanolyticum OX=94868; GN = BET01_13400 PE=3 SV=1
MYSLRTEHSFDSAHFLAGYEGKCSNIHGHRWQVVIEVKSLTLQTNQQLNGMLVDFAQLKKDIKEEVDFLDHAFIIEKNTLKPKTVAALEEEGFQIIVLDFRPTAENMAKYFYDRMEHRGYQVKSATVYETPNNCASYEE

SEQ ID NO: 19338 - protein, 143 aa, Clostridium argentinense
  REGION 1..143: note = tr|A0A0C1QZA1|A0A0C1QZA1_9CLOT 6-carboxy-5,6,7,8-tetrahydropterin synthase OS=Clostridium argentinense CDC 2741 OX=1418104 GN=queD PE=3 SV=1
MYILKAEQSFDSAHFLAGYEGKCSNIHGHRWKVEIEIKSQSLIKDGQLDGMVIDFGDLKKAVKDMVDYYDHGLIIQKETMREETLNCLLLDGFKIIEVDFRPTAENFAAFFFKTMKAQGFNVLRATVFETPTNSATYEEREES

SEQ ID NO: 19339 - protein, 163 aa, unidentified
  source 1..163: note = Clostridium autoethanogenum
  REGION 1..163: note = tr|A0A3M0T2F0|A0A3M0T2F0_9CLOT 6-pyruvoyl tetrahydrobiopterin synthase OS=Clostridium autoethanogenum OX=84023 GN=D9O40_00170 PE=4 SV=1
MKYNQYRFKFYLNASHSIYLKGILGEEHPHTWEITLDTVKLEDNFIIFNDIEKNIEKYLQKFQDKYINNITPFNTLNPTLENICAYFKECFESLLMENKWLLLSIEISETPTRSYIIDVSDEINYNNISYIKGKEKYNSNNGISIVNQEIDRITKLVIDKNKS

SEQ ID NO: 19340 - protein, 163 aa, unidentified
  source 1..163: note = Clostridium autoethanogenum
  REGION 1..163: note = tr|U5RYN3|U5RYN3_9CLOT 6-pyruvoyl tetrahydropterin synthase-related domain protein OS=Clostridium autoethanogenum DSM 10061 OX=1341692 GN=CAETHG_2465 PE=4; SV = 1
MKYNQYRFKFYLNASHSIYLKGILGEEHPHTWEITLDTVKLEDNFIIFNDIEKNIEEYLQKFQDKYINNITPFNTLNPTLENICAYFKECFESLLMENKWLLLSIEISETPTRSYIIDVSDEINYNNISHIKDKEKYNWNKGISIVNQEIDRITKLVIDKNKS

SEQ ID NO: 19341 - protein, 142 aa, Clostridium bartlettii
  REGION 1..142: note = tr|R5X9L7|R5X9L7_9CLOT 6-carboxy-5,6,7,8-tetrahydropterin synthase OS=Clostridium bartlettii CAG:1329 OX=1263063 GN=BN488_00123 PE=3 SV=1
MFKVKSQIEFDMAHYLSGYNGKCSNIHGHRYKLIVSVKSETLHQEGQLRGMVDDFGNIKARLKEIEDLYDHKLVIEDNEDGRLVAQKLSELPNAFKVMLVPYRPTAEEMSRDIFYKLKDMGLNVSEVELFETPTNSCTYSED

SEQ ID NO: 19342 - protein, 142 aa, Clostridium beijerinckii
  REGION 1..142: note = tr|A0A0K2MDW4|A0A0K2MDW4_CLOBE 6-carboxy-5,6,7,8-tetrahydropterin synthase OS=Clostridium beijerinckii NRRL B-598 OX=1428454 GN=X276_13970 PE=3 SV=1
MFKIKSEVQFDMAHYLSGYEGKCSNIHGHRYKLIAKLKSEKLHQDGQLRGMVDDFGNFKNILKEIAETFDHKLIIENNEDGKALVKNLEELQNNFNIYLVDYRPTAEEMSRDIFNRLKAKGLSVCEVELFETPNNSCIYTED

SEQ ID NO: 19343 - protein, 142 aa, Clostridium beijerinckii; identical to SEQ ID NO: 19342
  REGION 1..142: note = tr|A0A1B9BKD4|A0A1B9BKD4_CLOBE 6-carboxy-5,6,7,8-tetrahydropterin synthase OS=Clostridium beijerinckii OX=1520 GN=BGS1_24285 PE=3 SV=1

SEQ ID NO: 19344 - protein, 187 aa, unidentified
  source 1..187: note = [Clostridium] bolteae
  REGION 1..187: note = tr|R0AG37|R0AG37_9FIRM Rubredoxin OS=[Clostridium] bolteae 90B8 OX=997897 GN=HMPREF1097_05523 PE=4 SV=1
MRSITTLDLQYAHRFYGFKGEAQYLHGHTGILTLEVEDTVNAGVNMVFPCNEIQKTAWEVLKNFDHATILREDDPLLPALLGVYEAQGIKDGAPNNIMKGPAFKTDLATAYPECRLVVTKETMTVEGMIKIVYDLLKDKLNIVKITFTSGVNAASEEFKPQRTMERCPLCGIALDENGVCPKCGYRK

SEQ ID NO: 19345 - protein, 187 aa, unidentified
  source 1..187: note = [Clostridium] bolteae
  REGION 1..187: note = tr|R0BS03|R0BS03_9FIRM Rubredoxin OS=[Clostridium] bolteae 90A9 OX=997894 GN=HMPREF1085_04204 PE=4 SV=1
MRSITTLDLQYAHRFYGFKGEAQYLHGHTGILTLEVEDTVNAGVNMVFPCNEIQKTAWEVLKNFDHATILREDDPLLPALLGVYEAQGIKDGAPNNTMKGPAFKTELATAYPECRLVVTKETMTVEGMIKIVYDLLKDKLNIVKITFTSGVNAASEEFKPQRTMERCPLCGIALDENGVCPKCGYRK

SEQ ID NO: 19346 - protein, 187 aa, Clostridium bolteae; identical to SEQ ID NO: 19344
  REGION 1..187: note = tr|A8RMA2|A8RMA2_CLOBW Uncharacterized protein; OS = Clostridium bolteae (strain ATCC BAA-613 / WAL 16351); OX = 411902 GN=CLOBOL_01855 PE=4 SV=1

SEQ ID NO: 19347 - protein, 187 aa, Clostridium bolteae
  REGION 1..187: note = tr|R5F896|R5F896_9CLOT Uncharacterized protein; OS = Clostridium bolteae CAG:59 OX=1263064 GN=BN723_01238; PE = 4 SV=1
MRSITTLDLQYAHRFYGFKGEAQYLHGHTGILTLEVEDTVNAGVNMVFPCNEIQKTAWEVLKNFDHATILREDDPLLPALLGVYEAQGIKDGAPNNTMKGPAFKTELATAYPECRLVVTKETMTVEGMIKIVYDLLKDKLNIVKITFTSGINAASEEFKPQRTMERCPLCGIALDENGVCPKCGYRK

SEQ ID NO: 19348 - protein, 142 aa, unidentified
  source 1..142: note = Clostridium bornimense
  REGION 1..142: note = tr|W6RZH4|W6RZH4_9CLOT 6-pyruvoyl tetrahydrobiopterin synthase OS=Clostridium bornimense; OX = 1216932 GN=CM240_0232 PE=4 SV=1
MFKLRSEAQFDMAHYLSGYKGKCANIHGHRYRLIATLKAEELQKEGQCRGMVDDFTNFKNALRDIAESFDHKLIIEDNEDGRALAKQLEVLPNNFNIVFVPYRSTAEEMSRDIFNKLKAQGFPIYEVELFETPTNSCIYSEE

SEQ ID NO: 19349 - protein, 143 aa, Clostridium botulinum
  REGION 1..143: note = tr|C1FN24|C1FN24_CLOBJ 6-carboxy-5,6,7,8-tetrahydropterin synthase OS=Clostridium botulinum (strain Kyoto / Type A2) OX=536232 GN=queD PE=3; SV = 1
MYTLKVEHNFDSAHFLAGYEGKCGNIHGHRWKVEIQVQAESLVQGGQLDGMIIDFGDLKKDVKSMVDYYDHALIIEKGTMRGQSLSSLKEDGFRIIEVNFRPTAENFAAFFYKIMKDRGYNVKSTTVYETPNNSATYEESGVI

SEQ ID NO: 19350 - protein, 117 aa, Clostridium botulinum
  REGION 1..117: note = tr|A0A1J1CXW1|A0A1J1CXW1_CLOBO 6-carboxy-5,6,7,8-tetrahydropterin synthase OS=Clostridium botulinum OX=1491 GN=queD PE=3 SV=1
MILIKKFKFDAAHNLIHYHGKCERLHGHTYGLVIKISGEPDKEDMVIDFTELKAIVKENVLDILDHAYINEIIKQPTAENIAVWIWDKLYTKLKRDNCSLYEIEVWETETSGVVYSG

SEQ ID NO: 19351 - protein, 141 aa, Clostridium butyricum
  REGION 1..141: note = tr|A0A2S7F9M6|A0A2S7F9M6_CLOBU 6-carboxy-5,6,7,8-tetrahydropterin synthase OS=Clostridium butyricum OX=1492 GN=AWN73_14270 PE=3 SV=1
MFKLKSEVQFDMAHYLSGYNGKCSNIHGHRYRLIAKIGSETLHECGQCRGMVDDFSNFKNALKNIEETFDHKLVIEDNDEGRALSEKLKELPNNFDIYFVNYRPTAEEMSRDIFNRLKDMGLSVCEVELFETPNNSCIYSE

SEQ ID NO: 19352 - protein, 141 aa, Clostridium butyricum
  REGION 1..141: note = tr|A0A0Q0YQF4|A0A0Q0YQF4_CLOBU 6-carboxy-5,6,7,8-tetrahydropterin synthase OS=Clostridium butyricum OX=1492 GN=AK964_07255 PE=3 SV=1
MFKLKSEVQFDMAHYLSGYNGKCSNIHGHRYRLIAKIGSETLHEYGQCRGMVDDFSNFKNALKNIEETFDHKLVIENNDEGRLLSEKLKELPNNFDIYFVNYRPTAEEMSRDIFNRLKDMGLSVCEVELFETPNNSCIYSE

SEQ ID NO: 19353 - protein, 138 aa, Clostridium carboxidivorans
  REGION 1..138: note = tr|C6PUT4|C6PUT4_9CLOT 6-carboxy-5,6,7,8-tetrahydropterin synthase OS=Clostridium carboxidivorans P7 OX=536227 GN=CcarbDRAFT_2551 PE=3 SV=1
MYSLKVELSFDSAHFLAGYKGKCSNIHGHRWRVEIEVQSENLIDSGQMDGMVVDFGDLKSDLKEMVDFYDHALIIQKGTMREETLKCLIQDEFKIIELEFRPTAENLAKFFFDTMKEKGYNMKRAVVYETPSNCAVYE

SEQ ID NO: 19354 - protein, 119 aa, Clostridium cavendishii
  REGION 1..119: note = tr|A0A1M6JAT6|A0A1M6JAT6_9CLOT 6-pyruvoyltetrahydropterin/6-carboxytetrahydropterin synthase OS=Clostridium cavendishii DSM 21758 OX=1121302; GN = SAMN02745163_01968 PE =4 SV=1
MNTYYKFKFYINGRHSVTFGTNKSNIHPHTWEVVLIMKTKLDEEVNFTIFEKKLEEYFSNYEGKYLNELDEFIDINPTMENMGKILCEDIKALVDDEVLILKKIEISENPMRTYIIETI

SEQ ID NO: 19355 - protein, 187 aa, unidentified
  source 1..187: note = [Clostridium] celerecrescens
  REGION 1..187: note = tr|A0A084JPE4|A0A084JPE4_9FIRM Rubredoxin; OS = [Clostridium] celerecrescens OX=29354 GN=IO98_05395; PE = 4 SV=1
MRSITTLDLQYAHRFFGFKGEAQYLHGHTGVLTIEVEDSVNSGVNMVFPCNEIQKTAWEVLKNFDHALILREDDPLLPAILDVYEKQGIKDGAPTNQMKGPAFKTELATAYPECRLVVTKETMTVEGMIKIVYDLLKDKLNIAKITFTSGVNAASEEFETKNNIDRCPLCGIALNENGVCPKCGYKK

SEQ ID NO: 19356 - protein, 145 aa, Clostridium cellulovorans
  REGION 1..145: note = tr|D9SMJ5|D9SMJ5_CLOC7 6-carboxy-5,6,7,8-tetrahydropterin synthase OS=Clostridium cellulovorans (strain ATCC 35296 / DSM 3052 / OCM 3 / 743B) OX=573061 GN=Clocel_419 0 PE=3 SV=1
MKEVYKLVSEHSMDSAHFLKDYDGKCSNIHGHRWRVVAEIFSDQLINEGAEKGMIVDFGIFKNDIRELVDFYDHCLIVEKGSLKTELFQMLTTEGFRVEEVSFRPTAENLAKFFFEQLKKKGHNMKSVVVYETPNNAATYEVTYV

SEQ ID NO: 19357 - protein, 142 aa, Clostridium chromiireducens
  REGION 1..142: note = tr|A0A1V4IC92|A0A1V4IC92_9CLOT 6-carboxy-5,6,7,8-tetrahydropterin synthase OS=Clostridium chromiireducens OX=225345 GN=CLCHR_44110 PE=3 SV=1
MFKIKSEAQFDMAHYLSGYKGKCSNIHGHRYRLIVKLKSETLHADGQLRGMVDDFSNFKNSLKEIEEIFDHKLILEDNEEGKALAKKLADLPNDFDIYFVNYRPTAEEMSRDIFNRLKEKGLSVCEVELFETPNNSCIYTED

SEQ ID NO: 19358 - protein, 188 aa, unidentified
  source 1..188: note = [Clostridium] citroniae
  REGION 1..188: note = tr|A0A3E2V1P1|A0A3E2V1P1_9FIRM Rubredoxin; OS = [Clostridium] citroniae OX=358743 GN=DWZ14_28835 PE=4; SV = 1
MRSITTLDLQYAHRFYGFKGEAQYLHGHTGILTIEVEDSVEPGVNMVFPCNEIQKTAWALLKNFDHALILREDDPLLPAILGVYEAQGIRDGAPNNQMKGPAFKTELATAYPECRLVVTKETMTVEGMIKIVYDLLKDKLNIAKITFSSGVNAASEEFKPTLKVDRCPLCGIALNENGVCPKCGYKKS

SEQ ID NO: 19359 - protein, 188 aa, unidentified
  source 1..188: note = [Clostridium] citroniae
  REGION 1..188: note = tr|A0A0J9C174|A0A0J9C174_9FIRM Uncharacterized protein OS=[Clostridium] citroniae WAL-19142 OX=742734; GN = HMPREF9470_03056 PE=4 SV=1
MRSITTLDLQYAHRFYGFKGEAQYLHGHTGILTIEVEDSVEPGVNMVFPCNEIQKTAWALLKNFDHALILREDDPLLPAILGVYEAQGIRDGAPNNQMKGPAFKTELATAYPECRLVVTKETMTVEGMIKIIYDLLKDKLNIAKITFSSGVNAASEEFKPTLKVDRCPLCGIALNENGVCPKCGYKKS

SEQ ID NO: 19360 - protein, 187 aa, unidentified; identical to SEQ ID NO: 19345
  source 1..187: note = [Clostridium] clostridioforme
  REGION 1..187: note = tr|N9YLH8|N9YLH8_9FIRM Rubredoxin OS=[Clostridium] clostridioforme 90A7 OX=999407 GN=HMPREF1082_05629 PE=4; SV = 1

SEQ ID NO: 19361 - protein, 175 aa, unidentified
  source 1..175: note = [Clostridium] clostridioforme
  REGION 1..175: note = tr|R0CSR8|R0CSR8_9FIRM Rubredoxin OS=[Clostridium] clostridioforme 90A6 OX=999406 GN=HMPREF1083_04000 PE=4; SV = 1
MRSITQLDLQYAHRFYGFKGEAQYLHGHTGVLTIEVEGSVNAGVNMVFPCNEIQKTAWEVLKNFDHALVLREDDPLLPAILDVYEKQGIKDGSPNNTMKGPAFQTELATAYPDCRLVVTKETMTVEGMIKIVYDLLKDKLNIVKLTFTSGVNQASEEYTPHLEVERCPLCGIATE

SEQ ID NO: 19362 - protein, 187 aa, Clostridium clostridioforme
  REGION 1..187: note = tr|R7PJV4|R7PJV4_9CLOT Uncharacterized protein; OS = Clostridium clostridioforme CAG:511 OX=1263066; GN = BN688_03036 PE=4 SV=1
MRSITQLDLQYAHRFYGFKGEAQYLHGHTGVLTIEVEGSVNAGVNMVFPCNEIQKTAWEILKNFDHALVLREDDPLLPAILDVYEKQGIKDGSPNNTMKGPAFKTELATAYPDCRLVVTKETMTVEGMIKIVYDLLKDKLNIVKLTFTSGVNQASEEYTPHLEVERCPLCGIALNENGVCPKCGYKK

SEQ ID NO: 19363 - protein, 138 aa, unidentified
  source 1..138: note = [Clostridium] cocleatum
  REGION 1..138: note = tr|A0A1I0EWL9|A0A1I0EWL9_9FIRM 6-carboxy-5,6,7,8-tetrahydropterin synthase; OS = [Clostridium] cocleatum OX=69824 GN=SAMN04489758_11511; PE = 3 SV=1
MYYLKTEQSFDSAHFLHGYHGKCANIHGHRWKIVATIKNEKLLDDPQNKSMVIDFGDLKADLKVITDNFDHALIIEDGSLSKRLYQALIDENFKIINLPFRPTAENLAKYIYDRLAKKYNVDYIEVYETPNNCASYRG

SEQ ID NO: 19364 - protein, 139 aa, Clostridium colicanis
  REGION 1..139: note = tr|A0A151AQW0|A0A151AQW0_9CLOT 6-carboxy-5,6,7,8-tetrahydropterin synthase OS=Clostridium colicanis DSM 13634 OX=1121305 GN=CLCOL_06690 PE=3 SV=1
MYILKTEQSFDAAHFLAGYEGKCSNIHGHRWRVVIEVKSLTLQDSKQLNGMVVDFNQLKKDLKEEVDYFEHMLIIEKNTLKTETVKALKGEGFKIVVLDFRPTAENLAKYFFNRMKIKGYKVKSAVVYETPNNCAAYEE

SEQ ID NO: 19365 - protein, 117 aa, unidentified
  source 1..117: note = Clostridium combesii
  REGION 1..117: note = tr|A0A2G7HDE3|A0A2G7HDE3_9CLOT 6-carboxy-5,6,7,8-tetrahydropterin synthase OS=Clostridium combesii OX=39481 GN=queD PE=3 SV=1
MILIKKFKFDAAHNLIHYHGKCERLHGHTYGLVIKISGERDKEDMVIDFTELKAIVKENVLDILDHAYINDIIEQPTAENIAVWIWNKLYTKLERDNCSLYEIEVWETETSGVVYNG

SEQ ID NO: 19366 - protein, 143 aa, unidentified
  source 1..143: note = Clostridium combesii
  REGION 1..143: note = tr|A0A2G7HEJ0|A0A2G7HEJ0_9CLOT 6-carboxy-5,6,7,8-tetrahydropterin synthase OS=Clostridium combesii OX=39481 GN=queD PE=3 SV=1
MYTLKVEHNFDSAHFLAGYEGKCGNIHGHRWKVEIQVQAESLVQGGQLDGMIIDFGDLKKDVKSMVDYYDHALIIEKGTMRGQSLSSLKEDGFRIIEVNFRPTAENFAAFFYKIMKDRGYNVKSTTVHETPNNSATYEESGVI

SEQ ID NO: 19367 - protein, 163 aa, unidentified; identical to SEQ ID NO: 19339
  source 1..163: note = Clostridium coskatii
  REGION 1..163: note = tr|A0A170NPN8|A0A170NPN8_9CLOT 6-pyruvoyl tetrahydropterin synthase OS=Clostridium coskatii; OX = 1705578 GN=WX73_03383 PE=4 SV=1

SEQ ID NO: 19368 - protein, 1018 aa, unidentified
  source 1..1018: note = Clostridium coskatii
  REGION 1..1018: note = tr|A0A170NPM5|A0A170NPM5_9CLOT 6-pyruvoyl-tetrahydropterin synthase related domain membrane protein OS=Clostridium coskatii OX=1705578; GN = WX73_03378 PE=4 SV=1
MKFQGYKYKFKINISHSVLINNRRGNLHSHTFEISLFIKIINDDFALYDDVEKIVQEFLNIYDEKELNLIEPFDKIEPTIENVGDFLYVRLKEILKNNNMILVRLEISETPARVYVVNYDENDIKEPGYEEEFKNYKKRMTRIIINNILNTTAKQLTDDLKNSSNTIVEGTWIQEDDKKEKVIEKKNTIKIEESKKTPNAIRHNDKMRKSNHVFLETAGAISVLLIGTIVLLLCIAKTGGYPWGADTYGHIFKGDLLYKSIKEGNIYPLFTQFWYNGVQPFRYWGPLSYYVLAACEFISGGNPINGYVIFIGYSFFIGGLGWLLWGIHQRRILLSLVFGILWFFLPENIRVLFVAGNIPRVIIAALIPYLFYFVWKFVKDDDRSSIIPIALFMCAIIMCHLMIGAMIGIASFIFLSLYSIMNKKIERSFHVILTMLLSFAICGIWIYPALKGGLVSMDSGATSSQMMELLATPFTISLNPFLRLFGIVDREYFYYGLSILIISILGIFVSNKKSVPGFITSIVIFLGTTTAFVPMLEKMPFSQLLWMVRFTPIAYALFIISLLNWTKCKKYFMIIMVVLIAADSSLSFNLSLYPQIKSAEVDNILSSAKNITKQRIALLDNSTFGAYPSFYICSEDKKTSYSYGWAWQGAATAQNIVLLNTALEKGYYNYMFDRSLEMGCDTAVVAKAPMKKNKRDFSIINSAAKLSQYTLYKETSEGYVFHRKTSENFGVVTKYSGLCIGRSASDIPLQYPSFEIGSSWNIEDYTLDELSKYKVIYLSDFRYNSRSKAENMVSKLSSMGIKVIIDMNRIPSDTITNRMVFLGVTAQPITFSTKIPDMFFNNKKYESVNFKDEYKIWNTVYLDNVPQVTGFSWVNGKKVPFLGSGKGKNKNITFLGFNLMFHGMENDDSKVLTIMDTIMRTKSSILPKRILIPIDLKYGQNSITINSPKNNVNTTVAFLDAYKSNSGEIYSKQNLLNVNKGETKIRVTYPYLFQGIAVSVIGLMGFAFFIIYIYKRVV

SEQ ID NO: 19369 - protein, 117 aa, Clostridium cylindrosporum
  REGION 1..117: note = tr|A0A0J8D3Z1|A0A0J8D3Z1_CLOCY 6-carboxy-5,6,7,8-tetrahydropterin synthase OS=Clostridium cylindrosporum DSM 605 OX=1121307 GN=queD PE=3 SV=1
MILIKEFEFDAAHNLVKYHGKCERLHGHTYKLIVKIEGEPGEEDMVFDFVELKRIVKAKVIDKLDHYYLNDIIEQPTAENIAKYVWNELVDEIKRDNCKLFEIEIWETKTSGLIYRG

SEQ ID NO: 19370 - protein, 142 aa, Clostridium cylindrosporum
  REGION 1..142: note = tr|A0A0J8G2V1|A0A0J8G2V1_CLOCY 6-carboxy-5,6,7,8-tetrahydropterin synthase OS=Clostridium cylindrosporum DSM 605 OX=1121307 GN=queD PE=3 SV=1
MFKIKSEVGFDMAHYLCGYEGKCANIHGHRYRLVATLKSETLQESGQCRGMVDDFTNFKKALKEIAEDFDHKLLIEDNEEGRELAAKLEVLPNNFDIVFVPYRTTAEEMSRDVFNRLKSKGFKIYEVELFETPTNSCIYTEE

SEQ ID NO: 19371 - protein, 142 aa, Clostridium diolis
  REGION 1..142: note = tr|A0A2P8RLZ8|A0A2P8RLZ8_9CLOT 6-carboxy-5,6,7,8-tetrahydropterin synthase OS=Clostridium diolis OX=223919 GN=C4L39_01905 PE=3 SV=1
MFKIKSEVQFDMAHYLSGYEGKCSNIHGHRYKLIAKLKSEKLHQDGQLRGMVDDFGNFKNILKEIAETFDHKLIIENNEDGKALVKKLEELQNNFNIYLVDYRPTAEEMSRDIFNRLKAKGLSVCEVELFETPNNSCIYTED

SEQ ID NO: 19372 - protein, 142 aa, Clostridium diolis; identical to SEQ ID NO: 19342
  REGION 1..142: note = tr|A0A5A5UM36|A0A5A5UM36_9CLOT 6-carboxy-5,6,7,8-tetrahydropterin synthase OS=Clostridium diolis OX=223919 GN=CDIOL_42950 PE=3 SV=1

SEQ ID NO: 19373 - protein, 139 aa, Clostridium disporicum
  REGION 1..139: note = tr|A0A174EMT9|A0A174EMT9_9CLOT 6-carboxy-5,6,7,8-tetrahydropterin synthase OS=Clostridium disporicum OX=84024 GN=queD PE=3 SV=1
MYYITTEASFDSAHFLYGYEGKCRNIHGHRWRVIITLKSEELIEDGEYKGMLIEFGDVKEKLKKETEKLDHSLIIEENSLSERTLNALKEENFNIITVNFRPTAENFAKYFYKKMKKYNYTIATAEVYETPNNKAIYGE

SEQ ID NO: 19374 - protein, 143 aa, Clostridium estertheticum
  REGION 1..143: note = tr|A0A1J0GDZ2|A0A1J0GDZ2_9CLOT 6-carboxy-5,6,7,8-tetrahydropterin synthase OS=Clostridium estertheticum subsp. estertheticum OX=1552 GN=A7L45_05565; PE = 3 SV=1
MYILKSEHSFDSAHFLSGYEGKCANIHGHRWKVEVEVQSETLTKGGQLEGMVIDFGDLKRDVKSMADSYDHALIVQIGSMRDETLNCINQDGFKVILVDFRTTAENFAKFFFKKMKDKGYNVKRTTVYETPNNSASYEESEAH

SEQ ID NO: 19375 - protein, 136 aa, Clostridium felsineum
  REGION 1..136: note = tr|A0A1S8L4G2|A0A1S8L4G2_9CLOT 6-carboxy-5,6,7,8-tetrahydropterin synthase OS=Clostridium felsineum DSM 794 OX=1121310 GN=CLFE_43850 PE=3 SV=1
MYIVKIENSFDSAHFLSNYDGKCANIHGHRWKIEVEIQAKTLINDMVEDFTILKKKIKEVIDFYDHALIIEKNTLRELTYNCLIEDGFRIIELPFRPTAENFSKFFFDEIERLNYDVRKITVYETPNNSASYVKEV

SEQ ID NO: 19376 - protein, 156 aa, Clostridium felsineum
  REGION 1..156: note = tr|A0A1S8LBU2|A0A1S8LBU2_9CLOT 6-pyruvoyl tetrahydropterin synthase OS=Clostridium felsineum DSM 794; OX = 1121310 GN=CLFE_32110 PE=4 SV=1
MHYDEYKFKFYLNASHSIYINGVLGEEHPHTWEIIIYTIKLEEDFIIFNDVEKYVEDYIKKYQDLYINEVEPFTTLNPTLENICKFFKEKLRVLLLDAGWILLSIEISETPTRSYIIDLSREFENNYEISINKSKIMENSLIQKLDKLKKYGIKSE

SEQ ID NO: 19377 - protein, 486 aa, unidentified
  source 1..486: note = [Clostridium] fimetarium
  REGION 1..486: note = tr|A0A1I0R6P2|A0A1I0R6P2_9FIRM 6-pyruvoyl tetrahydropterin synthase-related domain-containing protein OS=[Clostridium] fimetarium OX=99656; GN = SAMN05421659_11273 PE=4SV=1
MGRNKDKKNRFIIVASVIVLGVILLVLLILDINNTVNKTLSAYNDNQNLLANTLLKTAVVQAENDSSELKDIIQFNVDENFPTSSSSYCIFAKNDNIIFLKDENTSSTLIDERISNYFDGNNVSSKDNQKYIISTAQTQNDGDNYTFVICTRQNYLLKQVKFNELRLHALGYFIIYGVILLMIIIYLLYKSRADEKRNRTLGEAAKNNRMIIEKLGNDKTKNYVNLDRDEVDSFYSRTIVDEVIACMSEEEKKKCIEIDILVQNLKIEHFILITIILGRIKAGGSLACYWEENQFKVLLFNSNKEEVEEFIDRFMNKYRTDSEEKVEELKIIATRFGRKIMEYSQYKYNFYLNASHSIYINGNKGERHPHTWQISLYVVNSKDTFIMFNEVEKLIEDYLGQYQEKYMNECPPFDTMNPTLENIAHYFMEELQKNLNPLNWVIFTMEISETPSRSYIISNVENNIISDVEKKNIAEKILEKNRIKNQ

SEQ ID NO: 19378 - protein, 145 aa, unidentified
  source 1..145: note = [Clostridium] fimetarium
  REGION 1..145: note = tr|A0A1I0RJ99|A0A1I0RJ99_9FIRM 6-carboxy-5,6,7,8-tetrahydropterin synthase; OS = [Clostridium] fimetarium OX=99656 GN=SAMN05421659_11680; PE = 3 SV=1
MYSLKTEDSFDSAHFLSGYEGKCSNIHGHRWRVIIEVKSNTLQTDQQSNGMLVDFGDLKKDIKEEVDFMDHAFIIEKNTLKPGTVAALEEEGFRIIMMEFRPTAENLAKYFYDQMVQKGYQVKSATVYETPNNCASYEEDFNVTI

SEQ ID NO: 19379 - protein, 125 aa, Clostridium formicaceticum
  REGION 1..125: note = tr|A0A1D9FS44|A0A1D9FS44_9CLOT 6-carboxy-5,6,7,8-tetrahydropterin synthase OS=Clostridium formicaceticum OX=1497 GN=BJL90_00165 PE=3 SV=1
MDVTKIFTFDSAHHLENYDGDCKYLHGHTYKLEITVRGKTDACGMVIDFSELKTIVKKEIIKPLDHRYLNEVLDFNPTCENMLVWIFNKLEDLLKKERYWLQKVVLWETPTSFATLEKEQYDVEG

SEQ ID NO: 19380 - protein, 143 aa, Clostridium gasigenes
  REGION 1..143: note = tr|A0A1H0NUJ4|A0A1H0NUJ4_9CLOT 6-carboxy-5,6,7,8-tetrahydropterin synthase OS=Clostridium gasigenes OX=94869 GN=SAMN04488529_101965 PE=3 SV=1
MYILKAEHSFDSAHFLSNYEGKCGNIHGHRWKVEIEVQSETLVKGGQLDGMVIDFGDLKKDVKSMADYYDHALIIEKDTMREETLSCITKDGFKTIKVNFRPTAENFAAFFFNTMKDKGYNIKRATVYETPTNSAVYEESEAN

SEQ ID NO: 19381 - protein, 143 aa, Clostridium homopropionicum
  REGION 1..143: note = tr|A0A0L6Z770|A0A0L6Z770_9CLOT 6-carboxy-5,6,7,8-tetrahydropterin synthase OS=Clostridium homopropionicum DSM 5847 OX=1121318 GN=CLHOM_29520 PE=3; SV = 1
MYILKTEHYFDSAHFLADYEGKCSNIHGHRWKVEIEIQSETLEKGGQLDGMIVDFGDFKEDVKAMVDYYDHVLIIQNGTLRKETLNCLMEDGFNLISVDFRPTAENFAAFFFNTMKNKGYNVKRATVFETPANSAVYEESEAN

SEQ ID NO: 19382 - protein, 141 aa, unidentified
  source 1..141: note = [Clostridium] indolis
  REGION 1..141: note = tr|A0A3P6J9S3|A0A3P6J9S3_9FIRM 6-carboxy-5,6,7,8-tetrahydropterin synthase; OS = [Clostridium] indolis OX=69825 GN=queD_2 PE=3 SV=1
MFQQHYPSINHNYQFELNKDFNFSAAHYIPSDDAGKCMRTHGHTYFVNLTIGGDVLDHNGFLVNFSELKKLVHDQFDHHLLNELPQFKDKSPSTEIVAQTIYEMVQTSLNERANQPQCLQVYVRETPTSYVIFRPKELNHE

SEQ ID NO: 19383 - protein, 143 aa, unidentified
  source 1..143: note = [Clostridium] indolis
  REGION 1..143: note = tr|A0A3P6J8R4|A0A3P6J8R4_9FIRM Queuosine biosynthesis protein QueD OS=[Clostridium] indolis; OX = 69825 GN=queD_1 PE=4 SV=1
MTNFENVQPPKQFKYRSNAVLIKNYYEFTCDNRIYFTQTVHKDLANQRYQFNIEILSQIDDYGLALDFNEVDKIYKSKIATYLDGQLINEALPPMNTTAENIAFWIWEQFEQFLPENNTLQKLEFFENETQGLVLTRERMEAN

SEQ ID NO: 19384 - protein, 160 aa, unidentified
  source 1..160: note = [Clostridium] lavalense
  REGION 1..160: note = tr|A0A1I0KDK6|A0A1I0KDK6_9FIRM 6-pyruvoyltetrahydropterin/6-carboxytetrahydropterin synthase OS=[Clostridium] lavalense OX=460384; GN = SAMN05216313_1702 PE=4 SV=1
MRSITQLDLQYAHRFYGFKGEAQYLHGHTGVLTIEVEGSVNAGVNMVFPCNEIQKTAWEILKNFDHALVLREDDPLLPAILDVYEKQGIKDGSPNNTMKGPAFKTELATAYPDCRLVVTKETMTVEGMIKIVYDLLKYSLQGTTQGRYLTGGVPPVRFSM

SEQ ID NO: 19385 - protein, 1018 aa, Clostridium ljungdahlii
  REGION 1..1018: note = tr|A0A162LAG3|A0A162LAG3_9CLOT 6-pyruvoyl-tetrahydropterin synthase related domain membrane protein OS=Clostridium ljungdahlii OX=1538; GN = WY13_02202 PE=4 SV=1
MKFQGYKYKFKINISHSVLINNRRGNLHSHTFEISLFIKIINDDFALYDDVEKIVQEFLNIYDEKELNLIKPFDKIEPTIENVGDLLYVRLKGILKNNNMILIRLEISETPARIYVVNYDENHIKEPGYEKEFKSYKKRMTRIIINNILNTTAKQLTDDLKNSSNTIVEGTWIQEDDKKEKVIEKKNTIKIKESKKAPDDIRHSGKVRKNNYVFLEILGPISVLLIGTIVLLLCIIKTGGYPWGADTYGHIFKGDLLYKSIKEGNIYPLFTQFWYNGVQPFRYWGPLSYYVLAGCEFISGGNPINGYVIFIGYSFFIGGLGWLLWGIHQRRILLSLVFGILWFFLPENIRVLFVAGNIPRVIIAALIPYLFYFVWKFVKDDDRSSIIPIALFMCAIIMCHLMIGAMVGIASFIFLSLYSIMNKKIEKSVHVILTMLLSFAICGIWIYPALKGGLVSMDSGATSSQMMELLATPFTISLNPFLRLFGIVDREYFYYGLSILIISILGIFVSNKKSAPGFVTSIVIFLGTTTAFVPMLEKMPFSQLLWMVRFTPIAYALFIISLLNWTKCKKYFMIIMVVLIAADSSLSFNLSLYPQIKSAEVDNILSSAKNITKQRIALLDDSTFGAYPSFYICSEDKKISYSYGWAWQGAATAQNIVLLNTALEKGYYNYMFDRSLEMGCDTVVVAKAPMKKDKRDFNIINNAAKFSQYTLYKETSEGYVFHRKASENFGVVTKYSGLCIGRSASDIPLEYPSFEIGSSWNIEDYTLDELSKYKVIYLSDFRYNSRSKAENMVSKLSSMGIKIIIDMNRIPADTITNRMVFLGVTAQPITFNTKMPDMFFNDKKYESVNFKDEYKIWNTVYLDNVPQVTGFSWVNGKKVPFLGSGKGKNKNITFLGFNLMFHGMENDDSRVLAIMNTVMGTKSSILPERTLVPINLKYGQNSITIDSPKNNVNTTVAFLDAYKSNSGQIYAKQNLLNVNKGETKIRVTYPYLFQGIAVSVIGLLGFAFFIIYIYKRVV

SEQ ID NO: 19386 - protein, 163 aa, Clostridium ljungdahlii; identical to SEQ ID NO: 19339
  REGION 1..163: note = tr|D8GLT8|D8GLT8_CLOLD 6-pyruvoyl-tetrahydropterin synthase related protein OS=Clostridium ljungdahlii (strain ATCC 55383 / DSM 13528 / PETC) OX=748727; GN = CLJU_c0402 0 PE=4 SV=1

SEQ ID NO: 19387 - protein, 143 aa, Clostridium magnum
  REGION 1..143: note = tr|A0A162T3F9|A0A162T3F9_9CLOT 6-carboxy-5,6,7,8-tetrahydropterin synthase OS=Clostridium magnum DSM 2767 OX=1121326 GN=queD PE=3 SV=1
MYILKTEHNFDSAHFLAGYEGKCGNIHGHRWKVEIEVQSETLVEEGQLEGMVVDFGDLKKDLKEVVDSYDHALIVQEKTMREETLNCLMQDGFKIIQVNFRPTAEQFSAFFFKEMKNRGYKVRRASVYETPTNCAVYEESEVN

SEQ ID NO: 19388 - protein, 139 aa, Clostridium novyi
  REGION 1..139: note = tr|A0A0A0IJW3|A0A0A0IJW3_CLONO 6-carboxy-5,6,7,8-tetrahydropterin synthase OS=Clostridium novyi A str. 4570 OX=1444290 GN=Z969_07830 PE=3 SV=1
MYILKTEQSFDSAHFLSGYDGKCSNIHGHRWTVEIEIQSETLNSTGKLRGMIVDFGDLKKDLKSIVDFYDHSLIIEQNSMKLETLNNLKNDGFRIIEVEFRPTAENLAYHFFNLMEQKGYDVRKSTVYETPNNCATFQK

SEQ ID NO: 19389 - protein, 139 aa, Clostridium novyi
  REGION 1..139: note = tr|A0A0A0IDZ4|A0A0A0IDZ4_CLONO 6-carboxy-5,6,7,8-tetrahydropterin synthase OS=Clostridium novyi A str. 4552 OX=1444289 GN=Z968_02185 PE=3 SV=1
MYILKTVESFDSAHFLAGYDGKCSNIHGHRWKVEIEIQSETLKSNGALKGMIVDFGDLKKDLKSIVDFYDHCLIIENNSMRLGTLNTLKNDGFKIIEVNFRPTAENLAYHFFNLMEQKGYDVRKSTVYETPNNCATFEK

SEQ ID NO: 19390 - protein, 118 aa, Clostridium paraputrificum
  REGION 1..118: note = tr|A0A174W4K3|A0A174W4K3_9CLOT Uncharacterized protein OS=Clostridium paraputrificum OX=29363; GN = CP373A1_00580 PE=4 SV=1
MECSYKFKFYINARHSVNLGGNQSDIHPHTWETVIYIAVKSQNYINFTKMEKMLEAYFHQYEGKYLNDLKCFKESIPTMENIGRKIFVDISNVLESNNLILNSIEISENPTRTYIIKK

SEQ ID NO: 19391 - protein, 123 aa, Clostridium pasteurianum
  REGION 1..123: note = tr|A0A0H3J005|A0A0H3J005_CLOPA 6-carboxy-5,6,7,8-tetrahydropterin synthase OS=Clostridium pasteurianum DSM 525 = ATCC 6013 OX=1262449 GN=queD PE=3; SV = 1
MFTYEVIKKVKFDAAHFIPEYKGKCRNIHGHTWFVEAGVKGNKLENGMLFDFTILKKELKSICDEFDHKFLNELEEFKELAPTAENIGRVIYEKIEDKLDKGLELSFIKVFENPDSWVTVTKD

SEQ ID NO: 19392 - protein, 123 aa, Clostridium pasteurianum; identical to SEQ ID NO: 19391
  REGION 1..123: note = tr|A0A1D9N087|A0A1D9N087_CLOPA 6-carboxy-5,6,7,8-tetrahydropterin synthase OS=Clostridium pasteurianum OX=1501 GN=AQ984_02580 PE=3 SV=1

SEQ ID NO: 19393 - protein, 140 aa, unidentified
  source 1..140: note = [Clostridium] polysaccharolyticum
  REGION 1..140: note = tr|A0A1I0BGB3|A0A1I0BGB3_9FIRM 6-carboxy-5,6,7,8-tetrahydropterin synthase; OS = [Clostridium] polysaccharolyticum OX=29364; GN = SAMN04487772_107107 PE=3 SV=1
MYRLQTEDSFDAAHFLAGYDGKCHNIHGHRWRVIVEIQTAALQESGQMRGMCVDFKMLKRDLKKITDKLDHALIIEKGSLKQKTLEALQAEEFTIIELPFRPTAEHLAQYFYENMNSLGYDISLVTIYETPANCASYSAD

SEQ ID NO: 19394 - protein, 147 aa, unidentified
  source 1..147: note = [Clostridium] populeti
  REGION 1..147: note = tr|A0A1I6I684|A0A1I6I684_9FIRM 6-carboxy-5,6,7,8-tetrahydropterin synthase; OS = [Clostridium] populeti OX=37658 GN=SAMN05661086_00455; PE = 3 SV=1
MNDINIPKPKKLKYHEKRVAVTKEFDFSAAHFLYEYQGKCKNLHGHTYIVVLTVSGYTDEQGFLIDFNKLKSIYIESIHNKLDHSYLNSILTNMNSTVENMIVWIWEQLEETFSLVQYKKQDIRIEEIKLYETPTSYATLKWEWMHG

SEQ ID NO: 19395 - protein, 142 aa, Clostridium puniceum
  REGION 1..142: note = tr|A0A1S8TIG0|A0A1S8TIG0_9CLOT 6-carboxy-5,6,7,8-tetrahydropterin synthase OS=Clostridium puniceum OX=29367 GN=CLPUN_22880 PE=3 SV=1
MFTIKSEIQFDMAHYLSGYNGKCSNIHGHRYKLIAKLKAETLHLEGQLRGMVDDFSNFKDALKEIGDIFDHKLIIEDNSEGKALAKKIEELPNNFDIYFVNYRPTAEEMSRDIFNRLKVQGLAVCEVELFETPKNSCIYTED

SEQ ID NO: 19396 - protein, 1004 aa, Clostridium roseum
  REGION 1..1004: note = tr|A0A1S8L370|A0A1S8L370_9CLOT 6-pyruvoyl-tetrahydropterin synthase OS=Clostridium roseum; OX = 84029 GN=CROST_28480 PE=4 SV=1
MEFEGYIYKFKLNASHSVLINNKRGTVHAHTFIISLRVKVYYDTFLLYNKMERVVEDYLKRYEEKELNKVEPFNKIEPTLENIGNVLFEEFTKVFDKKKVQLIKLEISETPSRVYVVNSYSRKDKERHENKVKKVILDGILTLCTEELIKGFKEHEREEKVVEEEVREKEIEIEEVRAHRKVNNDITKKYSVKKRVVISVICIIFSAVALLYYLWNVGGYPWGIDTYGHIFKGEFLYRNLRQGNLYPLFTKYWYNGVQPFRYWAPLSYYVFSVCEFLMSGNTLNAYLIFIILLFLIGALGWLIWGIREKCVFTALVLGILWFFLPENLKVLFYEGNIPRAVITVLLPYLFYFLWDFVEYDKKWSILPMTLFMTLITFTHLMISAMVGVASFMFLFIYSIIFKKILKPIQCIIAMFMGIAICGVWLYPALKGGLTSMNSDATSEVMKFFSAKFAVALNPFIRLTPDGKNGMFYYGLSVFLVALFGIVLSKKKSLPGFITSVIILLASTTAFLPIVSKLPLNQLFWMIRFAPIAYALFIISFLNWKSLKKYIKITVIIIIIADSMLSFRFSLYPEGRNLDSEKVLSKAKDIAQQRISLLDDSTFASYASYYICNGENKSTYSYGWAWQGAATANNIVLLNTAMGNGYYKYMFDRSMEMGCDTVVLRKSVLKKSKDNFKDIVYAAGLLGYKLYFQNDDSYIFHLNTPKTFGVITEYEGLCIGKSSESLPLLYPDFRKGSSDNIEDYSLKELMKYKVIYLSGFSYNLRAEAEKMITKLSENGVKIIIDMNRIPADNITNRMIFLGVTSEPITFNNRMPNLFFDKEKYEEKVAFKEEYKKWNTVYLEKLPEIQGFSWVKDKKLAFLGTGTKKNKNVYFLGFNLLFNGMTNEDHKSIDIMSRIIGKSFLNTPKREIVPIDISYGKNSIRINSPKNNVNTTLAYLDAYKGDKKIYKDQNLLNVDKKGVTNILIDYPYLRKGIAVSLMGIIGLIILISFVFKGKGEGIEKNT

SEQ ID NO: 19397 - protein, 136 aa, Clostridium roseum
  REGION 1..136: note = tr|A0A1S8L681|A0A1S8L681_9CLOT 6-carboxy-5,6,7,8-tetrahydropterin synthase OS=Clostridium roseum OX=84029 GN=CROST_22390 PE=3 SV=1
MYIVKIENSFDSAHFLSNYDGKCANIHGHRWKIEVEIQAKTLINDMVEDFTILKKKIKEVIDFYDHALIIEKNTLRELTYTCLIEDGFRIIELPFRPTAENFSKFFFDEIERLNYDVRKITVYETPNNSASYVKEV

SEQ ID NO: 19398 - protein, 142 aa, Clostridium saccharobutylicum
  REGION 1..142: note = tr|U5MPX2|U5MPX2_CLOSA 6-carboxy-5,6,7,8-tetrahydropterin synthase OS=Clostridium saccharobutylicum DSM 13864 OX=1345695 GN=queD PE=3 SV=1
MFKIKSEIQFDTAHYLSGYKGKCSNIHGHRYRLIAKLKSETLHEDGQLRGMVDDFSNFKGALKEIEEIFDHKLVIENNDEGKALARKLEDLPNNFDIYFVNYRPTAEEMSRDIFNMLKAKGLSVCEVELFETPNNSCIYTED

SEQ ID NO: 19399 - protein, 142 aa, Clostridium saccharobutylicum
  REGION 1..142: note = tr|A0A1S8NBJ9|A0A1S8NBJ9_CLOSA 6-carboxy-5,6,7,8-tetrahydropterin synthase OS=Clostridium saccharobutylicum OX=169679 GN=CLOSAC_19250 PE=3 SV=1
MFKIKSEIQFDTAHYLSGYEGKCSNIHGHRYRLIAKLKSETLHEDGQLRGMVDDFSNFKGALKQIEEIFDHKLVIENNDEGKAFARKLEDLPNNFDIYFVKYRPTAEEMSRDIFNMLKAKGLSVCEVELFETPNNSCIYTED

SEQ ID NO: 19400 - protein, 142 aa, Clostridium saccharoperbutylacetonicum
  REGION 1..142: note = tr|M1LVB2|M1LVB2_9CLOT 6-carboxy-5,6,7,8-tetrahydropterin synthase OS=Clostridium saccharoperbutylacetonicum N1-4(HMT) OX=931276 GN=queD; PE = 3 SV=1
MFKIKSEVQFDMAHYLSGYDGKCSNIHGHRYRLIAKLKSETLHKEGQLRGMVDDFSNFKEALKQIEEEFDHKLIIENNEEGKVLSKKLSELQNNFEISFVNYRPTAEEMSRDIFNRLKSKGLSVCEVELFETPNNSCIYTED

SEQ ID NO: 19401 - protein, 139 aa, Clostridium sp.
  REGION 1..139: note = tr|A7VCM5|A7VCM5_9CLOT 6-carboxy-5,6,7,8-tetrahydropterin synthase OS=Clostridium sp. L2-50 OX=411489 GN=queD PE=3 SV=1
MYSLKTNSSFDSAHFLAGYEGKCRNLHGHRWTVEVEVGGEKLMQDGQTRGMVVDFGDLKKDLREKTEEMDHCLIMEKGTLKEKTMEALAEEQFRIIELPMRPTAENLAKYFYEYMADKGYQVIRTTVYETPTNAATYMA

SEQ ID NO: 19402 - protein, 364 aa, Clostridium sp.
  REGION 1..364: note = tr|R5JYM4|R5JYM4_9CLOT 6-pyruvoyl tetrahydropterin synthase-related domain OS=Clostridium sp. CAG:632; OX = 1262830 GN=BN743_01154 PE=4 SV=1
MKKNKADLKWFRQPGKRLTVILILCAVCVSIFFGLYILIINSISRDYITTGSNTQQQYSNQLADALNSMCELGASEKDLQDYMAGSVPASGSSWAFLIKNHTVIFAKNPSTTETLQELKERDAFLKHLKEQNAIVTVDNFYVGNDSYTAGIITDEAQYLEQIHTHEVYLSILFATLTLIFIGAITALTGAWTGSDRKQATIRAELLKRNKEFEALEHASSADSSANGSGSTPIVIHHRGKSNLYKQYKFKFYLNARHAIYIDGVLGAMHPHTWEITLHVIKMQHDFVQFGDLEKKIEAFMQQYQDQELNSIPPFDVINPTLENCCDYFKEQISRILEEAGWLFLMIEMSETPSRSYVISMIDEE

SEQ ID NO: 19403 - protein, 141 aa, unidentified
  source 1..141: note = [Clostridium] spiroforme
  REGION 1..141: note = tr|A0A1Y4QN73|A0A1Y4QN73_9FIRM 6-carboxy-5,6,7,8-tetrahydropterin synthase; OS = [Clostridium] spiroforme OX=29348 GN=B5E91_00880 PE=3; SV = 1
MYYLKTEQSFDSAHFLHGYSGKCANIHGHRWRIVVTIKSDKLLDDPQNNGMIIDFSDLKNNLKSITDNLDHALIIEEGSLRSSLYQALIAENFKIINLPFRPTAENLAKYIYEILAKTYDVECVDVYETPNNCASYNENNK

SEQ ID NO: 19404 - protein, 143 aa, Clostridium sporogenes; identical to SEQ ID NO: 19349
  REGION 1..143: note = tr|A0A1V9IVH7|A0A1V9IVH7_CLOSG 6-carboxy-5,6,7,8-tetrahydropterin synthase OS=Clostridium sporogenes OX=1509 GN=VT92_0206100 PE=3 SV=1

SEQ ID NO: 19405 - protein, 143 aa, Clostridium sporogenes
  REGION 1..143: note = tr|A0A1V9IWH2|A0A1V9IWH2_CLOSG 6-carboxy-5,6,7,8-tetrahydropterin synthase OS=Clostridium sporogenes OX=1509 GN=queD_2 PE=3 SV=1
MYTLKVEHSFDSAHFLANYEGKCGNIHGHRWKVEIQIKSESLVQGGQLDGMVIDFGDLKKDVKSMVDYYDHALIIEKETMREQSLSSLKEDGFRIIEVNFRPTAENFAAFFYKFMKDKGYNVKSVTVYETPNNSATYEESGVI

SEQ ID NO: 19406 - protein, 188 aa, unidentified
  source 1..188: note = [Clostridium] symbiosum
  REGION 1..188: note = tr|U2BIN4|U2BIN4_CLOSY Uncharacterized protein; OS = [Clostridium] symbiosum ATCC 14940 OX=411472; GN = CLOSYM_01711 PE=4 SV=1
MRSITTLDLQYAHRFFGFKGEAQYLHGHTGILTIEVEDSVEPGVNMVFPCNEIQKTAWDVLKNFDHALILREDDPLLPAILKVYEEQGIKDGAPHNQMKGPAFHTDLATAYPECRLVVTKETMTVEGMIKIVYDLLKDKLNIAKITFSSGVNKASEEFQTKNRIDRCPLCGIALNENGICPKCGYKKQ

SEQ ID NO: 19407 - protein, 188 aa, unidentified; identical to SEQ ID NO: 19406
  source 1..188: note = [Clostridium] symbiosum
  REGION 1..188: note = tr|E7GUF1|E7GUF1_CLOSY Uncharacterized protein; OS = [Clostridium] symbiosum WAL-14163 OX=742740; GN = HMPREF9474_04546 PE=4 SV=1

SEQ ID NO: 19408 - protein, 188 aa, Clostridium symbiosum
  REGION 1..188: note = tr|A0A174GT12|A0A174GT12_CLOSY Queuosine biosynthesis protein QueD OS=Clostridium symbiosum OX=1512; GN = DXA34_12390 PE=4 SV=1
MRSITTLDLQYAHRFFGFKGEAQYLHGHTGILTIEVEDSVEPGVNMVFPCNEIQKTAWDVLKNFDHALILREDDPLLPAILKVYEEQGIKDGAPHNQMKGPAFHTDLATAYPECRLVVTKETMTVEGMIKIVYDLLKDKLNIAKITFSSGVNKASEEFQTKNQIDRCPLCGIALNENGICPKCGYKKQ

SEQ ID NO: 19409 - protein, 143 aa, unidentified
  source 1..143: note = Clostridium taeniosporum
  REGION 1..143: note = tr|A0A1D7XKK5|A0A1D7XKK5_9CLOT 6-carboxy-5,6,7,8-tetrahydropterin synthase OS=Clostridium taeniosporum OX=394958 GN=queD PE=3 SV=1
MYILKAEHSFDSAHFLAGYEGKCGNIHGHRWRVEIEIQGDTLVKGGQLDGMVIDFGDLKKDVKEMVDHYDHALIIEEKTMREETLGCIKQDGFKVIEVNFRPTAENFAAFFFKTMKNKGYNVKRAIVYETPTNSAVYEESERC

SEQ ID NO: 19410 - protein, 143 aa, Clostridium tagluense
  REGION 1..143: note = tr|A0A401UUW9|A0A401UUW9_9CLOT 6-carboxy-5,6,7,8-tetrahydropterin synthase OS=Clostridium tagluense OX=360422 GN=Ctaglu_48610 PE=3 SV=1
MYILKAEHSFDSAHFLSGYVGKCSNIHGHRWKVEVYVQSETLLKGGQLDGMVIDFGDLKKDVKAMVDCYDHALIVQEGTMRFETLNCIKQDGFNVIVVDFRPTAENFAGFFFKLMKDIGYNVKRTTVYETPTNSATYEESEAR

SEQ ID NO: 19411 - protein, 143 aa, Clostridium tepidiprofundi
  REGION 1..143: note = tr|A0A151B3D3|A0A151B3D3_9CLOT 6-carboxy-5,6,7,8-tetrahydropterin synthase OS=Clostridium tepidiprofundi DSM 19306 OX=1121338 GN=CLTEP_16390 PE=3; SV = 1
MYILRTEHSFDSAHFLAGYDGKCGNIHGHRWKVEVEVQSNKLTENGQLEGMVVDFGDLKKDLKEIVDYYDHAFIIQQGSMRNKTLECILEDGFRVIEVEFRPTAENFALFFFNRMKNKGYNVKRVFVYETPKNCAVYEEGEVN

SEQ ID NO: 19412 - protein, 118 aa, unidentified
  source 1..118: note = Clostridium tepidum
  REGION 1..118: note = tr|A0A1S9I250|A0A1S9I250_9CLOT 6-carboxy-5,6,7,8-tetrahydropterin synthase OS=Clostridium tepidum OX=1962263 GN=BS638_10985 PE=3 SV=1
MILIKKFKFDAAHNLVHYHGKCEKLHGHTYGLVIKVLGEPDKEDMVIDFTELKSIVKENVLDLLDHAYINEIIEQPTAENIAIWIWNKLYEKLKRDNCRLYEIEVWETETSGVVYRGQ

SEQ ID NO: 19413 - protein, 143 aa, unidentified
  source 1..143: note = Clostridium tepidum
  REGION 1..143: note = tr|A0A1S9I1B3|A0A1S9I1B3_9CLOT 6-carboxy-5,6,7,8-tetrahydropterin synthase OS=Clostridium tepidum OX=1962263 GN=BS638_11975 PE=3 SV=1
MYTLKVEHSFDSAHFLANYEGKCGNIHGHRWKVEIQIKSESLVQGGQLDGMVIDFGNLKKDVKSMVDYYDHALIIEKGTMREQSLNSLKEDGFRIIEVNFRPTAENFAAFFYKTIKDKGYNIKSVTVYETPNNSATYEESGVI

SEQ ID NO: 19414 - protein, 143 aa, Clostridium tetanomorphum
  REGION 1..143: note = tr|A0A037ZAX7|A0A037ZAX7_CLOTT 6-carboxy-5,6,7,8-tetrahydropterin synthase OS=Clostridium tetanomorphum DSM 665 OX=1230342 GN=CTM_10421 PE=3 SV=1
MYILKSEHSFDSAHFLAGYKGKCGNIHGHRWKVEIEIQSENLINGGQLDGMVIDFGDLKKDVKEMVDYYDHALIIQEGTMRTETLSCISEDGFKVITVNFRPTAENFAAFFFKTMKNKGYSVKRATVYETPTNSAVYEESEVI

SEQ ID NO: 19415 - protein, 140 aa, unidentified
  source 1..140: note = [Clostridium] thermoalcaliphilum
  REGION 1..140: note = tr|A0A1V4IAY0|A0A1V4IAY0_9FIRM 6-carboxy-5,6,7,8-tetrahydropterin synthase; OS = [Clostridium] thermoalcaliphilum OX=29349; GN = CLOTH_03560 PE=3 SV=1
MYILKGEHSFDSAHFLANYQGKCSNIHGHRWKVEVEVYSESLIEGGQLDGMVVDFGDLKKDIKDVVDYFDHALIIQSGTMRKETLDSIVSDGFKVINVDFRPTAENFSKHFFDCMKERSYNVKKVTVYETPTNSASYEVK

SEQ ID NO: 19416 - protein, 156 aa, Clostridium thermobutyricum
  REGION 1..156: note = tr|A0A1V4SXR6|A0A1V4SXR6_9CLOT 6-pyruvoyl tetrahydropterin synthase OS=Clostridium thermobutyricum DSM 4928 OX=1121339 GN=CLTHE_06130 PE=4 SV=1
MSYLLECEESFDSSHFLKGHKGKCRNLHGHRWRIKYGLKANELIQSGSSEGMIIDFSDIKSLIKEYFKVYDHALILTDYKEETLTKEEKNFIQACEDMKFRIVHVPFRSTAENMSKFFFNELERVLSEKIPSKNFNVHYVTVYETPNNAATYGGIN

SEQ ID NO: 19417 - protein, 156 aa, Clostridium thermobutyricum; identical to SEQ ID NO: 19416
  REGION 1..156: note = tr|N9XWI3|N9XWI3_9CLOT Queuosine biosynthesis protein QueD OS=Clostridium thermobutyricum OX=29372; GN = HMPREF1092_03123 PE=4 SV=1

SEQ ID NO: 19418 - protein, 139 aa, Clostridium thermopalmarium
  REGION 1..139: note = tr|A0A2T0AQJ2|A0A2T0AQJ2_9CLOT 6-carboxy-5,6,7,8-tetrahydropterin synthase OS=Clostridium thermopalmarium DSM 5974 OX=1121340 GN=CPAL_17270 PE=3 SV=1
MYILKTEQSFDAAHFLAGYEGKCSNIHGHRWRVVIEVKSLTLQDSKQLNGMVVDFNQLKKDLKEEVDYFDHMLIIEKNTLKTETVKALKGEGFKIVVLDFRPTAENLAKYFFNRMKIKGYKVKSAVVYETPNNCAAYEE

SEQ ID NO: 19419 - protein, 143 aa, Clostridium uliginosum
  REGION 1..143: note = tr|A0A1I1GPH6|A0A1I1GPH6_9CLOT 6-carboxy-5,6,7,8-tetrahydropterin synthase OS=Clostridium uliginosum OX=119641 GN=SAMN05421842_10120 PE=3 SV=1
MYILKAEHSFDSAHFLAKYEGKCGNIHGHRWKVEIEVQSETLVKGGQLDGMVIDFGDLKRDVKDMVDYYDHALIIEQGTMREETLNCIKQDGFKTIEVNFRPTAENFAAFFFKTMKDKGYNINRSTVYETPTNSATYEESEAR

SEQ ID NO: 19420 - protein, 154 aa, unidentified
  source 1..154: note = Clostridium ventriculi
  REGION 1..154: note = tr|A0A173WU36|A0A173WU36_CLOVE 6-carboxy-5,6,7,8-tetrahydropterin synthase OS=Clostridium ventriculi OX=1267 GN=queD PE=4 SV=1
MSYFLEGEESFDSSHFLIGHSGKCKNLHGHRWKIQYGLKADELIESGSSKGMIIDFTDIKNIIKNYFDKYDHALLLTVDSHEVSSEEKSFIDACNAMNFKIINLPCRTTAENMSKLFFYEISALLDEKVKSNNFSLCYITVYETPNNKATYKED

SEQ ID NO: 19421 - protein, 118 aa, unidentified
  source 1..118: note = Clostridium ventriculi
  REGION 1..118: note = tr|A0A174C5P6|A0A174C5P6_CLOVE 6-pyruvoyl tetrahydropterin synthase-related domain OS=Clostridium ventriculi OX=1267 GN=ERS852473_01819 PE=4 SV=1
MNYQYRFKFYVSARHYSNIAGTPTILHPHTWELTLLLTSSNNELIKFSYLESKISQYLKNFEQKSLNTLEVFINKSCTTEDIAYTFFEDLSNVVLKDDIVLDCLELSENPTRTFIVKR

SEQ ID NO: 19422 - protein, 143 aa, Clostridium vincentii
  REGION 1..143: note = tr|A0A2T0BDY1|A0A2T0BDY1_9CLOT 6-carboxy-5,6,7,8-tetrahydropterin synthase OS=Clostridium vincentii OX=52704 GN=queD PE=4 SV=1
MFILKSEIGFDMSHYLSGYDGKCGNIHGHRYRLIVKVKGTELKSTGSNRAMVEDFGFIKLILKDIHDLFDHKLVVEDDQIGRDLIKRLEGTLQNFEHVVVSYRPTAEEMSRDIFNRIKAKGINIYEVELFETPTNSCIYREEE

SEQ ID NO: 19423 - protein, 136 aa, unidentified
  source 1..136: note = Cnuella takakiae
  REGION 1..136: note = tr|A0A1M5C472|A0A1M5C472_9BACT 6-carboxy-5,6,7,8-tetrahydropterin synthase OS=Cnuella takakiae OX=1302690 GN=SAMN05444008_108217 PE=3 SV=1
MVYLTRVEHFNAAHKLYNPAWSREENELVFGKCANEHCHGHNYELYVTVKGKPDSGTGFVMDVKKLSTLIKEHVTDQLDHRNLNVDVPFMEGKLTSTENLAMAIWQQLAPQLPQSVQLHCIKLYETPRIYVEYFGE

SEQ ID NO: 19424 - protein, 118 aa, unidentified
  source 1..118: note = Cnuella takakiae
  REGION 1..118: note = tr|A0A1M4Y205|A0A1M4Y205_9BACT 6-carboxy-5,6,7,8-tetrahydropterin synthase OS=Cnuella takakiae OX=1302690 GN=SAMN05444008_104123 PE=3 SV=1
MEIYKEFSFDSAHFLPNVPEGHKCKNMHGHTYKLKVFVAGEVHPHYGWIMDFKELKDAIAPLIDQLDHKLINDIPGLENPTAENITIWIWNRLNPLVPQLSRIELYETPTTGVIYNGK

SEQ ID NO: 19425 - protein, 305 aa, Cobetia crustatorum
  REGION 1..305: note = tr|A0A558HN93|A0A558HN93_9GAMM 6-pyruvoyl tetrahydropterin synthase-related protein OS=Cobetia crustatorum OX=553385 GN=FQP86_08190 PE=4 SV=1
MITKTLFVRALTALDASTWSNTRGLYGISQHLDIELDGEVGHDGMLFDFGNVKPWAKGLIDQDADHTLIVPTLAEGVSVTDCPEGLSLRFTQPYAMEVRGPRQAFCLLPVAEITDEVMTQHFEKLLMRRLPPRVDAIRVKLRNEVIDGATYTYSHGLRHHTGNCQRIAHGHRSPLIIERNGERDTTLEAEWAEKLHDSYLAEEADLFDRPGRDMVFSYEAPQGKFRIRLPRQRVWLLPTPTTIEWIADWLARQIALESGDTIRVEAYEGINKGAIALHTPESARQPLVMPTLDTSREEVAGNEAS

SEQ ID NO: 19426 - protein, 299 aa, Cobetia marina
  REGION 1..299: note = tr|A0A4U1LY21|A0A4U1LY21_COBMA 6-pyruvoyl tetrahydropterin synthase-related protein OS=Cobetia marina OX=28258 GN=FBG13_08075 PE=4 SV=1
MTSKTLFVRALTAVDASVWSNTRGLHGISQHLDLELDGAVGHDGMLFDFGDVKPWAKRMIDQDADHTLIVPSQADGVNVTDCPEGLCLRFTQPYAMEVRGPRQAFCLLPVAEVTTLVLANHFEKLLTRRLPPRVEALRVRLRDECIEGAAYTYSHGLRHHSGNCQRIAHGHRSPLVIERNGLRDTALEAEWAEKLNDRYLAEEGDLIDRPGRELVFSYEAPQGRFRIRLPRKQVWLLPTPTTIEWIADWLARQIALDSGDSIRVEAYEGINKGAIARHTPETARQPLVLPEHEEMPVPS

SEQ ID NO: 19427 - protein, 299 aa, Cobetia marina
  REGION 1..299: note = tr|A0A4Y4GPH1|A0A4Y4GPH1_COBMA Uncharacterized protein OS=Cobetia marina OX=28258 GN=HHA02_22550 PE=4 SV=1
MTSKTLFVRALTAVDASVWSNTRGLHGISQHLDLELDGAVGHDGMLFDFGDVKPWAKRMIDQDADHTLIVPSQAEGVSVTDCPEGLCLRFTQPYAMEVRGPRQAFCLLPVAEVTTVVLANHFEKLLTRRLPPRVEALRVRLRDECIEGAAYTYSHGLRHHSGNCQRIAHGHRSPLVIERNGLRDTALEAEWAEKLNDRYLAEEGDLIDRPGRELVFSYEAPQGRFRIRLPRKQVWLLPTPTTIEWIADWLARQIALDSGDSIRVEAYEGINKGAIARHTPETARQPLVLPEHEEMPATS

SEQ ID NO: 19428 - protein, 299 aa, Cobetia sp.
  REGION 1..299: note = tr|A0A3T0K563|A0A3T0K563_9GAMM 6-pyruvoyl tetrahydropterin synthase-related protein OS=Cobetia sp. ICG0124 OX=2053669 GN=CU110_04805 PE=4 SV=1
MTSKTLFVRALTAVDASVWSNTRGLHGISQHLDLELDGAVGHDGMLFDFGDVKPWAKRMIDQDADHTLIVPSQADGVSVTDCPEGLCLRFTQPYAMEVRGPRQAFCLLPVAEVTTVVLANHFEKLLTRRLPPRVEALRVRLRDECIEGAAYTYSHGLRHHSGNCQRIAHGHRSPLVIERNGLRDTALEAEWAEKLNDRYLAEEGDLIDRPGRELVFSYEAPQGRFRIRLPRKQVWLLPTPTTIEWIADWLARQIALDSGDSIRVEAYEGINKGAIARHTPETARQPLVLPEHEEIPATS

SEQ ID NO: 19429 - protein, 299 aa, Cobetia sp.
  REGION 1..299: note = tr|A0A2E4Q1A9|A0A2E4Q1A9_9GAMM 6-pyruvoyl tetrahydropterin synthase-related protein OS=Cobetia sp.; OX = 1873876 GN=CL809_09510 PE=4 SV=1
MTPKTLFVRALTAVDASVWSNTRGLFGISQHLDLELDGAVGHDGMLFDFGDVKPWAKRMIDQDADHTLIVPSQAEGVSVTDCPEGLCLRFTQPYAMEVRGPRQAFCLLPVAEVTTEVLANHFEKLLTRRLPPRVEALRVRLRDEIIDGAAYTYSHGLRHHSGNCQRIAHGHRSPLIIERNGVRDTALEAEWAEKLNDRYLAEEGDLIDRPGRELVFSYEAPQGRFRIRLPRKQVWLLPTPTTIEWIADWLARQIALDSGDSIRVEAYEGINKGAIARHTPQTAREPLVLPEHEDTSATS

SEQ ID NO: 19430 - protein, 118 aa, Cocleimonas flava
  REGION 1..118: note = tr|A0A4R1EYR0|A0A4R1EYR0_9GAMM 6-carboxy-5,6,7,8-tetrahydropterin synthase OS=Cocleimonas flava OX=634765 GN=EV695_3179 PE=3 SV=1
MYTISKQFTFSASHQLLNLPGDHPCHRLHGHNYIVEIELRSATLNSTGFVRDYNDLDALKQYIDDTLDHRHLNEVFGHDDTTAENLAYFLYDWSKKQWPEVSAVRVSETPKTWAEYRP

SEQ ID NO: 19431 - protein, 118 aa, unidentified
  source 1..118: note = Cognatishimia maritima
  REGION 1..118: note = tr|A0A1M5L5T1|A0A1M5L5T1_9RHOB 6-carboxy-5,6,7,8-tetrahydropterin synthase; OS = Cognatishimia maritima OX=870908 GN=SAMN04488044_1170; PE = 3 SV=1
MYRITKEFHFSASHQLKGLPDDHPCARLHGHNYIVEVELSAPELDAVGFVLDYRELAPLKVWIDETLDHRHLNDVFGHDMVTSERLAKEVYDWAKARWDAVSAVRVSETPKTWAEYRP

SEQ ID NO: 19432 - protein, 126 aa, Cohaesibacter gelatinilyticus
  REGION 1..126: note = tr|A0A285N6U7|A0A285N6U7_9RHIZ 6-carboxy-5,6,7,8-tetrahydropterin synthase; OS = Cohaesibacter gelatinilyticus OX=372072; GN = SAMN06265368_0045 PE=3 SV=1
MFRITKEFHFSASHQLCGLPDDHPCARLHGHNYIAEIELSSPDHNEHGFVLDYRELSPLKAYIDDHLDHRHLNDVLGHDMVTSELLAKHLFDWAKARWPQVSAMRVSETPKTWAEYRPVISNGDDA

SEQ ID NO: 19433 - protein, 132 aa, Cohaesibacter marisflavi
  REGION 1..132: note = tr|A0A1I5KJN2|A0A1I5KJN2_9RHIZ 6-pyruvoyl-tetrahydropterin synthase OS=Cohaesibacter marisflavi OX=655353 GN=SAMN04488056_11442 PE=4 SV=1
MFAVEVRDHIMIAHSLPRPVFGPAQGIHGATFVVDATFFTRDVDSDGLAVDIGEATTALNDVLNPLNYQNLDEIEVFRHKISTTEVIAKYIFDQLATAVHEERFGPGSRRICKIRVTLHESHVAKGWYEADL

SEQ ID NO: 19434 - protein, 148 aa, Cohnella luojiensis
  REGION 1..148: note = tr|A0A4Y8LSR1|A0A4Y8LSR1_9BACL 6-carboxytetrahydropterin synthase OS=Cohnella luojiensis; OX = 652876 GN=E2980_16030 PE=4 SV=1
MIQQIYPSTPHPFRYELNKDMHFAAAHYVPSEQAGDCAKLHGHTYFANVTIVGNELDESGFLVNFSLIKKLVHDRFDHSLLNGHAEFADEHNPERYPTTENVARTLCEMIQDHLNGMANKPRCVQVFLRETPTSYVVYRPAAGGVYGG

SEQ ID NO: 19435 - protein, 146 aa, unidentified
  source 1..146: note = Cohnella lupini
  REGION 1..146: note = tr|A0A3D9I8V8|A0A3D9I8V8_9BACL PreQ(0) biosynthesis protein QueD OS=Cohnella lupini OX=1294267 GN=DFP95_109111; PE = 4 SV=1
MIQQIYPSVPHPYRYELNKDMHFAAAHYIPDERAGNCSELHGHTYFANLTIVGNELDECGFLVNFSLVKKLIHDRFDHSLLNGHADFTGDKQPERYPTTENVARTLCELVQSHLDGMANKPICSQVFLRETPSSYVVYRPAAGAVI

SEQ ID NO: 19436 - protein, 154 aa, Cohnella sp.
  REGION 1..154: note = tr|A0A1I0ZN58|A0A1I0ZN58_9BACL 6-pyruvoyltetrahydropterin/6-carboxytetrahydropterin synthase OS=Cohnella sp. OV330 OX=1855288; GN = SAMN05216312_105126 PE=4 SV=1
MLQQIYPVAPHPYRYELNKDLQFAAAHFVPAESAGKCSQVHGHTYFVNVTVAGDLLDEAGFLVNFSDIKTLIHTRFDHTLLNDDTESFNADDPNRFPTTEVVAKTICELVQHYLDGRPNHPVCLQVFVRETPTSYCVYRPWPKVSKRPAGDARA

SEQ ID NO: 19437 - protein, 149 aa, Cohnella sp.
  REGION 1..149: note = tr|A0A3E0RBA4|A0A3E0RBA4_9BACL 6-carboxy-5,6,7,8-tetrahydropterin synthase OS=Cohnella sp. OX=1883426 GN=queD PE=3 SV=1
MMQQIYPSVAHPYEYELNKDIQFAAAHYIPSDEAGKCRKLHGHTYFANITVAGDELDASGFLVNFAKIKELIHDRFDHTVLNDDAESFDSELPDRFPTTEVVARTIYEIVQRYLDGTANRPRCVQVYVRETPTSYCIYRPKLKEGDRRG

SEQ ID NO: 19438 - protein, 290 aa, unidentified
  source 1..290: note = Coleofasciculus chthonoplastes
  REGION 1..290: note = tr|B4VM09|B4VM09_9CYAN 6-pyruvoyl tetrahydropterin synthase family OS=Coleofasciculus chthonoplastes PCC 7420; OX = 118168 GN=MC7420_1717 PE=4 SV=1
MKCIINRRAQFSASHRYWLPELSEAQNQQQFGRGAQFPGHGHNYVLFVSLEGDLDEYGMVQNLSQVKKVIKQEVTSQLDYAYLNHTWLDFQETLPTTENIARVIWQKLAPYLPLVKIQLFEHPELWADYLGNGMEAYLTISTHFSAAHRLAHPQLSYDQNCEIYGKCARPNGHGHNYHLEVTVKGEIDPRTGMIVDLGALQKVIDDYVVEPFDHTFLNKDIPYFDQVVPTAENIAIYIRQLLQSPIQKLGAKLHKVKLIESPNNSCEVYCTGDTSSVEPDAIASPVLTFV

SEQ ID NO: 19439 - protein, 128 aa, unidentified
  source 1..128: note = Coleofasciculus chthonoplastes
  REGION 1..128: note = tr|B4VMX3|B4VMX3_9CYAN 6-carboxy-5,6,7,8-tetrahydropterin synthase; OS = Coleofasciculus chthonoplastes PCC 7420 OX=118168; GN = MC7420_1793 PE=3 SV=1
MSKWKLVTEFTFDSAHYIRDYDGPCGRMHGHTYTVRLEATSSTLHASEHCPHPVMVADFKSLRWAKKDVTKGGLDHGILNDILPDNYETTAEMIAQYIYDETKKRIPEGVQLKVAVSETPNSWVEYEE

SEQ ID NO: 19440 - protein, 149 aa, Collimonas arenae
  REGION 1..149: note = tr|A0A561FTT7|A0A561FTT7_9BURK 6-pyruvoyltetrahydropterin/6-carboxytetrahydropterin synthase OS=Collimonas arenae OX=279058 GN=FHW24_1236 PE=4; SV = 1
MLTITRKLEFDAGHRIPDHKSQCRNLHGHRYTLEITLVGAVIEVEGSSDNGMIMDFSDIKTLAKQHLVDIWDHAFLVYEKDTAVREFLATLPDHKTVIIDRIPTVENLARTAYDILKAAYKDHYGTGLHLQKLVLHETPNCWAEISEDR

SEQ ID NO: 19441 - protein, 149 aa, Collimonas arenae
  REGION 1..149: note = tr|A0A0A1FFI9|A0A0A1FFI9_9BURK 6-carboxy-5,6,7,8-tetrahydropterin synthase OS=Collimonas arenae OX=279058 GN=LT85_3392 PE=3 SV=1
MLTITRKLEFDAGHRIPDHKSQCRNLHGHRYTLEITLVGAVIEVEGSSDNGMIMDFSDIKTLAKQHLVDVWDHAFLVYEKDTAVRDFLATLPDHKTVIIDRIPTVENLARTAFDILKAAYKDHFGTGLHLQKLVLHETPNCWAEISEDR

SEQ ID NO: 19442 - protein, 149 aa, Collimonas fungivorans
  REGION 1..149: note = tr|G0AB81|G0AB81_COLFT 6-carboxy-5,6,7,8-tetrahydropterin synthase OS=Collimonas fungivorans (strain Ter331) OX=1005048 GN=queD PE=3 SV=1
MLTITRKLEFDAGHRIPDHKSQCRNLHGHRYTLEITLVGAVIEVEGSSDNGMIMDFSDIKTLAKQHLVDVWDHAFLVYEKDTAVRDFLATLPDHKTVIIDRIPTVENLARTAYDILKAAYKDHYGTGLHLQKLVLHETPNCWAEISEDR

SEQ ID NO: 19443 - protein, 149 aa, Collimonas fungivorans; identical to SEQ ID NO: 19442
  REGION 1..149: note = tr|A0A127P9L2|A0A127P9L2_9BURK 6-carboxy-5,6,7,8-tetrahydropterin synthase OS=Collimonas fungivorans OX=158899 GN=queD PE=3 SV=1

SEQ ID NO: 19444 - protein, 149 aa, Collimonas pratensis
  REGION 1..149: note = tr|A0A127Q7V1|A0A127Q7V1_9BURK 6-carboxy-5,6,7,8-tetrahydropterin synthase OS=Collimonas pratensis OX=279113 GN=queD PE=3 SV=1
MLTITRKLEFDAGHRIPDHKSQCRNLHGHRYTLEITLVGAVIEVEGSSDNGMIMDFSDIKTLAKQHLVDVWDHAFLVYEKDAAVRDFLATLPNHKTVVIDRIPTVENLARTAFDILKAAYKDHFGTGLHLQKLVLHETPNCWAEISEDR

SEQ ID NO: 19445 - protein, 149 aa, Collimonas pratensis
  REGION 1..149: note = tr|A0A127R0U6|A0A127R0U6_9BURK 6-carboxy-5,6,7,8-tetrahydropterin synthase OS=Collimonas pratensis OX=279113 GN=queD PE=3 SV=1
MLTITRKLEFDAGHRIPDHKSQCRNLHGHRYTLEITLVGAVIEVEGSSDNGMIMDFSDIKTLAKQHLVDVWDHAFLVYEKDAAVRDFLATLPNHKTVVIDRIPTVENLARTAFDILKVAYKDHFGTGLHLQKLVLHETPNCWAEISEDR

SEQ ID NO: 19446 - protein, 149 aa, Collimonas sp.
  REGION 1..149: note = tr|A0A1H3B5L0|A0A1H3B5L0_9BURK 6-pyruvoyltetrahydropterin/6-carboxytetrahydropterin synthase OS=Collimonas sp. OK242 OX=1798195; GN = SAMN04515617_103132 PE=4 SV=1
MLTITRKLEFDAGHRIPDHKSQCRNLHGHRYTLEITLVGAVIEVEGSSDNGMIMDFSDIKTLAKQHLVDVWDHAFLVYEKDMAVRDFLATLPDHKTVIIDRIPTVENLARTAYDILKAAYKDHYGTGLHLQKLVLHETPNCWAEISEDR

SEQ ID NO: 19447 - protein, 149 aa, Collimonas sp.
  REGION 1..149: note = tr|A0A1I1MIU0|A0A1I1MIU0_9BURK 6-pyruvoyltetrahydropterin/6-carboxytetrahydropterin synthase OS=Collimonas sp. OK412 OX=1801619; GN = SAMN04515619_114113 PE=4 SV=1
MLTITRKLEFDAGHRIPDHKSQCRNLHGHRYTLEITLVGAVIEVEGSSDNGMIMDFSDIKTLAKQHLVDVWDHAFLVYEKDTAVREFLATLPDHKTVIIDRIPTVENLARTAYDILKAAYKDHYGTGLHLQKLVLHETPNCWAEISEDR

SEQ ID NO: 19448 - protein, 293 aa, unidentified
  source 1..293: note = Colwellia beringensis
  REGION 1..293: note = tr|A0A222GC81|A0A222GC81_9GAMM Uncharacterized protein OS=Colwellia beringensis OX=1967665 GN=B5D82_17985; PE = 4 SV=1
MQLFVNDLTVIDFSYCCASRGIVGESWIVDVLLDGSLNEMSMVLDFAVVKKQIKAIIDDAVDHKLLLPMQENTISVEVSENRPGHEFVNFTSKQGGYYLQSPSCAFAKIDTKQIDIASVTDYLTTIILTHLPKNVQGLTLNLRPEVIDGAYYHYTHGLKLHDGNCQRIAHGHRSKIHIYKNGQRSAALEDVWSLRWQDIYLASEADRISLSDIELSATAMANLTPDHQLFSYFAPQGRFDIAVPSTILDVVDCDSTVELLADFIVRQLKKQSPLDEFKVVAFEGVAKGAIANG

SEQ ID NO: 19449 - protein, 293 aa, Colwellia chukchiensis
  REGION 1..293: note = tr|A0A1H7MQ00|A0A1H7MQ00_9GAMM 6-pyruvoyl tetrahydropterin synthase OS=Colwellia chukchiensis; OX = 641665 GN=SAMN05216262_10691 PE=4 SV=1
MQLFVNDLTVIDFSYCCAERGIVGESWIVDVLLDGSLNEMSMVLDFAVVKKQIKAIIDDAVDHKLLLPMLNRAINVENLAKRMGHEYVDFSSKQGSYYLQSPASAFAKIASDEITIDAVTTHLKTIILAQLPKNVQGLTLKLRPENIDGAYYHYTHGLKLHDGNCQRIAHGHRSKIHIYKNGQRSSALEDVWCLRWQDIYLASEADRVSQSEIELSETAMANLTPDHQFFAYHAPQGRFDIAVPSNILDVVDCDSTVELLADFIVRQLKQQSPNDEFKVVAFEGVAKGAIAHG

SEQ ID NO: 19450 - protein, 296 aa, Colwellia demingiae
  REGION 1..296: note = tr|A0A5C6Q9I6|A0A5C6Q9I6_9GAMM Uncharacterized protein OS=Colwellia demingiae OX=89401 GN=ESZ36_18585; PE = 4 SV=1
MQLFVDDLTVIDFSYLCKQRGIVGESWIVDVLLDGSLNEMSMVLDFAVVKKQIKAIIDDAVDHKLLLPIQEQALTLAESPHNDGHQTIDFIIDVASYYLQSPACAFASIDCLTITIPEVTKHLTAIILAHLPDNVKGLTLVLRPENIPSDYYHYTHGLKLHDGNCQRIAHGHRSKIQILVDGERSAKLEAAWCQRWEDIYIASEADRISASDIQLSAQAINNLTPDHQYFSYHAPQGRFDIAVDSKVLDVVDCDSTVELLADFILRQIKAQYSELANNEVKVIAYEGVAKGAIVHG

SEQ ID NO: 19451 - protein, 292 aa, Colwellia hornerae
  REGION 1..292: note = tr|A0A5C6Q5S2|A0A5C6Q5S2_9GAMM Uncharacterized protein OS=Colwellia hornerae OX=89402 GN=ESZ27_14750 PE=4; SV = 1
MQLFVNDLTVIDFSYCCPERGIVGESWIVDVLLDGALNEMSMVLDFAVVKKQIKAIIDDAVDHKLLLPMKNECITVTDSLHQENHEYVDFISERASYYLQSPKCAFAKIISDTIDVTSVTGHLTAIILEQLPQNVQGLKLTLRPENISGDYYHYTHGLKLHDGNCQRIAHGHRSTIHILQKGQRVAALEKAWCLRWQDIYIASDVDRVEKADIELSNFAQHNLTSDHHYFSYTAPQGRFDIAVENKVLDVVDCDSTVELLADFIARQLVADNQGEVTVVAFEGVGKGAIANA

SEQ ID NO: 19452 - protein, 296 aa, unidentified
  source 1..296: note = Colwellia marinimaniae
  REGION 1..296: note = tr|A0A1Z5I4H8|A0A1Z5I4H8_9GAMM Uncharacterized protein OS=Colwellia marinimaniae OX=1513592 GN=queD PE=4; SV = 1
MQLFVDNLTVIDFSYLCKQRGIVGESWIVDVLLDGSLNEQSMVLDFAIVKKQIKAIIDDAVDHKLLLPAQEQAITLADSPHNQGHQTIDFNSDVANYYLQSPACAFATIDCLSITVAAVTTHLTAIILAHLPDNVQGLSLVLRPEVISSDYYHYTHGLKLHDGNCQRIAHGHRSKIKVYVDDKRDAKLEAAWCQRWQDIYIASEADRISRDDIELSAHAMNNLTPDHQYFSYHAPQGRFDIAVDSKVLDVVDCDSTVELLADFILRQIKAEHAELANKTVQVVAYEGVAKGAIVHG

SEQ ID NO: 19453 - protein, 120 aa, Colwellia psychrerythraea
  REGION 1..120: note = tr|Q47ZY6|Q47ZY6_COLP3 6-carboxy-5,6,7,8-tetrahydropterin synthase OS=Colwellia psychrerythraea (strain 34H / ATCC BAA-681) OX=167879; GN = CPS_2933 PE=3 SV=1
MNTAIYKDFMFEAAHKLPNVPAGHKCARLHGHSYKVRIHLEGTVDKDSGWFIDFSDVKTIFKPIYNQLDHYYLNDIEGLENPTAEVISKWIWDKLKPDLPELSAIELMETCTCGVIYKGK

SEQ ID NO: 19454 - protein, 296 aa, Colwellia psychrerythraea
  REGION 1..296: note = tr|A0A099KUL7|A0A099KUL7_COLPS Uncharacterized protein OS=Colwellia psychrerythraea OX=28229; GN = GAB14E_2445 PE=4 SV=1
MQLFVDDLTVIDFSYLCKQRGIVGESWIVDVLLDGSLNDQSMVLDFAVVKKQIKAIIDDAVDHKLVLPIQEPALTLAESPHNEGHQTIDFISDVASYYLQSPACAFASIDCLTITVPAVTKHLTAIILAQLPDNVKGLTLVLRPEVIPSDYYHYTHGLKLHDGNCQRIAHGHRSKIKIYVDDKRDAKLEAQWCKRWQDIYIASEADRVSRDDIELSAYAMNNLTLDHQYFSYHAPQGRFDIAVDKKILEVVDCDSTVELLADFILRQIKAEHTELANNTVTVVAYEGVAKGAIVNG

SEQ ID NO: 19455 - protein, 293 aa, Colwellia sp.
  REGION 1..293: note = tr|A0A136HHM4|A0A136HHM4_9GAMM 6-pyruvoyl tetrahydropterin synthase OS=Colwellia sp. Phe_37; OX = 1795872 GN=AXW17_04550 PE=4 SV=1
MQLFVNDLTVIDFSYCCTERGIVGESWIVDVLLDGSLNEMSMVLDFAVVKKQIKAIIDDAVDHKLLLPMLDNAITVSDSTYREGHEFVDFKSKQGSYNLQSPRCAFAKISSDKIDIASVTNYLTEIILEQLPKNVQGLTLNLRAENIDGAFYHYTHGLKLHDGNCQRIAHGHRSKIHIYQNGQRSVDLEAAWSLRWKDIYLASEADRIALTDIELSANATENLSADQQLFSYFAPQGRFDIAVPSNILDVVDCDSTVELLADFILRQLKQQSPDNEFKVVAFEGVAKGAIANG

SEQ ID NO: 19456 - protein, 175 aa, Colwellia sp.
  REGION 1..175: note = tr|A0A2G2EZ62|A0A2G2EZ62_COLSX QueD like 2; OS = Colwellia sp. OX=56799 GN=COA35_17210 PE=4 SV=1
MQIDDLLITEQQLSTRLNQSVHADRRGEFSLLLAMLSQDALDFSQFHLPKTEIEENTTQEAQLREQLGAGPKQPLAPSEFNMLIGQFNAQRLSLVGENKGMADIKLNQCLNPEPFSIRDDVNHIPLPIIDNCELAVRRRLQKDEIEIDNPKMDVAGFYDVLTDVNQREPLHLTMA

SEQ ID NO: 19457 - protein, 293 aa, unidentified
  source 1..293: note = Colwelliaceae bacterium
  REGION 1..293: note = tr|A0A2D6REB3|A0A2D6REB3_9GAMM Uncharacterized protein OS=Colwelliaceae bacterium OX=2026726; GN = CL811_03250 PE=4 SV=1
  VARIANT 276: note = Xaa can be any naturally occurring amino acid
  VARIANT 280: note = Xaa can be any naturally occurring amino acid
MQLFVNDLTVIDFSYLCEERGIVGESWIVDVLLEGCLNEMSMVLDFGVVKKQIKAIIDDAVDHKLLLPGSSEKLRVTKEGARQDHEFVDFISERASYFLQSPEQAFATIDCQKISIEAVTSHLITVIKKQLPDNVEGLTIKLRPEDIKSDFYHYTHGLKKHDGNCQRIAHGHRSMITLFENDERSEALEAYWCERWKDIYLATDSDEISKEQAELSSFAMDNLKPDHRYFAYMAPQGRFDIAVQENVLEVVDCDSTVELLADYIGRQLKARTENSXITVXAYEGVGKGAIADV

SEQ ID NO: 19458 - protein, 149 aa, unidentified
  source 1..149: note = Colwelliaceae bacterium
  REGION 1..149: note = tr|A0A2D6RD73|A0A2D6RD73_9GAMM 6-carboxytetrahydropterin synthase QueD OS=Colwelliaceae bacterium OX=2026726 GN=CL811_01115 PE=4 SV=1
MTVIAKTIEINMGHRLPNHNSKCRNLHGHRYKIEVGVQGELISSKGSSDEGMIIDFGDLKKIMVEIIDDVYDHGLVLSNEDHNLIQFLENPANGVKTKLVVVDFIPTVENLTRHWHDLLKPKLEEKKILLKYVKTWETPTCFAVYEDED

SEQ ID NO: 19459 - protein, 147 aa, unidentified
  source 1..147: note = Comamonadaceae bacterium
  REGION 1..147: note = tr|A0A2M8E3R8|A0A2M8E3R8_9BURK 6-carboxytetrahydropterin synthase QueD OS=Comamonadaceae bacterium CG_4_9_14_0_8_um_filter_60_18 OX=1973950 GN=queD; PE = 4 SV=1
MLTITRKLEFDAGHRIPDHKSQCRNLHGHRYTLLITLTGEVVQQDGAADNGMIMDFGDIKALANQHLVNLWDHAFIVYAHDTPVRQFLESLPDHKTVVIDRVPTVENLAKIAFDILQPVYHGRFGHQLSLTRVTLFETPNCWAEIDA

SEQ ID NO: 19460 - protein, 147 aa, unidentified; identical to SEQ ID NO: 19459
  source 1..147: note = Comamonadaceae bacterium
  REGION 1..147: note = tr|A0A2M7FVC3|A0A2M7FVC3_9BURK 6-carboxytetrahydropterin synthase QueD OS=Comamonadaceae bacterium CG17_big_fil_post_rev_8_21_14_2_50_60_13; OX = 1973953 GN=queD PE=4 S V=1

SEQ ID NO: 19461 - protein, 158 aa, unidentified
  source 1..158: note = Comamonas serinivorans
  REGION 1..158: note = tr|A0A1Y0EPT5|A0A1Y0EPT5_9BURK 6-pyruvoyl tetrahydrobiopterin synthase OS=Comamonas serinivorans; OX = 1082851 GN=CCO03_14035 PE=4 SV=1
MSYRSTKTYGHEVGLSVAFRQWRAASHCRLLHGYSLAFRFEFEAHALDERHWVVDFGGLKPLKAMLEATFDHKTVVAADDPEIAWFEEAARRGLLELVVLPGVGCEKFAEHVHGLATAWMRAQGLSPRCRLVSVEVKEHGANSAIYLGADHAANQRGV

SEQ ID NO: 19462 - protein, 121 aa, Comamonas sp.
  REGION 1..121: note = tr|A0A0M2DPS3|A0A0M2DPS3_9BURK 6-carboxy-5,6,7,8-tetrahydropterin synthase OS=Comamonas sp. E6 OX=364029 GN=CSE6_013_25260 PE=3 SV=1
MQFTVHQRFFFDAAHTLERAIETEGSRRIHGHTYWAEVSVRGPRNPDNGMVIDLGHLRARLELLRDQLDHHFLDEVPGLGKPTLENLCLFIANALADLEPAPSRIRVWRDSIGDGCVLDLS

SEQ ID NO: 19463 - protein, 121 aa, Comamonas sp.
  REGION 1..121: note = tr|A0A5D3GXW3|A0A5D3GXW3_9BURK 6-carboxy-5,6,7,8-tetrahydropterin synthase OS=Comamonas sp. Z3 OX=2601247 GN=FSY59_18155 PE=3 SV=1
MQFTVHQRFFFDAAHTLERAIETESSRRIHGHTYWAEVSVTGPRNPDNGMVIDLGHLRARLELLRDQLDHHFLDEVPGLGKPTLENLCLFIASALADLEPAPSRIRVWRDSIGDGCVLDLS

SEQ ID NO: 19464 - protein, 121 aa, Comamonas testosteroni; identical to SEQ ID NO: 19463
  REGION 1..121: note = tr|A0A076PY41|A0A076PY41_COMTE 6-carboxy-5,6,7,8-tetrahydropterin synthase OS=Comamonas testosteroni TK102 OX=1392005 GN=O987_23310 PE=3 SV=1

SEQ ID NO: 19465 - protein, 121 aa, Comamonas testosteroni
  REGION 1..121: note = tr|A0A0L7MCN3|A0A0L7MCN3_COMTE 6-carboxy-5,6,7,8-tetrahydropterin synthase OS=Comamonas testosteroni OX=285 GN=GL58_16730 PE=3 SV=1
MQFTVHQRFFFDAAHTLERAIETESSRRIHGHTYWAEVSVSGPRNPDNGMVIDLGHLRARLELLRDQLDHHFLDEVPGLGKPTLENLCLFIANALTDLQPAPSRIRVWRDSIGDGCVLDLS

SEQ ID NO: 19466 - protein, 121 aa, Comamonas thiooxydans; identical to SEQ ID NO: 19462
  REGION 1..121: note = tr|A0A0E3BRN9|A0A0E3BRN9_9BURK 6-carboxy-5,6,7,8-tetrahydropterin synthase OS=Comamonas thiooxydans OX=363952 GN=ATN89_20090 PE=3 SV=1

SEQ ID NO: 19467 - protein, 121 aa, Comamonas thiooxydans
  REGION 1..121: note = tr|A0A096DHH5|A0A096DHH5_9BURK 6-carboxy-5,6,7,8-tetrahydropterin synthase OS=Comamonas thiooxydans OX=363952 GN=Ga0061062_11043 PE=3 SV=1
MQFTVHQRFFFDAAHTLERAIETESSRRIHGHTYWAEVSVRGPRNPDNGMVIDLGHLRARLELLRDQLDHHFLDEVPGLGKPTLENLCLFIANALADLEPAPSRIRVWRDSIGDGCVLDLS

SEQ ID NO: 19468 - protein, 177 aa, unidentified
  source 1..177: note = Commensalibacter intestini
  REGION 1..177: note = tr|G6F1Y1|G6F1Y1_9PROT 6-pyruvoyl-tetrahydropterin synthase OS=Commensalibacter intestini A911 OX=1088868; GN = CIN_16270 PE=4 SV=1
MLELIFTRRFAMAHRLIHGSSEICATPHGHNEEVRVYLKPLEVKPLDGKQNVIVPFEKAKSTWHRFIDGSVDHAFQLAENDPLVSWFIEHEPQRIPKLLITPGDPTTELLACLFMSKLNCFLSAEQSGLYCDQIEILETPTNTVRFTGNPLDFIPNIRPPEQCWWRRADISISDLES

SEQ ID NO: 19469 - protein, 177 aa, unidentified; identical to SEQ ID NO: 19468
  source 1..177: note = Commensalibacter intestini
  REGION 1..177: note = tr|A0A251ZVS3|A0A251ZVS3_9PROT 6-pyruvoyl tetrahydropterin synthase OS=Commensalibacter intestini; OX = 479936 GN=HK18_07625 PE=4 SV=1

SEQ ID NO: 19470 - protein, 176 aa, unidentified
  source 1..176: note = Commensalibacter sp.
  REGION 1..176: note = tr|W7DZ12|W7DZ12_9PROT Uncharacterized protein; OS = Commensalibacter sp. MX01 OX=1208583 GN=COMX_08075 PE=4; SV = 1
MLELVFTRRFAMAHRLIHGSSEICATPHGHNEEVKVYLKSQNFKALDGKMNVVVPFQQAKTTWHRFIDQSVDHAFQLAENDPLVEWFKQHEPKRLPRLLITPGDPTTELLACLFMSKLNCFLSAEQSGLYCHQIEIMETPTNTVRFMGNPSEFIPNCRPSDQCWWNRADMSISEFS

SEQ ID NO: 19471 - protein, 177 aa, unidentified
  source 1..177: note = Commensalibacter sp.
  REGION 1..177: note = tr|A0A318MY95|A0A318MY95_9PROT 6-pyruvoyl tetrahydropterin synthase OS=Commensalibacter sp. ESL0284; OX = 2070537 GN=DK869_06650 PE=4 SV=1
MFDLVFTRRYSMGHRLIHGAGDICATPHGHNEEVSVYLKAHEAERLDGSANMVLPFYYAKKKWHQFVDGSIDHSFQLSEDDPLLPWFIKNEPKRVRHLVVTPGDPTTELMACLLMIKVNTILDAEKTGLYCFKIDIKETPTNTVSFSGNPFDFVPQSKNGQGHWWERPDMSISDLEI

SEQ ID NO: 19472 - protein, 150 aa, unidentified
  source 1..150: note = Confluentibacter sp.
  REGION 1..150: note = tr|A0A2N3HLR8|A0A2N3HLR8_9FLAO 6-carboxytetrahydropterin synthase QueD; OS = Confluentibacter sp. 3B OX=1909700 GN=CSW08_05600 PE=4; SV = 1
MSNIRITKQFSFETGHALYGYDGKCKNVHGHSYKLSVTVIGTPITDTTHVKFGMVIDFSDLKKIVKEEIVDVFDHATVFNKNTPHVELAKELKNRGHNVLLVNYQPTSEMMVIDFSNKISKRLPSHIKLHSLKLQETETSFAEWYASDNA

SEQ ID NO: 19473 - protein, 136 aa, unidentified
  source 1..136: note = Confluentibacter sp.
  REGION 1..136: note = tr|A0A2N3HL94|A0A2N3HL94_9FLAO 6-carboxy-5,6,7,8-tetrahydropterin synthase; OS = Confluentibacter sp. 3B OX=1909700 GN=CSW08_07135 PE=3; SV = 1
MNVTVSRKAHFNAAHRLYRKEWTDEKNSLVFGKCSNPNYHGHNYELIVSVTGEIDKETGYVIDIQELKDLIKVEVEDAFDHKNLNIEVPEFKDLNPTAEHIAVVIYNKIKPKLKPNLDLEITLYETPRNFVRYSGT

SEQ ID NO: 19474 - protein, 118 aa, unidentified
  source 1..118: note = Confluentimicrobium lipolyticum
  REGION 1..118: note = tr|A0A238KQX6|A0A238KQX6_9RHOB 6-carboxy-5,6,7,8-tetrahydropterin synthase; OS = Confluentimicrobium lipolyticum OX=1524263 GN=queD PE=3; SV = 1
MFRITKEFHFSASHQLCGLPDDHPCARLHGHNYIVEVELAAEALDENGFVIDYRELLPLKRYIDDELDHRHLNDVFGHDMVTSERLAKTLYDWCKSRWPETTAVRVSETPKTWAEYRP

SEQ ID NO: 19475 - protein, 122 aa, Congregibacter litoralis
  REGION 1..122: note = tr|A4A7S0|A4A7S0_9GAMM 6-carboxy-5,6,7,8-tetrahydropterin synthase; OS = Congregibacter litoralis KT71 OX=314285 GN=KT71_14134; PE = 3 SV=1
MEIFKDFHFEAAHRLPQVPPGHKCERLHGHSFQLRVYVEGEPGATSGWIMDFGDIKAACKPVIEQLDHYYLNDIEGLENPTSENLCRWIWDRVLPALPELSAIEIRETCTSGCIYRGNRSAV

SEQ ID NO: 19476 - protein, 165 aa, Congregibacter litoralis
  REGION 1..165: note = tr|A4ACK7|A4ACK7_9GAMM 6-pyruvoyl-tetrahydropterin synthase OS=Congregibacter litoralis KT71 OX=314285; GN = KT71_19188 PE=4 SV=1
MERLATLYIDKESHKFSAAHYTIFSATERERLHGHNFSVSAMIAAPMGDNGFAADYNVYKRRIKGLCDELDEYMVLPGHSPYQSVVEDGDNYRVSFNGEDMWFLRSDTLVLPIVNSTVEEFAHYLLRRMLEESAGEALAELEICVASGPGQKGSARWSAMDEGIA

SEQ ID NO: 19477 - protein, 140 aa, Coprobacillus sp.
  REGION 1..140: note = tr|G9QXV8|G9QXV8_9FIRM 6-carboxy-5,6,7,8-tetrahydropterin synthase; OS = Coprobacillus sp. 3_3_56FAA OX=665941; GN = HMPREF1021_00502 PE=3 SV=1
MYFLKTEQSFDSAHFLAGYHGKCANIHGHRWKVIATIKSEKLLEDPQNKGMVTDFGDLKKDLKIIADSFDHALIIETGSLSEKLYQALIDENFKIINLPFRPTAENLAKYIYEALSKNYLVDCLDVYETPNNCASYRGKL

SEQ ID NO: 19478 - protein, 138 aa, Coprobacillus sp.
  REGION 1..138: note = tr|H1AM46|H1AM46_9FIRM 6-carboxy-5,6,7,8-tetrahydropterin synthase; OS = Coprobacillus sp. 8_2_54BFAA OX=469597; GN = HMPREF0978_01994 PE=3 SV=1
MYFLKTEQSFDSAHFLAGYHGKCANIHGHRWKVIATIKSEKLLEDPQNKGMVTDFGDLKKDLKIIADSFDHALIIETGSLSEKLYQALIYENFKIINLPFRPTAENLAKYIYEALSKDYLVDCLEVYETPNNCASYRG

SEQ ID NO: 19479 - protein, 110 aa, unidentified
  source 1..110: note = Coprobacter fastidiosus
  REGION 1..110: note = tr|A0A495WJ39|A0A495WJ39_9BACT 6-carboxy-5,6,7,8-tetrahydropterin synthase OS=Coprobacter fastidiosus NSB1 OX=1349822 GN=BC742_0435 PE=3 SV=1
MYIVKKTLEISASHHLNLSYESKCSSLHGHNWIISIFCRAETLNQDGMVTDFSLIKKLIHEKLDHKNLNEILPFNPTAENIARWVCDQIPFCFRVEVQESEGNIAIYEKD

SEQ ID NO: 19480 - protein, 110 aa, unidentified
  source 1..110: note = Coprobacter secundus
  REGION 1..110: note = tr|A0A0B2J8S2|A0A0B2J8S2_9BACT 6-carboxy-5,6,7,8-tetrahydropterin synthase OS=Coprobacter secundus OX=1501392 GN=PU94_14125 PE=3 SV=1
MFTVKKTLEISASHSLKLSYESKCSQLHGHNWIITIYCRSKELNEDGMVIDFTLIKKKIQDKLDHKNLNEVLSFNSTAENLAYWICNQIPQCFKVEVQESEGNIAIYEKD

SEQ ID NO: 19481 - protein, 112 aa, unidentified
  source 1..112: note = Coprobacter sp.
  REGION 1..112: note = tr|A0A316SRQ4|A0A316SRQ4_9BACT 6-carboxy-5,6,7,8-tetrahydropterin synthase OS=Coprobacter sp. OX=1941478 GN=queD PE=3 SV=1
MYYIIKKFEISASHSLKLSYQSKCEQLHGHNWIIEVHARSEKLNRDGMVIDFGHVKEKIQSQLDHRNLNDIFPDMNTTAENLAKWICDQIPECYKVMIQESESNVAWYEKDQ

SEQ ID NO: 19482 - protein, 139 aa, Coprococcus catus; identical to SEQ ID NO: 18296
  REGION 1..139: note = tr|A0A3E2TAU8|A0A3E2TAU8_9FIRM 6-carboxy-5,6,7,8-tetrahydropterin synthase OS=Coprococcus catus OX=116085 GN=queD PE=3 SV=1

SEQ ID NO: 19483 - protein, 139 aa, Coprococcus catus
  REGION 1..139: note = tr|A0A3E2TRY5|A0A3E2TRY5_9FIRM 6-carboxytetrahydropterin synthase OS=Coprococcus catus; OX = 116085 GN=DW070_02545 PE=4 SV=1
MYYLKTEHSFDSAHFLAGYEGKCRNIHGHEWRVVIEICRPDLDEEGQTRDMMFDFGQLKKDVKREVDAMDHALIIEKGSLMPATMAALQAENFRIIEIPYRPTAERLAYYFYERLTACGYHVHRSTVYETPNNCASYEE

SEQ ID NO: 19484 - protein, 139 aa, Coprococcus comes; identical to SEQ ID NO: 18296
  REGION 1..139: note = tr|A0A3R6BDP0|A0A3R6BDP0_9FIRM 6-carboxy-5,6,7,8-tetrahydropterin synthase OS=Coprococcus comes OX=410072 GN=queD PE=3 SV=1

SEQ ID NO: 19485 - protein, 140 aa, Coprococcus comes
  REGION 1..140: note = tr|A0A3R6A9Q9|A0A3R6A9Q9_9FIRM 6-carboxy-5,6,7,8-tetrahydropterin synthase OS=Coprococcus comes OX=410072 GN=DWX03_12975 PE=3 SV=1
MYYLRTESSFDAAHFLWKYEGKCRNLHGHRWRVVAEIKSPDLKQEEQTRGMVVDFGDLKNDLRLLCDLFDHSLIYETGSLREETLLAFRKEMFHLEEVSFRPTAENFAAYFYTKLSDLGYEVHRVEVYETPNNCATYEGK

SEQ ID NO: 19486 - protein, 111 aa, Coprococcus eutactus
  REGION 1..111: note = tr|A0A3R5WI00|A0A3R5WI00_9FIRM 6-carboxy-5,6,7,8-tetrahydropterin synthase OS=Coprococcus eutactus OX=33043 GN=DWX94_14135 PE=3 SV=1
MAELAVERVIDSAHGRKIHGHSFKVNVTFAGTVENDMVSGIDFHDAIDKVNAVLDTIDKKYLNDIEGMGRATVENIAVYIIRHLKGIEGLYAVTVWEGLDRYAKIFANEVD

SEQ ID NO: 19487 - protein, 163 aa, Coprococcus eutactus
  REGION 1..163: note = tr|A0A412IRW2|A0A412IRW2_9FIRM Uncharacterized protein OS=Coprococcus eutactus OX=33043 GN=DWX94_07575; PE = 4 SV=1
MWHIKQGGGWLFNYYIYRSYFNARHSFNGDRENMHGHSFTLVTYIGMKDKSEDIPFFKLEAIVSAFVDQYRGKYLNELPEFQKCENTLETLGDHFYEELKRRLEKIGMELYQLDISENPLCVYQVSDRLLLPTMNMDTSNRNYQKIFDDILRLESMTGVNNSQ

SEQ ID NO: 19488 - protein, 160 aa, Coprococcus sp.
  REGION 1..160: note = tr|A0A374K2K6|A0A374K2K6_9FIRM 6-pyruvoyl tetrahydrobiopterin synthase OS=Coprococcus sp. OM06-34AC; OX = 2293095 GN=DXB91_00705 PE=4 SV=1
MRFRQYKFKFYLNARHGIYKNGVLGEVHPHTWEIVINVVKGRDETVKFHHLEHRVEEFLSRYQDKTLNEIAPFDMINPTLENMCEYFKDELTEILNRNGWIFLMMEMSESPSMSYVVSLIDDSYTEEMQTINSLADRILKEIKQSRDETIDRIYSDMYNK

SEQ ID NO: 19489 - protein, 145 aa, Coprococcus sp.
  REGION 1..145: note = tr|A0A374K6C0|A0A374K6C0_9FIRM 6-carboxy-5,6,7,8-tetrahydropterin synthase OS=Coprococcus sp. OM06-34AC OX=2293095 GN=queD PE=3 SV=1
MLIGGVMYKLKTKASFDSAHFLKDYDGKCSNIHGHRWTVEIEVGAETLESDTQNRGMVVDFSNLKKDLKEIADHFDHSLIMETGSLKQATEDALLAENLRIVKVDFRPTAENFAKYIYDEMAGRGYKVIEASVYETPNNVASYCE

SEQ ID NO: 19490 - protein, 127 aa, Coprothermobacter proteolyticus
  REGION 1..127: note = tr|B5Y6S0|B5Y6S0_COPPD 6-carboxy-5,6,7,8-tetrahydropterin synthase; OS = Coprothermobacter proteolyticus (strain ATCC 35245 / DSM 5265 / BT) OX=309798 GN=COPRO5265_0096PE=3 SV=1
MNVCVTKAFTFDAAHNLTNYKGKCEALHGHTYRLEVTVCGTPNELENGLLMDFGDLKDLVNKEVLSKLDHSYLNDHFEQPSTELVAMWVFETLKPHVEKLGLVLTSVKLFETATSWVEIKADASRGD

SEQ ID NO: 19491 - protein, 143 aa, Coraliomargarita akajimensis
  REGION 1..143: note = tr|D5EK68|D5EK68_CORAD 6-pyruvoyl tetrahydropterin synthase OS=Coraliomargarita akajimensis (strain DSM 45221 / IAM 15411 / JCM 23193 / KCTC 12865 / 04OKA010-24) OX= 583355 GN=Caka_1798 PE=4 SV=1
MLTCTKTYRDIPFAHRQHKHDGHCALIHGHNWAITLTFACSDADENGFVVDFGKLKYLKAWIDEHLDHACLLNEDDPEKDALLADYGHLFQVYILPNCSSEGLAVHLHGIFDPMVREQTNGRVWITAIEIEEDSKNSATYRPE

SEQ ID NO: 19492 - protein, 144 aa, Coraliomargarita sp.
  REGION 1..144: note = tr|A0A317ZNA3|A0A317ZNA3_9BACT 6-carboxytetrahydropterin synthase OS=Coraliomargarita sp. WN38 OX=2174842 GN=DDZ13_02245 PE=4 SV=1
MITCKKSYRDIPFAHRQHLHDGHCAFIHGHNWTITLTFACEALDTNGFVVDFGKLGYIKKWIAKHLDHACLFNENDPEREKLLKNYGNLFQAYVLPNCSCEGIAQHLYEVFNPMVQEATNGRAWITSVEVEEDSKNSAKYSAGE

SEQ ID NO: 19493 - protein, 147 aa, Coraliomargarita sp.
  REGION 1..147: note = tr|A0A424QV87|A0A424QV87_9BACT 6-carboxytetrahydropterin synthase OS=Coraliomargarita sp. TMED73 OX=1986604 GN=CBC33_009715 PE=4 SV=1
  VARIANT 63: note = Xaa can be any naturally occurring amino acid
  VARIANT 110: note = Xaa can be any naturally occurring amino acid
MLTCSKTYRDIPFAHRQHRHAGHCAFLHGHNWTLRFTFACTEPDENGFVIDFGKLKYIKEWIXENLDHACLFNQDDPEREALLSQHPDLFKPYILPDCSSEGLAHHLYEXINPMVQEATGGRVRVTIVEVEEDSKNAAMYSTGSLAE

SEQ ID NO: 19494 - protein, 293 aa, unidentified
  source 1..293: note = Corallincola sp.
  REGION 1..293: note = tr|A0A368NQ18|A0A368NQ18_9GAMM Uncharacterized protein OS=Corallincola sp. C4 OX=2282215 GN=DU002_00570; PE = 4 SV=1
MRLFVDGLTVIDSTFLCAQRGMLGESWIVDVELAGELNDEGMLFDFSHVKKTIKHALDATVDHKLIVPEQAAETIIVSSDNDILLSFKAAKSELVIQSPLSAFAILPLAQITDSAFARYLEVMLLKLLPDNVTGITVHLRHEAEGPAFYHYTHGLKKHDGNCQRIAHGHRSRIGIWLDGEKRADLESNWASRWQDIYLGSADDEVSVETLPFSAQFGLTDASFYGFQYSASQGNYYLAVSKSATEIVDCDTTVECLADYIARQLSCDYPEQLIKVRAYEGVEKGAICEISASS

SEQ ID NO: 19495 - protein, 127 aa, Corallococcus coralloides
  REGION 1..127: note = tr|H8MTT4|H8MTT4_CORCM 6-carboxy-5,6,7,8-tetrahydropterin synthase; OS = Corallococcus coralloides (strain ATCC 25202 / DSM 2259 / NBRC 100086 / M2) OX=1144275 GN=queDPE=3 SV=1
MKKTPLVTEISKEFTFEAAHRLPNVPEGHKCSRVHGHSYRIEITLRGPVHPQFGWIVDFAELNAAWQPLHAQLDHRLLNDVPGLENPTSELLAAWLFERVNVPGTTVARIRVAETCTSSCTVYAQEG

SEQ ID NO: 19496 - protein, 166 aa, Corallococcus coralloides
  REGION 1..166: note = tr|H8MTT2|H8MTT2_CORCM Folate biosynthesis protein; OS = Corallococcus coralloides (strain ATCC 25202 / DSM 2259 / NBRC 100086 / M2) OX=1144275 GN=COCOR_01408 PE=4 SV=1
MAPRTTTLELHKEEMKFSAGHFTIFSATHRENLHGHNFSVYVALTGEVSDDGLLSDYGPLKQAIIQRCKAWNETFFLPAHSKHLRLERDEKGNHVAHFNGEELRFLARDVTVLPVANVSLEELARVFGEELVGDGSAMARDHITGLVVKCASGPGQWASWEWKRDV

SEQ ID NO: 19497 - protein, 132 aa, Corallococcus exiguus
  REGION 1..132: note = tr|A0A5C5DZ62|A0A5C5DZ62_9DELT 6-carboxy-5,6,7,8-tetrahydropterin synthase; OS = Corallococcus exiguus OX=83462 GN=queD PE=3 SV=1
MEAVSVKKPTLVTEISKEFTFEAAHRLPNVPEGHKCSRVHGHSYRIEITLHGPVHPQFGWIVDFAELNAAWQPLHAQLDHRLLNDVPGLENPTSELLAAWLFERVNVPGTTVARIRVAETCTSSCTVYAAEG

SEQ ID NO: 19498 - protein, 166 aa, Corallococcus exiguus
  REGION 1..166: note = tr|A0A5C5DYX7|A0A5C5DYX7_9DELT Folate biosynthesis protein OS=Corallococcus exiguus OX=83462 GN=FH620_08430; PE = 4 SV=1
MAPRTTTLELHKEEMKFSAGHFTIFSATHRENLHGHNFSVYVALTGEVADDGLLSDYGPLKQAIINRCKSWNETFFLPSRSKHLRLERDEKGNHVAHFNGEELRFLARDVTVLPVANVSLEELARVFGEELVGDGSGMARDHITGLVVKCASGPGQWASWEWKRDV

SEQ ID NO: 19499 - protein, 127 aa, Corallococcus sp.
  REGION 1..127: note = tr|A0A3A8LE70|A0A3A8LE70_9DELT 6-carboxy-5,6,7,8-tetrahydropterin synthase; OS = Corallococcus sp. CA053C OX=2316732 GN=queD PE=3 SV=1
MKKIPLITEISKEYTFEAAHHLPHVEKGHKCSRVHGHSYRIEITLQGPIHPQLGWLVDFAELNAAWEPLNEQLDHRLLNDVPGLENPTSELLAAWIYERLDIPGARVSRLKVAETCMSSCTVFPAPG

SEQ ID NO: 19500 - protein, 165 aa, Corallococcus sp.
  REGION 1..165: note = tr|A0A3A8NPU0|A0A3A8NPU0_9DELT Folate biosynthesis protein OS=Corallococcus sp. CA040B OX=2316726; GN = D7X12_07655 PE=4 SV=1
MARTTTIELHKEEMKFSAGHFTIFSATHRENLHGHNFTVYVALTGEVGDDGLMADYGPLKQAVIARCKAWNETFFLPERSRHLRLERDANGNHRAYFNGEELHFLARDVTLLPAANVTLEELARVFGEELVGDGAGMARDHVTRLVVKCASGPGQWATWEWNGNG

SEQ ID NO: 19501 - protein, 139 aa, unidentified
  source 1..139: note = Coriobacteriaceae bacterium
  REGION 1..139: note = tr|A0A0A8B3U7|A0A0A8B3U7_9ACTN 6-carboxy-5,6,7,8-tetrahydropterin synthase; OS = Coriobacteriaceae bacterium 68-1-3 OX=1531429; GN = JI75_05255 PE=3 SV=1
MYELKTETAFDGAHFLTDYYGKCENLHGHRWRVVAYIGKEALETAGTHKDMVLDFSVFKRTVRAVAEELDHTFLVEEGSLRPETIACLESEGFDLTVLPFRTTAENLATYLFERIAASGLPATCVEVYETPNNCAIYRP

SEQ ID NO: 19502 - protein, 140 aa, unidentified
  source 1..140: note = Coriobacteriaceae bacterium
  REGION 1..140: note = tr|A0A143X4Z6|A0A143X4Z6_9ACTN 6-carboxy-5,6,7,8-tetrahydropterin synthase; OS = Coriobacteriaceae bacterium CHKCI002 OX=1780377; GN = BN3658_01203 PE=3 SV=1
MYGLKTEASFDSAHFLTDYYGKCENLHGHRWRMVVRIESTDLQAEGTMKDMVMDFGVFKRAVRALAEELDHTFLVEEGSLADATLAALEAEGFSLTILPFRTTAENLARYACERLTEQGLPVSQVDMYETPNNCAVYRAR

SEQ ID NO: 19503 - protein, 141 aa, unidentified
  source 1..141: note = Coriobacteriales bacterium
  REGION 1..141: note = tr|A0A437UUL8|A0A437UUL8_9ACTN 6-carboxytetrahydropterin synthase OS=Coriobacteriales bacterium OH1046 OX=2491116 GN=EII22_06755 PE=4 SV=1
MFGLKTEGAFDSAHFLTDYYGACENLHGHRWRVVAYLAQEDLQSEGAMRGMVLDFGVFKSKVRLLCSEFDHTFLVEEGSLKPATVEALEGEGFSLKMLPFRTTAENLARHFAERLIGDGLPVCQIDLYETPNNCASYYVGG

SEQ ID NO: 19504 - protein, 142 aa, unidentified
  source 1..142: note = Coriobacteriales bacterium
  REGION 1..142: note = tr|A0A133ZCF4|A0A133ZCF4_9ACTN 6-carboxy-5,6,7,8-tetrahydropterin synthase; OS = Coriobacteriales bacterium DNF00809 OX=1588753; GN = HMPREF3190_00711 PE=3 SV=1
MFELKTESAFDSAHFLTDYYGKCENLHGHRWRVVGYIAQEHLQSEGTHKDMVLDFCLFKKIFREEVARLDHTFLVEEGSLHNDTLECLKREGFKLTILPFRTTAENLAQYFYRALQEKKLPVSCIEVYETPNNCAIYRPKQG

SEQ ID NO: 19505 - protein, 139 aa, unidentified
  source 1..139: note = Coriobacteriia bacterium
  REGION 1..139: note = tr|A0A2V2ECH2|A0A2V2ECH2_9ACTN 6-carboxy-5,6,7,8-tetrahydropterin synthase; OS = Coriobacteriia bacterium OX=2052159 GN=DBX43_01170 PE=3; SV = 1
MYGLKTESSFDAAHFLTDYHGKCENLHGHRWRVVAYLEQEELQTQGTHKDMVIDFADFKGALRDLTEAFDHSFVVEEGSLAPDTLACLEREGFSLSVVPFRTTAENLARYFYGKLAEAGFPVSQVDVYETPNNCAIYRG

SEQ ID NO: 19506 - protein, 160 aa, unidentified
  source 1..160: note = Coriobacteriia bacterium
  REGION 1..160: note = tr|A0A316RUA5|A0A316RUA5_9ACTN 6-carboxytetrahydropterin synthase QueD OS=Coriobacteriia bacterium OX=2052159 GN=DBX94_06865 PE=4 SV=1
MSFGLKTEASFDAAHFLADYYGKCENLHGHRWRVVAYLEQDGLQQEGTMREMVLDFGVFKRALRELVAEYDHTFLVEKGTLKDSTVAALESEGFSLTIVPFRTTAENLARHFADELMARGLPCSQVDVYETPLNCATYRPDFRGSAGEGPLLSRPAAILR

SEQ ID NO: 19507 - protein, 143 aa, Corynebacterium striatum
  REGION 1..143: note = tr|A0A2H1AFW3|A0A2H1AFW3_CORST 6-pyruvoyl tetrahydrobiopterin synthase OS=Corynebacterium striatum; OX = 43770 GN=AZH47_01955 PE=4 SV=1
MTNFDQVQPPEQFKYRSNAVLIKNYYEFTCDNRIYFSQTAHKDLANQHYKFDIEILSEIDDTGLALDFNEVDKIYNQKIATYLDGQLVNETLPSMNTTAENIAFWIWEQFEQHLPEQNTLQKLEFFENATQGLVLTREFMDEK

SEQ ID NO: 19508 - protein, 141 aa, Corynebacterium striatum
  REGION 1..141: note = tr|A0A2H1ADM1|A0A2H1ADM1_CORST 6-carboxy-5,6,7,8-tetrahydropterin synthase; OS = Corynebacterium striatum OX=43770 GN=AZH47_11510 PE=3; SV = 1
MFQQNYPSVNHNYQFELNKDFNFSAAHYIPSEDAGKCMRTHGHTYFVNLTIGGDTVDHNGFLVNFSELKQLVHGQFDHQLLNELPQFEGKSPSTEIVAQTIYEMVQSSLNQRPNTPQCLQVYVRETPTSYVIYRPKEPNHE

SEQ ID NO: 19509 - protein, 120 aa, Cosenzaea myxofaciens
  REGION 1..120: note = tr|A0A198GC03|A0A198GC03_9GAMM 6-carboxy-5,6,7,8-tetrahydropterin synthase OS=Cosenzaea myxofaciens ATCC 19692 OX=1354337 GN=M983_1071 PE=3 SV=1
MTTTIFKEFQFEAAHQLPHVPKGHKCGRLHGHSFLVRLELTGDVDTHSGWLIDFADVKAAFKPTLDRLDHYYLNDIEGLENPTSEVLAKWIWSQVKPSLPLLSAVIVKETCTAGSIYRGE

SEQ ID NO: 19510 - protein, 132 aa, Couchioplanes caeruleus
  REGION 1..132: note = tr|A0A3N1GBW1|A0A3N1GBW1_9ACTN 6-pyruvoyl-tetrahydropterin synthase OS=Couchioplanes caeruleus OX=56438 GN=EDD30_0433 PE=4 SV=1
MFSVTVRDHIMIAHSFSGEVFGPAQKLHGATFVVDATFKRPELDADNIVVDIGLASQELHAICAGLSYRNLDDEPDFTGVNTSTEFLAKVIADRLAGKAAAGELGAGASGLTGIAVTLHESHIAWASYERDL

SEQ ID NO: 19511 - protein, 132 aa, Couchioplanes caeruleus; identical to SEQ ID NO: 19510
  REGION 1..132: note = tr|A0A1K0G2I9|A0A1K0G2I9_9ACTN Uncharacterized protein OS=Couchioplanes caeruleus subsp. caeruleus; OX = 56427 GN=BG844_25865 PE=4 SV=1

SEQ ID NO: 19512 - protein, 184 aa, Coxiella burnetii
  REGION 1..184: note = tr|A9KBA1|A9KBA1_COXBN Queuosine biosynthesis protein OS=Coxiella burnetii (strain Dugway 5J108-111); OX = 434922 GN=queD PE=4 SV=1
MKQYISRRVEIDLGHRVMDERFKCYSIHGHRASVHMTFEFSNQSEIGYCIDFKEIKRVGAQWIDDKFDHGFAANPKDKFVIEACQKTNSKYYLMSLNGKDNYCNPTAENISREIFLALEILFEDYPGLKIHRLRFYETPNCWIDTEVSSILPAERENFLSVRGEEVRQYAKEKGRLEYDIRKVK

SEQ ID NO: 19513 - protein, 184 aa, Coxiella burnetii; identical to SEQ ID NO: 19512
  REGION 1..184: note = tr|Q83AK2|Q83AK2_COXBU Queuosine biosynthesis protein OS=Coxiella burnetii (strain RSA 493 / Nine Mile phase I) OX=227377 GN=queD PE=4 SV=1

SEQ ID NO: 19514 - protein, 132 aa, Coxiella sp.
  REGION 1..132: note = tr|A0A0S7XW01|A0A0S7XW01_9COXI Uncharacterized protein OS=Coxiella sp. DG_40 OX=1703354 GN=AMJ43_07655; PE = 4 SV=1
MVYFSEKFGFAAMHKLWNDELSESRNFEVFGKCANPAGHGHNYVVEVTIKKPTGIETFRIGEFERIVDDELIKTLDHKNLNAEVAAFGKINPTVENIAFFAWNKLVGKFGEAVLHCVTVWETDKTYCSYYGR

SEQ ID NO: 19515 - protein, 144 aa, Coxiella sp.
  REGION 1..144: note = tr|A0A0S7Y0Q6|A0A0S7Y0Q6_9COXI Uncharacterized protein OS=Coxiella sp. DG_40 OX=1703354 GN=AMJ43_01910; PE = 4 SV=1
MYKIRVKLKSFSAAHRLRKYHTDRCSNLHGHNYDISVVLGTKRLNEFGFVMDFRRVKELCNNWVEKHWDHVVILDENDSTLLEFLKREQQKFFLLPNEYPTSAENLAKYAFIQLAEIIDREDKQIKLLQVEISETKNCTAIYAE

SEQ ID NO: 19516 - protein, 133 aa, unidentified
  source 1..133: note = Coxiellaceae bacterium
  REGION 1..133: note = tr|A0A2E9ZBC2|A0A2E9ZBC2_9COXI 6-carboxy-5,6,7,8-tetrahydropterin synthase; OS = Coxiellaceae bacterium OX=2026727 GN=CL816_08100 PE=3; SV = 1
MFQVLKQITFCYGHRLIRYTGKCQHLHGHDAMAEVVIERDGLDDRGMVVDFSDIKADVTSWIDQHLDHKMLLCKDDPIVEQLKAFGEPLFLLDGNPTAENIAKVIFDQTARMGHNVVEVRLWESPTSCAVYRR

SEQ ID NO: 19517 - protein, 227 aa, unidentified
  source 1..227: note = Coxiellaceae bacterium
  REGION 1..227: note = tr|A0A2E9Z7Q2|A0A2E9Z7Q2_9COXI Uncharacterized protein OS=Coxiellaceae bacterium OX=2026727; GN = CL816_01585 PE=4 SV=1
MSYQSTKIIELGSCAFRQPQADSHCKFIHGYRLKAKFWFEASHLDQNNWVVDFGGLKELKKLMQDQFDHTTCIARTDPKVMLFKQMRDAGVCDLRIMDGVGIEKFAEWCHTTADNFVGVLTEMRCRCVKVEVFEHENNSAIFETRDSSTSGAQYMNDKADEIERSMQNNEPVVDHHFIKDEPTEKLVKPVVDNVTQPPFAKKAKQGLWPEKQKNTWLDKSGKSTWGF

SEQ ID NO: 19518 - protein, 143 aa, unidentified
  source 1..143: note = Crassaminicella sp.
  REGION 1..143: note = tr|A0A5C0SJ28|A0A5C0SJ28_9CLOT 6-carboxy-5,6,7,8-tetrahydropterin synthase; OS = Crassaminicella sp. SY095 OX=2599308 GN=queD PE=3 SV=1
MYLLKAEHSFDSAHFLANYNGKCRNIHGHRWKVEIEVKSESLIRGGQLDGMVVDFTDLKRDVKEMVDFYDHALIIQENTMREETLKHLMEDGFKIIQVKFRPTAENFAAFFFHYMEEKGYDVKRASVYETPTNCAAYEKSEGK

SEQ ID NO: 19519 - protein, 324 aa, unidentified
  source 1..324: note = Crenobacter cavernae
  REGION 1..324: note = tr|A0A4Q2JDY6|A0A4Q2JDY6_9NEIS 6-pyruvoyl tetrahydrobiopterin synthase OS=Crenobacter cavernae; OX = 2290923 GN=EBB06_06590 PE=4 SV=1
MRTTHLATCGFEAARTLPTAGKHGHSFFVTAESRVADLAELRERLTYACAPLDYRDLDTMIASPSDATLAAYLADALGQPCALNLRSAPDRGVDLDEDGALRHWLSTGFEAAHQLPNVEPGHQCGRLHGHGFRVRLVASEDHATIAAAWQPQFERLQHRYLNDIAGLENPTSEVLADWLWQGLAEPLPGLSKVEVFETHTAGSRRDASGLTIWKEQRFEAAVPFDAAGHYTGHSYLVRLYLAGEMDKVSGWLRDFGEVKSLFKPLYKRLDHNPLDQLRGIERTDCAGIAAWIAAKLTPLLPELSAIDLFENAHEGARLSLRDAR

SEQ ID NO: 19520 - protein, 324 aa, unidentified
  source 1..324: note = Crenobacter cavernae
  REGION 1..324: note = tr|A0A345Y7C9|A0A345Y7C9_9NEIS 6-pyruvoyl tetrahydrobiopterin synthase OS=Crenobacter cavernae; OX = 2290923 GN=DWG20_10480 PE=4 SV=1
MRTTHLATCGFEAARSLSATGRHGHSFFVTAESRVADLAELRERLTYACAPLDYRDLDTMIASPSDATLAAYLADALGQPCALNLRSAPDRGVELDEDGALRHWLSTGFEAAHQLPNVEPGHQCGRLHGHGFRVRLVASEDHATIAAAWQPQFERLQHRYLNDIAGLENPTSEVLADWLWQGLAEPLPGLAKVEVFETHTAGSRRDASGLTIWKEQRFEAAVSIDQDGNYTGHSYLVRLYLAGEMDQVSGWLRDFGEVKSLFKPLYKRLDHNPLDQLRGIERTDCAGIAAWIAAKLTPLLPELSAIDLFENAHEGARLSLRDPR

SEQ ID NO: 19521 - protein, 327 aa, unidentified
  source 1..327: note = Crenobacter luteus
  REGION 1..327: note = tr|A0A163D4Q4|A0A163D4Q4_9NEIS 6-pyruvoyl tetrahydrobiopterin synthase OS=Crenobacter luteus; OX = 1452487 GN=AVW16_07230 PE=4 SV=1
MRTLHLATRGFEAARTLPGVGRHGHSFFVTAESRVADHAELRAHLTEACAPLHYRDLSAMLADAGDAALARHLAATLSELGQPCALTLRSAPERGVELAEDGSLCHWFATGFEAAHQLPHVPPGHQCGRLHGHGFKVRLVAAEDVGDIVDAWQPQFDVLQHKYLNEIAGLENPTSEVLADWLWQRLAEPLPGLCKVEVFETHTAGSRRDARGLTIWKEQRFEAAVPFDAAGNYTGHSYLVRLYLSGAIDEFSGWLRDFGEVKSLFKPLYKQLDHNPLDALPGVARTDCAGIAAWIAARLSPLLPELSGVDLFENPHEGARLILRDAR

SEQ ID NO: 19522 - protein, 324 aa, unidentified
  source 1..324: note = Crenobacter sp.
  REGION 1..324: note = tr|A0A4T0V5W7|A0A4T0V5W7_9NEIS 6-pyruvoyl tetrahydrobiopterin synthase OS=Crenobacter sp. GY 70310; OX = 2563443 GN=E5K04_01245 PE=4 SV=1
MTVLSCSGAGFDAARTLARVRHGHGFFAQAISPQPLEMLAGELAAACASLTLCDLDPLFASPDDLTLARHLASCLSAPAELALRSAPELGVRRLAGGDEHVWFDTRFEAAHQLPNVPAGHPCGRLHGHGFGVRIEADAARATHASLAAAWQPLAARLEHRLLNEIAGLANPTSEVLAAWLFAELDVDGLVAVEVYETASAGSRFDGGRWTIWKTLRFEAARAFDAAGRYTGHSYRLRLRLAGDALDAELGWLRDFGDVKRAFAPLYDALDHHLLDTLPGLAATDCASLASYIGERFAMPALAGVDVLQNGHDGALWRKEAACTR

SEQ ID NO: 19523 - protein, 134 aa, unidentified
  source 1..134: note = Crenotalea thermophila
  REGION 1..134: note = tr|A0A1I7N4J1|A0A1I7N4J1_9BACT 6-carboxy-5,6,7,8-tetrahydropterin synthase OS=Crenotalea thermophila OX=1393122 GN=SAMN05660895_0581 PE=3 SV=1
MYITRRVHFNAAHKLYNPAWSKEKNEEVFGKCANENWHGHNYVLYVTVKGEIDPETGYVTDAKALHELIQRKILDQVDHRNLNLDVPFMKGKICSTENFAKAIWEQLAPEIRQGKLHCVKLYETENIYVEYFGD

SEQ ID NO: 19524 - protein, 151 aa, unidentified
  source 1..151: note = Crenotalea thermophila
  REGION 1..151: note = tr|A0A1I7N158|A0A1I7N158_9BACT 6-pyruvoyltetrahydropterin/6-carboxytetrahydropterin synthase OS=Crenotalea thermophila OX=1393122; GN = SAMN05660895_0320 PE=4 SV=1
MNRVRVTRVFHFEAAHALYGYDGKCRHIHGHGYELHVTLMGEPLQDPSHPKQGMVMDFGDIKQCIQQHIIEQFDHALLLCKHTPFIELADALQQHTDRIVWLDYTPTCENLVIDFARRIQSVLPAHVQLHHLTLYETPSSYASWYAEDQPA

SEQ ID NO: 19525 - protein, 134 aa, Crenothrix polyspora
  REGION 1..134: note = tr|A0A1R4H6B5|A0A1R4H6B5_9GAMM 6-carboxy-5,6,7,8-tetrahydropterin synthase OS=Crenothrix polyspora OX=360316 GN=CRENPOLYSF2_240003 PE=3 SV=1
MFTITKEVYFCYGHRLMNHSGKCRHLHGHSVKAAISVAQDQLNDQGMVCDFADIKQCVEGYINEYLDHNFLLHKNDPIVPVLIENKERFLALDEHPTAEVISKMIYQYLKKSGFNVVEVVLWETASAYASYKES

SEQ ID NO: 19526 - protein, 134 aa, Crenothrix polyspora
  REGION 1..134: note = tr|A0A1R4HJZ3|A0A1R4HJZ3_9GAMM 6-carboxy-5,6,7,8-tetrahydropterin synthase OS=Crenothrix polyspora OX=360316 GN=CRENPOLYSF1_890021 PE=3 SV=1
MFIITKEVYFCYGHRLMNHAGKCRNLHGHSVKAAISIASEQLNDHAMVCDFSEIKQCVESYIDEYLDHNFLLHKDDPIMPVLHANNERFLALDEHPTAEVISKMIYQHIKKSGFNVTQVTLWETASAYACYQEN

SEQ ID NO: 19527 - protein, 134 aa, Crenothrix sp.
  REGION 1..134: note = tr|A0A1Y2ZZT3|A0A1Y2ZZT3_9GAMM 6-carboxy-5,6,7,8-tetrahydropterin synthase OS=Crenothrix sp. D3 OX=1880899 GN=BCS42_03660 PE=3 SV=1
MFTITKEVYFCYGHRLMNHAGKCRHLHGHSVKAAISIQQETLNDQGMVCDFSDIRDCVTAYVDEQLDHNFLLHKDDPIIPMLIANNERFMALNEHPTAEVLSKMIYQHLKQAGFNVAEVALWETASAYACYRED

SEQ ID NO: 19528 - protein, 122 aa, unidentified
  source 1..122: note = Criblamydia sequanensis
  REGION 1..122: note = tr|A0A090D135|A0A090D135_9BACT 6-carboxy-5,6,7,8-tetrahydropterin synthase OS=Criblamydia sequanensis CRIB-18 OX=1437425 GN=queD PE=3 SV=1
MFELEKSFRFEAGHSLPQSNSKCRVPHGHSFLLVVKIRAEKLQEEGQERNMVVDFNVISSVVRPLINEYFDHCWLNDTLQTDAPTVEFIARWIYNRLKPELPDLYSITLHETDTQKVTFYES

SEQ ID NO: 19529 - protein, 141 aa, unidentified
  source 1..141: note = Cricetibacter osteomyelitidis
  REGION 1..141: note = tr|A0A4R2TFP4|A0A4R2TFP4_9PAST 6-carboxy-5,6,7,8-tetrahydropterin synthase; OS = Cricetibacter osteomyelitidis OX=1521931 GN=EDC44_11733; PE = 3 SV=1
MFKVSKEFSFDMAHILDGHDGKCQNLHGHTYKLQVEISGELYPNGPKKGMVIDFSDLKAIVQQFILDPMDHAFIYDQTSERESKIATLLQELKSKTFALDKRTTAEEMARFIFNRLKNEQNLPVSAIRLWETPTSFCEYSE

SEQ ID NO: 19530 - protein, 290 aa, unidentified
  source 1..290: note = Crinalium epipsammum
  REGION 1..290: note = tr|K9VX27|K9VX27_9CYAN Uncharacterized protein; OS = Crinalium epipsammum PCC 9333 OX=1173022; GN = Cri9333_1778 PE=4 SV=1
MRCTINRRAQFSASHRYWLPELSEADNIQRFGLCTQTHGHGHNYVLYISLEGEIDEYGMVQNLSDVKQVIKREVTSQLDYSFLNEVWSEFQETLPTTENIAKVIWQRLAPHLPLVKIQLFEHPELWADYLGNDMEAYLSIGTHFSAAHRLALPTLSYEENCQIYGKCARPNGHGHNYHLEVTVKGEVDSRTGMIVDLVALQKVVEDHVVEPFDHTFLNKDIPYFAEVVPTAENIAIHIGQLLEQPVRELGAELYKVKLIESPNNSCEVLCGKSTLNSVTAQSSEQVLLSV

SEQ ID NO: 19531 - protein, 129 aa, unidentified
  source 1..129: note = Crinalium epipsammum
  REGION 1..129: note = tr|K9VZ82|K9VZ82_9CYAN 6-carboxy-5,6,7,8-tetrahydropterin synthase OS=Crinalium epipsammum PCC 9333 OX=1173022 GN=Cri9333_1974 PE=3 SV=1
MPRWKLVTEFSFDSAHYIKDYDGPCGRMHGHTYKVKVEATSGQLHSSQYVPHKVMVADFRTLRWAKQDGTKGGLDHCVLNEVLPEGYETTAEMIAKYIYDETKKRVPEGVQLKVAVSETPNSWVEYEDD

SEQ ID NO: 19532 - protein, 150 aa, Croceibacter atlanticus
  REGION 1..150: note = tr|A3U5Z0|A3U5Z0_CROAH 6-pyruvoyl tetrahydrobiopterin synthase OS=Croceibacter atlanticus (strain ATCC BAA-628 / HTCC2559 / KCTC 12090) OX=216432; GN = CA2559_02840 PE= 4 SV=1
MSHIRITKQFSFETGHALYGYDGKCKNVHGHSYKLSVTVIGTPISDTSHVKFGMVIDFGDLKKIVKEEIVDVYDHATVFNKNTPHVDLAKELSNRGHNVLLVDYQPTSEMMVTDFAEKIKTRLPEHISLHSLKLQETETSFAEWYASDNM

SEQ ID NO: 19533 - protein, 136 aa, Croceibacter atlanticus
  REGION 1..136: note = tr|A3UB99|A3UB99_CROAH 6-pyruvoyltetrahydropterin synthase OS=Croceibacter atlanticus (strain ATCC BAA-628 / HTCC2559 / KCTC 12090) OX=216432 GN=CA2559_13633 PE=4 SV =1
MKLTVHRKAHFNAAHRLFRKDWSDKKNNEVFGKCSNPNYHGHNYELIVSVTGNVDPETGFVIDLGQLKDLIYKEIEVPFDHKNLNVEVEEFRDLIPTTEHISYVIYQKLRKHIDSSKELEITLYETPRNFVTYSGS

SEQ ID NO: 19534 - protein, 136 aa, Croceitalea dokdonensis
  REGION 1..136: note = tr|A0A0P7A744|A0A0P7A744_9FLAO 6-carboxy-5,6,7,8-tetrahydropterin synthase OS=Croceitalea dokdonensis DOKDO 023 OX=1300341 GN=I595_1004 PE=3 SV=1
MIATICRKAHFNAAHRLHNPNWSDEKNLHVFGKCNSPHYHGHNFDLEVRIKGEVDPDTGFVMDLAVLGKLIKEEVELRFDHKNLNEDCPEFKDILPSTEYFVKIIYDILKPKLDKAQQLHITLHETQKNSAEYGDW

SEQ ID NO: 19535 - protein, 135 aa, Croceitalea dokdonensis
  REGION 1..135: note = tr|A0A0P7A5D4|A0A0P7A5D4_9FLAO 6-carboxy-5,6,7,8-tetrahydropterin synthase OS=Croceitalea dokdonensis DOKDO 023 OX=1300341 GN=I595_2276 PE=3 SV=1
MRVKVSRKAHFNAAHRLYRPDWSFEKNNEVFGKCNNPRFHGHNYDLIVSVTGEIDEVTGYVMDMKVLKDLIKEEVEEAFDHKNLNMDVPDFKNLNPTAENIAVVIYDKLRKHIDADKDIEVVLYETPRNFVTYSG

SEQ ID NO: 19536 - protein, 135 aa, unidentified
  source 1..135: note = Croceivirga radicis
  REGION 1..135: note = tr|A0A1V6LNW4|A0A1V6LNW4_9FLAO 6-carboxy-5,6,7,8-tetrahydropterin synthase OS=Croceivirga radicis OX=1929488 GN=BUL40_14540 PE=3 SV=1
MRVKVSRKEQFNAAHRLFRPDWSSQKNQETFGKCNNPSFHGHNYDLIVSVTGEIDPETGYVMDMKVLKDLIKKEVTEYMDHKNLNLDVPDFKDLNPTAENIAVVIFNRIRPHLAPDKELEIQLFETPRNFVTYSG

SEQ ID NO: 19537 - protein, 136 aa, unidentified
  source 1..136: note = Croceivirga radicis
  REGION 1..136: note = tr|A0A1V6LMZ7|A0A1V6LMZ7_9FLAO 6-carboxy-5,6,7,8-tetrahydropterin synthase OS=Croceivirga radicis OX=1929488 GN=BUL40_15110 PE=3 SV=1
MIATICRKAHFNAAHRLHNPKWSDEKNIEVFGKCNSPHYHGHNFDLEVRIRGEVNPDTGFVMDLAVLGSLIKNEIEERFDHKNLNVDCPEFAEILPSTENFVKVIYDILKPKLAGDPLLHITLHETTKNSAEYGDW

SEQ ID NO: 19538 - protein, 134 aa, unidentified
  source 1..134: note = Crocinitomicaceae bacterium
  REGION 1..134: note = tr|A0A2D9D5H2|A0A2D9D5H2_9FLAO 6-carboxy-5,6,7,8-tetrahydropterin synthase; OS = Crocinitomicaceae bacterium OX=2026728 GN=CL824_01625; PE = 3 SV=1
MKVCRIAYFNSAHRLYNPEWSDEKNNEVFGKCNNPNYHGHNYKIEVWIEGSVNQETGYLIDLKILKQIIKDEITDAFDHKNLNLDCPEFKNLIPTLENICIVCWNKLSKALDSSLNLSVKIWETENNLAEYSGE

SEQ ID NO: 19539 - protein, 134 aa, unidentified
  source 1..134: note = Crocinitomicaceae bacterium
  REGION 1..134: note = tr|A0A358Y314|A0A358Y314_9FLAO 6-carboxy-5,6,7,8-tetrahydropterin synthase; OS = Crocinitomicaceae bacterium OX=2026728 GN=DEF82_00145; PE = 3 SV=1
MKVCRRATFNSAHRLYRKDWTDDKNKAVFGKCSNENFHGHNYTLEVWISGNVNQETGYLIDLKIVKDLIKEEISDRFDHKNLNLDCVEFKDLNPTAENIAIVCWNLLRSKLASEYGLVVKLWETENNSVEYDGI

SEQ ID NO: 19540 - protein, 137 aa, Crocinitomix sp.
  REGION 1..137: note = tr|A0A1J5LNJ0|A0A1J5LNJ0_9FLAO 6-carboxy-5,6,7,8-tetrahydropterin synthase; OS = Crocinitomix sp. MedPE-SWsnd OX=1860084 GN=BM555_03965; PE = 3 SV=1
MRVSVCRKAHFNAAHRLHNKAWTAEKNEQVFGKCNNPNYHGHNYKLEVWVSGEIDEETGYLIDLKILRDIIEKEVEDRFDHKNLNLDTEEFANLNPTAENIAVVIWGLIREKLNDNLELNIKLFETDRNFVQYPAIQ

SEQ ID NO: 19541 - protein, 149 aa, Crocinitomix sp.
  REGION 1..149: note = tr|A0A2W1NP84|A0A2W1NP84_9FLAO 6-carboxytetrahydropterin synthase QueD OS=Crocinitomix sp. SM1701 OX=2219161 GN=DNU06_12825 PE=4 SV=1
MNLRVTKIFDFETAHVLWGYDGKCKNIHGHSYKLTVTISGPLVNDLKEVKNGMIIDFSDLKKIVKSNVVEPFDHCLLVNGQTPHKKYTEVENGFSKIMLCDYQPTAENMLIDMVQRISTNLPDHVQLKYAKLQETENSFVEWLAEENGH

SEQ ID NO: 19542 - protein, 291 aa, unidentified
  source 1..291: note = Crocosphaera chwakensis
  REGION 1..291: note = tr|A3IUZ2|A3IUZ2_9CHRO Uncharacterized protein; OS = Crocosphaera chwakensis CCY0110 OX=391612; GN = CY0110_23336 PE=4 SV=1
MQCIINRRAQFSASHRYWLPEWDEAKNKQVFGACSRFPGHGHNYVLFVSLWGEIDQYGMVENLSTVKQVIKQEVTSQLDYSYLNDIWEDFQTTLPTTENLARVIWQRLAPHLPIVKIQLFEHPQLWAEYQGNAMKATLTIQTHFSAAHRLARPDLSLEENTKIYGKCARTHGHGHNYHLEVSVSGEIDPHTGMIVDLGELQTIVDDYVVEPFDHNFLNKDVPYFAEVVPTAENIALYIAQLLEQPIQKLGAQLEKVKLIESPNNSCEIYCGTSAESLNLPSQQAPQLVTLH

SEQ ID NO: 19543 - protein, 130 aa, unidentified
  source 1..130: note = Crocosphaera chwakensis
  REGION 1..130: note = tr|A3ISU0|A3ISU0_9CHRO 6-carboxy-5,6,7,8-tetrahydropterin synthase; OS = Crocosphaera chwakensis CCY0110 OX=391612; GN = CY0110_26822 PE=3 SV=1
MMNPTDQWTIYKEFRFEAAHRLPYHQGKCSRLHGHSWVGRVYVSCDRLQETGSQQGMVMDFGEISDYVDPLVENFLDHYYLNETTGLESPTSEAIAQWIFEKLESAQLPGLCMVEIRETCTSGAQYRRSV

SEQ ID NO: 19544 - protein, 291 aa, unidentified
  source 1..291: note = Crocosphaera subtropica
  REGION 1..291: note = tr|B1WP62|B1WP62_CROS5 6-pyruvoyl tetrahydropterin synthase OS=Crocosphaera subtropica (strain ATCC 51142 / BH68) OX=43989 GN=ptpS PE=4 SV=1
MQCVINRRAQFSASHRYWIPEWDEAKNKQVFGACSHFPGHGHNYVLFVSLWGEIDQYGMVENLSTVKQVIKGEVTSQLDYAYLNDVWEEFQTTLPTTENLARVIWQRLADHLPIVKIQLFEHPQLWAEYQGNAMKATLTIQTHFSAAHRLALPHLSLEENTEIYGKCARTHGHGHNYHLEVSVSGEIDPRTGMIVDLGKLQTIVEDYVVEPFDHNFLNKDIPYFAEVVPTAENIALYIAQLLEKPIKDLGVQLEKVKLIESPNNSCEIYCGASAESFKTPSQQAPQLVTLH

SEQ ID NO: 19545 - protein, 130 aa, unidentified
  source 1..130: note = Crocosphaera subtropica
  REGION 1..130: note = tr|B1WNN6|B1WNN6_CROS5 6-carboxy-5,6,7,8-tetrahydropterin synthase; OS = Crocosphaera subtropica (strain ATCC 51142 / BH68); OX = 43989 GN=cce_2115 PE=3 SV=1
MNPPHQWTIYKEFRFEAAHRLPHHQGKCSRLHGHSWVGRVYVSRDRLHETGPQQGMVMDFGEISAYLDPLVENFLDHYYLNETTGLESPTSEAIAQWIFEKLEAAKLPGLCMVEIRETCTSGAQYRRSNE

SEQ ID NO: 19546 - protein, 291 aa, unidentified
  source 1..291: note = Crocosphaera watsonii
  REGION 1..291: note = tr|T2ILC4|T2ILC4_CROWT 6-pyruvoyl tetrahydrobiopterin synthase OS=Crocosphaera watsonii WH 8502 OX=423474 GN=CWATWH8502_4946 PE=4 SV=1
MQCVINRRAQFSANHRYWLPEWDESKNQQAFGLCSRFPGHGHNYVLFVSLLGEIDQYGMVENLSTVKQVIKREVTSQLDYAYLNDVWEEFQTTLPTTENIARVIWQRLKDHLPIVKIQLFEHPQLWAEYQGDAMKATLNIQTHFSAAHRLARPDLSLEENTKIYGKCARTHGHGHNYHLEVSVSGDIDPRTGMLVDLVALQNIVNDYVVEPFDHNFLNKDVPYFAEVVPTAENIALYIAQLLQQPIRELGAQLEKVKLIESPNNSCEIYCGSSTESLNILSQQAPQLMALH

SEQ ID NO: 19547 - protein, 291 aa, unidentified
  source 1..291: note = Crocosphaera watsonii
  REGION 1..291: note = tr|T2IYK6|T2IYK6_CROWT 6-pyruvoyl tetrahydrobiopterin synthase OS=Crocosphaera watsonii WH 0005 OX=423472 GN=CWATWH0005_1873 PE=4 SV=1
MQCVINRRAQFSASHRYWLPEWDESKNQQAFGLCSRFPGHGHNYVLFVSLLGEIDQYGMVENLSTVKQVIKREVTSQLDYAYLNDVWEEFQTTLPTTENIARVIWQRLKDHLPIVKIQLFEHPQLWAEYQGDAMKATLNIQTHFSAAHRLARPDLSLEENTKIYGKCARTHGHGHNYHLEVSVSGDIDPRTGMLVDLVALQNIVNDYVVEPFDHNFLNKDVPYFAEVVPTAENIALYIAQLLQQPIRELGAQLEKVKLIESPNNSCEIYCGSSAESLNILSQQAPQLMALH

SEQ ID NO: 19548 - protein, 86 aa, Cronobacter condimenti
  REGION 1..86: note = tr|K8A908|K8A908_9ENTR Queuosine biosynthesis QueD, PTPS-I OS=Cronobacter condimenti 1330 OX=1073999; GN = BN137_85 PE=4 SV=1
MVRLEITGEVDPHTGWIIDFAELKAAFKPIYDSLDHYYLNDIPGLENPTSEVLARWIWDQMKPRLPLLSAVMIKETCTAGCVYRGE

SEQ ID NO: 19549 - protein, 120 aa, Cronobacter dublinensis
  REGION 1..120: note = tr|A0A0K2P5B1|A0A0K2P5B1_9ENTR 6-carboxy-5,6,7,8-tetrahydropterin synthase OS=Cronobacter dublinensis subsp. dublinensis LMG 23823 OX=1159554; GN = AFK67_16475 PE=3 SV= 1
MPTTLFKDFIFEAAHRLPHVPEGHKCGRLHGHSFMVRLEITGEVDPHTGWIIDFAELKAAFKPIYDSLDHYYLNDIPGLENPTSEVLARWIWDQMKPRMPLLSAVMIKETCTAGCVYRGE

SEQ ID NO: 19550 - protein, 73 aa, Cronobacter dublinensis
  REGION 1..73: note = tr|K8ASL8|K8ASL8_9ENTR Queuosine biosynthesis QueD, PTPS-I OS=Cronobacter dublinensis 1210 OX=1208656; GN = BN134_4343 PE=4 SV=1
MVRLEITGEVDPHTGWIIDFAELKAAFKPIYDSLDHYYLNDIPGLENPTSESAGALDLGSDEAPYAAVERGDD

SEQ ID NO: 19551 - protein, 86 aa, Cronobacter malonaticus
  REGION 1..86: note = tr|V5TXC1|V5TXC1_9ENTR Uncharacterized protein; OS = Cronobacter malonaticus OX=413503 GN=P262_01171 PE=4; SV = 1
MVRLEVTGEVDPHTGWIIDFAELKAAFKPIYDSLDHYYLNDIPGLENPTSEVLARWIWDQMKPRLPLLSAVMIKETCTAGCVYRGE

SEQ ID NO: 19552 - protein, 120 aa, Cronobacter malonaticus
  REGION 1..120: note = tr|A0A423XYU8|A0A423XYU8_9ENTR 6-carboxy-5,6,7,8-tetrahydropterin synthase OS=Cronobacter malonaticus OX=413503 GN=queD PE=3 SV=1
MPTTLFKDFIFEAAHRLPHVPEGHKCGRLHGHSFMVRLEVTGEVDPHTGWIIDFAELKAAFKPIYDSLDHYYLNDIPGLENPTSEVLARWIWDQMKPRLPLLSAVMIKETCTAGCVYRGE

SEQ ID NO: 19553 - protein, 120 aa, Cronobacter muytjensii; identical to SEQ ID NO: 19549
  REGION 1..120: note = tr|A0A2T7AS09|A0A2T7AS09_9ENTR 6-carboxy-5,6,7,8-tetrahydropterin synthase OS=Cronobacter muytjensii OX=413501 GN=queD PE=3 SV=1

SEQ ID NO: 19554 - protein, 120 aa, Cronobacter sakazakii
  REGION 1..120: note = tr|A0A3Q9CEU4|A0A3Q9CEU4_CROSK 6-carboxy-5,6,7,8-tetrahydropterin synthase OS=Cronobacter sakazakii OX=28141 GN=queD PE=3 SV=1
MPTTLFKDFIFEAAHRLPHVPEGHKCGRLHGHSFMVRLEITGEVDPHTGWIIDFAELKAAFKPIYDSLDHYYLNDIPSLENPTSEVLARWIWDQMKPRLPLLSAVMIKETCTAGCVYRGE

SEQ ID NO: 19555 - protein, 86 aa, Cronobacter sakazakii; identical to SEQ ID NO: 19548
  REGION 1..86: note = tr|K8CSY2|K8CSY2_CROSK Queuosine biosynthesis QueD, PTPS-I OS=Cronobacter sakazakii 696 OX=1208664; GN = BN128_2277 PE=4 SV=1

SEQ ID NO: 19556 - protein, 120 aa, Cronobacter sp.; identical to SEQ ID NO: 19549
  REGION 1..120: note = tr|A0A5J6X4R2|A0A5J6X4R2_9ENTR 6-carboxytetrahydropterin synthase QueD OS=Cronobacter sp. JZ38 OX=1906275 GN=BJP61_05340 PE=4 SV=1

SEQ ID NO: 19557 - protein, 120 aa, Cronobacter turicensis; identical to SEQ ID NO: 19552
  REGION 1..120: note = tr|A0A2T7B6R5|A0A2T7B6R5_9ENTR 6-carboxy-5,6,7,8-tetrahydropterin synthase OS=Cronobacter turicensis OX=413502 GN=queD PE=3 SV=1

SEQ ID NO: 19558 - protein, 120 aa, Cronobacter turicensis
  REGION 1..120: note = tr|C9XZ31|C9XZ31_CROTZ 6-carboxy-5,6,7,8-tetrahydropterin synthase OS=Cronobacter turicensis (strain DSM 18703 / LMG 23827 / z3032); OX = 693216 GN=ygcM PE=3 SV=1
MPTTLFKDFIFEAAHRLPHVPEGHKCGRLHGHSFMVRLEVTGEVDPHTGWIIDFAELKAAFKPIYDSLDHYYLNDIPGLENPTSEVLARWIWAQMKPRLPLLSAVMIKETCTAGCVYRGE

SEQ ID NO: 19559 - protein, 120 aa, Cronobacter universalis; identical to SEQ ID NO: 19552
  REGION 1..120: note = tr|A0A376EU27|A0A376EU27_9ENTR 6-carboxy-5,6,7,8-tetrahydropterin synthase OS=Cronobacter universalis NCTC 9529 OX=1074000 GN=queD PE=3 SV=1

SEQ ID NO: 19560 - protein, 148 aa, unidentified
  source 1..148: note = Cruoricaptor ignavus
  REGION 1..148: note = tr|A0A1M6G683|A0A1M6G683_9FLAO 6-pyruvoyltetrahydropterin/6-carboxytetrahydropterin synthase OS=Cruoricaptor ignavus OX=1118202; GN = SAMN05443429_10874 PE=4 SV=1
MDMSKGLITAERYHDISCGHRVVGHESKCRFLHGHNYRFHFKIASENGLDNLGRVIDFSVIKTHLCQWLEDYYDHKTLIWKNDPHLPDLLSVFRESIVVTEFNPTAENIAEDFCVNKAPELLKGTKCKLIEIKIEETRKCSATYQIRN

SEQ ID NO: 19561 - protein, 147 aa, unidentified
  source 1..147: note = Cruoricaptor ignavus
  REGION 1..147: note = tr|A0A1M6H3U3|A0A1M6H3U3_9FLAO 6-pyruvoyltetrahydropterin/6-carboxytetrahydropterin synthase OS=Cruoricaptor ignavus OX=1118202; GN = SAMN05443429_11117 PE=4 SV=1
MIRVTKIFSFETAHILFNYDGKCKNMHGHSYKLFVTVKGEPIQDLDHPKNGMVVDFADIKSIVDEHIVKVWDHAVLLNAQSPHKDLGKNLEEQGHRVIYCNFQPTCENMLYAIAAILRRNLPETVQLAYLKLHETENSYGEWFAEEN

SEQ ID NO: 19562 - protein, 132 aa, Cryobacterium sp.
  REGION 1..132: note = tr|A0A4Y8JS34|A0A4Y8JS34_9MICO 6-carboxytetrahydropterin synthase OS=Cryobacterium sp. TMT1-51 OX=1259239 GN=E3T49_12205 PE=4 SV=1
MTFTVTVRDHMMIAHSLAGESFGPAQQLHGATFVVDASFAATDLDADGVVVDIGRVTAALAEITGSLTYRNLDEDPRFAGRNTTTEVLCKVIADRLAEQVTSGALAPGQQFQSITVTLHESHIAWASYTRAP

SEQ ID NO: 19563 - protein, 132 aa, Cryobacterium sp.
  REGION 1..132: note = tr|A0A4R8WN18|A0A4R8WN18_9MICO 6-carboxytetrahydropterin synthase OS=Cryobacterium sp. MDB2-A-2 OX=1259182 GN=E3O35_10415 PE=4 SV=1
MTYTVTVRDHLMIAHSLTGDAFGAAQRLHGATFIVDATVASGGLDANGVVVDIGRLASALAEITGALTYRNLDEDPRFRGRNTTTEVLCTAIADLLAEGVKAGSLGPVQQLDSITVTLHESHIAWASYTRTA

SEQ ID NO: 19564 - protein, 137 aa, unidentified
  source 1..137: note = Cryomorphaceae bacterium
  REGION 1..137: note = tr|A0A3B9P6V2|A0A3B9P6V2_9FLAO 6-carboxy-5,6,7,8-tetrahydropterin synthase; OS = Cryomorphaceae bacterium OX=1898111 GN=DCG83_07865 PE=3; SV = 1
MIYIKRKEHFCAAHKLWNDKWDAATNKKVFGKCSNENYHGHNFELEVTVRGEIDPDTGFVMNLFDLKQIIREHIIDVVDHKNLNLDIDFMAGKQPTAEIIAYEFWNILSPKIAEYGAELHKIKLAETHNNIIEYYGE

SEQ ID NO: 19565 - protein, 137 aa, unidentified
  source 1..137: note = Cryomorphaceae bacterium
  REGION 1..137: note = tr|A0A354S7B1|A0A354S7B1_9FLAO 6-carboxy-5,6,7,8-tetrahydropterin synthase; OS = Cryomorphaceae bacterium OX=1898111 GN=DCG68_03940 PE=3; SV = 1
MVYIQRRETFSASHRLFNSAWTDEQNEAVFGKCSNRHGHGHNFQLIVTVKGTVSSETGFVMNLVDLKDIMMREVIDQVDHRNLNEDVPFLQGVLPSTENLALAFWARLSPAIEARGAALHCVRIVETENNFVEYYGE

SEQ ID NO: 19566 - protein, 146 aa, Cryptobacterium curtum
  REGION 1..146: note = tr|C7MN71|C7MN71_CRYCD 6-pyruvoyl-tetrahydropterin synthase OS=Cryptobacterium curtum (strain ATCC 700683 / DSM 15641 / 12-3) OX=469378 GN=Ccur_06460 PE=4 SV=1
MYGLKTESYFDGAHFLAEYHGKCENLHGHRWRVVAILGSACLMPSGDERDMVMDFSSFKQTLRDLTAAFDHTFIVEEGTLAPDTLDCLAREGFHLTMVPFRTTAENFARHFFSKLDQAGFPVEQVEVYETPMNCAIYTHDASGDCA

SEQ ID NO: 19567 - protein, 140 aa, Cryptobacterium sp.
  REGION 1..140: note = tr|R7CFS3|R7CFS3_9ACTN 6-carboxy-5,6,7,8-tetrahydropterin synthase; OS = Cryptobacterium sp. CAG:338 OX=1262868 GN=BN613_01299; PE = 3 SV=1
MYKLKTESSFDAAHFLTDYHGKCENLHGHRWRVVAYLAQQELCKEGTHKDMVLDFGEFKSALRKLTEELDHSFIVEEGSLMQETLACLEKEGFVLTIMPFRTTAENLARYFYNRLAELGLPVSEIEVYETPNNCAIYCGD

SEQ ID NO: 19568 - protein, 126 aa, Cryptosporangium arvum
  REGION 1..126: note = tr|A0A010ZX57|A0A010ZX57_9ACTN 6-pyruvoyl-tetrahydropterin synthase OS=Cryptosporangium arvum DSM 44712 OX=927661 GN=CryarDRAFT_2917 PE=4 SV=1
MYEAGTERGVRAFHTMPDMPPPEGEKHSHDYRLALVVSREQLDEKGMVVDLDVLVGALEDLTKQLQDNDLDEIVAPEIGKEAVTVEDFAHWVHGRIGAAIGTPGATLSVRVYENATEFGGYSGVLA

SEQ ID NO: 19569 - protein, 126 aa, Cryptosporangium aurantiacum
  REGION 1..126: note = tr|A0A1M7RLI7|A0A1M7RLI7_9ACTN 6-pyruvoyl-tetrahydropterin synthase OS=Cryptosporangium aurantiacum OX=134849 GN=SAMN05443668_119137 PE=4 SV=1
MYEAGTAREVRAFHVMPDMPPPEGERHSHDYRLALVVSREELDEKGMVVDLDVLVGALEDLTERLRDADLDEIVGKEIGADAVTVEAFANWVHGKIGAAIDSPGSALSVRIYENATEFGGYTGVLA

SEQ ID NO: 19570 - protein, 130 aa, Cryptosporangium sp.
  REGION 1..130: note = tr|A0A545AN75|A0A545AN75_9ACTN 6-carboxy-5,6,7,8-tetrahydropterin synthase; OS = Cryptosporangium sp. A-T 5661 OX=2593070 GN=FL583_22265; PE = 3 SV=1
MSRYAIGKSFAFSASHQLPGLPEGHQCGRLHGHNYTVEVELEAETLEFPGFVTDFGDLAPFKAYLDATFDHRHLNDVLDEPPTSERLAAHLATWLERELLPQVGGRLVSVRVSETPTSWAKFSPSPGGGS

SEQ ID NO: 19571 - protein, 147 aa, Cryptosporangium sp.
  REGION 1..147: note = tr|A0A545AXE5|A0A545AXE5_9ACTN Uncharacterized protein OS=Cryptosporangium sp. A-T 5661 OX=2593070; GN = FL583_05750 PE=4 SV=1
MPPSIAATPECCTPPSGMNERMYQTGTEREVRAFHTMPDMPPPEGERHSHDYRLTLVVSREELDDKGMVVDLDVLVGALEELTGRLQDADLDEIVAPELGTEAVTVESFAFWVHGKIGAAIKTPGADLAVRVYENASEFGGYSGVLA

SEQ ID NO: 19572 - protein, 178 aa, unidentified
  source 1..178: note = Culturomica sp.
  REGION 1..178: note = tr|A0A356DIE8|A0A356DIE8_9BACT 6-carboxytetrahydropterin synthase OS=Culturomica sp.; OX = 1926652 GN=DD657_10085 PE=4 SV=1
MIIRKLFKFEGAHIVRNCSSRHCRENMHGHSYIVEVFITSDRLDNGYMVMDFGLLDKVKAFIESFDHTYTLWTQEEPDFKHFIYRYNKRVAEIPVSPSAEGFALLFLYIINRILENTTFRNGEGHVQLSSVRVHETATGYAEAFREDLKLAEFTPADVLFSPAIQEEWKSDEWWKKIR

SEQ ID NO: 19573 - protein, 158 aa, unidentified
  source 1..158: note = Cupriavidus alkaliphilus
  REGION 1..158: note = tr|A0A2W7PEX8|A0A2W7PEX8_9BURK 6-pyruvoyltetrahydropterin/6-carboxytetrahydropterin synthase OS=Cupriavidus alkaliphilus OX=942866; GN = C7416_102608 PE=4 SV=1
MSKQVSITRRLEFDSGHRIPNHCGQCRNIHGHRYRLDLTLSGEVLHREGASDDGMILDFGDIKALANEHLVSQWDHAFLIYRGDTALLNFLQSMEGHKTVVLDAIPTVENLAQVAFDILAPVFKDCFGHQLQLTRLVLFETPNCWAEVSAPAVLPAQD

SEQ ID NO: 19574 - protein, 158 aa, unidentified
  source 1..158: note = Cupriavidus alkaliphilus
  REGION 1..158: note = tr|A0A1C3UGK6|A0A1C3UGK6_9BURK 6-pyruvoyltetrahydropterin/6-carboxytetrahydropterin synthase OS=Cupriavidus alkaliphilus OX=942866; GN = C7415_102536 PE=4 SV=1
MSKQVSITRRLEFDSGHRIPNHCGQCRNIHGHRYRLDLTLSGEVLHREGASDDGMILDFGDIKALANEHLVSKWDHAFLIYRGDTALLNFLQSMEGHKTVVLDAIPTVENLAQVAFDILAPVFKDCFGHQLQLTRLVLFETPNCWAEVSAPVQLPAQD

SEQ ID NO: 19575 - protein, 158 aa, Cupriavidus basilensis
  REGION 1..158: note = tr|A0A0C4Y9U6|A0A0C4Y9U6_9BURK 6-carboxytetrahydropterin synthase or Queuosine biosynthesis QueD, PTPS-I OS=Cupriavidus basilensis; OX = 68895 GN=RR42_m2296 PE=4 SV=1
MNKQVSITRRLEFDSGHRIPNHGGQCRNIHGHRYRLDLTLSGEVLHRAGASDEGMILDFSDIKALATEHLVSKWDHAFLIHRGDTALLNFLQTMDGHKTVVLDAIPTVENLAQIAFDMLAPVFKDCFGHQLQLTRLVLFETPNCWAEVSAAFSLPAQD

SEQ ID NO: 19576 - protein, 158 aa, Cupriavidus basilensis; identical to SEQ ID NO: 19575
  REGION 1..158: note = tr|H1S881|H1S881_9BURK 6-pyruvoyl tetrahydrobiopterin synthase OS=Cupriavidus basilensis OR16 OX=1127483 GN=OR16_20917 PE=4 SV=1

SEQ ID NO: 19577 - protein, 158 aa, Cupriavidus campinensis
  REGION 1..158: note = tr|A0A556UVQ7|A0A556UVQ7_9BURK 6-carboxytetrahydropterin synthase OS=Cupriavidus campinensis OX=151783 GN=FGG12_00400 PE=4 SV=1
MTKQVSITRRLEFDSGHRIPSHGGQCRNIHGHRYRLDLTLSGEVLHKEGASDDGMILDFGDIKTLANEHLVSKWDHAFLIYRGDTALLNFLQSMDNHKTVVLESIPTVENLAQVAFDILAPVFKDCFGHHLQLTRLVLFETPNCWAEVSAPVRLPAQD

SEQ ID NO: 19578 - protein, 158 aa, Cupriavidus gilardii
  REGION 1..158: note = tr|A0A0M4LFH2|A0A0M4LFH2_9BURK 6-pyruvoyl tetrahydrobiopterin synthase OS=Cupriavidus gilardii CR3; OX = 1267562 GN=CR3_1227 PE=4 SV=1
MNKQVSITRRLEFDAGHRIPNHGGQCRNIHGHRYRLDLTLSGEVLHREGAADEGMILDFSDIKALANQHLVDKWDHAFLIHRGDTALLEFLRGMEGHKTVVLDAIPTVENLAQIAFDMLAPVFKDCFGHHLQLTRLVLFETPNCWAEVTAPAVAPAQD

SEQ ID NO: 19579 - protein, 158 aa, Cupriavidus gilardii
  REGION 1..158: note = tr|A0A562B3M4|A0A562B3M4_9BURK 6-pyruvoyltetrahydropterin/6-carboxytetrahydropterin synthase OS=Cupriavidus gilardii J11 OX=936133; GN = L602_000600001560 PE=4 SV=1
MNKQVSITRRLEFDAGHRIPNHGGQCRNIHGHRYRLDLTLSGEVLRREGAADEGMILDFGDIKALANQHLVDKWDHAFLVHRGDTALVEFLRGMEGHKTVVLDAVPTVENLAQIAFDMLAPVFKDCFGHHLQLTRLVLFETPNCWAEVTAPVTLPAQD

SEQ ID NO: 19580 - protein, 187 aa, Cupriavidus metallidurans
  REGION 1..187: note = tr|A0A2L0WZK8|A0A2L0WZK8_9BURK 6-carboxytetrahydropterin synthase OS=Cupriavidus metallidurans OX=119219 GN=C3Z06_06245 PE=4 SV=1
MLIRKLFRFENAHIVRGCSTRRCSHSIHGHSYKIELLLEAHSLDHGQMVYDFGLLKGGAFTLLDAFDHTVTLWTGDDPAYLAAMRQHSERWVLIPVSPSAEQFSRLFFLLVDAVLATTALRNGEGDVRLHSVIVHETETGYAQCFREDAENPRMGRIDLESIVFAPAITAQWSDPALFERLKRARAD

SEQ ID NO: 19581 - protein, 158 aa, Cupriavidus metallidurans
  REGION 1..158: note = tr|A0A132HMA9|A0A132HMA9_9BURK 6-carboxy-5,6,7,8-tetrahydropterin synthase OS=Cupriavidus metallidurans OX=119219 GN=queD PE=4 SV=1
MSKQVSITRRLEFDAGHRIPSHGGQCRNIHGHRYRLDLTLSGEVLHQEGAPDDGMILDFGDIKTLANEHLVSKWDHAFLIYRGDTALLNFLQSMDNHKTVVIDSIPTVENLAQVAFDILAPVFKDCFDHHLQLTRLVLFETPNCWAEVSAPLSLPAQD

SEQ ID NO: 19582 - protein, 158 aa, unidentified
  source 1..158: note = Cupriavidus nantongensis
  REGION 1..158: note = tr|A0A142JK48|A0A142JK48_9BURK 6-carboxy-5,6,7,8-tetrahydropterin synthase OS=Cupriavidus nantongensis OX=1796606 GN=A2G96_12335 PE=4 SV=1
MSKQVSITRRLEFDSGHRIPNHCGQCRNIHGHRYRLDLTLSGEVLHREGASDDGMILDFGDIKALANEHLVSKWDHAFLIYRGDTALLNFLQSMEGHKTVVLDAIPTVENLAQVAFDILAPVFKDCFGHQLQLTRLVLFETPNCWAEVSAPAQLPAQD

SEQ ID NO: 19583 - protein, 158 aa, Cupriavidus necator
  REGION 1..158: note = tr|A0A1U9UNJ8|A0A1U9UNJ8_CUPNE 6-carboxytetrahydropterin synthase QueD OS=Cupriavidus necator OX=106590 GN=BJN34_10165 PE=4 SV=1
MSKQVSITRRLEFDSGHRIPNHCGQCRNIHGHRYRLDLTLSGEVLHREGASDDGMILDFGDIKALANEHLVNKWDHAFLIYRGDTALLNFLQSMEGHKTVVLDAIPTVENLAQVAFDILAPVFKGCFGHHLQLTRLVLFETPNCWAEVSAPAVLPAQD

SEQ ID NO: 19584 - protein, 158 aa, Cupriavidus necator
  REGION 1..158: note = tr|A0A1K0JFF0|A0A1K0JFF0_CUPNE 6-Pyruvoyl tetrahydrobiopterin synthase protein OS=Cupriavidus necator OX=106590 GN=ptpS PE=4 SV=1
MSKQVSITRRLEFDSGHRIPNHCGQCRNIHGHRYRLDLTLSGEVLHREGASDDGMILDFGDIKALANEHLVNKWDHAFLIYRGDTALLNFLQSMEGHKTVVLDAIPTVENLAQVAFDILAPVFKDCFGHHLQLTRLVLFETPNCWAEVSAPAVLPAQD

SEQ ID NO: 19585 - protein, 158 aa, Cupriavidus oxalaticus; identical to SEQ ID NO: 19584
  REGION 1..158: note = tr|A0A375FTH5|A0A375FTH5_9BURK 6-Pyruvoyl tetrahydrobiopterin synthase protein OS=Cupriavidus oxalaticus OX=96344 GN=ptpS PE=4 SV=1

SEQ ID NO: 19586 - protein, 158 aa, Cupriavidus oxalaticus
  REGION 1..158: note = tr|A0A4P7LCK2|A0A4P7LCK2_9BURK 6-carboxytetrahydropterin synthase QueD OS=Cupriavidus oxalaticus OX=96344 GN=queD PE=4 SV=1
MSKQVSITRRLEFDSGHRIPNHGGQCRNIHGHRYRLDLTLSGEVLHREGASDDGMILDFGDIKALANEHLVNKWDHAFLIYRGDTALLNFLQSMEGHKTVVLDAIPTVENLAQVAFDILAPVFKDCFGHHLQLTRLVLFETPNCWAEVSAPAVLPAQD

SEQ ID NO: 19587 - protein, 158 aa, Cupriavidus pauculus
  REGION 1..158: note = tr|A0A2N5C6I2|A0A2N5C6I2_9BURK 6-carboxytetrahydropterin synthase QueD OS=Cupriavidus pauculus OX=82633 GN=CYJ10_25450 PE=4 SV=1
MSKQVSITRRLEFDAGHRIPSHGGQCRNIHGHRYRLDLTLSGEVLRQEGASDDGMILDFGDIKTLANEHLVSKWDHAFLIYRGDTALLNFLQSMDNHKTVVIDSIPTVENLAQEAFDILAPVFKDCFGHHLQLTKLVLFETPNCWAEVSAPFSLPAQD

SEQ ID NO: 19588 - protein, 158 aa, Cupriavidus pauculus
  REGION 1..158: note = tr|A0A3G8H1R9|A0A3G8H1R9_9BURK 6-carboxytetrahydropterin synthase OS=Cupriavidus pauculus; OX = 82633 GN=EHF44_13315 PE=4 SV=1
MSKQVSITRRLEFDAGHRIPSHGGQCRNIHGHRYRLDLTLAGEVLRQEGASDDGMILDFGDIKALANEHLVSKWDHAFLIYRGDTALLNFLQSMDNHKTVVIDSIPTVENLAQAAFDILAPVFKDCFGHHLQLTRLVLFETPNCWAEVSAPLSLPAQD

SEQ ID NO: 19589 - protein, 158 aa, Cupriavidus pinatubonensis
  REGION 1..158: note = tr|Q470H1|Q470H1_CUPPJ Putative 6-pyruvoyl tetrahydrobiopterin synthase protein OS=Cupriavidus pinatubonensis (strain JMP 134 / LMG 1197) OX=264198; GN = Reut_A1847 PE= 4 SV=1
MSKQVSITRRLEFDSGHRIPNHCGQCRNIHGHRYRLDLTLSGEVLHREGASDDGMILDFGDIKSLAQEHLVSKWDHAFLIYRGDTALLNFLQSMEGHKTVVLDAIPTVENLAQIAFDMLAPVFKDCFGHHLQLTRLVLFETPNCWAEVTATVALPAQD

SEQ ID NO: 19590 - protein, 158 aa, unidentified
  source 1..158: note = Cupriavidus plantarum
  REGION 1..158: note = tr|A0A316F188|A0A316F188_9BURK 6-pyruvoyltetrahydropterin/6-carboxytetrahydropterin synthase OS=Cupriavidus plantarum OX=942865; GN = C7419_1011135 PE=4 SV=1
MTKQVSITRRLEFDAGHRIPSHGGQCRNIHGHRYRLDLTLSGEVLHLEGAPDDGMILDFGDIKSLANEHLVNKWDHAFLIYRGDTALLNFLQTMDNHKTVVIESIPTVENLAQEAFDILAPVFRNCFGHQLQLTRLVLFETPNCWAEVSAPVQLPAQD

SEQ ID NO: 19591 - protein, 158 aa, Cupriavidus sp.; identical to SEQ ID NO: 19584
  REGION 1..158: note = tr|R7XQG3|R7XQG3_9BURK 6-pyruvoyl tetrahydrobiopterin synthase OS=Cupriavidus sp. GA3-3; OX = 1229514 GN=C265_03228 PE=4 SV=1

SEQ ID NO: 19592 - protein, 155 aa, Cupriavidus sp.
  REGION 1..155: note = tr|A0A439EZD4|A0A439EZD4_9BURK 6-pyruvoyl tetrahydrobiopterin synthase OS=Cupriavidus sp. UYMSc13B; OX = 1774746 GN=AU476_26235 PE=4 SV=1
MYKSTKRYGHEIGLSCCFRQHRADSHCKLLHGYALAFKFVFASRELDVRNWVVDFGSLKGLKAILEDTFDHTLLVAEDDPKLVTLRGLQDAGLARVIVMPAVGCEATAHLVYEVAKQWLKDAGYGDRVWLESVEVSEHGANSAIYIKEQRNDVQD

SEQ ID NO: 19593 - protein, 158 aa, Cupriavidus taiwanensis
  REGION 1..158: note = tr|A0A375EJ66|A0A375EJ66_9BURK Putative 6-PYRUVOYL TETRAHYDROBIOPTERIN SYNTHASE PROTEIN OS=Cupriavidus taiwanensis OX=164546 GN=CBM2606_A110016 PE=4 SV=1
MSKQVSITRRLEFDSGHRIPNHCGQCRNIHGHRYRLDLTLSGEVLHREGASDDGMILDFGDIKALANEHLVSKWDHAFLIYRGDTALLNFLQSMEGHKTVVLDAIPTVENLAQVAFDMLAPVFKDCFGHQLQLTRLVLFETPNCWAEVSAPVVLPAQD

SEQ ID NO: 19594 - protein, 158 aa, Cupriavidus taiwanensis; identical to SEQ ID NO: 19574
  REGION 1..158: note = tr|A0A375E0M6|A0A375E0M6_9BURK 6-carboxy-5,6,7,8-tetrahydropterin synthase QueD; OS = Cupriavidus taiwanensis OX=164546 GN=queD PE=4 SV=1

SEQ ID NO: 19595 - protein, 119 aa, unidentified
  source 1..119: note = [Curtobacterium] plantarum
  REGION 1..119: note = tr|A0A3M7UEF3|A0A3M7UEF3_9GAMM 6-carboxy-5,6,7,8-tetrahydropterin synthase; OS = [Curtobacterium] plantarum OX=221276 GN=queD PE=3 SV=1
MSTTLFKEFQFEAAHHLPNVPAGHKCGRLHGHSFLVRLEITGEVDAHTGWVMDFAELKAAFKPVYNRLDHYYLNDIPGLENPTSEVLAKWIWDQMKPQLPLLSAVMIKETCTAGCVYRG

SEQ ID NO: 19596 - protein, 149 aa, Curtobacterium sp.
  REGION 1..149: note = tr|A0A1S2J8Z5|A0A1S2J8Z5_9MICO Uncharacterized protein OS=Curtobacterium sp. MMLR14_014 OX=1898744; GN = BIV02_04560 PE=4 SV=1
MYSVIKLFDDLPCAHRAWAQGGNCVFLHGYERSFELTFEAEALEIGTGFVVDFSRLKGIRKLLESQFDHTTVIAEDDPMLAEFERMHELGVLDLRVMMQAGMEGAAQWVLENADAFIRRDTGGRVRVVRVLARESRKNAVTYERAPSGD

SEQ ID NO: 19597 - protein, 115 aa, Curtobacterium sp.
  REGION 1..115: note = tr|A0A4P8SUH9|A0A4P8SUH9_9MICO 6-carboxy-5,6,7,8-tetrahydropterin synthase; OS = Curtobacterium sp. SGAir0471 OX=2070337 GN=queD PE=3; SV = 1
MKHSLTRSFRFEAAHVLPWHRGKCSRLHGHSYRLEVTITGPLDVNGIVTDFGEIRQIVDAHVVQVLDHTYLNDRFDNPTVELVASWVFETLEPHLRGLTSVRMWETADSSVAVHR

SEQ ID NO: 19598 - protein, 135 aa, unidentified
  source 1..135: note = Curvibacter putative
  REGION 1..135: note = tr|C9YH99|C9YH99_9BURK 6-carboxy-5,6,7,8-tetrahydropterin synthase OS=Curvibacter putative symbiont of Hydra magnipapillata OX=667019; GN = Csp_B21490 PE=3 SV=1
MTQAPAIPLPRSCEVSQKFFFDAAHTLKRTVDDAEEIAGSRRIHGHTYHAEVTVAGSADADTGMVVDLGHLRNAIQVLRPQLDHHLLDEVEGLGPGTLENLAAFIWRAMAAEFPGLSQVRVWRDGIGDSCTLRAH

SEQ ID NO: 19599 - protein, 120 aa, Curvibacter sp.
  REGION 1..120: note = tr|A0A1F8VVL2|A0A1F8VVL2_9BURK 6-carboxy-5,6,7,8-tetrahydropterin synthase OS=Curvibacter sp. GWA2_64_110 OX=1797747 GN=A2Z93_09005 PE=3 SV=1
MMYEISQRFFFDAAHTLRREIEAEGSKRVHGHTYYAEVFVRGEPAAENGMVMDLGYIRREVNALREQLDHHFLDEVQGLGPATLENLCTYIWKALKPKIPGLSAVMVERHAIGDKCVYRP

SEQ ID NO: 19600 - protein, 136 aa, Curvibacter sp.
  REGION 1..136: note = tr|A0A433CB00|A0A433CB00_9BURK 6-carboxy-5,6,7,8-tetrahydropterin synthase OS=Curvibacter sp. OX=1888168 GN=EKK45_00490 PE=3 SV=1
MSLSPSNAFPRAGAVFELSQRFFFDAAHTLQRQIEAEGSRRIHGHTYHAEVHVSGAPDPATGMVVDLGFVRAEIARLREQLDHHFLDEVPGLGPATLENLCLFIGRQLAPVLPQLSAITVERQAVGDRCTLRWSGA

SEQ ID NO: 19601 - protein, 290 aa, unidentified
  source 1..290: note = Cuspidothrix issatschenkoi
  REGION 1..290: note = tr|A0A2S6CQ92|A0A2S6CQ92_9CYAN 6-pyruvoyl tetrahydropterin synthase OS=Cuspidothrix issatschenkoi CHARLIE-1 OX=2052836 GN=CUN59_18135 PE=4 SV=1
MQCIVNRRAQFSASHRYWLPELSETENLEKFGLCSKFPGHGHNYVLFISLVGELDEYGMVLNLSDVKQVIKREVTGQLDFSYLNDVWAEFGQTLPTTENIARVIWQRLSPHLPLVRVQLFEHPQLWADYMGNGMEAYFSVSTHFSAAHRLAHPDLSLAENTDIYGKCARVNGHGHNYHLEVTVKGEIDPRTGMIIDLGALNQVITDYIVEPFDHTFLNKDIPFFSKVVPTAENIALYISNTLRSPIQELGAKLYKVKLIESPNNSCEIYAADSETTTVNATVSEPVLARV

SEQ ID NO: 19602 - protein, 129 aa, unidentified
  source 1..129: note = Cuspidothrix issatschenkoi
  REGION 1..129: note = tr|A0A2S6CUA3|A0A2S6CUA3_9CYAN 6-carboxy-5,6,7,8-tetrahydropterin synthase; OS = Cuspidothrix issatschenkoi CHARLIE-1 OX=2052836; GN = CUN59_10450 PE=3 SV=1
MPKWKLTTEFTFDSAHYIKDYKGPCGRMHGHTYKVRIEAQSATLHSSEYCPHPVMVADFRSLRWAKKDVNQGGLDHCILNEVLPPEYETTAEMIAKYIYDETKKRLPTDIKLKVSVSETANSWAEYEDD

SEQ ID NO: 19603 - protein, 94 aa, unidentified
  source 1..94: note = Cutibacterium acnes
  REGION 1..94: note = tr|A0A085B3P6|A0A085B3P6_CUTAC 6-pyruvoyl tetrahydrobiopterin synthase OS=Cutibacterium acnes HL201PA1 OX=1271528 GN=PAST3_03734 PE=4 SV=1
MHGHNYIVRVELISDTLNAIGFVVDYRDLSPIKDWLNKELDHRCLNEVIAANPTAENLAMHIAKIIRKVTNIPREVRVAVGVSETAKTWARYAE

SEQ ID NO: 19604 - protein, 85 aa, unidentified
  source 1..85: note = Cutibacterium acnes
  REGION 1..85: note = tr|W4TNR8|W4TNR8_CUTAC Queuosine biosynthesis QueD; OS = Cutibacterium acnes JCM 18909 OX=1302241; GN = JCM18909_3326 PE=4 SV=1
MELISDTLNAIGFVVDYRDLSPIKDWLNKELDHRCLNEVIAANPTAENLAMHIAKIIRKVTNIPREVHVAVGVSETAKTWARYAE

SEQ ID NO: 19605 - protein, 157 aa, unidentified
  source 1..157: note = Cyanobacteria bacterium
  REGION 1..157: note = tr|A0A3M1KR02|A0A3M1KR02_9CYAN 6-carboxytetrahydropterin synthase (Fragment); OS = Cyanobacteria bacterium J083 OX=2420336 GN=D6756_13670; PE = 4 SV=1
MEASLTVKTHFSAAHRLALDELSLEENQEIYGKCARPHGHGHNYHLEVSVVGEIDPRTGMLVDLGALQKVIDDYVVEPFDHTFLNKDIAYFAQVVPTAENIALHIAQLLKAPIAALGAQLDKIKLIESPNNSCEIYCRKNNNQQQNSQIQELVATNY

SEQ ID NO: 19606 - protein, 119 aa, unidentified
  source 1..119: note = Cyanobacteria bacterium
  REGION 1..119: note = tr|A0A353QYQ3|A0A353QYQ3_9CYAN 6-carboxy-5,6,7,8-tetrahydropterin synthase; OS = Cyanobacteria bacterium UBA9971 OX=2055776 GN=queD PE=3; SV = 1
MFEVKVEAHFSAAHHLLNYDGKCENLHGHNWKVEVYAQGEELDQSGMLIDFTILKKELNCILDILDHHDLNTLEELKGVSPSSENIAKFIYTELKKKIPKLTKVCVWETERARATYWEN

SEQ ID NO: 19607 - protein, 287 aa, unidentified
  source 1..287: note = Cyanobacterium aponinum
  REGION 1..287: note = tr|K9Z633|K9Z633_CYAAP Uncharacterized protein; OS = Cyanobacterium aponinum (strain PCC 10605) OX=755178; GN = Cyan10605_2523 PE=4 SV=1
MECIVNRRAKFSASHRYWLPELSEAENQQRFGANSRFPGHGHNYVLYVSLIGELDKYGMVQNLSEVKKVIKEEVTSQLDYSYLNDTWAEFQQTLPTTENIAKVIWERLSPHLPLVDIQLYEHPQLWVNYQGNNMEATLTVQTHFSAAHRLALPELSLEENTEIYGKCARVNGHGHNYHLEVSVTGEMDARTGMIVDLGELQKAINDYVVEPFDHTFLNKDIPYFADVVPTAENIAVYIAQLLKDPIASLGVELDKVKLIESPNNSCEIYCRKGVLNQSPANHQVALV

SEQ ID NO: 19608 - protein, 287 aa, unidentified
  source 1..287: note = Cyanobacterium aponinum
  REGION 1..287: note = tr|A0A2G3PFE0|A0A2G3PFE0_9CHRO 6-pyruvoyl tetrahydropterin synthase OS=Cyanobacterium aponinum IPPAS B-1201 OX=2047986 GN=CSQ80_03375 PE=4 SV=1
MECIVNRRAKFSASHRYWLPELSESENQQRFGANSRFPGHGHNYVLYVSLIGELDKYGMVQNLSEVKKVIKEEVTSQLDYSYLNDTWAEFQQTLPTTENIAKVIWERLSPHLPLVDIQLYEHPQLWVNYQGNNMEATLTVQTHFSAAHRLALPELSLEENTEIYGKCARVNGHGHNYHLEVSVTGEMDARTGMIVDLGELQKAINDYVVEPFDHTFLNKDIPYFADVVPTAENIAVYIAQLLKDPIASLGVELDKVKLIESPNNSCEIYCRKGVLNQSPANHQVALV

SEQ ID NO: 19609 - protein, 154 aa, unidentified
  source 1..154: note = Unknown
  REGION 1..154: note = tr|A0A0R2U305|A0A0R2U305_9CYAN 6-pyruvoyl tetrahydropterin synthase OS=cyanobacterium BACL30 MAG-120619-bin27 OX=1655601 GN=ABR96_07350 PE=4 SV=1
MPTPAYSCSKTFSGYPCCHRQWRHQGHCRFVHGYSRSFSFWFRAHELDDCGFVVDFSSLKQLEARLADQFDHTFLANADDPLLSTWRQLHDQGALDLRVMANVGMEASAELVWGWANELLHGRDSGRSCCWKVEARENEKNAACFEALPGWFKP

SEQ ID NO: 19610 - protein, 320 aa, unidentified
  source 1..320: note = Unknown
  REGION 1..320: note = tr|A0A0R2U4Y7|A0A0R2U4Y7_9CYAN 6-pyruvoyl tetrahydropterin synthase OS=cyanobacterium BACL30 MAG-120619-bin27 OX=1655601 GN=ABR96_09080 PE=4 SV=1
MTATATASGFSPNPASSSHGRGRPCVITRRATFSASHRYWLPELSAEENQARFGLCSLAPGHGHNYTLVVAMAGPLDADGMVLNLSEVKHAIRAEVTAQLDFRFLNEAWPEFDLDRPEGKLPTTEALCQAIWTRLAPQLPLVGLRLHETDTLWVDLLAPGSTPIPMEAFLSIRTHFAAAHRLARPELSQGENETIYGKCARPHGHGHNYLLDVTVRGPIDARTGMVCDLAALQQLVDDLVVEPFDHTFLNKDVEHFASTVPTAENIALHIADLLSAPIAATGARLHKVRLQESPNNAAEVFAETPQLEMVPAALEALVAG

SEQ ID NO: 19611 - protein, 274 aa, Epithemia turgida
  REGION 1..274: note = tr|A0A077JD67|A0A077JD67_9CYAN 6-pyruvoyl-tetrahydropterin synthase OS=cyanobacterium endosymbiont of Epithemia turgida isolate EtSB Lake Yunoko; OX = 1228987 GN=ptpS P E=4 SV=1
MECIISRRAQFSASHRYWLPEFDERENQRLFGACTWFPGHGHNYVLYVSLIGEVDQYGMVENLSTVKRVIKKEVTGQLDYSYLNDVWEEFQHTLPTTENLARVIWQRLAPHLSLANIQLFEYPQLWAQYEGNAMKASLTISTHFSAAHRLALPELSLEENTKIYGKCARPHGHGHNYHLEVSVTGQIDPRTGILVNLVALQEVVNNYVVEPFDHNFLNKDVSYFAQVVPTAENITLHIAQLLRKPIGELGVDLDKVKLIESPNNSCEIHCRQST

SEQ ID NO: 19612 - protein, 291 aa, Rhopalodia gibberula
  REGION 1..291: note = tr|A0A2Z5SWQ2|A0A2Z5SWQ2_9CYAN 6-pyruvoyl-tetrahydropterin synthase OS=cyanobacterium endosymbiont of Rhopalodia gibberula OX=1763363 GN=ptpS; PE = 4 SV=1
MECIISRRAQFSASHRYWLPEFDEGENKRLFGACTWFPGHGHNYVLYVSLIGEIDHYGMVENLSTVKRVIKKEVTGQLDYSYLNDVWEEFQDTLPTTENLARVIWQRLAPHLPLANIQLFEYPQLWAQYQGNAMKASLTIRTHFSAAHRLALPELSLEENTKIYGKCARPHGHGHNYHLEVSVTGEIDSRTGMLVDLVALQEVVNNYVVEPFDHNFLNKDVPYFAQIVPTAENIALHIAQLLRKPIEELGVDLDKVKLIESPNNSCEIYCRKSPQIPQGLTHQESVLATTN

SEQ ID NO: 19613 - protein, 70 aa, unidentified
  source 1..70: note = Unknown
  REGION 1..70: note = tr|A0A2T4D237|A0A2T4D237_9CYAN 6-carboxytetrahydropterin synthase QueD (Fragment); OS = cyanobacterium G8-9 OX=2137193 GN=C9925_01175 PE=4 SV=1
MIIRKLFKFENAHIVRDCTTQRCSENIHGHSYKIEVLLESNYLDNGQMVYDFGLTKRYIKELIDSFDHAI

SEQ ID NO: 19614 - protein, 120 aa, unidentified
  source 1..120: note = Unknown
  REGION 1..120: note = tr|A0A2T4CZU3|A0A2T4CZU3_9CYAN 6-carboxytetrahydropterin synthase QueD (Fragment); OS = cyanobacterium G8-9 OX=2137193 GN=C9925_01960 PE=4 SV=1
SKDDEKYIEAMKTYSNRWVELPVSPSAEQFSRVIYLMVERVLECTDMRNGEREVKLHSIIVHETETGYAQGFKEDAHSILMGKIALEDIIFSSQVQSEWSDPELWDKLLSHTSIKNPTKV

SEQ ID NO: 19615 - protein, 290 aa, unidentified
  source 1..290: note = Cyanobacterium sp.
  REGION 1..290: note = tr|A0A1E5QXQ6|A0A1E5QXQ6_9CHRO 6-pyruvoyl tetrahydropterin synthase OS=Cyanobacterium sp. IPPAS B-1200 OX=1562720 GN=A5482_00880 PE=4 SV=1
MKCIVNRRAKFSASHRYWLPELSEQENQERFGLNSRFPGHGHNYVLFVSLIGELDQYGMVQNLSNVKKVIKNEVTGQLDYGYLNDVWAEFQETLPTTENIARVIWQRLAPHLPLTDIQLYEHPQLWVNYQGKDMEATLSIQTHFSAAHRLASNQLSYEENLEIYGKCARPNGHGHNYHLEVSVTGNMDARTGMIVDLGALQNVIDEYVVEPFDHTFLNKDIAHFADTVPTAENIAFYIATLLKEPVSKLGVELEKIKLIESPNNSCEIFCRNQSFDGVKAQESEKVPALA

SEQ ID NO: 19616 - protein, 290 aa, unidentified
  source 1..290: note = Cyanobacterium sp.
  REGION 1..290: note = tr|A0A2K8WPE4|A0A2K8WPE4_9CHRO Bifunctional 6-pyruvoyltetrahydropterin / 6-carboxytetrahydropterin synthase QueD OS=Cyanobacterium sp. HL-69 OX=2054282; GN = queD PE=4SV=1
MKCIVNRRAKFSASHRYWLPELSEQENQERFGLNSRFPGHGHNYVLFVSLIGELDQYGMVQNLSNVKKVIKNEVTSQLDYGYLNDIWEEFQETLPTTENIARVIWQRLNPHLPLTDILLYEHPQLWVNYQGKDMEATLSIQTHFSAAHRLASNKLSYEENLEIYGKCARPNGHGHNYHLEVSVTGNMDARTGMIVDLGALQNVIDEYVVEPFDHTFLNKDIAHFADTVPTAENIAFYIATLLKEPVSKLGVELEKIKLIESPNNSCEIFCRNQSFDGVKAQESEKVPALA

SEQ ID NO: 19617 - protein, 288 aa, unidentified
  source 1..288: note = Cyanobacterium stanieri
  REGION 1..288: note = tr|K9YN20|K9YN20_CYASC Uncharacterized protein; OS = Cyanobacterium stanieri (strain ATCC 29140 / PCC 7202); OX = 292563 GN=Cyast_1547 PE=4 SV=1
MKCIVNRRAKFSASHRYWLPELSEQENQKRFGPNSRFPGHGHNYVLYVSLIGELDQYGMVQNLSNVKKVIKNEVTSQLDYGYLNDIWEEFKQTLPTTENIARVIWQRLAPHLPLTDIQLYEHPQLWVNYQGKDMEATLTIQTHFSAAHRLASNQLSYEENLEIYGKCARPNGHGHNYHLEVSVTGEMDSRTGMIVDLVALQNVIDEYVVEPFDHTFLNKDIAHFADTVPTAENIAFYIATLLKEPVSKLGVELDKIKLIESPNNSCEIFCRHQNFNNVQGENKVPALV

SEQ ID NO: 19618 - protein, 244 aa, Ornithocercus magnificus
  REGION 1..244: note = tr|A0A4Y3FW88|A0A4Y3FW88_9CYAN 6-carboxytetrahydropterin synthase OS=cyanobiont of Ornithocercus magnificus OX=2496102 GN=OMCYN_00940 PE=4; SV = 1
MAGGLNADGMVLNLSEVKHAIHSQVTSQLDFHFLNEVWPEFDVYHPQGCLPTTEALARVIWKRLSPYLPITALRLYEQPVLWADYLGHTMDVFLSIRTHFAAAHRLARPELSQEENESIYGKCARPNGHGHNYLVDITVRGAIDVRTGMACDLSALQRLVNDLVVEPFDHTFLNKDIPHFADCVPTAENIALHIADRLTSPIRAIGVELHRVRLQESPNNAAEVYAETPQLEMIPMNSTAIAAS

SEQ ID NO: 19619 - protein, 163 aa, Ornithocercus magnificus
  REGION 1..163: note = tr|A0A4Y3G0F5|A0A4Y3G0F5_9CYAN 6-carboxytetrahydropterin synthase OS=cyanobiont of Ornithocercus magnificus OX=2496102 GN=OMCYN_00154 PE=4; SV = 1
MTASHLIQGAPTPYTCSKQFDGYPCCHRQWRHLGHCRYVHGYSRSFTIWFAALELDDCGFIVDFSSLRPFEEQLRQQFDHTFLVNADDPLLPEWHHLHKLGAIDLRVMVNVGMESTARLVWEWINELLLEREGGRSCCWCVSARENAVNTAYFQEVPSWFLAG

SEQ ID NO: 19620 - protein, 320 aa, unidentified
  source 1..320: note = Cyanobium gracile
  REGION 1..320: note = tr|K9PBT3|K9PBT3_CYAGP 6-pyruvoyl-tetrahydropterin synthase OS=Cyanobium gracile (strain ATCC 27147 / PCC 6307) OX=292564 GN=Cyagr_2953 PE=4 SV=1
MTATRLTAPPAAPSPTSAAHGRGRPCVITRRATFSASHLYRLPELDDAENARRFGRCSLAPGHGHNYELTVAMGGPLDADGMVLNLSDVKHAIRREVTEPLDFRFLNEVWPEFDLSRSEGRLPTTEALLLAIRQRLAPQLPLVALRLHEHPNLWADVLCGPTTDPMEAFLSIRTHFAAAHRLARPELSQSENEAIYGKCARPHGHGHNYLLDVTVRGPIDGRTGMVCDLAALQRLVDDLVVEPFDHTFLNKDVAHFADCVPTAENIALHIADLLSAPIAATGARLHKVRLQESPNNAAEVFAETPQLEMVPAALEALAAV

SEQ ID NO: 19621 - protein, 167 aa, unidentified
  source 1..167: note = Cyanobium gracile
  REGION 1..167: note = tr|K9PAL6|K9PAL6_CYAGP 6-pyruvoyl-tetrahydropterin synthase OS=Cyanobium gracile (strain ATCC 27147 / PCC 6307) OX=292564 GN=Cyagr_3319 PE=4 SV=1
MPIPAAHTCSKSYGGFPCCHRQWRHPGHCRFVHGYSRSFTFWFAAQHLDIHGFVVDFSSLQPLRARLEEQFDHTFLVNHDDPLLAQWQALHDQGALDLRVMANVGMEASAELAWGWANDLLHPRDGGRSCCWRVEARENEANAARFTAIPDWFEAATPATPEPWPAP

SEQ ID NO: 19622 - protein, 155 aa, unidentified
  source 1..155: note = Cyanobium sp.
  REGION 1..155: note = tr|A0A182AJS0|A0A182AJS0_9CYAN 6-pyruvoyl tetrahydropterin synthase OS=Cyanobium sp. NIES-981; OX = 1851505 GN=CBM981_0117 PE=4 SV=1
MPSPAAYTCSKTFRGYPCCHRQWRHPGHCRFVHGYSRGFTFWFAANQLDACGFVVDFSSLRPLEAQLAAQFDHTFLANADDPLLEHWRALHEAGALDLRVMENVGMEASAALVWEWANALLLERDGGRTCCWKTEARENSRNAACYEAVPPWFQP

SEQ ID NO: 19623 - protein, 321 aa, unidentified
  source 1..321: note = Cyanobium sp.
  REGION 1..321: note = tr|A0A2W6Z7D7|A0A2W6Z7D7_9CYAN 6-pyruvoyl tetrahydropterin synthase OS=Cyanobium sp. OX=2164130; GN = DCF23_09770 PE=4 SV=1
MSAQGLITKGKPPAEPRSVERFSGHGEGRGCVITRRATFSSSHLYRLPELSDAENLARFGRCSLAPGHGHNYELIVAMAGGLNQDGMVLNLSDVKHAIRREVTEQLDFRFLNDCWPEFDLRGPAGRLPTTEALCQAIWQRLAPHLPLIGLRLYEQPTLWADLLDDTMEAFLSIRTHFAAAHRLARQELSQAENERIYGKCARPHGHGHNYLLDVTVRGTIDPRTGMVCDLAELQQIVNDLVVEPFDHTFLNKDVVHFASCVPTAENIALHIVDLLAAPVAATGARLHKVRLQESPNNAAEVFAETPLLDMRPAALEALAAV

SEQ ID NO: 19624 - protein, 154 aa, unidentified
  source 1..154: note = Cyanobium usitatum
  REGION 1..154: note = tr|A0A2P7MVL2|A0A2P7MVL2_9CYAN 6-pyruvoyl tetrahydropterin synthase OS=Cyanobium usitatum str. Tous; OX = 2116684 GN=C7K55_07740 PE=4 SV=1
MPTPAYSCSKTFSGYPCCHRQWRHQGHCRFVHGYSRSFSFWFRATELDDCGFVVDFSSLKQLEARLADQFDHTFLANADDPLLSTWRQLHDQGALDLRVMTNVGMEASAELVWGWANELLHGRDSGRSCCWKVEARENEKNAACFEALPGWFKT

SEQ ID NO: 19625 - protein, 320 aa, unidentified
  source 1..320: note = Cyanobium usitatum
  REGION 1..320: note = tr|A0A2P7MQT0|A0A2P7MQT0_9CYAN 6-pyruvoyl tetrahydropterin synthase OS=Cyanobium usitatum str. Tous; OX = 2116684 GN=C7K55_12645 PE=4 SV=1
MTATATASGFSPNPASSSHGRGRPCVITRRATFSASHRYWLPELSAEENQARFGPCSLAPGHGHNYTLVVAMAGPLDADGMVLNLSEVKHAIRAEVTAQLDFRYLNEAWPEFDLDRPEGKLPTTEALCQAIWTRLAPQLPLVGLRLHETDTLWVDLLAPGSAPTPMEAFLSIRTHFAAAHRLARPELSQGENETIYGKCARPHGHGHNYLLDVTVRGPIDARTGMVCDLAALQQLVDDLVVEPFDHTFLNKDVEHFASTVPTAENIALHIADLLSAPIAATGARLHKVRLQESPNNAAEVFAETPQLEMVPAALEALVAG

SEQ ID NO: 19626 - protein, 288 aa, unidentified; identical to SEQ ID NO: 19188
  source 1..288: note = Cyanosarcina cf.
  REGION 1..288: note = tr|A0A2T1FLG4|A0A2T1FLG4_9CHRO 6-pyruvoyl tetrahydropterin synthase OS=Cyanosarcina cf. burmensis CCALA 770 OX=2107697 GN=C7B80_15395 PE=4 SV=1

SEQ ID NO: 19627 - protein, 294 aa, unidentified
  source 1..294: note = Cyanothece sp.
  REGION 1..294: note = tr|B8HT27|B8HT27_CYAP4 Uncharacterized protein; OS = Cyanothece sp. (strain PCC 7425 / ATCC 29141) OX=395961; GN = Cyan7425_0432 PE=4 SV=1
MPCIINRRDEFSASHRYWIPEWSEAKNLHCFGACTRFPGHGHNYVLYVSMIGELDEYGMVLNLSEVKHTIRREVTQQLNFSYLNDVWPEFQQTLPTTENLARVIWQRLAPHLPLVRIQLFEHPRLWADYEGNGMEAFLSVSTHFSAAHRLARPDLSYEENCQIYGKCARPHGHGHNYHLEVTVKGEIDPRTGMIVDLVALEKAIDDHVTEPFDHTFLNKDIPYFAEVVPTAENIAVHIRDLLQQPIRDLGAKLHRVKLIESPNNSCEVFCQDEVESQTLEAAVQRISSVAALQV

SEQ ID NO: 19628 - protein, 133 aa, unidentified
  source 1..133: note = Cyanothece sp.
  REGION 1..133: note = tr|A0A3B8Y9P7|A0A3B8Y9P7_9CYAN 6-carboxy-5,6,7,8-tetrahydropterin synthase OS=Cyanothece sp. UBA12306 OX=2055757 GN=queD PE=3 SV=1
MNANFTDNWLIFKEFRFEAAHRLPHHDGKCHRLHGHSWVGRIYVQGNHLVKEGPKQGMVLDFGDIQQYLEPLLENFLDHYYLNETTGLENPSCEAVAQWIFEKLEKSGLQGLQAVEIQETCTSGARYSRSQKS

SEQ ID NO: 19629 - protein, 136 aa, unidentified
  source 1..136: note = Cyclobacteriaceae bacterium
  REGION 1..136: note = tr|A0A3N4H594|A0A3N4H594_9BACT 6-carboxy-5,6,7,8-tetrahydropterin synthase; OS = Cyclobacteriaceae bacterium YHN15 OX=2487897; GN = EF405_10280 PE=3 SV=1
MKVAVYRKEHFNAAHRLHNPDWSDEKNTEIFGKCNNYHYHGHNYELIVKLVGEVDPNTGYVYDMKLLSDLIKIYVTDRFDHKNLNLDTNEFKKLNPTAENIAVVIWHILREKIEDKYDLTIRLYETERNFVEYDGN

SEQ ID NO: 19630 - protein, 136 aa, unidentified
  source 1..136: note = Cyclobacteriaceae bacterium
  REGION 1..136: note = tr|A0A5C7ZBE9|A0A5C7ZBE9_9BACT 6-carboxytetrahydropterin synthase OS=Cyclobacteriaceae bacterium OX=2099675 GN=E6Q41_01075 PE=4 SV=1
MKIAVYRKEHFNAAHRLFNPAWSDEKNNAVFGKCSNPNYHGHNYELEVKLIGTPDPETGYVFDMKVLSDLIQEHVVKKFDHKNLNLDTAYFKNLNPTAENIAVVIWRILRQHIDNQYELKIKLYETERNFVEYPAD

SEQ ID NO: 19631 - protein, 139 aa, Cyclobacterium amurskyense
  REGION 1..139: note = tr|A0A0H4PH58|A0A0H4PH58_9BACT Uncharacterized protein OS=Cyclobacterium amurskyense OX=320787; GN = CA2015_2778 PE=4 SV=1
MVHVCRKEHFNAAHKLWNPKWSEEKNKAVFGPCSNENWHGHNFELIVTIKGRPDEDTGFVVDLKQLSTLIRNEVIDKVDHKNLNVDVPFMTGKMASCENLVMEFWKILQPKVDKIVKDGGLYKLTLYETPRNFVEYYGE

SEQ ID NO: 19632 - protein, 136 aa, Cyclobacterium amurskyense
  REGION 1..136: note = tr|A0A0H4PBZ5|A0A0H4PBZ5_9BACT 6-carboxy-5,6,7,8-tetrahydropterin synthase; OS = Cyclobacterium amurskyense OX=320787 GN=CA2015_0875; PE = 3 SV=1
MKIAIYRKEHFNAAHRLHNPKWSEEKNNEVFGKCNNASYHGHNYDLVVKLSGPIDPETGYVYDMKRLKDVIKKHVTSKLDHKNLNLDVDEFKNLNPTAENIAVVIWNILREEIELKYDLTIRLYETERNFVEFSGD

SEQ ID NO: 19633 - protein, 136 aa, unidentified
  source 1..136: note = Cyclobacterium halophilum
  REGION 1..136: note = tr|A0A1H6Y353|A0A1H6Y353_9BACT 6-carboxy-5,6,7,8-tetrahydropterin synthase; OS = Cyclobacterium halophilum OX=1416801; GN = SAMN05192553_103438 PE=3 SV=1
MKLSIYRKEHFNAAHRLHNPAWSDDKNQEVFGKCNNPNYHGHNYDLIVKVSGPVDPDTGYVYDMKLLKDLIRAHVTDKFDHKNLNLDTDEFKNLNPTAENIAVVIWHILRNKIEKKYDLTVRLYETERNFVEFSGN

SEQ ID NO: 19634 - protein, 139 aa, unidentified
  source 1..139: note = Cyclobacterium halophilum
  REGION 1..139: note = tr|A0A1H7BRF7|A0A1H7BRF7_9BACT 6-pyruvoyltetrahydropterin/6-carboxytetrahydropterin synthase OS=Cyclobacterium halophilum OX=1416801; GN = SAMN05192553_111105 PE=4 SV=1
MVHVCRKEHFNAAHKLWNPKWSEEKNKAVFGPCANENWHGHNFELIVTIKGRPDADTGFVVDLKQLSTLIRREVIDKVDHKNLNVDVPFMAGKMASCENLVMEFWKILQPLVDELVKEGGLYKLTLYETPRNFVEYYGE

SEQ ID NO: 19635 - protein, 139 aa, Cyclobacterium lianum
  REGION 1..139: note = tr|A0A1M7QS69|A0A1M7QS69_9BACT 6-pyruvoyltetrahydropterin/6-carboxytetrahydropterin synthase OS=Cyclobacterium lianum OX=388280; GN = SAMN04488057_12312 PE=4 SV=1
MVHVCRKEHFNAAHKLWNPKWSEEKNKAVFGPCANENWHGHNFELIVTIKGKPDEDTGFVVDLKQLSTLVRREVIDKVDHKNLNLDVSFMSGKMASCENLVMEFWKILQPLVDKLVKEGGLYKLTLYETPRNFVEYYGE

SEQ ID NO: 19636 - protein, 136 aa, Cyclobacterium lianum
  REGION 1..136: note = tr|A0A1M7QD38|A0A1M7QD38_9BACT 6-carboxy-5,6,7,8-tetrahydropterin synthase; OS = Cyclobacterium lianum OX=388280 GN=SAMN04488057_11695; PE = 3 SV=1
MKTAIFRKEHFNAAHRLHNPKWSSKKNQEVFGKCNNENYHGHNYDLIVKLEGPIDPDTGYVYDMKLLKDLIREYVTDRFDHKNLNLDTDEFKTLNPTAENIAVVIWNILREKIEKKYDLTVRLYETERNFVEYSGN

SEQ ID NO: 19637 - protein, 139 aa, Cyclobacterium marinum
  REGION 1..139: note = tr|G0J1E4|G0J1E4_CYCMS Uncharacterized protein; OS = Cyclobacterium marinum (strain ATCC 25205 / DSM 745); OX = 880070 GN=Cycma_2845 PE=4 SV=1
MVHVCRKEHFNAAHKLWNPKWSEEKNKSVFGPCSNANWHGHNFELIVTIKGRPDEDTGFVVDLKQLSNLIRKEVIDKVDHKNLNVDVPFMEGKMASCENLVMEFWKILQPQVDKMVKDGGLYKLTLYETPRNFVEYYGE

SEQ ID NO: 19638 - protein, 136 aa, Cyclobacterium marinum
  REGION 1..136: note = tr|A0A5D9BG42|A0A5D9BG42_9BACT 6-carboxy-5,6,7,8-tetrahydropterin synthase; OS = Cyclobacterium marinum OX=104 GN=FY028_00300 PE=3 SV=1
MKIAIYRKEHFNAAHRLHNPQWSAEKNDAVFGKCNNPSYHGHNYDLEVKLTGPIDPETGYVYDMKLLKDVIKENVTKKFDHKNLNLDVDEFKNLNPTAENIAVVIWNILREKIELKYDLTIRLYETERNFVEFSGD

SEQ ID NO: 19639 - protein, 139 aa, unidentified
  source 1..139: note = Cyclobacterium qasimii
  REGION 1..139: note = tr|A0A512CHI9|A0A512CHI9_9BACT 6-carboxy-5,6,7,8-tetrahydropterin synthase; OS = Cyclobacterium qasimii OX=1350429 GN=CQA01_42030 PE=4; SV = 1
MVHVCRKEHFNAAHKLWNPKWSEEKNKEVFGPCSNANWHGHNFELIVTIKGRPDEDTGFVVDLKQLSTLIRKEVIDKVDHKNLNVDVPFMSGKMASCENLVMEFWKILQPGVNEIVKDGGLFKLTLYETPRNFVEYYGE

SEQ ID NO: 19640 - protein, 136 aa, unidentified
  source 1..136: note = Cyclobacterium qasimii
  REGION 1..136: note = tr|S7WJ41|S7WJ41_9BACT 6-carboxy-5,6,7,8-tetrahydropterin synthase; OS = Cyclobacterium qasimii M12-11B OX=641524 GN=ADICYQ_4291; PE = 3 SV=1
MKIAIYRKEHFNAAHRLHNPKWSEEKNKAVFGKCNNPSYHGHNYDLVVKLSGPIDPDTGYVYDMKKLKDVIKEHITSKFDHKNLNLDVDEFKNLNPTAENIAVVIWNILREEIELKYDLTIRLYETERNFVEFSGD

SEQ ID NO: 19641 - protein, 134 aa, Cycloclasticus sp.
  REGION 1..134: note = tr|A0A1M6F8N0|A0A1M6F8N0_9GAMM 6-carboxy-5,6,7,8-tetrahydropterin synthase; OS = Cycloclasticus sp. DSM 27168 OX=1884353; GN = SAMN05519226_1149 PE=3 SV=1
MYRITKNLSFCYGHRLMNHPGKCRHLHGHSARVEITLESEQLNEQGMVCDFADIKQFAGQWINETLDHNMLLHKNDPVLPLLQEAGERLMVVDEHPTAEFLAKLIYNYVSKGGFPVTKVSVWETDSSSASYSPA

SEQ ID NO: 19642 - protein, 134 aa, Cycloclasticus sp.
  REGION 1..134: note = tr|A0A1Y5F296|A0A1Y5F296_9GAMM 6-carboxy-5,6,7,8-tetrahydropterin synthase; OS = Cycloclasticus sp. 44_32_T64 OX=1856282 GN=A9Q85_04660; PE = 3 SV=1
MYRITKKLSFCYGHRLMNHPGKCRHLHGHSARVAITLESAELNEQGMVCDFSDLKQFVGKWISETLDHNMLLHKNDPVLPLLQEAGERLMVVDEHPTAEFLAKLIYDYVAKGGFPVTNVSVWETDSANASYSTN

SEQ ID NO: 19643 - protein, 134 aa, unidentified; identical to SEQ ID NO: 19641
  source 1..134: note = Cycloclasticus zancles
  REGION 1..134: note = tr|S5T9Y0|S5T9Y0_9GAMM 6-carboxy-5,6,7,8-tetrahydropterin synthase; OS = Cycloclasticus zancles 78-ME OX=1198232 GN=CYCME_2050; PE = 3 SV=1

SEQ ID NO: 19644 - protein, 287 aa, Cylindrospermopsis raciborskii
  REGION 1..287: note = tr|A0A1S1ZYT1|A0A1S1ZYT1_9CYAN Uncharacterized protein OS=Cylindrospermopsis raciborskii MVCC14 OX=940191; GN = BCV64_05870 PE=4 SV=1
MSLTARSHFSAAHRLAPNLSAEKYGKFIRTHGHNYHLEVTVEGEMDGRTGMIVDLGCLHETVEREILELFDHSCINEDIPYFSTSHIVPTTENIARYMSDLLQFPISELGVKLSRVKLFESDHLWVEYEGKDSEIFFSVATGFSAAHRLADPTLSLEKNQTIYGKCSRINGHGHNYHLEVTVRGEIDSVTGMSVDLVGLNQIIQHYVIEPMDHSFLNQDLPYFTEVVPTAENIAVYISDVVRSPIEELGAKLHKVKLIESPNNSCEIYAKDIEESRVDRVDRELAVV

SEQ ID NO: 19645 - protein, 422 aa, Cylindrospermopsis raciborskii
  REGION 1..422: note = tr|A0A1X4G8H6|A0A1X4G8H6_9CYAN 6-pyruvoyl tetrahydropterin synthase OS=Cylindrospermopsis raciborskii CENA303 OX=1170769 GN=B7O87_06320 PE=4 SV=1
MECIINRRAQFSASHRYWLPELGEAQNVGKFGLCAKFPGHGHNYVLFISMSGELDEYGMVLNLSDVKQVIKSEVTSELDFSYLNEVWEEFQATLPTTENIARVIWNRLTPHLPLVRVQLFQHPQLWTEYEGKGEKVSLTARSHFSAAHRLAPNLSAEKYGKCTRTHGHNYHLEVTVEGEMDGRTGMIVDLGCLHETVEREILELFDHSCINEDIPYFSTSHIVPTTENIARYMSDLLQFPISELGVKLSRVKLFESDHLWVEYEGKDSEIFFSVATGFSAAHRLADPTLSLEKNQTIYGKCSRINGHGHNYHLEVTVRGEIDSVTGMSVDLVGLNQIIQHYVIEPMDHSFLNQDLPYFTEVVPTAENIAVYISDVVRSPIEELGAKLHKVKLIESPNNSCEIYAKDIEESRVDRVDRELAVV

SEQ ID NO: 19646 - protein, 129 aa, Cylindrospermopsis sp.
  REGION 1..129: note = tr|A0A0R0M9M6|A0A0R0M9M6_9CYAN 6-carboxy-5,6,7,8-tetrahydropterin synthase; OS = Cylindrospermopsis sp. CR12 OX=1747196 GN=ASL19_03280; PE = 3 SV=1
MPRWKLSTEFTFDSAHYIKDYKGPCGRMHGHTYRVKMEVTSSQLHSSEYCPHPVMVADFKSLRWAKKDVTQGGLDHCVLNEVLPPEYETTAEMIAKYIYDETKRRLPTGVKLKVAVSETPNSWAEYEDD

SEQ ID NO: 19647 - protein, 420 aa, Cylindrospermopsis sp.
  REGION 1..420: note = tr|A0A0R0M285|A0A0R0M285_9CYAN 6-pyruvoyl tetrahydropterin synthase OS=Cylindrospermopsis sp. CR12; OX = 1747196 GN=ASL19_11215 PE=4 SV=1
MECIINRRAQFSASHRYWLPELGEAQSVEKFGPCAKFPGHGHNYVLFISMSGELDEYGMVLNLSDVKQVIKSEVTSELDFSYLNEVWEEFQATLPTTENIARVIWNRLAPHLPLVRVQLFEHPQLWTEYEGEKSSLTVRSHFSAAHRLAPNLSAEKYGKCTRTHGHNYHLEVTVEGEMDGRTGMIVDLGCLHEIVEREILELFDHSCINEDIPYFSTSHIVPTTENIARYMSDLLQFPISQLGVKLSRVKLFESDHLWVEYEGKDSEIFFSVATGFSAAHRLADPTLSLEKNQTIYGKCSRINGHGHNYYLEVTVQGEIDSVTGMSVDLVGLNQIIQHYVIEPMDHSFLNQDLPYFTEVVPTAENIAVYITNVVRSPIEELGAKLHKVKLIESPNNSCEIYARDIEESKVDRIYRELAAV

SEQ ID NO: 19648 - protein, 129 aa, Cylindrospermum sp.
  REGION 1..129: note = tr|A0A1Z4QSJ2|A0A1Z4QSJ2_9NOST 6-carboxy-5,6,7,8-tetrahydropterin synthase; OS = Cylindrospermum sp. NIES-4074 OX=2005457; GN = NIES4074_57160 PE=3 SV=1
MPKWKLLTEFTFDSAHYIKDYNGPCGRLHGHTYTVRVEAKSSKLYSSEYCPHPVMVADFRTLRWAKKDVTKGGLDHCVLNDVLPAEYATTAEMIAKYIYDETKKRLTPDIHLKVAVSETPNSWAEYEDD

SEQ ID NO: 19649 - protein, 290 aa, Cylindrospermum sp.
  REGION 1..290: note = tr|A0A1Z4QJY1|A0A1Z4QJY1_9NOST 6-pyruvoyl-tetrahydropterin synthase homolog; OS = Cylindrospermum sp. NIES-4074 OX=2005457; GN = NIES4074_29920 PE=4 SV=1
MQCIVNRRAQFSASHRYWLPELSEAENIENFGACSRFPGHGHNYVLFISLAGELDKYGMVLNLSDVKQVIKREVTSQLDFSYLNDVWAEFQQTLPTTENIARVIWQRLAPHLPLVRVQLFEHPELWADYMGNGMEGYLTTSTHFSAAHRLAHPQLSLEENTEIYGKCARVNGHGHNYHLEVTVKGEIDPRTGMILDLGALHQAIADYVVEPFDHTFLNKDIAFFAEVVPTAENIALYICNLLRSPIQELGAKLYKVKLIESPNNSCEIYAPESESNSAVSAVSQPVLARV

SEQ ID NO: 19650 - protein, 290 aa, Cylindrospermum stagnale
  REGION 1..290: note = tr|K9WTA5|K9WTA5_9NOST 6-pyruvoyl-tetrahydropterin synthase OS=Cylindrospermum stagnale PCC 7417 OX=56107; GN = Cylst_0420 PE=4 SV=1
MQCIVNRRAQFSASHRYWLPELTEAENIEKFGACSRFPGHGHNYVLFISLAGELDKYGMVLNLSDVKQVIKREVTSQLDFSYLNDVWADFQETLPTTENIARVVWQRLAPHLPLVRVQLFEHPELWADYMGNGMEAYLSISTHFSAAHRLAHPDLSLEENTEIYGKCARVNGHGHNYHLEVTVKGEIDPRTGMIADLGALHQAIADYVVEPFDHTFLNKDIAFFAEVVPTAENIALYISNVLRSPIQELGAKLYKVKLIESPNNSCEIYTTESELNSASTVKTAPVLARV

SEQ ID NO: 19651 - protein, 165 aa, Cystobacter ferrugineus
  REGION 1..165: note = tr|A0A1L9AWH3|A0A1L9AWH3_9DELT Folate biosynthesis protein OS=Cystobacter ferrugineus OX=83449 GN=BON30_43955; PE = 4 SV=1
MARTTTIELHKEDMKFAAGHFTIFSATHRENMHGHNFAVFVSLTGEVLDNGMLADYDIFKRMALEQCRAWNETFMLPAHSRHLQVERDARGDVIARFNGEELRFLARDVTILPVENVSLEELARLFGENLVGDGSLMRDSRISRVVVKCSSEPGQNCSWEWNSHG

SEQ ID NO: 19652 - protein, 132 aa, Cystobacter ferrugineus
  REGION 1..132: note = tr|A0A1L9AW87|A0A1L9AW87_9DELT 6-carboxy-5,6,7,8-tetrahydropterin synthase OS=Cystobacter ferrugineus OX=83449 GN=BON30_43965 PE=3 SV=1
MESAILSKPPLITEISKEFTFEAAHRLPNVPPGHKCARVHGHSYRIEITLRGPVHPTYGWVVDFAELTAAWQPLHAQLDHRLLNEVPGLENPTSELLAAWVFERVSIPGTRVTKVRVAETCTSSCTVFAAEG

SEQ ID NO: 19653 - protein, 132 aa, Cystobacter fuscus
  REGION 1..132: note = tr|S9PP52|S9PP52_9DELT 6-carboxy-5,6,7,8-tetrahydropterin synthase OS=Cystobacter fuscus DSM 2262 OX=1242864 GN=D187_000243 PE=3 SV=1
MESATLSKPPLITEISKEFTFEAAHRLPNVPPGHKCARVHGHSYRIEITLRGPVHPTFGWVVDFAELTAAWQPLQAQLDHRLLNEVPGLENPTSELLAAWVFERVNIPGTRVTKVRVAETCTSSCTVFAAEG

SEQ ID NO: 19654 - protein, 165 aa, Cystobacter fuscus
  REGION 1..165: note = tr|S9R713|S9R713_9DELT Folate biosynthesis protein PTPS-III OS=Cystobacter fuscus DSM 2262 OX=1242864; GN = D187_000245 PE=4 SV=1
MARTTTIELHKEDMKFAAGHFTIFSATHRENMHGHNFAVFISLTGEVLDNGMLADYDIFKRMALEQCRTWNETFMLPAHSRHLQVERDARGDVLARFNGEELRFLARDVTILPVENVSLEELARLFGENLVGDGALMRDSRISRVVVKCSSEPGQNCSWEWNSHG

SEQ ID NO: 19655 - protein, 135 aa, Cytophaga hutchinsonii
  REGION 1..135: note = tr|Q11WI3|Q11WI3_CYTH3 6-pyruvoyl tetrahydrobiopterin synthase OS=Cytophaga hutchinsonii (strain ATCC 33406 / NCIMB 9469) OX=269798 GN=ygcM PE=4; SV = 1
MKTAIFRKEHFNAAHRLFNASWSDEKNDAVFGKCNNPNFHGHNYELIVKLTGEIDPITGYVFDTKELSNLIKQHILTRYDHKNLNLDCEEFKDVNPTAENIAKQIYTTLRSLIDASLDLKVILYETERNFVEYPA

SEQ ID NO: 19656 - protein, 141 aa, Cytophaga hutchinsonii
  REGION 1..141: note = tr|Q11VA5|Q11VA5_CYTH3 Probable 6-pyruvoyltetrahydropterin synthase (6-pyruvoyl tetrahydrobiopterin) synthase OS=Cytophaga hutchinsonii (strain ATCC 33406 / NCIMB 94 69) OX=269798 GN=ygcM PE=4; SV = 1
MIIYVSRQEHFNAAHKLYNPAWSEEKNAEMFGPCANSNWHGHNFDLIVTVKGEPSPDTGFVIDLKKLSTLIREKVTDKVDHKNLNLDVDFMIGKMASTEILAYEFWKILEPHITTLSDGRGKLHSIKLYETPRNYVEYFGE

SEQ ID NO: 19657 - protein, 140 aa, Cytophaga sp.
  REGION 1..140: note = tr|A0A4R4KGU7|A0A4R4KGU7_9BACT 6-carboxytetrahydropterin synthase OS=Cytophaga sp. DMA-K-7a OX=2070510 GN=EZE20_07720 PE=4 SV=1
MILPRVSVFRKEHFNAAHRLHNPNWSDDKNERVYGKCNNYNYHGHNYDLIVQLTGEVDPETGYVFDMKVLGDLIREHITDKFDHKNLNLDTEEFKDLNPSAENIAIVIYNLLRKEISTNLDLKIRLYETERNFVEYPTHG

SEQ ID NO: 19658 - protein, 139 aa, Cytophaga sp.
  REGION 1..139: note = tr|A0A4R4KJR7|A0A4R4KJR7_9BACT 6-carboxytetrahydropterin synthase OS=Cytophaga sp. DMA-K-7a OX=2070510 GN=EZE20_06445 PE=4 SV=1
MIYVTRKEHFNAAHRLYNPAWSEEKNQEVFGPCANRNFHGHNFELIVTVKGTPDPDTGFVIDLKVLGELIKKHVVDKVDHRNLNLDVDFMEGKMASCEIFVMEIWKILAPIITEKAPAAHLHYIKLVETPKNFVEYYGE

SEQ ID NO: 19659 - protein, 149 aa, Cytophaga xylanolytica
  REGION 1..149: note = tr|A0A2W7P1Y0|A0A2W7P1Y0_9BACT 6-carboxy-5,6,7,8-tetrahydropterin synthase OS=Cytophaga xylanolytica OX=990 GN=LX69_00703 PE=3 SV=1
MTSIRLTKEFRFEMAHALWNYDGLCRNLHGHSYILRVTVKGMPNADANHPKCGMVMDFGELKAIVKDEILDRLDHAILVSDRAPVNDIANLSQMAERLIVVDYQPTCENMLVDFAQRIAARLPERVMLHSLRLNETATSYAEWFAEDNG

SEQ ID NO: 19660 - protein, 137 aa, unidentified
  source 1..137: note = Cytophagaceae bacterium
  REGION 1..137: note = tr|A0A4Q5RI41|A0A4Q5RI41_9BACT 6-carboxytetrahydropterin synthase OS=Cytophagaceae bacterium OX=2026729 GN=EOO36_01845 PE=4 SV=1
MLYVSRREHFNAAHKLYNPAWTPARNQEVFGPCANENWHGHNYEMIVTVKGQPDPDTGFVVDLKALSDLIRTHITDQVDHKNLNLDVPFLTGQLASTENLAVAFWRILERELPGITPAQLHCIKIYETPRNAVEYYG

SEQ ID NO: 19661 - protein, 140 aa, unidentified
  source 1..140: note = Cytophagaceae bacterium
  REGION 1..140: note = tr|A0A1E4A5F1|A0A1E4A5F1_9BACT 6-carboxytetrahydropterin synthase QueD OS=Cytophagaceae bacterium SCN 52-12 OX=1660162 GN=ABS46_07535 PE=4 SV=1
MIYVSRKEHFNAAHRLYNSNWSAEKNREVFGPCANPYYHGHNFELIVTVKGDPDPETGFVIDLKVLGDIIRVEVVEKVDHRNLNIDVDFMEGKMASCEVFVTEIWKLLKPAIEKAAPNARLHYIKLIETPKNFVEYYGEG

SEQ ID NO: 19662 - protein, 138 aa, unidentified
  source 1..138: note = Cytophagales bacterium
  REGION 1..138: note = tr|A0A286IH16|A0A286IH16_9BACT 6-carboxy-5,6,7,8-tetrahydropterin synthase; OS = Cytophagales bacterium TFI 002 OX=1945892; GN = SAMN06298216_0357 PE=3 SV=1
MKKKVAVFRKEHFNAAHRLHNPSWNEEKNNRIFGKCNNPNYHGHNYEMEVKVVGHIDDETGYVMDIKILSDIIKEHVLDKLDHKNLNLDVPEFEFLNPTAENIVIVIHEKIEKAINNPQLALTVRLYETPRNYVEYPG

SEQ ID NO: 19663 - protein, 138 aa, unidentified
  source 1..138: note = Cytophagales bacterium
  REGION 1..138: note = tr|A0A2M6GLK9|A0A2M6GLK9_9BACT 6-carboxytetrahydropterin synthase QueD OS=Cytophagales bacterium CG18_big_fil_WC_8_21_14_2_50_42_9 OX=1973956; GN = COW65_03530 PE=4 SV= 1
MVYLSRLEHFNAAHKLYNPKWSEERNKEVFGPCSNANWHGHNYELIVTVKGQPDPETGFIIDLKKLSILIREQIIEKVDHKNVNLDVPFMADKLASTENLVIEFWRILEPLIATTSSARLYCLKLYETPRNFVEYYGE

SEQ ID NO: 19664 - protein, 143 aa, unidentified
  source 1..143: note = Cytophagia bacterium
  REGION 1..143: note = tr|A0A2E5GWL0|A0A2E5GWL0_9BACT 6-carboxytetrahydropterin synthase QueD OS=Cytophagia bacterium OX=2026730 GN=CL871_05715 PE=4 SV=1
MIYLTRKEHFNAAHKLYNPLWSKEKNYQVYGDCSNENWHGHNYELLVTIKGSINDDDGMVINLKLLSKIINDEIISKVDHKNLNIDVPFLKNKITSTENVVVEFWNILEKKISSLENYKCFLHCVKLYETPKNSVEYYGPEGK

SEQ ID NO: 19665 - protein, 140 aa, unidentified
  source 1..140: note = Cytophagia bacterium
  REGION 1..140: note = tr|A0A2E9WJC5|A0A2E9WJC5_9BACT 6-carboxytetrahydropterin synthase QueD OS=Cytophagia bacterium OX=2026730 GN=CL870_03060 PE=4 SV=1
MIYIVRKEHFNAAHKLFNPSWSKEKNQKEFGVCSNKNWHGHNYEIEVTLKGKIDPGSGMLINLKILSKILKDEIIDKVDHKNLNIDVPFLEGIITTTENVTIKFWEILDERIKSLNISCSLHKIRLYETPRNFVEYYGEN

SEQ ID NO: 19666 - protein, 290 aa, unidentified
  source 1..290: note = Dactylococcopsis salina
  REGION 1..290: note = tr|K9YUC6|K9YUC6_DACSA 6-pyruvoyl-tetrahydropterin synthase OS=Dactylococcopsis salina PCC 8305 OX=13035; GN = Dacsa_1876 PE=4 SV=1
MKCIINRRAQFSAAHRYWLPELSEAENEAKFGTGSRYPGHGHNYVLYVSLEGEIDQYGMVMNLSEVKPVIRKQITEQLNNAHLNEVWREFTETLPTTENVARVIWQRLESYLPLVNIRLFEHPQLWADYQGRNMEASLTVGTHFSAAHRLARPDLSYEENCEIYGKCARPHGHGHNYHLEVTVTGEIDPRTGMIVNLEKLHDILEEFVVEPFDHYFLNEDIPYFAEVVPTAENIAVYIGQLLQQPTQELGVMLDKIKLIESPNNSCEINCRSLSQEFSNQATREPALASY

SEQ ID NO: 19667 - protein, 133 aa, unidentified
  source 1..133: note = Dankookia rubra
  REGION 1..133: note = tr|A0A4R5QK02|A0A4R5QK02_9PROT 6-carboxytetrahydropterin synthase OS=Dankookia rubra; OX = 1442381 GN=E2C06_08280 PE=4 SV=1
MYSLTVCDHIMVAHSFRGAEFGPAQRLHGATFAVEAEFRAPKLDHLHLLVDIGLAKVELRKALDGLDYRNLDGEPAFAGLNTTTEFLCAHIHGLLAAALQEGKLGAQSGSVTSLKVLLRESPNAWAAYEGEVA

SEQ ID NO: 19668 - protein, 194 aa, unidentified
  source 1..194: note = Dankookia rubra
  REGION 1..194: note = tr|A0A4R5Q854|A0A4R5Q854_9PROT 6-pyruvoyl tetrahydrobiopterin synthase OS=Dankookia rubra OX=1442381; GN = E2C06_33415 PE=4 SV=1
MVEGARGALDRELSPYSGISLASTPIHRSTKTYDHSEGLSCCFRQWRAQSHCRLIHGYALAFKFVFATRELDECGWCFDFGGLKPVRAWLHEMFDHTMLVAADDPDLPEFKRLEEKGLVALRVLPRVGCEATAEHVFRHVARFVAEQTAGRVWLETVEVREHGGNSALYEGEVHDTAGAGQSLGTFGELGAIAR

SEQ ID NO: 19669 - protein, 152 aa, unidentified
  source 1..152: note = Dechloromonas aromatica
  REGION 1..152: note = tr|Q47HS1|Q47HS1_DECAR Uncharacterized protein; OS = Dechloromonas aromatica (strain RCB) OX=159087; GN = Daro_0854 PE=4 SV=1
MPMLITRRLEFDAGHRIPDHKSQCRHLHGHRYAIEITLSGSVIDKAGDAANGMVMDFSQVKDLANLHLVKEWDHAFLAFAGDKAIVDFLSSLPGHKTVILDRVPTAENLARLAFERLDAVYRDTYGNHLQLEQVRLYETPNCWADALRTKLD

SEQ ID NO: 19670 - protein, 150 aa, Dechloromonas denitrificans
  REGION 1..150: note = tr|A0A133XHC1|A0A133XHC1_9RHOO 6-carboxy-5,6,7,8-tetrahydropterin synthase; OS = Dechloromonas denitrificans OX=281362 GN=AT959_13035; PE = 4 SV=1
MFITRRLEFDAGHRIPDHKSQCRHLHGHRYVIEITLSGQVIDKAGDAANGMVMDFSQVKHLAKQHLVDEWDHAFLAFAGDSAIVDFLNSLPDHKTVILDRVPTAENLARIAFDRLDAVYRDTYGNHLQLEQVRLYETPNCWADALRAKLD

SEQ ID NO: 19671 - protein, 150 aa, Dechloromonas sp.
  REGION 1..150: note = tr|A0A5C7ZMQ3|A0A5C7ZMQ3_9RHOO 6-carboxytetrahydropterin synthase QueD OS=Dechloromonas sp. OX=1917218 GN=queD PE=4 SV=1
MLITRRLEFDAGHRIPDHKSQCRHLHGHRYAIEITLSGSVIDKARDAANGMVMDFSQVKDLAKAHLVDLWDHAFLAYAGDTAIVDFLQSIPGHKTVILDRVPTAENLARLAFEILDGVYRDTYGNHLRLEQVRLYETPNCWSDAIRSRLD

SEQ ID NO: 19672 - protein, 150 aa, Dechloromonas sp.
  REGION 1..150: note = tr|A0A3B7ACR8|A0A3B7ACR8_9RHOO 6-carboxytetrahydropterin synthase QueD OS=Dechloromonas sp. HYN0024 OX=2231055 GN=queD PE=4 SV=1
MLITRRLEFDAGHRIPDHKSQCRHLHGHRYAIEITLSGSVIDKAGDAANGMVMDFSQVKDLANSHLVHEWDHAFLAYAGDQAIVDFLASLPGHKTVILDRVPTAENLARIAFERLDAVYRDTYGNHLRLEQVRLYETPNCWADALRTRLD

SEQ ID NO: 19673 - protein, 119 aa, Deferribacter autotrophicus
  REGION 1..119: note = tr|A0A5A8F772|A0A5A8F772_9BACT 6-carboxy-5,6,7,8-tetrahydropterin synthase; OS = Deferribacter autotrophicus OX=500465 GN=queD PE=3 SV=1
MYRLRVIDSFASAHFLRNYEGKCENLHGHNWRVEVYLEGDKLNETGLLVDFKEIKKELKKILDELDHIFLNEHEYFKNVNPTSENIAKYIYDKMKEKFENLMKSVVVWESDNAAAEYFE

SEQ ID NO: 19674 - protein, 119 aa, Deferribacter desulfuricans
  REGION 1..119: note = tr|D3PD04|D3PD04_DEFDS 6-carboxy-5,6,7,8-tetrahydropterin synthase; OS = Deferribacter desulfuricans (strain DSM 14783 / JCM 11476 / NBRC 101012 / SSM1) OX=639282 GN=DE FDS_1007 PE=3; SV = 1
MYRLRVIDHFASAHFLRDYEGKCENLHGHNWKVEVYLKGEKLDKTGMLVDFKNIKKELRKITDELDHIFLNEHPYFEKINPTSENIAKYIYDRLKEKFCDLMSSVVVWESETAAAEYYE

SEQ ID NO: 19675 - protein, 117 aa, unidentified
  source 1..117: note = Defluviimonas sp.
  REGION 1..117: note = tr|A0A059IJE3|A0A059IJE3_9RHOB 6-carboxy-5,6,7,8-tetrahydropterin synthase; OS = Defluviimonas sp. 20V17 OX=1417296 GN=U879_19825 PE=3; SV = 1
MYRIAKEFAFSASHQLCHLPPDHQCARLHGHNYVVVVELAAEALNADGFVRDYHDLAPLKTYIDECFDHRHLNDVLDGPSTAETLARHFHDWCRARWPETVAVRVSETPKTWAEYRP

SEQ ID NO: 19676 - protein, 141 aa, Dehalobacter sp.
  REGION 1..141: note = tr|K4L699|K4L699_9FIRM 6-carboxy-5,6,7,8-tetrahydropterin synthase; OS = Dehalobacter sp. CF OX=1131462 GN=queD PE=3 SV=1
MYMLKVESGFDSAHFLAGHPGKCRNIHGHSWRVVVEIESETLADEGEARGMIVDFSQLKADLRQLADDYDHALLVEDGTLQKSTLEHLIRDGFRVIEVPFRTTAENFARCFYEALAGKGYQMTRVSVFETPANCAVYEGRR

SEQ ID NO: 19677 - protein, 141 aa, Dehalobacter sp.
  REGION 1..141: note = tr|A0A4V2WJA4|A0A4V2WJA4_9FIRM 6-carboxy-5,6,7,8-tetrahydropterin synthase; OS = Dehalobacter sp. 12DCB1 OX=2070364 GN=queD PE=3 SV=1
MYMLKVESGFDSAHFLAGHPGKCRNIHGHSWRVVVEIESETLADEGEARGMIVDFSQLKADLRQLADDYDHALLVEDGTLRKSTLEHLIRDGFRVIEVPFRTTAENFARCFYEALAGKGYQMTRVSVFETPTNCAVYEGRR

SEQ ID NO: 19678 - protein, 162 aa, unidentified
  source 1..162: note = Dehalococcoidaceae bacterium
  REGION 1..162: note = tr|A0A2E8T9Y4|A0A2E8T9Y4_9CHLR 6-carboxytetrahydropterin synthase QueD; OS = Dehalococcoidaceae bacterium OX=2026731 GN=CL872_00985; PE = 4 SV=1
MSESFAVNVNAVKLRFASAHMATLGKELEPLHGHNYIVSCTVEGDITDDEWVIDFSVIKDSVRDACKILDHKFILQKDSSILEIKETSNEWQIMHDGQKYLFPKNDVVALNIKNTTAENLAKWLFYSIKKDILTKNYSNIHKMTIEVEEMPGQSGIYKSKLK

SEQ ID NO: 19679 - protein, 123 aa, unidentified
  source 1..123: note = Dehalococcoidales bacterium
  REGION 1..123: note = tr|A0A2D6LGT2|A0A2D6LGT2_9CHLR 6-carboxy-5,6,7,8-tetrahydropterin synthase; OS = Dehalococcoidales bacterium OX=2026733 GN=queD PE=3 SV=1
MYQISVEKHFDAAHFLRGYRGKCEALHGHRFRAVARVSATKLDDIGLAYDFNELKRHLNDILDRFDHTCLNDVPPFDKINPSSENIAAAIHGELRSKLAEAPVAISAIEVWESPQTRIIYRPD

SEQ ID NO: 19680 - protein, 123 aa, unidentified
  source 1..123: note = Dehalococcoidales bacterium
  REGION 1..123: note = tr|A0A2D5UQZ4|A0A2D5UQZ4_9CHLR 6-carboxy-5,6,7,8-tetrahydropterin synthase; OS = Dehalococcoidales bacterium OX=2026733 GN=queD PE=3 SV=1
MYLVSVQQHFDAAHYLRDYQGKCEALHGHRFQVVAKIAASQVNDIGLAYDFTLLKRHLGGIVDRFDHACLNDMAPFDKINPSSENIASTIYHELDPRLTEDPVSLSFVEVWESPDSWVTYSPD

SEQ ID NO: 19681 - protein, 123 aa, unidentified
  source 1..123: note = Dehalococcoides mccartyi
  REGION 1..123: note = tr|A0A0V8LXK9|A0A0V8LXK9_9CHLR 6-carboxy-5,6,7,8-tetrahydropterin synthase; OS = Dehalococcoides mccartyi OX=61435 GN=DA01_06055 PE=3; SV = 1
MYYLSVKKHFEAAHFLRGYKGKCENMHGHRYEVALKVRANELDECGMGADFKVLKTRLGEVLQSYDHTCLNDLTPFDNQNPSAENISKDIYDKLKPVISRMGVELRGVEVWESPDSSVLYQPD

SEQ ID NO: 19682 - protein, 123 aa, unidentified
  source 1..123: note = Dehalococcoides mccartyi
  REGION 1..123: note = tr|A0A076IA57|A0A076IA57_9CHLR 6-carboxy-5,6,7,8-tetrahydropterin synthase; OS = Dehalococcoides mccartyi CG1 OX=1432059 GN=X792_08035; PE = 3 SV=1
MYYLSVKRHFEAAHFLRGYKGKCENLHGHRYEAALKVRVSKLDECGMGVDFKLLKTSLSEVLQSYDHTCLNDLTPFDSQNPSAENIAKDIYNRLKPVITKNGAELYGVEVWESPDSSVLYQPD

SEQ ID NO: 19683 - protein, 123 aa, unidentified; identical to SEQ ID NO: 19682
  source 1..123: note = Dehalococcoides sp.
  REGION 1..123: note = tr|A0A0C6ERC3|A0A0C6ERC3_9CHLR 6-carboxy-5,6,7,8-tetrahydropterin synthase; OS = Dehalococcoides sp. UCH007 OX=1522671 GN=queD PE=3 SV=1

SEQ ID NO: 19684 - protein, 123 aa, unidentified
  source 1..123: note = Dehalococcoidia bacterium
  REGION 1..123: note = tr|A0A0S7WMY0|A0A0S7WMY0_9CHLR Uncharacterized protein OS=Dehalococcoidia bacterium DG_22 OX=1703393; GN = AMJ38_00270 PE=4 SV=1
MEVEGELTEDAWVIDFGELKRIGEALCQELDHRFLLPRDNPALNISDLDDAWQITSAGRRYVIPKSDVCVLPLDNSTAERLAEWFCHRLAEALTERGNITSISVGVEEAPGQTGWCTLSLGNR

SEQ ID NO: 19685 - protein, 120 aa, unidentified
  source 1..120: note = Dehalococcoidia bacterium
  REGION 1..120: note = tr|A0A0S8EBL7|A0A0S8EBL7_9CHLR Uncharacterized protein OS=Dehalococcoidia bacterium SM23_28_2 OX=1703396; GN = AMJ77_06985 PE=4 SV=1
MEVEGALTEDAWVLDFGDVKRIGGQQLDHRFLLPRDNPALDVSDLDDAWQIAVAGRRYLIPKSDACLLPLDNPTAERLAEWFCHRLAEALADRGNITSITVGVEEAPDQAGWCTLSLSDR

SEQ ID NO: 19686 - protein, 121 aa, unidentified
  source 1..121: note = Dehalogenimonas alkenigignens
  REGION 1..121: note = tr|A0A0W0GGF2|A0A0W0GGF2_9CHLR 6-carboxy-5,6,7,8-tetrahydropterin synthase; OS = Dehalogenimonas alkenigignens OX=1217799 GN=DEALK_04810; PE = 3 SV=1
MYIVAVESHFDAAHYLRGYQGKCENLHGHRYRVAVKLSSKELDSVGLACDFGDVKSALKPILARYDHSLLNDVPPFNKINPSAENIARTIYEEIKPEIGGASLKAVTVWESPESSAEYTED

SEQ ID NO: 19687 - protein, 123 aa, unidentified
  source 1..123: note = Dehalogenimonas formicexedens
  REGION 1..123: note = tr|A0A1P8FAL1|A0A1P8FAL1_9CHLR 6-carboxy-5,6,7,8-tetrahydropterin synthase; OS = Dehalogenimonas formicexedens OX=1839801 GN=queD PE=3; SV = 1
MYYIAVENHFDAAHFLRGYQGKCENLHGHRYKVAVKVSSATLNETGLVIDFREIKDALKPVIDRFDHTLLNDVPPFDQINPSAENLARTIFEAIKPAIHGAVLESVMVWESPESWAEYKPQVG

SEQ ID NO: 19688 - protein, 121 aa, Dehalogenimonas lykanthroporepellens
  REGION 1..121: note = tr|D8K2B5|D8K2B5_DEHLB 6-carboxy-5,6,7,8-tetrahydropterin synthase; OS = Dehalogenimonas lykanthroporepellens (strain ATCC BAA-1523 / JCM 15061 / BL-DC-9) OX=552811 GN= Dehly_1457; PE = 3 SV=1
MYRISVESHFDSAHFLRGYGGKCEQLHGHRYRVMVKVAAAELDDTGLACDFTELKALLKPVLARYDHTLLNDVPPFDTINPSAENIARVIFEALAPEITGVQLESVTVWESPESSAEYRPD

SEQ ID NO: 19689 - protein, 124 aa, Dehalogenimonas sp.
  REGION 1..124: note = tr|A0A0F7GBS8|A0A0F7GBS8_9CHLR 6-carboxy-5,6,7,8-tetrahydropterin synthase; OS = Dehalogenimonas sp. WBC-2 OX=943347 GN=queD PE=3 SV=1
MYYINVESHFDAAHFLRGYAGKCENLHGHRYKVAVKIASENLDDIGMAYDFTNLKAVLKPLLSRYDHTLLNDVPPFDKINPSAENIARAIYEALAPEIKGVRLESVTVWESPESCAEYRATNPT

SEQ ID NO: 19690 - protein, 121 aa, Dehalogenimonas sp.
  REGION 1..121: note = tr|A0A2P5P6K2|A0A2P5P6K2_9CHLR 6-carboxy-5,6,7,8-tetrahydropterin synthase; OS = Dehalogenimonas sp. GP OX=1536648 GN=queD PE=3 SV=1
MYYITVENHFDAAHFLRGYVGKCENLHGHRYKVAVKLSSATLDEVGLAFDFRDLKNVLKPILNRLDHTLLNDVSPFDKINPSAENIARSIFKEVKAGIEGATLESVTVWESPESSAEYRED

SEQ ID NO: 19691 - protein, 136 aa, unidentified
  source 1..136: note = Deinococcus actinosclerus
  REGION 1..136: note = tr|A0A2Z3YXG7|A0A2Z3YXG7_9DEIO 6-carboxy-5,6,7,8-tetrahydropterin synthase OS=Deinococcus actinosclerus OX=1768108 GN=DM785_16080 PE=3 SV=1
MPWKLSSEFTFDSAHVITGYDGPCGRLHGHTYRVRMELTSDRLRPSAHVKRAIMVADFKTLKWAKKDVDVGGLDHAYLNDLPDLGDDTTAEVIAAYIHRKTMERVRADLPEGDDGADLRLHVTLWETPDSSCEYWE

SEQ ID NO: 19692 - protein, 136 aa, unidentified
  source 1..136: note = Deinococcus actinosclerus
  REGION 1..136: note = tr|A0A0U4BUB5|A0A0U4BUB5_9DEIO 6-carboxy-5,6,7,8-tetrahydropterin synthase OS=Deinococcus actinosclerus OX=1768108 GN=AUC44_15615 PE=3 SV=1
MPWKLSSEFTFDSAHVITGYDGPCGRLHGHTYRVRMELSSEKLRPSAHVKRAIMVADFKTLKWAKKDVDAGGLDHAYLNDLPDLGDDTTAEVIAAYLHRRTMDRVRADLPEGDDGADLRLHVTLWETPESSCEYWE

SEQ ID NO: 19693 - protein, 134 aa, Deinococcus cellulosilyticus
  REGION 1..134: note = tr|A0A511MZJ7|A0A511MZJ7_9DEIO 6-carboxy-5,6,7,8-tetrahydropterin synthase OS=Deinococcus cellulosilyticus NBRC 106333 = KACC 11606 OX=1223518; GN = queD PE=3 SV=1
MPWKLVTEFTFDSAHVIVGYDGPCGRLHGHTYRVKMELQSEKLRPSAHVKRGIMVADFKTLKWAKKDVEKGGLDHAYLNDLLGDDTTAEVIVQHLYRKTLERIRENLPEGDDGSDLKLKVTLWETPESYCEYWE

SEQ ID NO: 19694 - protein, 149 aa, Deinococcus cellulosilyticus
  REGION 1..149: note = tr|A0A511MZX5|A0A511MZX5_9DEIO 6-carboxy-5,6,7,8-tetrahydropterin synthase OS=Deinococcus cellulosilyticus NBRC 106333 = KACC 11606 OX=1223518; GN = queD PE=4 SV=1
MLTCIKEYKDIPFAHRQYRHEGHCAFIHGHNWNIKITFKAATLDQSGFVMDFGKLKPIRNWIDHHLDHACLLSSNDPLLDTLLAFNQQHHVFKLLVLEDVSCEGLAQHLWQVFSSILQQETGGRVAIHSIEVFENKSNAVVFTPQGVQG

SEQ ID NO: 19695 - protein, 136 aa, Deinococcus deserti
  REGION 1..136: note = tr|C1CXM4|C1CXM4_DEIDV 6-carboxy-5,6,7,8-tetrahydropterin synthase OS=Deinococcus deserti (strain VCD115 / DSM 17065 / LMG 22923) OX=546414; GN = Deide_00320 PE=3 SV=1
MPWTLRTEFTFDSAHVIAGYDGPCGRLHGHTYRVRMELTSSRLRPSAHVRRNIMVADFRTLKWAKKDVTGGGLDHTYLNDVPELGDDTTAEVIAAYIHRKTMERVRADLEPGDDGADLKLKVTLWETPDSSCEYWE

SEQ ID NO: 19696 - protein, 136 aa, Deinococcus gobiensis
  REGION 1..136: note = tr|H8GTZ1|H8GTZ1_DEIGI 6-carboxy-5,6,7,8-tetrahydropterin synthase OS=Deinococcus gobiensis (strain DSM 21396 / JCM 16679 / CGMCC 1.7299 / I-0) OX=745776 GN=DGo_CA27 04 PE=3 SV=1
MPWRLATEFTFDSAHTIVGYDGPCGRLHGHTYRVRLELTSDRLRPSAHVKRHIMVADFKTLKWAKKDVDAGGLDHAYLNDLPELGDDTTAEVIAAYIHRHTMARVRADLPGGDDGADLKLRVTLWETPDSSCEYWE

SEQ ID NO: 19697 - protein, 136 aa, Deinococcus grandis
  REGION 1..136: note = tr|A0A100HGC4|A0A100HGC4_9DEIO 6-carboxy-5,6,7,8-tetrahydropterin synthase OS=Deinococcus grandis OX=57498 GN=DEIGR_100153 PE=3 SV=1
MPWKLTSEFTFDSAHVITGYDGPCGRLHGHTYRVRMELTSDRLRPSAHVKRAIMVADFKTLKWAKKDVDAGGLDHAYLNDFPELGDDTTAEVVAAYIHRRTMQRVRADLPEGDDGADLRLHVTLWETPDSSCEYWE

SEQ ID NO: 19698 - protein, 136 aa, Deinococcus indicus
  REGION 1..136: note = tr|A0A246BFR4|A0A246BFR4_9DEIO 6-carboxy-5,6,7,8-tetrahydropterin synthase OS=Deinococcus indicus OX=223556 GN=CBQ26_18760 PE=3 SV=1
MPWKLSSEFTFDSAHVITGYDGPCGRLHGHTYRVRMELSSDRLRPSAHVKRAIMVADFKTLKWAKKDVDAGGLDHAYLNDLPDLGDDTTAEVIAAYIHRKTMDRVRADLPDGDDGADLRLHVTLWETPDSSCEYWE

SEQ ID NO: 19699 - protein, 136 aa, Deinococcus maricopensis
  REGION 1..136: note = tr|E8U3S3|E8U3S3_DEIML 6-carboxy-5,6,7,8-tetrahydropterin synthase OS=Deinococcus maricopensis (strain DSM 21211 / LMG 22137 / NRRL B-23946 / LB-34) OX=709986 GN=Dei ma_3137 PE=3 SV=1
MPWQLSTEFTFDSAHTITGYDGPCGRLHGHTYRVRLQLQSDRLRPSAHVRRAIMVADFRTLKWAKKDVSQGGLDHAYLNDLPDLGDDTTAEVIAAYLHRETLRRLRDALEPGDDGADLQLRVTLWETPDSACEYWE

SEQ ID NO: 19700 - protein, 136 aa, Deinococcus peraridilitoris
  REGION 1..136: note = tr|L0A460|L0A460_DEIPD 6-carboxy-5,6,7,8-tetrahydropterin synthase OS=Deinococcus peraridilitoris (strain DSM 19664 / LMG 22246 / CIP 109416 / KR-200) OX=937777 GN=D eipe_2337 PE=3 SV=1
MPWKLSTEFTFDSAHTIVGYDGPCGRLHGHTYRVRLELQSGRLRPSAHVKRNIMVADYRTLKWAKKDVEAGGLDHAYLNDIAELGDDTTAEVIAQFIHCHTLQRVREALEAGDDGADLQLKVTVWETPDSACEYWE

SEQ ID NO: 19701 - protein, 136 aa, Deinococcus proteolyticus
  REGION 1..136: note = tr|F0RP01|F0RP01_DEIPM 6-carboxy-5,6,7,8-tetrahydropterin synthase OS=Deinococcus proteolyticus (strain ATCC 35074 / DSM 20540 / JCM 6276 / NBRC 101906 / NCIMB 13154/ VKM Ac-1939 / CCM 2703 / MRP); OX = 693977 GN=De
MPWKLSTEFTFDSAHIIEGYDGPCGRLHGHTYRVRMELQSDRLRPSAHVKRDIMVADFKSLKWAKKDVEQGGLDHMFLNEHPDLGSDTTAEVIAAFLHRETMRRIRENLAEGDDGADLHLRVFLWETPESCCEYWE

SEQ ID NO: 19702 - protein, 136 aa, Deinococcus radiophilus
  REGION 1..136: note = tr|A0A431W5S7|A0A431W5S7_9DEIO 6-carboxy-5,6,7,8-tetrahydropterin synthase OS=Deinococcus radiophilus OX=32062 GN=EJ104_00990 PE=3 SV=1
MPWKLSTEFTFDSAHIIEGYDGPCGRLHGHTYRVRMELESERLRPSAHVRRGIMVADFKSLKWAKKDVDQGGLDHMFLNEHPELGDDTTAEVVAAYLHRETMRRIHADLEESDDGADLKLRVLLWETPESCCEYWE

SEQ ID NO: 19703 - protein, 136 aa, unidentified
  source 1..136: note = Deinococcus soli
  REGION 1..136: note = tr|A0A0F7JN50|A0A0F7JN50_9DEIO 6-carboxy-5,6,7,8-tetrahydropterin synthase OS=Deinococcus soli Cha et al. 2016 OX=1309411 GN=SY84_08625 PE=3 SV=1
MPWKLSSEFTFDSAHVITGYDGPCGRLHGHTYRVRMELTSDRLRPSAHVKRAIMVADFKTLKWAKKDVDAGGLDHAYLNDLPDLGDDTTAEVIAAYLHRRTMDRVRADLPGGDDGADLRLHVTLWETPDSSCEYWE

SEQ ID NO: 19704 - protein, 136 aa, Deinococcus sp.
  REGION 1..136: note = tr|A0A418REK7|A0A418REK7_9DEIO 6-carboxy-5,6,7,8-tetrahydropterin synthase OS=Deinococcus sp. RM OX=2316359 GN=D3W47_00730 PE=3 SV=1
MPWKLSSEFTFDSAHVITAYDGPCGRLHGHTYRVRMELTSEKLRPSAHVKRAIMVADFKTLKWAKKDVDAGGLDHAYLNALPDLGDDTTAEVIAAYIHRKTMDRVRADLPDGDEGADLRLHVTLWETPDSSCEYWE

SEQ ID NO: 19705 - protein, 136 aa, Deinococcus sp.
  REGION 1..136: note = tr|A0A1T1BDC2|A0A1T1BDC2_9DEIO 6-carboxy-5,6,7,8-tetrahydropterin synthase OS=Deinococcus sp. LM3 OX=1938608 GN=BXU09_06355 PE=3 SV=1
MPWKLSSEFTFDSAHVITGYDGPCGRLHGHTYRVRMELTSDRLRPSAHVKRAIMVADFKTLKWAKKDIDAGGLDHAYLNDIPELGDDTTAEVVAAYIHRHTMKRVRADLPEGDDGADLRLHVTLWETPDSSCEYWE

SEQ ID NO: 19706 - protein, 136 aa, Deinococcus yavapaiensis
  REGION 1..136: note = tr|A0A318S5A3|A0A318S5A3_9DEIO 6-carboxy-5,6,7,8-tetrahydropterin synthase OS=Deinococcus yavapaiensis KR-236 OX=694435 GN=DES52_112106 PE=3 SV=1
MPWKLTTEFTFDSAHTITGYDGPCGRLHGHTYRVRIELQSDRLRPSAHVKRNIMVADFKTLKWPKKDVDAGGLDHAYLNDLPALGDDTTAEVIAAFIHHETMRRVRFDLPEGDDGADLRLKVTVWETPDSACEYWE

SEQ ID NO: 19707 - protein, 121 aa, Delftia acidovorans
  REGION 1..121: note = tr|S2WFH1|S2WFH1_DELAC 6-carboxy-5,6,7,8-tetrahydropterin synthase OS=Delftia acidovorans CCUG 274B OX=883101 GN=HMPREF9701_04463 PE=3; SV = 1
MQFTVHQRFFFDAAHTLERAIETESSRRIHGHTYYAEVSVTGPRNPDNGMVIDLGYLRSRLKTLGDALDHRFLDEIPGLGKPTLENLCLFIADSLADLQPAPSRIRVWRDSIGDGCVLDLG

SEQ ID NO: 19708 - protein, 121 aa, Delftia acidovorans; identical to SEQ ID NO: 19707
  REGION 1..121: note = tr|A0A2W5H015|A0A2W5H015_DELAC 6-carboxy-5,6,7,8-tetrahydropterin synthase OS=Delftia acidovorans OX=80866 GN=DI604_12080 PE=3 SV=1

SEQ ID NO: 19709 - protein, 121 aa, Delftia lacustris; identical to SEQ ID NO: 19707
  REGION 1..121: note = tr|A0A1H3RRK1|A0A1H3RRK1_9BURK 6-carboxy-5,6,7,8-tetrahydropterin synthase OS=Delftia lacustris OX=558537 GN=SAMN05421547_116114 PE=3 SV=1

SEQ ID NO: 19710 - protein, 121 aa, Delftia sp.; identical to SEQ ID NO: 18545
  REGION 1..121: note = tr|A0A031HMY3|A0A031HMY3_9BURK 6-carboxy-5,6,7,8-tetrahydropterin synthase OS=Delftia sp. RIT313 OX=1468410 GN=BW39_04733 PE=3 SV=1

SEQ ID NO: 19711 - protein, 121 aa, Delftia sp.; identical to SEQ ID NO: 18545
  REGION 1..121: note = tr|A0A1C7LG28|A0A1C7LG28_9BURK 6-carboxy-5,6,7,8-tetrahydropterin synthase OS=Delftia sp. JD2 OX=469553 GN=ACM14_11090 PE=3 SV=1

SEQ ID NO: 19712 - protein, 121 aa, Delftia tsuruhatensis; identical to SEQ ID NO: 19707
  REGION 1..121: note = tr|A0A072T7B0|A0A072T7B0_9BURK 6-carboxy-5,6,7,8-tetrahydropterin synthase OS=Delftia tsuruhatensis OX=180282 GN=BI380_15475 PE=3 SV=1

SEQ ID NO: 19713 - protein, 154 aa, unidentified
  source 1..154: note = Unknown
  REGION 1..154: note = tr|Q1NNT9|Q1NNT9_9DELT Uncharacterized protein; OS = delta proteobacterium MLMS-1 OX=262489 GN=MldDRAFT_3224; PE = 4 SV=1
MNSWRGIPKGSSRLFFVMTAKKTGEAMYTLGVNRSFSARHRLIGGDWGEESITHAHCYRLEVALDGPELNEHGFLVDIVELAGNLDLVQEAYEDRILNDLPEFAGLNPSIENLARLIWQRLSQLPASDKLLSMSVTVWEDDQAWASFQSKLPCG

SEQ ID NO: 19714 - protein, 125 aa, unidentified
  source 1..125: note = Unknown
  REGION 1..125: note = tr|A0A1V4MQ64|A0A1V4MQ64_9DELT 6-carboxy-5,6,7,8-tetrahydropterin synthase OS=delta proteobacterium MLS_D OX=1775673 GN=AVO39_00375 PE=3 SV=1
MYTVTIRRTFSAAHTIAIGGVKEAMHGHNFAVEISLESMELDGDGVVVDFRTVKNHADIVLKEMDHSYLNDLTFFKTIPPTSENIARHIFERMEKACASQNAVLSQVTVWESESARATYRRGNRG

SEQ ID NO: 19715 - protein, 152 aa, unidentified
  source 1..152: note = Deltaproteobacteria bacterium
  REGION 1..152: note = tr|A0A2D5G440|A0A2D5G440_9DELT 6-pyruvoyl tetrahydropterin synthase OS=Deltaproteobacteria bacterium; OX = 2026735 GN=CL913_05790 PE=4 SV=1
  VARIANT 67..68: note = Xaa can be any naturally occurring amino acid
  VARIANT 90: note = Xaa can be any naturally occurring amino acid
  VARIANT 95: note = Xaa can be any naturally occurring amino acid
  VARIANT 125: note = Xaa can be any naturally occurring amino acid
MGQYIYTCTKQYFNLPCAHRQHAHQGHCSQIHGYSRSFKFHFACKELDTNHFVFDFGELKELKEHLXXMCDHTLLINKQDPYLETFEGMXEKGLXKLRVVENCGAEGMARYFLEFADELVRRKSXSRAWCYKVIQWENDKNSGIAEYIPSQR

SEQ ID NO: 19716 - protein, 69 aa, unidentified
  source 1..69: note = Deltaproteobacteria bacterium
  REGION 1..69: note = tr|A0A2N2I3L3|A0A2N2I3L3_9DELT Uncharacterized protein (Fragment) OS=Deltaproteobacteria bacterium HGW-Deltaproteobacteria-20 OX=2013748 GN=CVU63_15600 PE=4; SV = 1
KRYVIPSDEVLWLPVENVVVESLAEYLWGRLEDELHADMVAAGVDMLEVTVTEAPGQGASHRCAPRGGR

SEQ ID NO: 19717 - protein, 126 aa, Dendrosporobacter quercicolus
  REGION 1..126: note = tr|A0A1G9M0U8|A0A1G9M0U8_9FIRM 6-carboxy-5,6,7,8-tetrahydropterin synthase; OS = Dendrosporobacter quercicolus OX=146817; GN = SAMN04488502_101527 PE=3 SV=1
MYELTVSVDFEAAHRIVDYPGKCDRLHGHNWLVEVTVAGQKLNELGMLIDFKELKAEVNQVINQLDHIYLNELEAFQVENPTAENIARYIYTALRKRPVLAQRVSVRKVKVWESPKSAVTYHEDDR

SEQ ID NO: 19718 - protein, 146 aa, Denitratisoma sp.
  REGION 1..146: note = tr|A0A518U7X2|A0A518U7X2_9PROT 6-carboxy-5,6,7,8-tetrahydropterin synthase; OS = Denitratisoma sp. DHT3 OX=1981880 GN=queD PE=3 SV=1
MQITRRLEFDAGHRIPNHRSQCRHLHGHRYVLEVTLSGDVMQQAGSPEEGMVMDFSDVKAIAKAHLVDLWDHAFLAYRHDKAVVEFLASLPDHKTVLLDAIPTAENLAKQAFSILAPLYRDNYGNRLRLERIRIYETPNCWADMTA

SEQ ID NO: 19719 - protein, 142 aa, Denitrobacterium detoxificans
  REGION 1..142: note = tr|A0A172RY43|A0A172RY43_9ACTN 6-pyruvoyltetrahydropterin/6-carboxytetrahydropterin synthase OS=Denitrobacterium detoxificans OX=79604; GN = SAMN02910314_01610 PE=4 SV= 1
MYGLKTESCFDSAHFLSDYYGKCENLHGHRWKVVAYLRQPSLRTQGTMRDMVVDFGEFKKAVRELTEAFDHTFLVEEGTLSDATIEALRGEGFAPTIVPFRTTAENLARHFYDSLAAKGFPVSQIDCYETPLNCASYFGEGE

SEQ ID NO: 19720 - protein, 289 aa, Denitrobacterium detoxificans
  REGION 1..289: note = tr|A0A1H8TJX5|A0A1H8TJX5_9ACTN Ribonuclease HI; OS = Denitrobacterium detoxificans OX=79604; GN = SAMN02910314_01574 PE=4 SV=1
MSTGVLYIDGASHGNPGPSACAFALLSESGGEVSHGAWYLGDATNNIAAYMALIWGMQNALASGFTAVDVRCDSQLVALQMGGALKVKTADLVPLYRKASDLAGRFESFSITRIRRAENHALNELACEALDERSHSGSYAVPLDAGQDTLFQVRDEAESPIESVFSPDASFLYKGGYYELTIKSRFEQITPTGDPVTWSVEARVSSEELDAQGRVISLGTMQQMLADVIDGLDGADLSRQEPFDALPATMEHLARVIFWRLDPALPPRVQLDEVGIWSSAIGAKIVYRP

SEQ ID NO: 19721 - protein, 151 aa, unidentified
  source 1..151: note = Denitromonas halophilus
  REGION 1..151: note = tr|A0A557RL65|A0A557RL65_9RHOO 6-carboxytetrahydropterin synthase QueD OS=Denitromonas halophilus OX=1629404 GN=queD PE=4 SV=1
MRITRRLEFDAGHRIPDHASQCKHLHGHRYVIEITLTGDIIQADGNPANGMVMDFGDIKRIAKTHLVDQWDHAFLAYRGDAPIVDFLASLPDHKTVLLDAVPTAENLVVIAFRILDAQYKDSFGNHLRLERVRLYETPNCWADATRDMVQA

SEQ ID NO: 19722 - protein, 151 aa, unidentified
  source 1..151: note = Denitromonas halophilus
  REGION 1..151: note = tr|A0A557QJX8|A0A557QJX8_9RHOO 6-carboxytetrahydropterin synthase QueD OS=Denitromonas halophilus OX=1629404 GN=queD PE=4 SV=1
MRITRRLEFDAGHRIPDHASQCKHLHGHRYVIEITLTGDIIQADGNPANGMVMDFGDIKRIAKTHLVDQWDHAFLAYRGDAPIVDFLASLPNHKTVLLDAVPTAENLVVIAFRILDAHYTDSFGNHLRLERVRLYETPNCWADATRDMVQA

SEQ ID NO: 19723 - protein, 122 aa, Denitrovibrio acetiphilus
  REGION 1..122: note = tr|D4H7Z0|D4H7Z0_DENA2 6-carboxy-5,6,7,8-tetrahydropterin synthase; OS = Denitrovibrio acetiphilus (strain DSM 12809 / N2460); OX = 522772 GN=Dacet_1367 PE=3 SV=1
MYKVRVVMSFGGAHNLRNYNGKCENLHGHNWKVEAYLKGDELNETEMLVDFTIMKKRLKEILETLDHKYLNEQVEFFKVNNPTSENIARYIYQGLKETFGKLTDRVAVWETDIQAAEYWEQE

SEQ ID NO: 19724 - protein, 122 aa, Denitrovibrio sp.
  REGION 1..122: note = tr|A0A2N6D222|A0A2N6D222_9BACT 6-carboxy-5,6,7,8-tetrahydropterin synthase; OS = Denitrovibrio sp. OX=2053308 GN=queD PE=3 SV=1
MYRVRAVMSFGGAHNLRNYNGKCENLHGHNWKVEAYLKGDSLDETGMLVDFSVLKKRLKEILDTLDHKYLNDEVVFFRSNNHTSENIAKYIFTEMKETFGSLTDRVVVWETDIQAAEYWEND

SEQ ID NO: 19725 - protein, 122 aa, Denitrovibrio sp.
  REGION 1..122: note = tr|A0A2N6DDF6|A0A2N6DDF6_9BACT 6-carboxy-5,6,7,8-tetrahydropterin synthase; OS = Denitrovibrio sp. OX=2053308 GN=queD PE=3 SV=1
MYRVRVVMSFNGAHNLRNYNGKCENLHGHNWKVEAYLKGNELNETEMLVDFTILKKRLKEILETLDHKYLNEEVPFFVEHNPTSENISKYIYTCLKETFGELTDRVVVWETDIQAAEYWEND

SEQ ID NO: 19726 - protein, 126 aa, unidentified
  source 1..126: note = Desertifilum sp.
  REGION 1..126: note = tr|A0A1E5QLY9|A0A1E5QLY9_9CYAN 6-carboxy-5,6,7,8-tetrahydropterin synthase; OS = Desertifilum sp. IPPAS B-1220 OX=1781255 GN=BH720_09620; PE = 3 SV=1
MDEWIIYKEFRFEAAHHLPHHDGKCRRLHGHSWVGRVYVRGNTLVKSGPKQGMLIDYGEIKQYIQPLLEDYLDHHYLNETTGLENPTSEAIAQWIYNRLEAAKLPGLYAVEIQETCTSGCRYQKLT

SEQ ID NO: 19727 - protein, 290 aa, unidentified
  source 1..290: note = Desertifilum sp.
  REGION 1..290: note = tr|A0A1E5QLH0|A0A1E5QLH0_9CYAN 6-pyruvoyl tetrahydropterin synthase OS=Desertifilum sp. IPPAS B-1220; OX = 1781255 GN=BH720_09030 PE=4 SV=1
MKCIITRRAQFSASHRYWLPELSEAENQQKFGPTSRSPGHGHNYVLFVYMEGELDEYGMVLNLSEVKHVIKSEVTSQLDFSFLNEAWPEFQQTLPTTEHIAQAIWKRLSPHLPLVRIQLYEHPELWADYLGEGMEAYLTISTHFSAAHRLARPDLSFEENCEIYGKCARPHGHGHNYHLEVTVKGQIDPRTGMIADLAAVQKAIDEHVVEPFDHTFLNKDIPYFAEVVPTAENIAVHIRELLQQPIRETGAKLHKVKLIESPNNACEVYCTEPNEAATSSQQREAILASV

SEQ ID NO: 19728 - protein, 158 aa, Desmospora activa
  REGION 1..158: note = tr|A0A2T4Z6T9|A0A2T4Z6T9_9BACL PreQ(0) biosynthesis protein QueD OS=Desmospora activa DSM 45169 OX=1121389; GN = C8J48_0159 PE=4 SV=1
MDFQIPERVERFGVDIQREELRYHRKRVAVTKSFTFDAAHHLHLYEGKCKNLHGHTYRLVISISGFVDDVGIAVDFGDIKRMYQEEIKARLDHRYLNEVLPNMNTTAENMIVWIWERLDERLVQEGLKKRGHRLEELVLYETPTSYATLRREWMEGDE

SEQ ID NO: 19729 - protein, 161 aa, Desmospora sp.
  REGION 1..161: note = tr|F5SDR0|F5SDR0_9BACL 6-pyruvoyltetrahydropterin synthase OS=Desmospora sp. 8437 OX=997346 GN=ptpS PE=4 SV=1
MEFRIPERVERLGVDIGRHELRYHRKRVAVTREFTFDAAHHLHLYEGKCKNLHGHTYRLVITVSGFVDEVGIAVDFGEIKRMYKEEVEARLDHRYLNEVLPNMNTSAENIIVWIWEVLDDRLERDGWKKRGHRLEELVLYETPTSRATMKREWMEAEESDE

SEQ ID NO: 19730 - protein, 162 aa, Desulfacinum hydrothermale
  REGION 1..162: note = tr|A0A1W1XMX6|A0A1W1XMX6_9DELT PreQ(0) biosynthesis protein QueD OS=Desulfacinum hydrothermale DSM 13146; OX = 1121390 GN=SAMN02746041_02238 PE=4 SV=1
MAIDKGKAIEFNGRNCSKEKDFDCVHGVRPSPRDEKLMYEVKIVTDFAAAHNLRNFRGRCENLHGHNWKVEVVVRGDRLDQAGVLLDFGELKQATRQVLQQVDHQYLNDLPYFKERNPSSEHIARFLFESLAARINGDHRWVFSVSAWESKDSCATYYGESR

SEQ ID NO: 19731 - protein, 125 aa, Desulfacinum infernum
  REGION 1..125: note = tr|A0A1M5C6R9|A0A1M5C6R9_9DELT 6-carboxy-5,6,7,8-tetrahydropterin synthase; OS = Desulfacinum infernum DSM 9756 OX=1121391; GN = SAMN02745206_02124 PE=3 SV=1
MYEVKIVSDFAAAHNLRNFRGRCENLHGHNWKVEVVVRGDRLDDAGVLLDFGELKQATRDVLQLVDHQYLNDLPYFKERNPSSEYIARFLFENLSARVNGDHRWVHSVSAWESKDSCATYYGESR

SEQ ID NO: 19732 - protein, 137 aa, unidentified
  source 1..137: note = Desulfallas geothermicus
  REGION 1..137: note = tr|A0A1I6D4V2|A0A1I6D4V2_9FIRM 6-carboxy-5,6,7,8-tetrahydropterin synthase OS=Desulfallas geothermicus DSM 3669 OX=1121426 GN=SAMN05660706_105126; PE = 3 SV=1
MTERMKYLLAPQNIASITKVFTFNSAHSLPNYPGHCKNVHGHTYRLEVTIRGPVNTETGMVMDFYDLKSLVKEHIIKKLDHCYLNDVLPYIPTAENIAIWICRSLQNKVPTLYKIKLWETPTSCVEVYVTDVQTSSM

SEQ ID NO: 19733 - protein, 151 aa, unidentified
  source 1..151: note = Desulfamplus magnetovallimortis
  REGION 1..151: note = tr|A0A1W1H816|A0A1W1H816_9DELT Related to 6-pyruvoyl tetrahydropterin synthase OS=Desulfamplus magnetovallimortis OX=1246637 GN=MTBBW1_1380072 PE=4 SV=1
MEARLINSPSLNIKKVDMLTITKEFLFDAAHKLWRSELSDDENHALYGKCSRFHGHTYRLRITVSGTVGPDGMIINFEKLKKLVTDSIIERYDHAYLNELEEYQDLPVTAENMVQYIFNVLASILYEEKVALESVVLYETPTSWATMTRDS

SEQ ID NO: 19734 - protein, 124 aa, unidentified
  source 1..124: note = Desulfamplus magnetovallimortis
  REGION 1..124: note = tr|A0A1W1HIX6|A0A1W1HIX6_9DELT 6-carboxy-5,6,7,8-tetrahydropterin synthase; OS = Desulfamplus magnetovallimortis OX=1246637 GN=ptpS PE=3; SV = 1
MFELKIKTHFAAAHQLTMVGQKCENLHGHNWNIEVYVSGEKLNAAGVLVDFGDIKKEVRKIMEQLDHKFLNEIDAFKDAQPSSERIAIYIAEQLQPKLANFPEDVRVSRVSAWESDDACATYIP

SEQ ID NO: 19735 - protein, 122 aa, Desulfarculus baarsii
  REGION 1..122: note = tr|E1QE11|E1QE11_DESB2 6-carboxy-5,6,7,8-tetrahydropterin synthase; OS = Desulfarculus baarsii (strain ATCC 33931 / DSM 2075 / VKM B-1802 / 2st14) OX=644282 GN=Deba_042 3 PE=3 SV=1
MFELMVTGRFAAAHSLRNFNGRCEALHGHNWKVEVVVYGDKLDKADLLMDFGELKKLMNQALDNLDHRHLNEVPPFDRLNPSSEQIARHIAQQVALGLPEHVRVRRVSAWESDDSRASYLPD

SEQ ID NO: 19736 - protein, 121 aa, Desulfarculus sp.
  REGION 1..121: note = tr|A0A3A6NMZ7|A0A3A6NMZ7_9DELT 6-carboxy-5,6,7,8-tetrahydropterin synthase; OS = Desulfarculus sp. OX=2093367 GN=queD PE=3 SV=1
MYRLSVTGRFAAAHNLRHFKGRCESLHGHNWKVEVVVEGRDLDQADLLLDFGELKRLLNLALDQLDHRHLNQVPPFDQRNPSSEMIAKHLYETIAAQLPPQVKMAEVSTWESEDSRATYLG

SEQ ID NO: 19737 - protein, 122 aa, Desulfatibacillum aliphaticivorans
  REGION 1..122: note = tr|B8FGI6|B8FGI6_DESAL 6-carboxy-5,6,7,8-tetrahydropterin synthase; OS = Desulfatibacillum aliphaticivorans OX=218208; GN = Dalk_3205 PE=3 SV=1
MYELKVKTDFAAAHRLTLVGHKCENLHGHNWKVEVCIKGDGLDEGGVLMDFGVIKKSLRGIMEELDHKFLNELEMFSECPPSSENIARIIADKLGAAVNSDKARVYSVTAWESDNASATYIV

SEQ ID NO: 19738 - protein, 126 aa, Desulfatibacillum aliphaticivorans
  REGION 1..126: note = tr|B8FMW4|B8FMW4_DESAL 6-carboxy-5,6,7,8-tetrahydropterin synthase; OS = Desulfatibacillum aliphaticivorans OX=218208; GN = Dalk_4150 PE=3 SV=1
MAGVFEIYVKTHFSAAHALTGYDGDCSRIHGHNWMVEVSIQCRKLDDVGIGIDFKDVKDAVEEITQGLDHCMLNDHPAFQSVNPTSENVAMFLYKQLGSHLNNEYTKVSRVKVFEAPGAGAAYWEE

SEQ ID NO: 19739 - protein, 126 aa, Desulfatibacillum alkenivorans
  REGION 1..126: note = tr|A0A1M6MMJ5|A0A1M6MMJ5_9DELT 6-carboxy-5,6,7,8-tetrahydropterin synthase; OS = Desulfatibacillum alkenivorans DSM 16219 OX=1121393; GN = SAMN02745216_02371 PE=3 SV=1
MAGVFEIYVKTHFSAAHALTGYDGDCSRIHGHNWMVEVSIQCRKLDNVGIGIDFKDVKDAVEEITQGLDHCMLNDHPAFQSVNPTSENVAMFLYKELGSHLNNKYTKVSRVKVFEAPGAGAAYWEE

SEQ ID NO: 19740 - protein, 123 aa, Desulfatibacillum alkenivorans
  REGION 1..123: note = tr|A0A1M6WRG1|A0A1M6WRG1_9DELT 6-carboxy-5,6,7,8-tetrahydropterin synthase; OS = Desulfatibacillum alkenivorans DSM 16219 OX=1121393; GN = SAMN02745216_04388 PE=3 SV=1
MYELKVKTDFAAAHRLTLVGHKCENLHGHNWKVEVCIKGDGLDEGGVLMDFGVIKKSLRGIMEELDHKFLNELDMFSDCPPSSENIARIIADKLGAAVNTDKARVYSVTAWESDNASATYIVQ

SEQ ID NO: 19741 - protein, 121 aa, unidentified
  source 1..121: note = Desulfatitalea sp.
  REGION 1..121: note = tr|A0A0F2QUP7|A0A0F2QUP7_9DELT 6-carboxy-5,6,7,8-tetrahydropterin synthase; OS = Desulfatitalea sp. BRH_c12 OX=1629708 GN=VR64_17285; PE = 3 SV=1
MFELKILTHFAAAHQLRLVAKKCENLHGHNWKVEVCVAGEKLNSAGVLIDFGELKAHVNEIVGTLDHKYLNDLEMFSGNPSSENIAVYIADALSERLAGTGIKISRVTTWESEDACATYSP

SEQ ID NO: 19742 - protein, 126 aa, Desulfitobacterium metallireducens
  REGION 1..126: note = tr|W0EBG6|W0EBG6_9FIRM 6-carboxy-5,6,7,8-tetrahydropterin synthase; OS = Desulfitobacterium metallireducens DSM 15288 OX=871968; GN = DESME_14940 PE=3 SV=1
MKITKSFTFDAAHFLPNHKGKCSSMHGHTYRLEVTVLRENGKLIERGSDEGMVIDFSDLKAIVKAEIIDKVDHKLLNEVFPFRTTAENMAAHIFSVLTDKFQPLGVKVEKIKLYETPDSYAEVERA

SEQ ID NO: 19743 - protein, 124 aa, Desulfobacca acetoxidans
  REGION 1..124: note = tr|F2NGH8|F2NGH8_DESAR 6-carboxy-5,6,7,8-tetrahydropterin synthase; OS = Desulfobacca acetoxidans (strain ATCC 700848 / DSM 11109 / ASRB2) OX=880072 GN=Desac_0711 PE=3SV=1
MYELKVITQFAAAHRLDNFYGKCEALHGHNWKVEIFLRADGLDEAGLVMDFGKIKSRAHEILSEIDHTFLNELPAFKTQNPSSENIARYLFERLGAAINNDRVTVSRISVWESDNTSASYFLAG

SEQ ID NO: 19744 - protein, 126 aa, Desulfobacca sp.
  REGION 1..126: note = tr|A0A1F9PLQ6|A0A1F9PLQ6_9DELT 6-pyruvoyl tetrahydropterin synthase OS=Desulfobacca sp. RBG_16_60_12; OX = 1797909 GN=A2139_02495 PE=4 SV=1
MHEYTLAVKRDFVARHYLVGGDWGAENELHSHYYQVEVQLEGRTLDKHGYLVDIVAVEAHLQELVAYYRDQSLNDLPEFAGLNPSIEHFARILCQEILSRVKEPLSAVMVKIWENDIAWASYREER

SEQ ID NO: 19745 - protein, 123 aa, Desulfobacca sp.
  REGION 1..123: note = tr|A0A1V4QP79|A0A1V4QP79_9DELT 6-carboxy-5,6,7,8-tetrahydropterin synthase; OS = Desulfobacca sp. 4484_104 OX=1940691 GN=BZ151_00220; PE = 3 SV=1
MYELKIITQFSAAHRLENFYGKCEALHGHNWKVEIFLGAASLDEVGLVRDFGKIKAAAREVLEEVDHTYLNELPAFQNQNPSSENLARYLFERLSPAINDDRVKVTRVAVWESDTSSAAYYLP

SEQ ID NO: 19746 - protein, 126 aa, Desulfobacter hydrogenophilus
  REGION 1..126: note = tr|A0A328FK83|A0A328FK83_9DELT 6-carboxy-5,6,7,8-tetrahydropterin synthase; OS = Desulfobacter hydrogenophilus OX=2291 GN=queD PE=3 SV=1
MPGIYDICVQDHFAAAHSLRGYDGNCSNLHGHNWVIEAHIRCTKLNQLGMGIDFRDVKGVVKDVLSKLDHTNLNEVAEFGSINPTAENLAKFLYSELSRRLNTEFIKVQKIMVFESPGCGSSYQEI

SEQ ID NO: 19747 - protein, 132 aa, Desulfobacter hydrogenophilus
  REGION 1..132: note = tr|A0A328FDL4|A0A328FDL4_9DELT 6-carboxy-5,6,7,8-tetrahydropterin synthase; OS = Desulfobacter hydrogenophilus OX=2291 GN=queD PE=3 SV=1
MFELKVKTRFAGAHQLAMVGRKCENLHGHNWQVEVYVKGDQLNDAGVLADFGDIKRAVRAVVDEELDHQFLNELPAFEDNQPTSELIAVYIAGKVQAYLDKNLDEKVVVSRVMAWESDDACAIYYPTPVVTQ

SEQ ID NO: 19748 - protein, 126 aa, Desulfobacter postgatei
  REGION 1..126: note = tr|I5AYI0|I5AYI0_9DELT 6-carboxy-5,6,7,8-tetrahydropterin synthase; OS = Desulfobacter postgatei 2ac9 OX=879212; GN = DespoDRAFT_00255 PE=3 SV=1
MPGVYEICVQDHFAAAHSLRGYDGNCSNLHGHNWVVEAHIRCTKLNQLGMGIDFRDVKSVLKDVLSRLDHTNLNEIAEFGSINPTAENLAKFLYSELSRRLNTEFIKIQKIMVFESPSCGSSYQEI

SEQ ID NO: 19749 - protein, 132 aa, Desulfobacter postgatei
  REGION 1..132: note = tr|I5B2Q2|I5B2Q2_9DELT 6-carboxy-5,6,7,8-tetrahydropterin synthase; OS = Desulfobacter postgatei 2ac9 OX=879212; GN = DespoDRAFT_01855 PE=3 SV=1
MFELKVKTRFAGAHQLAMVGRKCENLHGHNWQVEVYVKGDQLNDAGVLADFGDIKRAVRSVVDGELDHKFLNELPAFADTQPTSERIAIYIADKVQTYLDKNVDEKIVVSRVMAWESDDACAIYYPAPIVMK

SEQ ID NO: 19750 - protein, 126 aa, Desulfobacter sp.
  REGION 1..126: note = tr|A0A357YRA5|A0A357YRA5_9DELT 6-carboxy-5,6,7,8-tetrahydropterin synthase; OS = Desulfobacter sp. OX=2294 GN=queD PE=3 SV=1
MPGVYEICVQDHFAAAHSLRGYDGNCSNLHGHNWVVEAHIRCTKLNQLGMGIDFRDVKSVVKDVLSRLDHTNLNEIAEFGSINPTAENLAKFLYSELSRRLNTEFIKIQKIMVFESPSCGSSYQEI

SEQ ID NO: 19751 - protein, 132 aa, Desulfobacter sp.
  REGION 1..132: note = tr|A0A357YSI7|A0A357YSI7_9DELT 6-carboxy-5,6,7,8-tetrahydropterin synthase; OS = Desulfobacter sp. OX=2294 GN=queD PE=3 SV=1
MFELKVKTRFAAAHQLAMVGRKCENLHGHNWQVEVYVKGDQLNDAGVLADFGDIKRAVRSVVDGELDHKFLNELPAFADTQPTSERIAIYIADKVQTYLDKNVDEKIVVSRVMAWESDDACAIYYPAPIVMQ

SEQ ID NO: 19752 - protein, 125 aa, unidentified
  source 1..125: note = Desulfobacteraceae bacterium
  REGION 1..125: note = tr|A0A525D4R0|A0A525D4R0_9DELT 6-carboxy-5,6,7,8-tetrahydropterin synthase; OS = Desulfobacteraceae bacterium OX=2049433 GN=queD PE=3; SV = 1
MFELKVKTHFAAAHQLTMVGQKCENLHGHNWNVEVYVSGENLNEAGVLADFGDIKKAVRQIMTDLDHKFLNEIDAFAHAQPTSERIAVYIAEKLQAEMDQLAEEVKVTRVSAWESADACATYYPS

SEQ ID NO: 19753 - protein, 113 aa, unidentified
  source 1..113: note = Desulfobacteraceae bacterium
  REGION 1..113: note = tr|A0A1W9TUT1|A0A1W9TUT1_9DELT 6-carboxy-5,6,7,8-tetrahydropterin synthase; OS = Desulfobacteraceae bacterium 4572_187 OX=1971620; GN = B6I30_04190 PE=3 SV=1
MVSKKCENLHGHNWKIEICVAGKTLNNTGVLVDFGELKQHVSEIMTRLDHKFLNELDYFNDDNPPSSENIARYIANSLQTLLNNSKIKVARVTAWESEDACATYFMGNPSLSF

SEQ ID NO: 19754 - protein, 122 aa, unidentified
  source 1..122: note = Desulfobacterales bacterium
  REGION 1..122: note = tr|A0A1E7GL23|A0A1E7GL23_9DELT 6-carboxy-5,6,7,8-tetrahydropterin synthase; OS = Desulfobacterales bacterium S3730MH5 OX=1869298; GN = BA861_10265 PE=3 SV=1
MYELKVITHFSAAHQLRNFEGACEDLHGHNWKIEVYVTSEALSEAGIVVDFRILKKYVKDILATLDHKFLNELEPFKSQNPSSENIARYMADQLALLLQDPQIKVSRVTAWESETSCATYYP

SEQ ID NO: 19755 - protein, 123 aa, unidentified
  source 1..123: note = Desulfobacterales bacterium
  REGION 1..123: note = tr|A0A2H0A9J9|A0A2H0A9J9_9DELT 6-carboxy-5,6,7,8-tetrahydropterin synthase; OS = Desulfobacterales bacterium CG23_combo_of_CG06-09_8_20_14_all_51_8 OX=1973983 GN=queD P E=3 SV=1
MYELKVVSRFAAAHQLKMVAEKCENLHGHNWRVEVYVAGPELNSAGVLMDFGEIKAHLREIINTLDHKFLNELAFLKNGNPSSENIARYIAQTLSAKIDTPGVRVSRIGVWESDDCCATYIIP

SEQ ID NO: 19756 - protein, 127 aa, Desulfobacterium autotrophicum
  REGION 1..127: note = tr|C0QLV0|C0QLV0_DESAH 6-carboxy-5,6,7,8-tetrahydropterin synthase; OS = Desulfobacterium autotrophicum (strain ATCC 43914 / DSM 3382 / HRM2) OX=177437 GN=ptpS PE=3 SV= 1
MFELKVKTHFAAAHKLAMVGEKCENLHGHNWDVEVYVAGEQLNEAGVLVDFGVIKGFVRKIMKELDHKYLNELDAFADVQPSSEQIAIYIANRLKPSLKGFHPPVRVSRVSAWESANACATYILPAE

SEQ ID NO: 19757 - protein, 134 aa, Desulfobacterium vacuolatum
  REGION 1..134: note = tr|A0A1W2A6Z1|A0A1W2A6Z1_9DELT 6-carboxy-5,6,7,8-tetrahydropterin synthase; OS = Desulfobacterium vacuolatum DSM 3385 OX=1121400; GN = SAMN02746065_104204 PE=3 SV=1
MLTITRQFKFDAAHRLFLKNLTHRENHDIFGKCSKVHGHTYCLKITISGKVQPTGMILNFTDLKRIVETRIIDRYDHSFLNDLDEYKDLPTTAENMALYIFKALSPCLKSRDLTLTRVVLYETPDSWATVTSDV

SEQ ID NO: 19758 - protein, 129 aa, Desulfobacterium vacuolatum
  REGION 1..129: note = tr|A0A1W1ZTI4|A0A1W1ZTI4_9DELT 6-carboxy-5,6,7,8-tetrahydropterin synthase; OS = Desulfobacterium vacuolatum DSM 3385 OX=1121400; GN = SAMN02746065_103166 PE=3 SV=1
MFELKVKTDFAAAHQLTMVGEKCENLHGHNWNVEVYVAGEHLNAAGVLVDFGDIKKHVRAIMKELDHKFLNELDAFKGIQPSSEQIAIYIANRLQGYLKDDKLDETVRVSRVSAWESADACATYIPPQD

SEQ ID NO: 19759 - protein, 126 aa, Desulfobacula phenolica
  REGION 1..126: note = tr|A0A1H2IE89|A0A1H2IE89_9DELT 6-carboxy-5,6,7,8-tetrahydropterin synthase; OS = Desulfobacula phenolica OX=90732 GN=SAMN04487931_108104; PE = 3 SV=1
MPGVYEIYVKDHFAAAHVLKGYDGNCSNMHGHNWIVEAYIQCTKLDHLGMGIDFMDVKSAVTDVLSKLDHTTLNDLPEFCNMNPTSENVAKILYTQLSRRLNTEHITVTKVMVFESPGCGSSYREV

SEQ ID NO: 19760 - protein, 127 aa, Desulfobacula phenolica
  REGION 1..127: note = tr|A0A1H2DV57|A0A1H2DV57_9DELT 6-carboxy-5,6,7,8-tetrahydropterin synthase; OS = Desulfobacula phenolica OX=90732 GN=SAMN04487931_102225; PE = 3 SV=1
MFELKVKTRFAGAHQLTMVGQKCENLHGHNWHIEVCVKGEKLNSAGVLADFGDIKKAVRQIVKGELDHKFLNELEIFEGKQPTSERIAVYIAQRVQVLLDQSLDNDVKVSKVMAWESDDACATYFAG

SEQ ID NO: 19761 - protein, 126 aa, Desulfobacula sp.
  REGION 1..126: note = tr|A0A1F9NAT3|A0A1F9NAT3_9DELT 6-carboxy-5,6,7,8-tetrahydropterin synthase; OS = Desulfobacula sp. GWF2_41_7 OX=1797910 GN=A2097_15830; PE = 3 SV=1
MFELKVKSHFSGAHQLTMVGQKCENLHGHNWNVEVCVTGEKLNSAGVLADFGDIKKAVRKVVDEELDHKFLNDLEIFKGVQPTSERIAIYIAERVQAMLSQELSEEVRVSKVMAWESEDACATYIP

SEQ ID NO: 19762 - protein, 126 aa, Desulfobacula sp.
  REGION 1..126: note = tr|A0A1F9NBI2|A0A1F9NBI2_9DELT 6-carboxy-5,6,7,8-tetrahydropterin synthase; OS = Desulfobacula sp. GWF2_41_7 OX=1797910 GN=A2097_13295; PE = 3 SV=1
MPGVYEIYVKDHFAAAHALKGYDGNCSNLHGHNWIIEAYIQCKKLNKLGIGIDFRDVKTVLKDVLGKLDHTNLNDIAEFGAINPTSENLSKFLYSELSLRLNTDYIKVKKIMVFESPGCGSAYWEE

SEQ ID NO: 19763 - protein, 126 aa, Desulfobacula toluolica
  REGION 1..126: note = tr|K0NBU6|K0NBU6_DESTT 6-carboxy-5,6,7,8-tetrahydropterin synthase; OS = Desulfobacula toluolica (strain DSM 7467 / Tol2); OX = 651182 GN=queD PE=3 SV=1
MPGVYEIYVKDHFAAAHVLKGYDGNCSNMHGHNWIVEAYIQCTKLDHLGMGIDFMDVKSAVTDVLSKLDHTTLNDLPEFCNMNPTSENVAKFLYTQLSRHLNTEHITVTKVMVFESPGCGSSYREV

SEQ ID NO: 19764 - protein, 127 aa, Desulfobacula toluolica
  REGION 1..127: note = tr|K0NSA5|K0NSA5_DESTT 6-carboxy-5,6,7,8-tetrahydropterin synthase; OS = Desulfobacula toluolica (strain DSM 7467 / Tol2); OX = 651182 GN=ptpS PE=3 SV=1
MFELKVKTRFAGAHQLTMVGQKCENLHGHNWHIEVCVKGEKLNSAGVLADFGDIKKAVRQIVKGELDHKFLNELEIFDGKQPTSERIAVYIAQRVQFLLDQSLDNDVKVSKVMAWESDDACATYFAG

SEQ ID NO: 19765 - protein, 138 aa, Desulfobotulus alkaliphilus
  REGION 1..138: note = tr|A0A562RW57|A0A562RW57_9DELT 6-carboxy-5,6,7,8-tetrahydropterin synthase; OS = Desulfobotulus alkaliphilus OX=622671 GN=LZ24_01474; PE = 3 SV=1
MLSITREFRFEAAHRLALAHLTDEENTEIFGPCARIHGHSYRLRVTLSGTTNAFGWILNFSELKKIVYQHVLSEYDHACLNELHDYRNDIPTAENMAKTIFRRLEPHLQGPNYRLLRICVHETENAWASWEADHALCS

SEQ ID NO: 19766 - protein, 124 aa, Desulfobotulus alkaliphilus
  REGION 1..124: note = tr|A0A562S3U6|A0A562S3U6_9DELT 6-carboxy-5,6,7,8-tetrahydropterin synthase; OS = Desulfobotulus alkaliphilus OX=622671 GN=LZ24_00611; PE = 3 SV=1
MYELRVRGDFAAAHQLHNVTEKCENLHGHNFDVEAAVEGKELNEAHVLMDFGLLKKHLREILASLDHCFLNEHPAFAGKNASSENIARFIAENLSERLLPLGGGVRVRRVRVWESARASAAYYP

SEQ ID NO: 19767 - protein, 123 aa, unidentified
  source 1..123: note = Desulfobulbaceae bacterium
  REGION 1..123: note = tr|A0A1W9M6D2|A0A1W9M6D2_9DELT 6-carboxy-5,6,7,8-tetrahydropterin synthase; OS = Desulfobulbaceae bacterium A2 OX=1934250 GN=BWK76_14485; PE = 3 SV=1
MFDVFITTHFAGAHHLRDYPGDCERPHGHNWQIEVRVRAEALDSLGMGIDFKELKRRVKAVIDELDHRDLNEHPAFRERNPSSEHIAVFLFQRLRDALQHERYRLHAITVRETDSSGVTYYGP

SEQ ID NO: 19768 - protein, 125 aa, unidentified
  source 1..125: note = Desulfobulbaceae bacterium
  REGION 1..125: note = tr|A0A0F2NQS3|A0A0F2NQS3_9DELT 6-pyruvoyl tetrahydropterin synthase OS=Desulfobulbaceae bacterium BRH_c16a OX=1629713 GN=VR65_00510 PE=4 SV=1
MYSLGVRRQFSARHYLIDGDWGEENIEHSHLYRMELVLHGKELDRHGFLADIVEVERHLDDVTAGFREKTFNSLPAFAGSNPSIERLAAVLHDIFRKRFESFRLEAITVTIWEDDIAWTSYHDTL

SEQ ID NO: 19769 - protein, 122 aa, Desulfobulbus propionicus
  REGION 1..122: note = tr|A0A2G6MI46|A0A2G6MI46_9DELT 6-carboxy-5,6,7,8-tetrahydropterin synthase; OS = Desulfobulbus propionicus OX=894 GN=queD PE=3 SV=1
MDIFIKTHFSGGHHLRDYPGSCEKPHGHNWKIKVTVRASELDHLGMGIDFRTLKHEVGKVVDELDHCDLNEHPAFASINPSSEHIAIFLFEKLEEVLKTDRYQLYAVEVRETDTSGVIYYGQ

SEQ ID NO: 19770 - protein, 124 aa, Desulfobulbus propionicus
  REGION 1..124: note = tr|A0A2G6MCT7|A0A2G6MCT7_9DELT 6-carboxy-5,6,7,8-tetrahydropterin synthase; OS = Desulfobulbus propionicus OX=894 GN=queD PE=3 SV=1
MFDIFIQTHFSGGHHLREYPGTCEQPHGHNWKVKVTVRAHQLDELGMGIDFKVLKKKVNSVIDTLDHCDLNQHPAFLQRNPSSEHIAQYIFDQLRPQLVSHRYRIHSVEVRETDTSGVIYHPNP

SEQ ID NO: 19771 - protein, 123 aa, Desulfobulbus sp.
  REGION 1..123: note = tr|A0A0A2HW67|A0A0A2HW67_9DELT 6-carboxy-5,6,7,8-tetrahydropterin synthase; OS = Desulfobulbus sp. Tol-SR OX=1536652 GN=JT06_04815 PE=3; SV = 1
MFDIFVKTHFAGAHHLRDYPGECENPHGHNWKVEVAVRATELDELGMGIDFKLLKNIVKVAIDKLDHRDLNNMAIFKDVNPSSENIARFLFSELKGPLTHDRYSLCSVTVHETDTSGLTYYGP

SEQ ID NO: 19772 - protein, 71 aa, Desulfobulbus sp.
  REGION 1..71: note = tr|A0A432QIC3|A0A432QIC3_9DELT Uncharacterized protein OS=Desulfobulbus sp. OX=895 GN=DSY58_01290 PE=4; SV = 1
MIDIFIKTHFSGGHHLRDYPGTCERPHGHNWKVKVQVRATSLDQLGMGIDFKTLKKQLSSVPVLTQCSSNK

SEQ ID NO: 19773 - protein, 123 aa, Desulfocapsa sp.
  REGION 1..123: note = tr|A0A432QNS7|A0A432QNS7_9DELT 6-carboxy-5,6,7,8-tetrahydropterin synthase; OS = Desulfocapsa sp. OX=2066021 GN=DSY80_10295 PE=3 SV=1
MIDIFIKTHFSGGHHLRDYPGNCEHPHGHNWKIKVLVRAHGLDKLGMGLDFKILKKQVNLVIDDLDHCDLNKHPAFLDRNPSSENIAIFIFNSLQDKLKTDRYQLYSVQVQETDSSGVIYYGA

SEQ ID NO: 19774 - protein, 126 aa, Desulfocapsa sp.
  REGION 1..126: note = tr|A0A432R3Z1|A0A432R3Z1_9DELT 6-carboxy-5,6,7,8-tetrahydropterin synthase; OS = Desulfocapsa sp. OX=2066021 GN=queD PE=3 SV=1
MYDIFIKTHFAGAHHLRNYPGDCENPHGHNWKIRVTVRASSVDELGMGIDFKVLKKIVNKAVDELDHRDLNKHPAFQDRNPSSEHIAAFLFDTLRPDLEHDRYALYSVEVWETDSSGLIYYGADAK

SEQ ID NO: 19775 - protein, 126 aa, Desulfocapsa sulfexigens
  REGION 1..126: note = tr|M1PTT0|M1PTT0_DESSD 6-carboxy-5,6,7,8-tetrahydropterin synthase; OS = Desulfocapsa sulfexigens (strain DSM 10523 / SB164P1); OX = 1167006 GN=UWK_03234 PE=3 SV=1
MYDIFIKTHFAGAHHLRNYPGDCENPHGHNWKIKVTVRATQVDELGMGIDFKVLKKIVNTAVDMLDHRDLNEHPAFQDRNPSSEHIAAFLYDTLYPDLKHDRYKLHCVEVWETETSGLIFYGPDAS

SEQ ID NO: 19776 - protein, 121 aa, unidentified
  source 1..121: note = Desulfocarbo indianensis
  REGION 1..121: note = tr|A0A0K9IF88|A0A0K9IF88_9DELT 6-carboxy-5,6,7,8-tetrahydropterin synthase; OS = Desulfocarbo indianensis OX=1348163 GN=AAU61_03610 PE=3; SV = 1
MYELMVTGRFAAAHSLRNFKGRCEALHGHNWRVEVVVRGDTLDQAGLIMDFGELKAAMNQVMDRLDHCYLNEIKPFDELNPSSELIAKYLYEEISQLLPAGVSMARVSAWESEDSRATYFG

SEQ ID NO: 19777 - protein, 124 aa, Desulfococcus multivorans
  REGION 1..124: note = tr|S7V5R0|S7V5R0_DESML 6-carboxy-5,6,7,8-tetrahydropterin synthase; OS = Desulfococcus multivorans DSM 2059 OX=1121405; GN = dsmv_1726 PE=3 SV=1
MFELKILTRFAAAHQLRMVGQKCENLHGHNWKVEVCVGGEHLNEAGVLMDFGDVKRHVADIIREIDHKFLNELEFFQRVEQPSSERIAVHIAQELQKRLDTPGVRVTRVSAWESDDACATYILP

SEQ ID NO: 19778 - protein, 128 aa, Desulfococcus multivorans
  REGION 1..128: note = tr|S7UP63|S7UP63_DESML 6-carboxy-5,6,7,8-tetrahydropterin synthase; OS = Desulfococcus multivorans DSM 2059 OX=1121405; GN = dsmv_3426 PE=3 SV=1
MKEIHEIYVKTHFSAAHCLEGYPGDCARLHGHNWIIEVHVRCERLNEIGIGIDFRDIKTAVKEVLQGLDHFNLNELPAFKSVNPTSENIARFLYKELSWILNADGIKVSKVKVCETPGAGAYYWEEED

SEQ ID NO: 19779 - protein, 129 aa, unidentified
  source 1..129: note = Desulfococcus oleovorans
  REGION 1..129: note = tr|A8ZZE4|A8ZZE4_DESOH 6-carboxy-5,6,7,8-tetrahydropterin synthase; OS = Desulfococcus oleovorans (strain DSM 6200 / Hxd3); OX = 96561 GN=Dole_1493 PE=3 SV=1
MFELTVTTHFAAAHQLKMVAHKCENLHGHNWKVEVCVAGSELDHAGLLIDFGELKRHVATVIDGLDHRFLNELEYFKNGNPSSEHIAVYIADQLTGMLKETRAKISRVKVWESENSCATYIPDAQGQPL

SEQ ID NO: 19780 - protein, 122 aa, Desulfococcus sp.
  REGION 1..122: note = tr|A0A1W9PQ37|A0A1W9PQ37_9DELT 6-carboxy-5,6,7,8-tetrahydropterin synthase; OS = Desulfococcus sp. 4484_241 OX=1968522 GN=B5M56_10865; PE = 3 SV=1
MFELMVTTNFAAAHQLRMVGNKCENLHGHNWKVEVYVSGDKLDNTGLLIDFGELKRHLGTIIESLDHRFLNEMDFFKNENPSSERIAVFIANKLAELIEGTPAKVSRVRVWESDNACVTYLP

SEQ ID NO: 19781 - protein, 131 aa, unidentified
  source 1..131: note = Desulfocurvibacter africanus
  REGION 1..131: note = tr|M5PZ95|M5PZ95_DESAF 6-carboxy-5,6,7,8-tetrahydropterin synthase; OS = Desulfocurvibacter africanus PCS OX=1262666; GN = PCS_03493 PE=3 SV=1
MGTGRWRLTVREEFSASHQLRHYQGKCEALHGHNFGVEVSIEGDRTDERTGMLLDFKVLKDITRESVGLLDHKHLNDLEAFAGENPSSEHLARFLFREIEGRLGGYAVSLVEVTVAEKSSQSATYFESGEK

SEQ ID NO: 19782 - protein, 131 aa, unidentified
  source 1..131: note = Desulfocurvibacter africanus
  REGION 1..131: note = tr|F3YYG6|F3YYG6_DESAF 6-carboxy-5,6,7,8-tetrahydropterin synthase; OS = Desulfocurvibacter africanus subsp. africanus str. Walvis Bay OX=690850 GN=Desaf_2396 PE=3 SV=1
MGTGRWRLTVREEFSASHQLRHYQGKCEALHGHNFGVEVSIEGDRTDERTGMLLDFKVLKDITRECVGLLDHKHLNDLEAFAGENPSSEHLARFLFREIEGRLGGYAVSLVEVTVAEKSSQSATYFEPGGK

SEQ ID NO: 19783 - protein, 136 aa, Desulfofaba hansenii
  REGION 1..136: note = tr|A0A2M9DJW5|A0A2M9DJW5_9DELT 6-carboxy-5,6,7,8-tetrahydropterin synthase OS=Desulfofaba hansenii OX=157842 GN=CKJ97_24450 PE=3 SV=1
MAMLTITKEFLFDAAHMLRREELSDAENMEIFGKCSKIHGHTYRLQITVAGAVDENGMIIHFSNLKAMVKHHVVDRYDHSMLNAQEEYAKLPPTAEVMVNYIFKTLARALGDEGLTLTAVTLFETPTSWATMTADA

SEQ ID NO: 19784 - protein, 124 aa, Desulfofaba hansenii
  REGION 1..124: note = tr|A0A2M9DL15|A0A2M9DL15_9DELT 6-carboxy-5,6,7,8-tetrahydropterin synthase OS=Desulfofaba hansenii OX=157842 GN=CKJ97_22345 PE=3 SV=1
MFELKVTGKFAAAHQLKMVGEKCENLHGHNFKVEAYVAGEALNDAGVLLDFGIVKAALKEIVGGVDHKFLNEMAPFKESSASSENIAVHIATELQKAVDSEGVCVSRIRVWESDNACVTYHPKK

SEQ ID NO: 19785 - protein, 125 aa, unidentified
  source 1..125: note = Desulfofarcimen acetoxidans
  REGION 1..125: note = tr|C8VWH9|C8VWH9_DESAS 6-carboxy-5,6,7,8-tetrahydropterin synthase; OS = Desulfofarcimen acetoxidans (strain ATCC 49208 / DSM 771 / VKM B-1644 / 5575) OX=485916 GN=Dtox _3631 PE=3 SV=1
MSILFELKVTEHFDSAHYLREYPGKCKNVHGHTWYIEVVLQGENLDSTGILIDFSELKGLIKNIIEPFDHQLLNEQVPFEVDNPTSENLARYFYHEIKKKLSDKPVKLVRVTVSESRATAAAYFE

SEQ ID NO: 19786 - protein, 127 aa, unidentified
  source 1..127: note = Desulfofundulus australicus
  REGION 1..127: note = tr|A0A1M5C708|A0A1M5C708_9FIRM 6-carboxy-5,6,7,8-tetrahydropterin synthase; OS = Desulfofundulus australicus DSM 11792 OX=1121425; GN = SAMN02745218_02438 PE=3 SV=1
MYRLTIIERFAAAHRLFNYQGKCARLHGHTWTVEVSVEGKKLNSCGMLIDFGELKKMTSTVIKELDHSYLNDLHPFNKLDNNPTAENLAKYIYHQLKTLLPSNLTLAEVRVWESPDACASYREDTGP

SEQ ID NO: 19787 - protein, 127 aa, unidentified
  source 1..127: note = Desulfofundulus kuznetsovii
  REGION 1..127: note = tr|A0A101HXW3|A0A101HXW3_9FIRM 6-carboxy-5,6,7,8-tetrahydropterin synthase; OS = Desulfofundulus kuznetsovii OX=58135 GN=XE00_0541 PE=3; SV = 1
MYEVTVKKQFAAAHRLLDYPDRCSRLHGHSWVVEVSVSGTELDENGMLIDFKEAKKLVGEVIDGLDHQYLNELEFFSQPGRETNPTAENIARYIFNCLRAVFKNSLKLSGVRVWESSDTCAFYSEGR

SEQ ID NO: 19788 - protein, 127 aa, unidentified
  source 1..127: note = Desulfofundulus salinum
  REGION 1..127: note = tr|A0A494WY09|A0A494WY09_9FIRM 6-carboxy-5,6,7,8-tetrahydropterin synthase; OS = Desulfofundulus salinum OX=2419843 GN=queD PE=3 SV=1
MYRLTVIKRFAAAHRLVNYQGQCARLHGHTWTVEVSVGGEKLDSCGMLIDFRALKELVGKIVGELDHSYLNDLHPFNELNFNPTAENLARHIFYKLKSLLPPDLTMSEVRVWESPDVCASYREDVIP

SEQ ID NO: 19789 - protein, 127 aa, unidentified
  source 1..127: note = Desulfofundulus thermosubterraneus
  REGION 1..127: note = tr|A0A1M6DGK5|A0A1M6DGK5_9FIRM 6-carboxy-5,6,7,8-tetrahydropterin synthase; OS = Desulfofundulus thermosubterraneus DSM 16057 OX=1121432; GN = SAMN02745219_00909 PE=3 SV=1
MYRLTVIKRFAAAHRLVNYQGQCARLHGHTWTIEVSVGGEKLDSCGMLIDFRALKELVGQIVGELDHSYLNDLHPFSEPNFNPTAENLARYIYYKLKSLLPSDLTMGEVRVWESPDVCASYREDIRP

SEQ ID NO: 19790 - protein, 127 aa, Desulfofustis glycolicus
  REGION 1..127: note = tr|A0A1M5U978|A0A1M5U978_9DELT 6-carboxy-5,6,7,8-tetrahydropterin synthase; OS = Desulfofustis glycolicus DSM 9705 OX=1121409; GN = SAMN02745124_01067 PE=3 SV=1
MYDIFIKTHFSSGHHLRDYPGNCEFPHGHNWHVTVTVRAEELDEIGMGIDFKVLKKEVNKIVDHLDHKNLNDLEAFSRINPSSENIARYIFEQLQPILHDERYRLHAVTVYETDNAGLTYYGSGPHA

SEQ ID NO: 19791 - protein, 125 aa, Desulfofustis sp.
  REGION 1..125: note = tr|A0A353XGJ0|A0A353XGJ0_9DELT 6-carboxytetrahydropterin synthase OS=Desulfofustis sp.; OX = 2053546 GN=DDX99_13750 PE=4 SV=1
MYELGIRRSFSATHYLIGGDWGAENFEHSHEYRLEVILGKNQLDRHGFLVDIVEVEDHLDQVVAQFRGKTLNDLPGFTGANPSIERLAAVIHECFRFRFADYDLSSLTVVIWEDDIAWTSYRASF

SEQ ID NO: 19792 - protein, 127 aa, Desulfofustis sp.
  REGION 1..127: note = tr|A0A353XC03|A0A353XC03_9DELT 6-carboxy-5,6,7,8-tetrahydropterin synthase; OS = Desulfofustis sp. OX=2053546 GN=queD PE=3 SV=1
MYDIFINTHFSSGHHLRDYPGSCEYPHGHNWKVRVTVRAHELDEVGMGIDFKVLKQHVKVVIEQLDHRNLNEMEPFTTVNPSSEHIARYIFEQLQAPLATARYHLFSVSVHETDSAGLIYYGKSDRP

SEQ ID NO: 19793 - protein, 125 aa, Desulfoglaeba alkanexedens
  REGION 1..125: note = tr|A0A4P8L1H1|A0A4P8L1H1_9DELT 6-carboxy-5,6,7,8-tetrahydropterin synthase; OS = Desulfoglaeba alkanexedens ALDC OX=980445 GN=queD PE=3; SV = 1
MYEVKIISEFSAAHHLRHFRGKCENLHGHNWKVEVVVRGSCLDESGMLIDFGVVKQITREILGGLDHRYLNDLPAFKERNPSSENIAEHLFEGLSERINNDHRWVYCVSAWESKDACATYWNDRR

SEQ ID NO: 19794 - protein, 126 aa, Desulfoglaeba alkanexedens
  REGION 1..126: note = tr|A0A4P8L3I7|A0A4P8L3I7_9DELT 6-carboxy-5,6,7,8-tetrahydropterin synthase; OS = Desulfoglaeba alkanexedens ALDC OX=980445 GN=queD PE=3; SV = 1
MPACFEVYVETHFSAAHRLKGYPGDCARLHGHNWMVEVTVRCTQLDALGIGIDFRDVRTALKEAVADLDHQDLGEIPAFRAQNPTSENIARYLYRELSSKLDDASRRVSKVKVCETPGAGALYWEE

SEQ ID NO: 19795 - protein, 130 aa, Desulfohalobium retbaense
  REGION 1..130: note = tr|C8X2N5|C8X2N5_DESRD 6-carboxy-5,6,7,8-tetrahydropterin synthase; OS = Desulfohalobium retbaense (strain ATCC 49708 / DSM 5692 / JCM 16813 / HR100) OX=485915 GN=Dret_ 1395 PE=3 SV=1
MHTDQGLYRLRVRGGFSASHQLLHYEGKCERLHGHNFRVEAEVEGREVDPDTGMLLDFKVLKKRLNAVLDYLDHRHLNELTPFEGLSPSSENIARYIFTTLQKSMAEPGVRLREVSVAENEGSVAVYREE

SEQ ID NO: 19796 - protein, 123 aa, Desulfoluna butyratoxydans
  REGION 1..123: note = tr|A0A4U8YJK3|A0A4U8YJK3_9DELT 6-carboxy-5,6,7,8-tetrahydropterin synthase OS=Desulfoluna butyratoxydans OX=231438 GN=MSL71_11390 PE=3 SV=1
MFELKVTTRFAAAHRLTMVGEQCENLHGHNWHVEVYVQGEKLDKGGVLMDFGIVKKELKEVIGTLDHTYLNESDIFKDAPPSSEHIAMYIAKELERRIDVDGVKVSRVSAWESENSCATYIAD

SEQ ID NO: 19797 - protein, 132 aa, Desulfoluna butyratoxydans
  REGION 1..132: note = tr|A0A4U8YS17|A0A4U8YS17_9DELT 6-carboxy-5,6,7,8-tetrahydropterin synthase OS=Desulfoluna butyratoxydans OX=231438 GN=MSL71_42010 PE=3 SV=1
MLSITKEFRFDAAHKLCRHDFSEEENKALYGKCAAFHGHTYTLRVTVAGPLDASGMILNFTELKGLVKERIVDRYDHANLNELPEYENLPVTAENMVLHIFKTLSEAPEFHGLTLKEVRLYETPDSWATVTA

SEQ ID NO: 19798 - protein, 123 aa, Desulfoluna spongiiphila
  REGION 1..123: note = tr|A0A1G5IXY2|A0A1G5IXY2_9DELT 6-carboxy-5,6,7,8-tetrahydropterin synthase OS=Desulfoluna spongiiphila OX=419481 GN=SAMN05216233_122108 PE=3 SV=1
MFELKVTTRFAAAHRLTMVGKQCENLHGHNWHVEVYVQGENLDKGGVLMDFGIVKKELKKVIDTLDHTYLNESEIFKDVPASSEHIAMYIAKELERRIDVDGIKVSRVSAWESENSCATYIAD

SEQ ID NO: 19799 - protein, 123 aa, Desulfoluna spongiiphila
  REGION 1..123: note = tr|A0A5E7XG89|A0A5E7XG89_9DELT 6-carboxy-5,6,7,8-tetrahydropterin synthase OS=Desulfoluna spongiiphila OX=419481 PE=3 SV=1
MFELKVTTRFAAAHRLTMVGKQCENLHGHNWHVEVYVQGENLDKGGVLMDFGIVKKELKKVIDTLDHTYLNESEIFKDVPASSEHIAMYIAKELERRIDVDGVKVSRVSAWESENSCATYIAD

SEQ ID NO: 19800 - protein, 125 aa, unidentified
  source 1..125: note = Desulfomicrobiaceae bacterium
  REGION 1..125: note = tr|A0A3D1NBP4|A0A3D1NBP4_9DELT 6-carboxy-5,6,7,8-tetrahydropterin synthase; OS = Desulfomicrobiaceae bacterium OX=2053547 GN=DEU72_01275; PE = 3 SV=1
MGVWRLRVRGGFAAAHQILHYGGPCEALHGHNFAVEVEVEGCVLDSKTGMLMDFKELKGHLAAVTGQLDHTHVNALPEFAGVSPSSERLAEYIFRRLAVRLKDSGVRLVRVSVAENTGSEAEYRE

SEQ ID NO: 19801 - protein, 138 aa, Desulfomicrobium apsheronum
  REGION 1..138: note = tr|A0A1I3UNK2|A0A1I3UNK2_9DELT 6-carboxy-5,6,7,8-tetrahydropterin synthase; OS = Desulfomicrobium apsheronum OX=52560; GN = SAMN04488082_10847 PE=3 SV=1
MLTITKEFSFHAAHRLHLRNLSESDNLRIYGNCARLHGHTYRLQVQLAGRPDETGMILHFGELKGIVQREVLSRYDHADLSDLPEYHDLPATAENMAEHIFRTLDRALVSNRFRLEQVTVFETQTAWATRSRDGGEHA

SEQ ID NO: 19802 - protein, 130 aa, Desulfomicrobium apsheronum
  REGION 1..130: note = tr|A0A1I3UEB1|A0A1I3UEB1_9DELT 6-carboxy-5,6,7,8-tetrahydropterin synthase; OS = Desulfomicrobium apsheronum OX=52560; GN = SAMN04488082_10793 PE=3 SV=1
MTQGQWRLRVSSDFSSSHQLRHYEGKCENMHGHNFTVEVDVVGESLDQRLGILMDFKALKRLLKEVTDELDHRHLNDLPDFAEQNPSSELLARFVFRRMKDLLAPYPVRLAEVMVSEKASSRAYYSEGSV

SEQ ID NO: 19803 - protein, 130 aa, Desulfomicrobium baculatum
  REGION 1..130: note = tr|C7LSL2|C7LSL2_DESBD 6-carboxy-5,6,7,8-tetrahydropterin synthase; OS = Desulfomicrobium baculatum (strain DSM 4028 / VKM B-1378) OX=525897 GN=Dbac_0097 PE=3 SV=1
MTQGQWRLRVSSDFSSSHQLRHYEGKCENMHGHNFTVEVDVVGESLDPKLGILMDFKALKRLLKEVTDELDHRHLNDLPDFAEQNPSSELLARFVFLRMKNLLAPYPVRLTEVMVSEKASSRAYYSEVQG

SEQ ID NO: 19804 - protein, 138 aa, Desulfomicrobium norvegicum
  REGION 1..138: note = tr|A0A1I4KYF8|A0A1I4KYF8_DESNO 6-carboxy-5,6,7,8-tetrahydropterin synthase; OS = Desulfomicrobium norvegicum (strain DSM 1741 / NCIMB 8310) OX=52561 GN=SAMN05421830_107 90 PE=3 SV=1
MLTITKEFSFHAAHRLHLRDLSESDNLRIYGNCARLHGHTYRLQVQLAGRPDETGMILHFGELKGIVQRKVLSRYDHADLSDLPEYHDLPATAENMAEHIFRTLDCALVSDRFRLEQVTVYETQTAWATRSRDGGEHA

SEQ ID NO: 19805 - protein, 130 aa, Desulfomicrobium norvegicum
  REGION 1..130: note = tr|A0A1I4GXG9|A0A1I4GXG9_DESNO 6-carboxy-5,6,7,8-tetrahydropterin synthase; OS = Desulfomicrobium norvegicum (strain DSM 1741 / NCIMB 8310) OX=52561 GN=SAMN05421830_101 673 PE=3 SV=1
MTQGQWRLRVSSDFSSSHQLRHYEGKCENMHGHNFTVEVDVVGESLDQRLGILMDFKALKRLLKEVTDELDHKHLNDLPDFAEQNPSSELLARFVFRRMKDLLASYPVRLAEVMVSEKASSRAYYSEGSV

SEQ ID NO: 19806 - protein, 130 aa, Desulfomicrobium orale
  REGION 1..130: note = tr|A0A0X8JPN0|A0A0X8JPN0_9DELT 6-carboxy-5,6,7,8-tetrahydropterin synthase; OS = Desulfomicrobium orale DSM 12838 OX=888061; GN = AXF15_05145 PE=3 SV=1
MNTGLWRLRVNSDFSSSHQLRHYEGKCERLHGHNFIVEAEVEGRELDRKLGILMDFKELKRLLKIVTDELDHKHLNELPAFTRQNPSSELLAHYVFTRLRELLASHPVRLKEVMVAEKDSSRAYYSEGGD

SEQ ID NO: 19807 - protein, 60 aa, Desulfomicrobium sp.
  REGION 1..60: note = tr|A0A3D5BQG8|A0A3D5BQG8_9DELT 6-carboxytetrahydropterin synthase QueD (Fragment); OS = Desulfomicrobium sp. OX=52017 GN=DGF30_05255 PE=4 SV=1
DHRHLNELPAFADHNPSSELLAQYVYRRMKDLLAAHPVRLEQVMVSEKASSRAYYSEGTD

SEQ ID NO: 19808 - protein, 35 aa, Desulfomicrobium sp.
  REGION 1..35: note = tr|A0A3D5BSF7|A0A3D5BSF7_9DELT 6-carboxytetrahydropterin synthase QueD (Fragment); OS = Desulfomicrobium sp. OX=52017 GN=DGF30_05260 PE=4 SV=1
MNMGKGQWRLRVSGDFSSSHQLRHYEGKCENMHGH

SEQ ID NO: 19809 - protein, 131 aa, Desulfomonile tiedjei
  REGION 1..131: note = tr|I4C7W8|I4C7W8_DESTA 6-pyruvoyl-tetrahydropterin synthase OS=Desulfomonile tiedjei (strain ATCC 49306 / DSM 6799 / DCB-1) OX=706587 GN=Desti_2993 PE=4 SV=1
MHSSSGYSVAVQRDFVAQHFLFGGDWGAENQRHSHHYRIEVQLEGAELDQHGYLVDIVDIETQLEALVSYYRDKTLNELPEFQGLNPSIEHLSRIFCDTFSSRISAKNITVITVKIWENEIAWASFRKERS

SEQ ID NO: 19810 - protein, 123 aa, Desulfomonile tiedjei
  REGION 1..123: note = tr|I4C2Z1|I4C2Z1_DESTA 6-carboxy-5,6,7,8-tetrahydropterin synthase; OS = Desulfomonile tiedjei (strain ATCC 49306 / DSM 6799 / DCB-1) OX=706587 GN=Desti_1219 PE=3 SV=1
MYEVEITVNFSAAHRLRDYNGKCEQLHGHNYKIQIAARSSSPGKGGMVIDFGDLKKAANQVLDTLDHRYLNDIKPFDEIEPSAENIAAHIFREVSQNLGDQGAMLHSVSVWESDTSKATYLKD

SEQ ID NO: 19811 - protein, 128 aa, Desulfonatronospira thiodismutans
  REGION 1..128: note = tr|D6SUG9|D6SUG9_9DELT 6-carboxy-5,6,7,8-tetrahydropterin synthase; OS = Desulfonatronospira thiodismutans ASO3-1 OX=555779; GN = Dthio_PD0263 PE=3 SV=1
MAAPRYCLRVSSDFSSSHQLRNYGGKCESLHGHNFQVQVQVCGKEVDPDTGMLMDFKELKNTLLAVLEELDHKHLNDLPHFKETNPSSENLACFVYQGLKKSLGNRGVYLDWVMVAEKDSSRAYYSES

SEQ ID NO: 19812 - protein, 130 aa, Desulfonatronovibrio sp.
  REGION 1..130: note = tr|A0A424XZA0|A0A424XZA0_9DELT 6-carboxy-5,6,7,8-tetrahydropterin synthase; OS = Desulfonatronovibrio sp. MSAO_Bac4 OX=2293858 GN=queD; PE = 3 SV=1
MAYSEWRLRVSDDFSSSHQLRNYGGKCESLHGHNFLVEVEVKGSEVDPDTGMLMDFKVLKQKLGAVLEMLDHKHLNDLEWFKKVNPSSENLAKFVYENLKPALQGEKVSIEWVMVAEKNSSKAFYREVLP

SEQ ID NO: 19813 - protein, 128 aa, Desulfonatronum sp.
  REGION 1..128: note = tr|A0A2T5CC71|A0A2T5CC71_9DELT 6-carboxy-5,6,7,8-tetrahydropterin synthase; OS = Desulfonatronum sp. SC1 OX=2109626 GN=queD PE=3 SV=1
MSREIWRLTVSDHFSSAHQLRHYQGKCESLHGHNFAVQVQVQGRDLDPKLGILIDFQELKTLLKQVLAELDHRNLNELPEFAAINPSSEHLARYIFQRLAALLPGPGVTMHAVSVAEGPTAIATYSEE

SEQ ID NO: 19814 - protein, 128 aa, Desulfonatronum thiosulfatophilum
  REGION 1..128: note = tr|A0A1G6C9H5|A0A1G6C9H5_9DELT 6-carboxy-5,6,7,8-tetrahydropterin synthase; OS = Desulfonatronum thiosulfatophilum OX=617002; GN = SAMN05660653_01416 PE=3 SV=1
MGEGLWRLTVADHFSSAHQLRHYQGKCECLHGHNFAVQVQVQGRRLHPELGIVMDFKELKALLKTVLAELDHCNLNEMAEFSRINPSSENIARHIYQRLQTMLPGPEVIMHSVSVAEGPNSVAIYMED

SEQ ID NO: 19815 - protein, 126 aa, Desulfonauticus sp.
  REGION 1..126: note = tr|A0A101DJV1|A0A101DJV1_9DELT 6-carboxy-5,6,7,8-tetrahydropterin synthase; OS = Desulfonauticus sp. 38_4375 OX=1635258 GN=XD41_0092; PE = 3 SV=1
MDKRYRLRIKDKFSAAHSLRNYEGSCENVHGHNFGVEIEVYGYSLEKDTEILIDFKVLKRKLKNILMDLDHKFLNELDFFRVNNPSSENIAKFIFFKLKETLPQNISLSYVMVSESDNSQAFYEEV

SEQ ID NO: 19816 - protein, 126 aa, Desulfonauticus submarinus
  REGION 1..126: note = tr|A0A1G9ZQA9|A0A1G9ZQA9_9DELT 6-carboxy-5,6,7,8-tetrahydropterin synthase; OS = Desulfonauticus submarinus OX=206665; GN = SAMN04488516_101119 PE=3 SV=1
MKGIYRLRIKDKFSAAHSLRNYNGKCEELHGHNFGVEIEVYGKKLEKDTEILIDFKILKKFLKEVLNSLDHKFLNDLQYFQKYNPSSENIACYIYKNLQSKLPSGVNLKYVMVSEGENSMAFFEEV

SEQ ID NO: 19817 - protein, 124 aa, Desulfonema ishimotonii
  REGION 1..124: note = tr|A0A401G1Y5|A0A401G1Y5_9DELT 6-carboxy-5,6,7,8-tetrahydropterin synthase OS=Desulfonema ishimotonii OX=45657 GN=DENIS_4186 PE=3 SV=1
MFELKVITRFAAAHQLKMVARQCENLHGHNWKVEVCVGGETLNEAGVLVDFGEIKTHVRALMAQLDHKFLNELEIFDDQCPPSSENIAHFIGTRLQEMISVPDVRVTRVTAWESDDACATYIMN

SEQ ID NO: 19818 - protein, 104 aa, Desulfonispora thiosulfatigenes
  REGION 1..104: note = tr|A0A1W1VEP7|A0A1W1VEP7_DESTI 6-pyruvoyltetrahydropterin/6-carboxytetrahydropterin synthase OS=Desulfonispora thiosulfatigenes DSM 11270; OX = 656914 GN=SAMN00017405_2 199 PE=4 SV=1
MTQYHGKCENLHGHTYKLQVTVKGTLNEEDLVLDFIVLKNIVKEKVLNKLDHTNLNDRFTQPSTENILIWIWNEIKDELKGPNYELYELKLWETPTSFATYRED

SEQ ID NO: 19819 - protein, 126 aa, Desulfopila aestuarii
  REGION 1..126: note = tr|A0A1M7YKM4|A0A1M7YKM4_9DELT 6-carboxy-5,6,7,8-tetrahydropterin synthase OS=Desulfopila aestuarii DSM 18488 OX=1121416 GN=SAMN02745220_04985 PE=3; SV = 1
MYDIFVKTHFAGAHHLRDYPGDCEKPHGHNWKVKVTVRAAKLDHLGMGIDFTILKKHVKEVIDTIDHCDLNEHEAFRVLNPSSEHIAQYLFENLADKLCHERYFLYSIEVSETDNQGLIYFGPENN

SEQ ID NO: 19820 - protein, 131 aa, Desulfopila sp.
  REGION 1..131: note = tr|A0A4U1AFF7|A0A4U1AFF7_9DELT 6-carboxy-5,6,7,8-tetrahydropterin synthase OS=Desulfopila sp. IMCC35006 OX=2569542 GN=queD PE=3 SV=1
MFDIFIDTHFAGAHHLRDYPGDCEKPHGHNWKVKVTARATELDRCGMAIDFKVLKKIVKEVIDKLDHNDLNTLPYFQDKNPSSEHIARFIFDEVSALLTNKNHSLRTVTVLETDTQGLTYYGNQDHGGELR

SEQ ID NO: 19821 - protein, 125 aa, Desulfopila sp.
  REGION 1..125: note = tr|A0A4U1AL17|A0A4U1AL17_9DELT 6-carboxytetrahydropterin synthase OS=Desulfopila sp. IMCC35006 OX=2569542 GN=FCL47_05870 PE=4 SV=1
MYNLGVAREFNARHYLIGGDWGEENVEHSHHYRIELILEKKDLDRHGFLVDIVEVERHLDEVVADFQGQTLNALDAFAGINPSIERLATILQEIFRERLGSLQLEALTVKIWENDIAWTSYRTTI

SEQ ID NO: 19822 - protein, 142 aa, unidentified
  source 1..142: note = Desulfoplanes formicivorans
  REGION 1..142: note = tr|A0A194AFJ3|A0A194AFJ3_9DELT 6-carboxy-5,6,7,8-tetrahydropterin synthase; OS = Desulfoplanes formicivorans OX=1592317 GN=DPF_0669 PE=3; SV = 1
MTRNGRWRLRVRTDFSAAHQLRHYQGKCEALHGHNFSVEAEVAGDQLDAKVGYLMDFKDLKNRLNQVVDTLDHTCLNDLPGFSTCNPTSEELARYIFEALDALLQDSPVRLCWTMVAEKDSSMAFYERCDHASQDDCRRGIS

SEQ ID NO: 19823 - protein, 132 aa, Desulforhopalus singaporensis
  REGION 1..132: note = tr|A0A1H0IZ83|A0A1H0IZ83_9DELT 6-carboxy-5,6,7,8-tetrahydropterin synthase; OS = Desulforhopalus singaporensis OX=91360; GN = SAMN05660330_00088 PE=3 SV=1
MLSITRQFRFDAAHKLERTELSDQENQLLYGKCSALHGHSYTLEVTVSGPVDESGMIINFTELKKLVTDLVITRYDHAYLNELEEYRNEVVTVENMALHIFRTLSKASEFNDLTLLRIRLYETADSWATVTA

SEQ ID NO: 19824 - protein, 128 aa, Desulforhopalus singaporensis
  REGION 1..128: note = tr|A0A1H0PJ70|A0A1H0PJ70_9DELT 6-carboxy-5,6,7,8-tetrahydropterin synthase; OS = Desulforhopalus singaporensis OX=91360; GN = SAMN05660330_01696 PE=3 SV=1
MYDIFIDTHFAGAHHLRDYPGDCEKPHGHNWKVRVTVRAAKVDKCGMGMDFTLLKKVVKEVIDLLDHHDLNTLPYFQEKNPSSEYIAEFIYGEVRARLTDDNHRIFSVRVLETDTQGLIYYGPEGPKF

SEQ ID NO: 19825 - protein, 125 aa, Desulforhopalus sp.
  REGION 1..125: note = tr|A0A4U0ZWQ2|A0A4U0ZWQ2_9DELT 6-carboxy-5,6,7,8-tetrahydropterin synthase; OS = Desulforhopalus sp. IMCC35007 OX=2569543 GN=queD PE=3; SV = 1
MFDIFIDTHFAGAHHLRDYPGDCEKPHGHNWKVRVTVRATSVDQYGMGIDFKVLKKIVKHAIDKLDHKDLNTLPYFEKQNPSSEHIAEFLFADIKEELTSDSYQLYSVRVLETDTQGLTYYGPQN

SEQ ID NO: 19826 - protein, 125 aa, Desulforhopalus sp.
  REGION 1..125: note = tr|A0A4U0ZTS2|A0A4U0ZTS2_9DELT 6-carboxytetrahydropterin synthase OS=Desulforhopalus sp. IMCC35007 OX=2569543 GN=FCL48_22335 PE=4 SV=1
MYRLGMRRKFSARHHLIGGDWGDENVEHSHNYQLELILEKKELDQHGFLVDIVEVEHHLDEVTAVFQGQYLNTLAAFEGINPSIERLANVIHDIFTKRLESFQLEALTVTIWEDDIAWTSYRATL

SEQ ID NO: 19827 - protein, 126 aa, unidentified; identical to SEQ ID NO: 18770
  source 1..126: note = Desulforudis audaxviator
  REGION 1..126: note = tr|B1I3W3|B1I3W3_DESAP 6-carboxy-5,6,7,8-tetrahydropterin synthase; OS = Desulforudis audaxviator (strain MP104C) OX=477974; GN = Daud_1237 PE=3 SV=1

SEQ ID NO: 19828 - protein, 124 aa, Desulfosoma caldarium
  REGION 1..124: note = tr|A0A3N1V069|A0A3N1V069_9DELT 6-carboxy-5,6,7,8-tetrahydropterin synthase OS=Desulfosoma caldarium OX=610254 GN=EDC27_1534 PE=3 SV=1
MYEVKVMADFAAAHNLRNFRGRCENLHGHNWKVEVTVRGDRLEESGVLVDFGEVKDALRKALHQLDHQYLNDLTYFQDKNPSSELIARYLFETLSAVIDGPHRRVHSVSAWESKDSCATYYGER

SEQ ID NO: 19829 - protein, 125 aa, unidentified
  source 1..125: note = Desulfosporosinus acididurans
  REGION 1..125: note = tr|A0A0J1FWU6|A0A0J1FWU6_9FIRM 6-carboxy-5,6,7,8-tetrahydropterin synthase; OS = Desulfosporosinus acididurans OX=476652 GN=queD PE=3; SV = 1
MYQVCVQAHFDAAHFIRNYKGKCSNLHGHRWNVVVCIEGKQLDNLGMLVDFSEVKQAIRKTLDLLDHSLLNDLPAFGPAGVNPTAELIAQFLFCEFKQNLVLGENRLVWVKVFEAPDAWAIYKED

SEQ ID NO: 19830 - protein, 125 aa, Desulfosporosinus acidiphilus
  REGION 1..125: note = tr|I4D854|I4D854_DESAJ 6-carboxy-5,6,7,8-tetrahydropterin synthase; OS = Desulfosporosinus acidiphilus (strain DSM 22704 / JCM 16185 / SJ4) OX=646529 GN=Desaci_3071 PE= 3 SV=1
MFQVCVQAHFDAAHFIRNYKGKCSNLHGHRWNVVVCIEGSKLDHLGMLVDFSEVKQVIKKTLDLLDHSLLNDLPIFGPEGINPTAELIAHFLFKEFKRSLVLEEKRLAWVKVFEAPDAWAVYKED

SEQ ID NO: 19831 - protein, 125 aa, unidentified
  source 1..125: note = Desulfosporosinus fructosivorans
  REGION 1..125: note = tr|A0A4Z0R243|A0A4Z0R243_9FIRM 6-carboxy-5,6,7,8-tetrahydropterin synthase; OS = Desulfosporosinus fructosivorans OX=2018669 GN=queD; PE = 3 SV=1
MFQVFVQAHFDAAHFIRNYDGNCAKLHGHRWNVVVCIEGRQLDHLGMLIDFSEVKQSIREKLKLLDHSLLNDLAAFGIEGVNPTAENLAQQLYTELKKDLVLTNKRLAWVQVNESPDAWAIFKED

SEQ ID NO: 19832 - protein, 126 aa, unidentified
  source 1..126: note = Desulfosporosinus fructosivorans
  REGION 1..126: note = tr|A0A4Z0R2X3|A0A4Z0R2X3_9FIRM 6-carboxy-5,6,7,8-tetrahydropterin synthase; OS = Desulfosporosinus fructosivorans OX=2018669 GN=queD; PE = 3 SV=1
MKTTKSFTFDAAHFLPDHKGKCANMHGHTYRLEVSVARNNGILGNGGSDEGMVIDFADLKAIVKAEVIDKMDHKVLNDVLPFRTTAENMADHIFKVLTDKLQASGVIVDRIKLWETPDSYVEACYE

SEQ ID NO: 19833 - protein, 125 aa, Desulfosporosinus hippei
  REGION 1..125: note = tr|A0A1G7XL28|A0A1G7XL28_9FIRM 6-carboxy-5,6,7,8-tetrahydropterin synthase; OS = Desulfosporosinus hippei DSM 8344 OX=1121419; GN = SAMN05443529_10720 PE=3 SV=1
MFQVCVRAHFDAAHYIRDYDGDCSNLHGHRWDIEVCISGEKLDHLGMLIDFKEIKQAIRKEVKLLDHCLLNDLTPFGASGVNPTAENLARYLFLEFKEALSLQEKRLAWVKVFESPDTWAIFRED

SEQ ID NO: 19834 - protein, 125 aa, Desulfosporosinus lacus
  REGION 1..125: note = tr|A0A1M5WJF7|A0A1M5WJF7_9FIRM 6-carboxy-5,6,7,8-tetrahydropterin synthase; OS = Desulfosporosinus lacus DSM 15449 OX=1121420; GN = SAMN02746098_01648 PE=3 SV=1
MFQVCVRAHFDAAHFIRDYDGDCSNLHGHRWDVEVCIAGKQLDHLGMLIDFKEVKQSIRKTLKSLDHGLLNNLTSFGPEGVNPTAENLAQFLFLEFKRDLVLEDKRLAWVKVFESPDTWAIFKED

SEQ ID NO: 19835 - protein, 125 aa, Desulfosporosinus meridiei
  REGION 1..125: note = tr|J7IWI9|J7IWI9_DESMD 6-carboxy-5,6,7,8-tetrahydropterin synthase; OS = Desulfosporosinus meridiei (strain ATCC BAA-275 / DSM 13257 / NCIMB 13706 / S10) OX=768704 GN=D esmer_2605 PE=3; SV = 1
MFQVCVRAHFDAAHYIRDYDGDCSNLHGHRWDIEVCVSGEKLDHLGMLIDFKDIKQAIRSEVKLLDHCLLNDLTPFGASGVNPTAENLARYLYLEFKEALSLQEKRLAWVKVFESPDTWAIYEED

SEQ ID NO: 19836 - protein, 125 aa, Desulfosporosinus orientis
  REGION 1..125: note = tr|G7WDT3|G7WDT3_DESOD 6-carboxy-5,6,7,8-tetrahydropterin synthase; OS = Desulfosporosinus orientis (strain ATCC 19365 / DSM 765 / NCIMB 8382 / VKM B-1628) OX=768706 GN =Desor_3342 PE=3; SV = 1
MFQVCVRAHFDAAHFIRGYDGDCAKLHGHRWDVEVCISGNQLDSLGMLIDFKDVKQTIRKTLKSLDHSLINDLTHFGPQGINPTAENLARFLFLEFKRDLRLNDNNLAWVKVYESPDTWAIFKED

SEQ ID NO: 19837 - protein, 126 aa, Desulfosporosinus sp.
  REGION 1..126: note = tr|A0A0F2JEM2|A0A0F2JEM2_9FIRM 6-carboxy-5,6,7,8-tetrahydropterin synthase; OS = Desulfosporosinus sp. I2 OX=1617025 GN=UF75_2275 PE=3; SV = 1
MFQVCVRAHFDAAHFIRNYEGDCANLHGHRWDVEVCIEGQSLDNLGMLIDFSLVKQSIRKYLQILDHSLLNDFPAFGVQGVNPTAENIAQFLYREFKKDIVLIDKRLTWVKVYESPDTWALFKEDG

SEQ ID NO: 19838 - protein, 125 aa, Desulfosporosinus sp.
  REGION 1..125: note = tr|A0A117SJX7|A0A117SJX7_9FIRM 6-carboxy-5,6,7,8-tetrahydropterin synthase; OS = Desulfosporosinus sp. BRH_c37 OX=1734396 GN=APF81_27565; PE = 3 SV=1
MFQVCVQAHFDAAHFIRNYDGNCAKLHGHRWNVVVCIEGRELDHLGMLIDFGEIKQSIRKKLKLLDHSLLNDLPSFGLEGVNPTAENLALLIFTELKRDLVLTEKRLAWVQVNESPDAWAIFKEG

SEQ ID NO: 19839 - protein, 132 aa, Desulfosporosinus youngiae
  REGION 1..132: note = tr|H5XVK8|H5XVK8_9FIRM 6-carboxy-5,6,7,8-tetrahydropterin synthase; OS = Desulfosporosinus youngiae DSM 17734 OX=768710; GN = DesyoDRAFT_3047 PE=3 SV=1
MFQVCVRAHFDAAHFIRDYDGDCAKLHGHRWDVEVCIEGSQLNQLGMLIDFKDVKQSIRKTLKLLDHSLLNDLTPFGINGVNPTAENLARFLFFEFKGDLVLEDKHLAWVKVYESPDTWALFKEDKSVRGAL

SEQ ID NO: 19840 - protein, 80 aa, Desulfotalea psychrophila
  REGION 1..80: note = tr|Q6AKY1|Q6AKY1_DESPS Related to 6-pyruvoyl-tetrahydropterin synthase OS=Desulfotalea psychrophila (strain LSv54 / DSM 12343) OX=177439; GN = DP2265 PE=4 SV=1
MGLDFTVLKKKTKEVIELLDHRDLNNLPYFKEKNPSSEHIAIFIFDILAPVLEHKRYSLYSVRVMETDNQGCTYFAPSQG

SEQ ID NO: 19841 - protein, 136 aa, Desulfotalea psychrophila
  REGION 1..136: note = tr|Q6ARY1|Q6ARY1_DESPS 6-carboxy-5,6,7,8-tetrahydropterin synthase; OS = Desulfotalea psychrophila (strain LSv54 / DSM 12343); OX = 177439 GN=DP0165 PE=3 SV=1
MAMLTITKEFRFDAAHKLFLKDLTDQENREAFGKCSQLHGHTYCLRITITGKVQPNGMVLNFTDLKQIVEEKIIARYDHSHLNELEEYRDLPTTAENMSLYIFKVLAACLKKQKVTLTEVQLYETPTSWATVSHDA

SEQ ID NO: 19842 - protein, 128 aa, Desulfotalea sp.
  REGION 1..128: note = tr|A0A2G2DQA0|A0A2G2DQA0_9DELT 6-carboxy-5,6,7,8-tetrahydropterin synthase; OS = Desulfotalea sp. OX=2030813 GN=queD PE=3 SV=1
MFDIFIDTHFAGAHHLRDYPGECEKPHGHNWKVKVTVRASSVDQYGMGIDFKILKKVVKKAIDKLDHKDLNELPYFRDQNPSSEHIAEFLFEEVKEDLASDSYYLYSVRVLETDTQGLTYYGPTSEQD

SEQ ID NO: 19843 - protein, 127 aa, Desulfotignum phosphitoxidans
  REGION 1..127: note = tr|S0FZ22|S0FZ22_9DELT 6-carboxy-5,6,7,8-tetrahydropterin synthase; OS = Desulfotignum phosphitoxidans DSM 13687 OX=1286635; GN = queD PE=3 SV=1
MFELKVKTRFAGAHRLTMVGQKCENLHGHNWQVEVCVKGPKLNDAGVLADFGDIKKAVRQVVDGDLDHKYLNELSVFEGMQPTSERIAVYIARQVQALLDENLPEKLQVSRVMAWESEDACAIYYPD

SEQ ID NO: 19844 - protein, 134 aa, Desulfotignum phosphitoxidans
  REGION 1..134: note = tr|S0G179|S0G179_9DELT 6-carboxy-5,6,7,8-tetrahydropterin synthase; OS = Desulfotignum phosphitoxidans DSM 13687 OX=1286635; GN = queD PE=3 SV=1
MLTITREFRFDAAHRLFLNGLTDRENRDIFGQCSKLHGHTYRLRVTVSGRVHPNGMILDFTDLKQIVDEKIIARYDHAFLNEWDEYRDQPTTVENMCLHIFKVLFPCFEALGAVLTRVQICETPDAWATVTPDV

SEQ ID NO: 19845 - protein, 131 aa, Desulfotomaculum aeronauticum
  REGION 1..131: note = tr|A0A1M6NEX7|A0A1M6NEX7_9FIRM 6-carboxy-5,6,7,8-tetrahydropterin synthase; OS = Desulfotomaculum aeronauticum DSM 10349 OX=1121421; GN = SAMN02745123_00096 PE=3 SV=1
MYELTVKSRFSAAHSLCGYPGDCARLHGHTWTVEVKVCGHDLDQLGMVVDFKDIKRQLSRIIDQLDHSFLNDLPGFGPEGLNPTAENLSYYIYQSLAKPVAELRPGIKLKEISVWESPDAYATYREGSSCE

SEQ ID NO: 19846 - protein, 106 aa, unidentified
  source 1..106: note = Desulfotomaculum aquiferis
  REGION 1..106: note = tr|A0A4Q2WPH8|A0A4Q2WPH8_9FIRM Uncharacterized protein OS=Desulfotomaculum aquiferis OX=1397668; GN = N752_14000 PE=4 SV=1
MYELTVSKSFSAAHILCGYPGDCARLHGHTWTVQVKVKGEELDNLGMLVDFKAIKKELMNLIDQFDHRFINDLDGFGDGGVNPTAENLAFYIYRSLEKPVEALRLG

SEQ ID NO: 19847 - protein, 124 aa, Desulfotomaculum arcticum
  REGION 1..124: note = tr|A0A1I2QHM6|A0A1I2QHM6_9FIRM 6-carboxy-5,6,7,8-tetrahydropterin synthase; OS = Desulfotomaculum arcticum DSM 17038 OX=1121424; GN = SAMN05660649_01253 PE=3 SV=1
MDNNIIAYITKVFTFDSAHSLPNYPGHCRNIHGHTYKLEVTVKGEINNETGMVMDFYDLKHLVKEHVISKLDHCYLNDVLPCVPTAENIAVWICQLIKVKSPSLYQVKLWETPTSCVEVYAADV

SEQ ID NO: 19848 - protein, 125 aa, unidentified
  source 1..125: note = Desulfotomaculum copahuensis
  REGION 1..125: note = tr|A0A1B7LE21|A0A1B7LE21_9FIRM 6-carboxy-5,6,7,8-tetrahydropterin synthase; OS = Desulfotomaculum copahuensis OX=1838280 GN=A6M21_10725; PE = 3 SV=1
MYQLSVTKRFAAAHRLSNYQGQCANLHGHTWQLEVTVKGEKLDANGMLLDFKALKEMVGRVIKELDHQYLNELPSFNRINPTAENLARYISGRLRVLLAPELQLALVRVWESPDAWAGYTEDEQA

SEQ ID NO: 19849 - protein, 127 aa, unidentified
  source 1..127: note = Desulfotomaculum ferrireducens
  REGION 1..127: note = tr|A0A1S6IWH7|A0A1S6IWH7_9FIRM 6-carboxy-5,6,7,8-tetrahydropterin synthase; OS = Desulfotomaculum ferrireducens OX=1833852; GN = B0537_08535 PE=3 SV=1
MYELTVKSRFSAAHSLCGYPGDCARLHGHTWTVEVKVCGHELDKLGMLVDFKDIKRQLSRIIDQLDHSLLNDLPEFSTGGSNPTAENLAYYIYQSLLKPVAELRPGLKLKEISVWESPDAYATYRED

SEQ ID NO: 19850 - protein, 128 aa, Desulfotomaculum hydrothermale
  REGION 1..128: note = tr|K8EEA0|K8EEA0_9FIRM 6-carboxy-5,6,7,8-tetrahydropterin synthase; OS = Desulfotomaculum hydrothermale Lam5 = DSM 18033; OX = 1121428 GN=ygcM PE=3 SV=1
MYELTVRSRFSAAHSLCGYPGDCARLHGHTWTVQIKVEGEKLDSLGMLVDFKELKKQLSLIIDQLDHRLLNELPGFREQGINPTAENLAYYIYQTLKQPVTDLQQGIRLKEISVWESPDAYATYWEER

SEQ ID NO: 19851 - protein, 127 aa, Desulfotomaculum nigrificans
  REGION 1..127: note = tr|F6B4U2|F6B4U2_DESCC 6-carboxy-5,6,7,8-tetrahydropterin synthase; OS = Desulfotomaculum nigrificans (strain DSM 14880 / VKM B-2319 / CO-1-SRB) OX=868595 GN=Desca_1345PE=3 SV=1
MYQLTVNSKFSAAHSLCGYPGDCARLHGHTWNVQVKVKGNNLDHLGMLVDFKAIKKLLAEVVDQLDHSFLNEIPGFGQDGMNPTAENLAYYIYKKLKNPIAGIREGVTLQEISVWESPDAYATYREE

SEQ ID NO: 19852 - protein, 129 aa, unidentified
  source 1..129: note = Desulfotomaculum profundi
  REGION 1..129: note = tr|A0A2C6M6P6|A0A2C6M6P6_9FIRM 6-carboxy-5,6,7,8-tetrahydropterin synthase; OS = Desulfotomaculum profundi OX=1383067 GN=P378_13440 PE=3; SV = 1
MFELTVRSRFSAAHSLCGYPGDCARLHGHTWTVEVKVTGDKLDQLGMLVDFKDIKKQLSMIIDQLDHRFLNDIPGFREEGVNPTAENLAYYIYKTLEQAIAAIREGIRLKEISVWESPDAYATYREEFN

SEQ ID NO: 19853 - protein, 1161 aa, unidentified
  source 1..1161: note = Desulfotomaculum profundi
  REGION 1..1161: note = tr|A0A2C6ME53|A0A2C6ME53_9FIRM PTPS_related domain-containing protein OS=Desulfotomaculum profundi; OX = 1383067 GN=P378_13200 PE=4 SV=1
MGEIKIACLENNVIEILKQELQALINQKKQSEDKITILKCQLAAREAEVMTVERALAESKKIAREIEDQALQRAESTVEETKKIVREKEALIKSVESEIARLEKELELYHHLVNQLITIGKTNNTGGDRSSRENLHSVSIQEIKPFTNGSLYTIKMVCFLNARHFVSFSGTAGPVHAHSWQVQISARVNSDNPELVTFTKVIESIKTVFVPYENTILNEVYPFNIIQPTTENMALYFYNRLEDTLADLGLSLNTLSVWETPTRGIEVSNRYQEFDRILQNPEQYEVPSEFKKEAAAGVEPVPSVPIQDENKENAVEHNDREISTGNPSKYATGHWVLALAVISLFAIVAYYNILFPPAGQHYPWGADTSLHLRHAEYVYNEFRKGNYFPQFFEYSYTSFDPFIYWGSLSYYLLAFFRAITGDFILAGKYFIFTCYLLGGFSCLIFQRRLGLWPATLVGIIWTVWITNLHVAFVDGNLPRVMVTALLPVLLEMYLRVLENRKSIYAIPITVFLFQLVNLGQVYTGVGYFLCLFLFTFFLWIFQGCSFKDCLRGILVLTAGILVSAWWLLPILNNHMDTGTSTAGSGLIPATIALDPFYRFSDHDSFYWGISLLFVILANFLTWRLKLSWARSLTMCGIVLMVLTFPSLEPIYHLLPLSQLTWPLCFTDFASLGLLVSGVAFTTRNKQHWLLRFKQAPAVLLAGIFLVLMTDCLFSLGLLAKTEKDRPGLPSSELLQNPTGWRHSLIDLRKADSSPSFLLSSHPGHGRGTGWVWQGNWTSKQIIFSNHGLDQQYYPFLFRSGLYLGITDMAVADAVLTNPEEFRKAAMLAGYHRRGTDGYYSILSNDHGPYLVEKSYKCLVIGKYAEIVGLLFPEVEMGVSRYIDDYSPTFLRKYPTILLAGAEWQVKSKAEETVRNYAAAGGQVLVDLAGMSKNVLSGTPQFLGVAGEPVLLDSRLEIFGQGKNLSVPLWSATATPNSPVPAGLDKVTFYVPLGLDNVELKFIYHGNEAPVYGYKLVDGKKIGFLGGNLIHQAFLTGDKVTLDLLREILGLSSQYHAWNIIPLADFKVTKNGYQIHYRSERNLGAIVPVVAQNNMKVTIDGVLTPYSKFENLLQLDLPAGSHVITIERSLIPIQLLGIGLSAGSLLLLIFILYRVKRAGETA

SEQ ID NO: 19854 - protein, 128 aa, Desulfotomaculum putei
  REGION 1..128: note = tr|A0A1M4T0S6|A0A1M4T0S6_9FIRM 6-carboxy-5,6,7,8-tetrahydropterin synthase; OS = Desulfotomaculum putei DSM 12395 OX=1121429; GN = SAMN02745133_00306 PE=3 SV=1
MYELTVRSRFSAAHSLCGYPGDCARLHGHTWTLEVKVVGEKLDQMGMLVDFKEIKKQLSLVIDQLDHRLLNEIPGFGKDGLNPTAENLSYYIYQTLKQPIAAMKEGIRLKEISVWESPDAYATYREDV

SEQ ID NO: 19855 - protein, 1158 aa, Desulfotomaculum putei
  REGION 1..1158: note = tr|A0A1M5C8T7|A0A1M5C8T7_9FIRM 6-pyruvoyl tetrahydropterin synthase-related domain-containing protein OS=Desulfotomaculum putei DSM 12395 OX=1121429; GN = SAMN02745133_ 02848 PE=4 SV=1
MGEIKIACLENDVIEILKQELQALINQKKQSEDKITNLKCQLAAREAEVMTVERALAESKKIAREIEDQALQRAESMVEETKKIVREKEALIKSVESEIARLEKELELYHHLVNQLITIGKTNNTGGDRSSRENLHSVSIQEIKPFTNGSLYTIKMVCFLNARHFVSFSGTAGPVHAHSWQVQISAQVNSDNPELVTFTKVIESIKTVFVPYENTILNEVYPFNIIQPTTENMALYFYNRLEDTLADLGLSLNTLSVWETPTRGIEVSNRYQEFDRILQNPEQYEVPSEFKKEAAAGVEPVPSVPIQDENKESAVEHNDREISTGNPSKYAWVLALAVISLFATVAYYNILFPPAGQHYPWGADTSLHLRHAEYVYNEFRKGNYFPQFFEYSYTSFDPFIYWGSLSYYLLAFFRAITGDFILAGKYFIFTCYLLGGFSCLIFQRRLGLWPATLVGIIWTVWITNLHVAFVDGNLPRVMVTALLPVLLEMYLRVLENRKSIYAIPITVFLFQLVNLGQVYNGVGYFLCLFLFTFFLWIFQGCSFKDCLRGILVLTAGILVSAWWLLPILNNHMDTGTSTAGSGLIPAAIALDPFYRFSDHDSFYWGISLLFVILANFLTWRLKLSWARSLTMCGIVLMVLTFPSLEPIYHLLPLSQLTWPLCFTDFASLGLLVSGVAFTTRNKQHWLLRFKQAPAVLLAGIFLVLMTDCLFSLGLLAKTEKDRPGLPSSELLQNPTGWRHSLIDLRKADSSPSFLLSSPPGHGRGTGWVWQGNWTSKQIIFSNHGLDQQYYPFLFRSGLYLGITDMAVADAVLTNPEEFRKAAMLAGYHRRGTDGYYSIWSNDHGPYLVEKSYKCLVIGKYAEIVGLLFPEVEMGVSRYIDDYSPTFLRKYPTILLAGAKWQVKSKAEETVRNYAAAGGQVLVDLAGMSKNVLSGTPQFLGVAGEPVLLDSRLEIFGQGKNLSIPLWSATATPNSPVPAGLDKVTFYVPLGLDNVELKFIYHGNEAPVYGYKLVDGKKIGFLGGNLIHQAFLTGDKVTLDLLREILGLSSQYHAWNIIPLADFKVTKNGYQIHYRSERNLGAIVPVVAQNNMKVTIDGVLTPYSKFENLLQLDLPAGSHVITIERSLIPIQLLGIGLSAGSLLLLIFILYRVKRAGETA

SEQ ID NO: 19856 - protein, 128 aa, unidentified
  source 1..128: note = Desulfotomaculum reducens
  REGION 1..128: note = tr|A4J5C6|A4J5C6_DESRM 6-carboxy-5,6,7,8-tetrahydropterin synthase; OS = Desulfotomaculum reducens (strain MI-1) OX=349161; GN = Dred_1754 PE=3 SV=1
MFELTVKNKFSAAHVLCGYPGDCARLHGHTWTVEVKVFGKELNELGMLIDFKDIKKQLATIINEFDHSYINDLPGFGEDGVNPTAENLSYYIFQTLAQRISSIQMGVKLKEVSVWESPDAYATYREDF

SEQ ID NO: 19857 - protein, 127 aa, Desulfotomaculum ruminis
  REGION 1..127: note = tr|F6DLC1|F6DLC1_DESRL 6-carboxy-5,6,7,8-tetrahydropterin synthase; OS = Desulfotomaculum ruminis (strain ATCC 23193 / DSM 2154 / NCIMB 8452 / DL) OX=696281 GN=Desru_22 20 PE=3 SV=1
MYELTVNGKFSAAHRLCGYPGDCARLHGHTWTVQVKVIGEELDPLGMLVDFKEIKKHLAAVIDRLDHQFLNEIPGFGQGGVNPTAENLSFYIYRLLEKPILEIKKGIRLKEISVWESPDAYATYREE

SEQ ID NO: 19858 - protein, 129 aa, Desulfotomaculum sp.
  REGION 1..129: note = tr|A0A356UII4|A0A356UII4_9FIRM 6-carboxy-5,6,7,8-tetrahydropterin synthase; OS = Desulfotomaculum sp. OX=41211 GN=DD719_05650 PE=3 SV=1
MDLLFTVGVKREFEAAHKLEGDFGPASSLHGHTYQVEVEVSGKELDKKGVLFDLGHLKESLNKVIAPLHCRYLNELEAFKAKNPTAENVSKYILECLLPEIENKSKNIQRLKVTVWESSFAFACCSIEF

SEQ ID NO: 19859 - protein, 126 aa, Desulfotomaculum sp.
  REGION 1..126: note = tr|A0A356UI78|A0A356UI78_9FIRM 6-carboxy-5,6,7,8-tetrahydropterin synthase; OS = Desulfotomaculum sp. OX=41211 GN=queD PE=3 SV=1
MYEITVKKTFAAAHRLPGYKGRCAAVHGHTWTVEVSVAGVSLDENGMLIDFIQLKEIVTQITRDFDHQYLNDLKLADSVVTTHPTAENLARYIFKQLGRLLPPNLSLTKVKVWESAETAASYQEGV

SEQ ID NO: 19860 - protein, 130 aa, Desulfovibrio alaskensis
  REGION 1..130: note = tr|Q30ZA2|Q30ZA2_DESAG 6-carboxy-5,6,7,8-tetrahydropterin synthase; OS = Desulfovibrio alaskensis (strain G20) OX=207559; GN = Dde_2197 PE=3 SV=1
MPKGIWRLTVRSDFAAAHSLRNYCGKCEALHGHNFGVEATVEGGILTPDTELLVDFKVLKNALKQVLDGLDHCVLNETPPFDTCNPSSENLARHIYRHMAPLVQPHGVRMHSVTVSEKQAQSATYMEVDE

SEQ ID NO: 19861 - protein, 129 aa, Desulfovibrio alkalitolerans
  REGION 1..129: note = tr|S7TG79|S7TG79_9DELT 6-carboxy-5,6,7,8-tetrahydropterin synthase; OS = Desulfovibrio alkalitolerans DSM 16529 OX=1121439; GN = dsat_1745 PE=3 SV=1
MPGRWLIGVTLDFSASHCLRNYGGKCEALHGHNFSVTVEVEGRDPDPATGLVLDFKILKTETKAVLETLDHAHLNDTPPFRDVNPSSEHIARHVFRLLAERLSPYPVRLKRVQVAEKPGQWAVYLEDEP

SEQ ID NO: 19862 - protein, 130 aa, Desulfovibrio bizertensis
  REGION 1..130: note = tr|A0A1T4VY84|A0A1T4VY84_9DELT 6-carboxy-5,6,7,8-tetrahydropterin synthase; OS = Desulfovibrio bizertensis DSM 18034 OX=1121442; GN = SAMN02745702_01247 PE=3 SV=1
MSEKKGKWRLTVRKDFAAAHQLRHYEGKCERMHGHNFMVEAQVEGDTLSQDTELLVDFKVLKNMLKEILGDMDHCHLNEHPAFAVHNPSSENIARHIYKGLEARLAGSGVDVKSVSVSEKPAQTATYFEE

SEQ ID NO: 19863 - protein, 123 aa, Desulfovibrio carbinolicus
  REGION 1..123: note = tr|A0A4P6HKR0|A0A4P6HKR0_9DELT 6-carboxy-5,6,7,8-tetrahydropterin synthase; OS = Desulfovibrio carbinolicus OX=296842 GN=C3Y92_07625; PE = 3 SV=1
MPPIYTIAVAGDFSAAHRLPGHPGPCAAMHGHNFQVTAEICAESLINGMVADFLDVRTAMDAIFADLDHACLNDVPTLDPPTAEVLAGYILAKLKERLDDGRVRVTAVTVVESRGLAATCREA

SEQ ID NO: 19864 - protein, 130 aa, Desulfovibrio carbinolicus
  REGION 1..130: note = tr|A0A4P6HSG6|A0A4P6HSG6_9DELT 6-carboxy-5,6,7,8-tetrahydropterin synthase; OS = Desulfovibrio carbinolicus OX=296842 GN=C3Y92_14235; PE = 3 SV=1
MQQRKGKWRLTVSEGFCASHCLRGYEGPCENLHGHNFGVEAVVEGERLDPKVEYLVDFKVLRGRLREILAGLDHRHLNDLPAFSLENPSSENLARFVYRQLEAALAGQPVRLVCVSVSEKDSSKATYMEE

SEQ ID NO: 19865 - protein, 124 aa, Desulfovibrio carbinoliphilus
  REGION 1..124: note = tr|G7QC33|G7QC33_9DELT 6-carboxy-5,6,7,8-tetrahydropterin synthase; OS = Desulfovibrio carbinoliphilus subsp. oakridgensis; OX = 694327 GN=DFW101_3481 PE=3 SV=1
MPGTYTITVSGAFSAAHRLPDHPGPCAFMHGHNFEVAVALTATALVRGMVADFLDVRAALDAAFARLDHACLNDIPELSPPTAEVLAAWIFGQLRERLDDGRVRVARVTVTESAGLAATYAEDA

SEQ ID NO: 19866 - protein, 131 aa, Desulfovibrio carbinoliphilus
  REGION 1..131: note = tr|G7QCS5|G7QCS5_9DELT 6-carboxy-5,6,7,8-tetrahydropterin synthase; OS = Desulfovibrio carbinoliphilus subsp. oakridgensis; OX = 694327 GN=DFW101_0214 PE=3 SV=1
MLNNKRGVWQLTVTESFSASHCLRGYEGPCENLHGHNFGVEAVVEGERLDAKVEYLMDFKKLRGRLRGILAELDHRHLNDVAPFDGENPSSENLARHIYRRLEAALAGEAVTLVAVSVSEKDTSKATYREL

SEQ ID NO: 19867 - protein, 120 aa, Desulfovibrio desulfuricans
  REGION 1..120: note = tr|A0A4Y3TD82|A0A4Y3TD82_DESDE 6-carboxy-5,6,7,8-tetrahydropterin synthase; OS = Desulfovibrio desulfuricans OX=876 GN=DDE01_11040 PE=3; SV = 1
MELFVTLSFDAAHRLPCVPQGHKCGNLHGHTFSVEVHLAGPLDGDNGWVMDFGDVKRVARPVVDQLDHAYLNDIEGLENPTSENIARWLWERLVTSLPLLSKVVVRESPTSGAVYRGHSA

SEQ ID NO: 19868 - protein, 126 aa, Desulfovibrio desulfuricans
  REGION 1..126: note = tr|F0JJ65|F0JJ65_DESDE 6-carboxy-5,6,7,8-tetrahydropterin synthase; OS = Desulfovibrio desulfuricans ND132 OX=641491; GN = DND132_2761 PE=3 SV=1
MPGKWKLTITQEFSASHQLRNYCGKCENMHGHNFGVEVVVEGDTLDPKVQYLVDFKELKRLTRTVLDKLDHKHLNEVECFTEINPSSENLAMFIYRNLKSNMPENVSLVEVSVSEKNTSKATYWEE

SEQ ID NO: 19869 - protein, 143 aa, unidentified
  source 1..143: note = Desulfovibrio fairfieldensis
  REGION 1..143: note = tr|A0A109W3S4|A0A109W3S4_9DELT 6-pyruvoyl tetrahydrobiopterin synthase OS=Desulfovibrio fairfieldensis OX=44742 GN=AXF13_03180 PE=4 SV=1
MTVRHCWRLTVRDEFSAGHALRHYQGKCERLHGHNFGVELCVEGRDLTPGTELLLDFKVLKTALKDALRELDHCVLNDTPPFDRINPSSENLSRHIWRNVAARLAESPDPQARAVRLVSVSVSEKGSQSATYLEWAEGDPPVR

SEQ ID NO: 19870 - protein, 128 aa, Desulfovibrio ferrireducens
  REGION 1..128: note = tr|A0A1G9D9X4|A0A1G9D9X4_9DELT 6-carboxy-5,6,7,8-tetrahydropterin synthase; OS = Desulfovibrio ferrireducens OX=246191; GN = SAMN05660337_0968 PE=3 SV=1
MNKGTWKLKVKKDFAAAHQLRNYGGKCENIHGHNFGVEVEIEGNKLDSKIEILMDFKVLKNELSAVLETLDHKHLNEIEYFKHRNPSSENLARYVYEEMKKRVETDGIKLVYASVSENDSSVATYSEV

SEQ ID NO: 19871 - protein, 128 aa, unidentified
  source 1..128: note = Desulfovibrio ferrophilus
  REGION 1..128: note = tr|A0A2Z6B0E5|A0A2Z6B0E5_9DELT 6-carboxy-5,6,7,8-tetrahydropterin synthase; OS = Desulfovibrio ferrophilus OX=241368 GN=DFE_2184 PE=3; SV = 1
MPKGKWRLEITEDFAASHQLRHYEGKCERMHGHNFGVLAAVEGDTLTPDTELLIDFKVLRKQLKAVLSELDHRHLNEVEPFTTCNPSSENLARFIYQGLSAKLADVGVRVAYITVSEKPAQSATYFED

SEQ ID NO: 19872 - protein, 129 aa, Desulfovibrio fructosivorans
  REGION 1..129: note = tr|E1K0M9|E1K0M9_DESFR 6-carboxy-5,6,7,8-tetrahydropterin synthase; OS = Desulfovibrio fructosivorans JJ OX=596151; GN = DesfrDRAFT_3429 PE=3 SV=1
MSKRGIWRLTVTESFSASHCLRGYEGPCENLHGHNFGVEAVVEGERLDPKVEYLMDFKRLRGALREILAPLDHHHLNEVPPFDVENPSSENLARYIYRKLEGALEGEAARLVSVSVLEKEASKATYMEY

SEQ ID NO: 19873 - protein, 124 aa, Desulfovibrio fructosivorans
  REGION 1..124: note = tr|E1JX66|E1JX66_DESFR 6-carboxy-5,6,7,8-tetrahydropterin synthase; OS = Desulfovibrio fructosivorans JJ OX=596151; GN = DesfrDRAFT_2190 PE=3 SV=1
MPGIYAITVSGSFSAAHRLPGHPGPCAAMHGHNFAVTLHLVATSLKDGMVADFLTVRAALDAAFARLDHACLNDIPELSPPTAEVIAAWIFGEVRPRLEDGRVRLSRVTVEESKGLVASYTEDA

SEQ ID NO: 19874 - protein, 130 aa, Desulfovibrio gigas
  REGION 1..130: note = tr|T2G7C5|T2G7C5_DESGG 6-carboxy-5,6,7,8-tetrahydropterin synthase; OS = Desulfovibrio gigas (strain ATCC 19364 / DSM 1382 / NCIMB 9332 / VKM B-1759) OX=1121448 GN=DGI_ 0099 PE=3 SV=1
MTDTWRLSVTREFAASHCLRHYQGKCEQLHGHNFSAHVVVEGHTLDPKVEILMDFGDLKKCTDQALAALDHRHLNEVPPFDRLNPSSENLARHIFHTLTPLLAAFPVRLVSVTVCEKPGQCASYSPTGAF

SEQ ID NO: 19875 - protein, 128 aa, unidentified
  source 1..128: note = Desulfovibrio gilichinskyi
  REGION 1..128: note = tr|A0A1X7EQB2|A0A1X7EQB2_9DELT 6-carboxy-5,6,7,8-tetrahydropterin synthase; OS = Desulfovibrio gilichinskyi OX=1519643; GN = SAMN06295933_3249 PE=3 SV=1
MKQGKWKLKVKKDFAAAHQLRNYNGKCENMHGHNFGVEVEVEGCKLDPEVEIVMDFKVLKTELADVLETLDHKDLNKIEYFKNRNPSSENLARYVYEEMKKRVETDEIKLIYASVSENESSVATYSEI

SEQ ID NO: 19876 - protein, 127 aa, Desulfovibrio gracilis
  REGION 1..127: note = tr|A0A1T4Y2G6|A0A1T4Y2G6_9DELT 6-carboxy-5,6,7,8-tetrahydropterin synthase; OS = Desulfovibrio gracilis DSM 16080 OX=1121449; GN = SAMN02745704_02681 PE=3 SV=1
MPEPLWRLTVKLGFSASHQLRNYGGKCERMHGHNFGVEVMVEGSRLDPKIHYLVDFKVLKRLTKEILEELDHHHLNEHPFFLERNPSSENIAMYIYRQLSGKLPENVRLVEVSVAEKDAQKATYMEV

SEQ ID NO: 19877 - protein, 128 aa, Desulfovibrio hydrothermalis
  REGION 1..128: note = tr|L0R8Z0|L0R8Z0_9DELT 6-carboxy-5,6,7,8-tetrahydropterin synthase; OS = Desulfovibrio hydrothermalis AM13 = DSM 14728; OX = 1121451 GN=DESAM_20363 PE=3 SV=1
MSKGKWKLKVKKDFSAAHQLRNYGGKCENMHGHNFGVEVEIEGDRLDSRVEILMDFKELKKELSEVLETLDHKHLNSTEFFEHRNPSSENIARYIYKEMQKRVETEHIKLVYASVSEKDSSVASYSEE

SEQ ID NO: 19878 - protein, 142 aa, unidentified
  source 1..142: note = Desulfovibrio legallii
  REGION 1..142: note = tr|A0A1G7I146|A0A1G7I146_9DELT 6-carboxy-5,6,7,8-tetrahydropterin synthase; OS = Desulfovibrio legallii OX=571438 GN=SAMN05192586_101111; PE = 3 SV=1
MNTHLWRLTVRDDFAAAHALRHYEGKCERLHGHNFAVELAVEGQNLTPDTEMLLDFKVLKTGLKAVLEALDHRLLNETPPFDRLNPSSENLARHIWRGMEAWLAGQADPQARAVRLYSVTVAEKGAQSATYMELPPLAAPRG

SEQ ID NO: 19879 - protein, 130 aa, Desulfovibrio litoralis
  REGION 1..130: note = tr|A0A1M7TAA6|A0A1M7TAA6_9DELT 6-carboxy-5,6,7,8-tetrahydropterin synthase; OS = Desulfovibrio litoralis DSM 11393 OX=1121455; GN = SAMN02745728_01772 PE=3 SV=1
MLKKFWRITIHSEFSAAHALRNYNGKCEHLHGHNFGVSITIQGEKLSEDTELLLDFTVLKQELKSVLELLDHKDLNAVSPFDKINPSSENIARFVFQALAPRLTKYAVTLYEVNISERGPQSASYFEVFE

SEQ ID NO: 19880 - protein, 130 aa, Desulfovibrio magneticus
  REGION 1..130: note = tr|C4XMR6|C4XMR6_DESMR 6-carboxy-5,6,7,8-tetrahydropterin synthase; OS = Desulfovibrio magneticus (strain ATCC 700980 / DSM 13731 / RS-1) OX=573370 GN=DMR_13660 PE=3 SV =1
METKKGKWRLTVSEGFCASHCLRGYEGPCENLHGHNFGVEAVVEGERLDPKVEYLVDFKVLRGRLREILAGLDHRHLNDLPAFSLENPSSENLARFVYRQLEAALAGQPVRLVCVSVSEKDSSKATYMEE

SEQ ID NO: 19881 - protein, 123 aa, Desulfovibrio magneticus
  REGION 1..123: note = tr|C4XPJ5|C4XPJ5_DESMR 6-carboxy-5,6,7,8-tetrahydropterin synthase; OS = Desulfovibrio magneticus (strain ATCC 700980 / DSM 13731 / RS-1) OX=573370 GN=DMR_16850 PE=3 SV =1
MPPIYTIAVAGDFSAAHRLPGHPGPCAAMHGHNFQVTAEICADSLINGMVADFLDVRTAMDAIFADLDHACLNDVPALDPPTAEVLAGYILSRLKARLDDGRVRVTAVTVVESRGLAATCREA

SEQ ID NO: 19882 - protein, 129 aa, Desulfovibrio mexicanus
  REGION 1..129: note = tr|A0A238ZZH6|A0A238ZZH6_9DELT 6-carboxy-5,6,7,8-tetrahydropterin synthase; OS = Desulfovibrio mexicanus OX=147047 GN=SAMN04488503_1694; PE = 3 SV=1
MAGKWRLTIDEGFCASHQLRNYNGKCEHLHGHNFGVSVEVEGSELDPAVEILVDFGELKRLAREAVDALDHAHLNDLPAFAERNPSSENIARHLYQGIREKLAALAPQARLVSVSVSEKGTSRATYLED

SEQ ID NO: 19883 - protein, 133 aa, Desulfovibrio mexicanus
  REGION 1..133: note = tr|A0A238Z5Q7|A0A238Z5Q7_9DELT 6-carboxy-5,6,7,8-tetrahydropterin synthase; OS = Desulfovibrio mexicanus OX=147047 GN=SAMN04488503_1238; PE = 3 SV=1
MKRNYELCVRGEFCAAHRLAGYPGDCRNTHGHNWGVTAYVLCHELDDIGMGLDFREIKRILREALATLDHACLNDLPPFSGQNPTAENIARHLFHDLGERLAQSAPQNGSAARVSRVRIAETPGAEVTYWEEP

SEQ ID NO: 19884 - protein, 134 aa, Desulfovibrio piger
  REGION 1..134: note = tr|B6WWR8|B6WWR8_9DELT 6-carboxy-5,6,7,8-tetrahydropterin synthase; OS = Desulfovibrio piger ATCC 29098 OX=411464 GN=queD PE=3; SV = 1
MSKKIWRLTVRDEISAGHALRHYEGKCERLHGHNFAVELTVEGDKLTENVELLLDFKVLKRALKEELALLDHQIINEVPPFDRINPSSENISRHIFQNVARRLAADASACHVRVHSVSVSEKGAQTATYLELED

SEQ ID NO: 19885 - protein, 138 aa, Desulfovibrio piger
  REGION 1..138: note = tr|B6WPV7|B6WPV7_9DELT Putative 6-carboxy-5,6,7,8-tetrahydropterin synthase; OS = Desulfovibrio piger ATCC 29098 OX=411464; GN = DESPIG_00072 PE=4 SV=1
MISICRYHDISVGHRICGHESHCARLHGHNYRIHFTCTADELDALGRVLDFQVVKERLCQWLEDHWDHRFLVWDKDPLLEGLRALDPSVSVLPCNPSAENMARYLGEVVGPAQLEGTGARLVAVEVEETAKCKARWSL

SEQ ID NO: 19886 - protein, 128 aa, Desulfovibrio salexigens
  REGION 1..128: note = tr|C6BS13|C6BS13_DESAD 6-carboxy-5,6,7,8-tetrahydropterin synthase; OS = Desulfovibrio salexigens (strain ATCC 14822 / DSM 2638 / NCIB 8403 / VKM B-1763) OX=526222 GN=D esal_3346 PE=3; SV = 1
MSKGKWRLKVKKDFSSAHQLRNYGGKCENMHGHNFGVEVEIEGDRLDQKVEILMDFKELKKELNEVLDTLDHKHLNSLEYFEHRNPSSENIARYIYEEMKKRVENEHVRMVFASVSEKESSVATYFED

SEQ ID NO: 19887 - protein, 131 aa, Desulfovibrio sp.
  REGION 1..131: note = tr|I2PZI8|I2PZI8_9DELT 6-carboxy-5,6,7,8-tetrahydropterin synthase; OS = Desulfovibrio sp. U5L OX=596152 GN=DesU5LDRAFT_1248; PE = 3 SV=1
MLNNKRGVWQLTVAESFSASHCLRGYEGPCENLHGHNFGVEAVVEGGRLDAKVEYLMDFKKLRGRLRGILAELDHRHLNDVAPFDGENPSSENLARHIYRRLEAALAGEAVTLVAVSVSEKDTSKATYREL

SEQ ID NO: 19888 - protein, 143 aa, Desulfovibrio sp.
  REGION 1..143: note = tr|A0A396CAJ9|A0A396CAJ9_9DELT 6-carboxy-5,6,7,8-tetrahydropterin synthase; OS = Desulfovibrio sp. AM18-2 OX=2292040 GN=queD PE=3 SV=1
MNTHLWRLTVRDDFAAAHALRHYEGKCERLHGHNFAVELTVEGQNLTPDTEMLLDFKVLKTGLKRVLETLDHRLLNETPPFDRLNPSSENLSRHIWRSMAAWLEAHPDPQARAVRLHSVTVAEKGAQSATYMELPSEVGGRAG

SEQ ID NO: 19889 - protein, 120 aa, Desulfovibrio vulgaris
  REGION 1..120: note = tr|A0A0E0T4X8|A0A0E0T4X8_DESVR 6-carboxy-5,6,7,8-tetrahydropterin synthase; OS = Desulfovibrio vulgaris (strain RCH1) OX=573059; GN = Deval_2449 PE=3 SV=1
MELFVTLSFDAAHRLPCVPKGHKCGNLHGHTFSVEVHLAGPLDGDNGWVMDFGDVKRVARPVVDQLDHAYLNDIEGLENPTSENIARWLWERLVTSLPLLSKVVVRESPTSGAVYRGHSA

SEQ ID NO: 19890 - protein, 120 aa, Desulfovibrio vulgaris; identical to SEQ ID NO: 19867
  REGION 1..120: note = tr|A0A0H3A5L6|A0A0H3A5L6_DESVV 6-carboxy-5,6,7,8-tetrahydropterin synthase; OS = Desulfovibrio vulgaris subsp. vulgaris (strain DP4); OX = 391774 GN=Dvul_0598 PE=3 SV=1

SEQ ID NO: 19891 - protein, 135 aa, unidentified
  source 1..135: note = Desulfovibrionaceae bacterium
  REGION 1..135: note = tr|A0A1J4SNJ5|A0A1J4SNJ5_9DELT 6-carboxytetrahydropterin synthase QueD; OS = Desulfovibrionaceae bacterium CG1_02_65_16 OX=1805130; GN = AUJ49_10445 PE=4 SV=1
MKRIYELSVRAEFCAAHRLIGYPGDCRNTHGHNWDVTAYVLCEELDELGMGLDFREIKKLVREALATLDHACLNDLAPFAEQNPTAENIARHLHETLSASLAACPAAKGPGGRARISRVRVAETPGAEVTYWEEP

SEQ ID NO: 19892 - protein, 128 aa, unidentified
  source 1..128: note = Desulfovibrionaceae bacterium
  REGION 1..128: note = tr|A0A316MGS6|A0A316MGS6_9DELT 6-carboxy-5,6,7,8-tetrahydropterin synthase; OS = Desulfovibrionaceae bacterium OX=2049043 GN=queD PE=3; SV = 1
MKTPVWYLTVRGEFSAAHALRHYHGKCENMHGHNYGAELTVRGEELTPDTELAMDFSQLKKIFREVLEQLDHHILNEMSPFDVINPSSENLARHIWKQMTPRLAGSPVELYSVTVSEKSAQSATYREE

SEQ ID NO: 19893 - protein, 129 aa, unidentified
  source 1..129: note = Desulfovibrionales bacterium
  REGION 1..129: note = tr|A0A1F9QB07|A0A1F9QB07_9DELT 6-carboxy-5,6,7,8-tetrahydropterin synthase; OS = Desulfovibrionales bacterium GWA2_65_9 OX=1797915; GN = A2051_10720 PE=3 SV=1
MAGKWRLTVDEAFCASHQLRNYNGKCEHLHGHNFGVTVEVEGSELDPAVEILVDFGELKRLTREAVGALDHSHLNDLPAFTEHNPSSENLARHLYREIRDRLAALAPQARLRSVSVSEKGTSRATYMED

SEQ ID NO: 19894 - protein, 131 aa, unidentified
  source 1..131: note = Desulfovibrionales bacterium
  REGION 1..131: note = tr|A0A1F9PYF4|A0A1F9PYF4_9DELT 6-carboxy-5,6,7,8-tetrahydropterin synthase; OS = Desulfovibrionales bacterium GWA2_65_9 OX=1797915; GN = A2051_04945 PE=3 SV=1
MTRNYELSVSAEFCAAHRLDGYPGNCKNTHGHNWGVTVFVLCTELDGLGMGLDFRDIKALVKEAISSLDHVFLNDLAPFAEQNPTAENIARHLYQELSHLLAAGLNTGAARISRVHVAETPGAGVTYWEAP

SEQ ID NO: 19895 - protein, 121 aa, Desulfurella acetivorans
  REGION 1..121: note = tr|W0JIU0|W0JIU0_DESAE 6-carboxy-5,6,7,8-tetrahydropterin synthase; OS = Desulfurella acetivorans A63 OX=694431 GN=DESACE_04950; PE = 3 SV=1
MFEICVESHFCAAHRLNNYLGACENLHGHNFKVEVVVRCKKLNQIYIGIDFKELKKYLKEILSTLDHRYLNEIDYFSKTNPTSEMIAKYIFETLKPRIKDCMLYSVSVYETSTSKVTYTED

SEQ ID NO: 19896 - protein, 121 aa, unidentified
  source 1..121: note = Desulfurella amilsii
  REGION 1..121: note = tr|A0A1X4Y002|A0A1X4Y002_9DELT 6-carboxy-5,6,7,8-tetrahydropterin synthase; OS = Desulfurella amilsii OX=1562698 GN=DESAMIL20_229 PE=3; SV = 1
MFEICVESDFCAAHRLNNYLGACENLHGHNFKVEVVVRCSKLNQTYIGIDFKELKGHLKDILSALDHRYLNEIDFFSKTNPTSEMIAKYIFETLKSRIKECDLYTVSVYETPTSKATYMED

SEQ ID NO: 19897 - protein, 121 aa, Desulfurella multipotens
  REGION 1..121: note = tr|A0A1G6PXN8|A0A1G6PXN8_9DELT 6-carboxy-5,6,7,8-tetrahydropterin synthase; OS = Desulfurella multipotens OX=79269 GN=SAMN05660835_01449; PE = 3 SV=1
MFEICVESDFCAAHRLNNYRGACENLHGHNFKVEVVVRCKKLNQIYIGIDFKELKKYLKEILSTLDHRYLNEIDYFSKTNPTSEMIAKYIFETLKPHIKDCMLYSVSVYETSTSKVTYTED

SEQ ID NO: 19898 - protein, 33 aa, Desulfurella sp.
  REGION 1..33: note = tr|A0A2N7PZR6|A0A2N7PZR6_9DELT 6-carboxytetrahydropterin synthase QueD (Fragment); OS = Desulfurella sp. OX=1962857 GN=C0173_04645 PE=4 SV=1
MFEIFVESDFCAAHRLNNYRGACENLHGHNFKV

SEQ ID NO: 19899 - protein, 121 aa, Desulfurella sp.
  REGION 1..121: note = tr|A0A2N7PYA0|A0A2N7PYA0_9DELT 6-carboxy-5,6,7,8-tetrahydropterin synthase; OS = Desulfurella sp. OX=1962857 GN=queD PE=3 SV=1
MFEICVESHFCAAHRLNNYLGACENLHGHNFKVEVVVRCKKLNQIYIGIDFKELKKYLKEILSTLDHRYLNEIDYFSKTNPTSEMIAKYIFETLKPRIKDCMLYSVSVYETPTSKVTYTED

SEQ ID NO: 19900 - protein, 168 aa, unidentified
  source 1..168: note = Desulfurellales bacterium
  REGION 1..168: note = tr|A0A5C7Q6P3|A0A5C7Q6P3_9DELT 6-carboxytetrahydropterin synthase OS=Desulfurellales bacterium OX=2482794 GN=E6Q97_10375 PE=4 SV=1
MYLGHRCYLEADPLTVVRISKEIGIDAGHRVPNHESKCRNPHGHRYRVIVHAEGPIITEPGSPDEGMLVDFAFLKQIMMQRVDAILDHGFIVYEGDHDMLDCFTFPQASEWKIVVFPYIPTAENIARWIWEQINPDIATHFRGNLKLVAVEIWETPTSMAIYEGKEVQ

SEQ ID NO: 19901 - protein, 140 aa, unidentified
  source 1..140: note = Desulfurellales bacterium
  REGION 1..140: note = tr|A0A5C7P352|A0A5C7P352_9DELT 6-carboxytetrahydropterin synthase OS=Desulfurellales bacterium OX=2482794 GN=E6Q97_36820 PE=4 SV=1
MITAQRYHDISCGHRVFGHESKCAHLHGHNYRVHFTIAGDLDDVGRVLDFSAIKERLCMWLESEWDHKFLIWEEDPWQQQLAILDPKGVVWVPFNPTAENMAEYLVNVVAPLRLAGTGTKLLSCTIEETRKCSATYAIGG

SEQ ID NO: 19902 - protein, 125 aa, unidentified
  source 1..125: note = Desulfuribacillus alkaliarsenatis
  REGION 1..125: note = tr|A0A1E5G6Z4|A0A1E5G6Z4_9BACL 6-carboxy-5,6,7,8-tetrahydropterin synthase; OS = Desulfuribacillus alkaliarsenatis OX=766136; GN = BHF68_02295 PE=3 SV=1
MYELKIISSFDAAHSLKGYQGDCANLHGHTWTIEVYVVGDKLNELGLLVDFKDVKKYTNEIVQRLDHQYLNNLPDFQAKELNPTAENLSKYIYDELVKKLGHLDVEVSKVAVWESPKACATYLAR

SEQ ID NO: 19903 - protein, 128 aa, unidentified
  source 1..128: note = Desulfuribacillus stibiiarsenatis
  REGION 1..128: note = tr|A0A1E5L6U8|A0A1E5L6U8_9BACL 6-carboxy-5,6,7,8-tetrahydropterin synthase; OS = Desulfuribacillus stibiiarsenatis OX=1390249; GN = BHU72_02835 PE=3 SV=1
MYELKIITHFDSAHSLRGYNGDCANLHGHTWTIEVYVEGDQLNEIGLLVDFKEVKKYTNEIIKRFDHQCINQIPGFRENELNPTAENLSRYIYEELAKLMSHIDIQLKKISVWESPNACATYFPNGKS

SEQ ID NO: 19904 - protein, 125 aa, Desulfurispirillum indicum
  REGION 1..125: note = tr|E6W0J9|E6W0J9_DESIS 6-carboxy-5,6,7,8-tetrahydropterin synthase; OS = Desulfurispirillum indicum (strain ATCC BAA-1389 / S5); OX = 653733 GN=Selin_0500 PE=3 SV=1
MFELKVTEEFASAHNLRDYQGKCENIHGHNYVVNLYVRGEKLQHNEMLVDFKVMKTCLREVMEYLDHKYLNDVPPFDQWNPTGENIARYVYQECKRLLAEQGVANATVWKVEVYETSTSSATYWE

SEQ ID NO: 19905 - protein, 123 aa, Desulfurivibrio alkaliphilus
  REGION 1..123: note = tr|D6Z266|D6Z266_DESAT 6-carboxy-5,6,7,8-tetrahydropterin synthase; OS = Desulfurivibrio alkaliphilus (strain DSM 19089 / UNIQEM U267 / AHT2) OX=589865 GN=DaAHT2_0938 P E=3 SV=1
MYEVFTTTHFSSGHHLRNYPGNCEKPHGHNWKVKVIMRADELDELGMALDFRDLKAALKVIIDDLDHRDLNEHPAFQQENPSSENIARYIFAELKKSLSSDRYRPHKVTVLETDACGVSYSEE

SEQ ID NO: 19906 - protein, 222 aa, Desulfurobacterium atlanticum
  REGION 1..222: note = tr|A0A238Z3U8|A0A238Z3U8_9BACT 6-pyruvoyltetrahydropterin/6-carboxytetrahydropterin synthase OS=Desulfurobacterium atlanticum OX=240169; GN = SAMN06265340_10648 PE=4 SV =1
MFEISKTFTFSAAHSVFSQQLNPKWTTNTYPKCRRLPGHGHDYKLTVYLCSETLDKSQMVTDFHHLSWFKQFLDRCFDHKLILSLQDSGTLLFLKKLNLIDDDVFSLPEIEKMKPSVKFYGVETDFSFVSGEIDVDAIDLSRFIYLTFDNFSCPAFSEKSVVEIDFYQRLLDGIALFKYSPTSEQMAKFFYKFINKNIEPLGVRCSRVSISETETSCATYSE

SEQ ID NO: 19907 - protein, 222 aa, unidentified
  source 1..222: note = Desulfurobacterium indicum
  REGION 1..222: note = tr|A0A1R1MN46|A0A1R1MN46_9BACT 6-pyruvoyl tetrahydropterin synthase OS=Desulfurobacterium indicum; OX = 1914305 GN=BLW93_01235 PE=4 SV=1
MFEISKSFTFSAAHSVFSQQLNPKWTKNTYPKCRRLPGHGHNYKLTVYLASDSLDRSQMVTDFGHLSWFKRFLDRCFDHKLILSSQDTGSVMFLEKLGILEDGKVVLPEIEKMKPSLKFYGVNKNFTFVSGEIDVESVPLDNFHYLTFDSFSCPAFSEKSIVEIDFYQRLLDGIAIFSESPTSENMARFFFKFINESIKPMGVTCSKVTIQETETSSATYME

SEQ ID NO: 19908 - protein, 220 aa, Desulfurobacterium thermolithotrophum
  REGION 1..220: note = tr|F0S3K1|F0S3K1_DESTD Uncharacterized protein; OS = Desulfurobacterium thermolithotrophum (strain DSM 11699 / BSA) OX=868864 GN=Dester_0782 PE=4 SV=1
MFEISKVIEFSAAHSVYSQKLNPEWTKNTYPKCRRLPGHGHNYRLVVYLKSENLDFSQMVTDFGHLSWLKSFVDSCFDHKLILGMDDPALHLFFTKLGLMKSEKLVIPQIDGKKTEVDVVAVDENYRIKKLTIREVDLSEIKSYKYFSFQNFRSDSDSVEADFYQRLLDGISLFSGSPTSENLARFFFYFVSENIKPLGIKCSKVSIHETPTSCATFKER

SEQ ID NO: 19909 - protein, 123 aa, unidentified
  source 1..123: note = Desulfuromonadaceae bacterium
  REGION 1..123: note = tr|A0A1G2WEH2|A0A1G2WEH2_9DELT 6-carboxy-5,6,7,8-tetrahydropterin synthase; OS = Desulfuromonadaceae bacterium GWC2_58_13 OX=1801896; GN = A2X84_08810 PE=3 SV=1
MYHLTIHSHFAAAHNLINYQGDCENLHGHNWKVEVTVRARELDKAGLAIDFKILKRETNAVLDLLDHKYLNKIEPFVTASPSSENIARFLYETLGKRLNNDNVTVSKVNVWESEYACASYMED

SEQ ID NO: 19910 - protein, 123 aa, unidentified
  source 1..123: note = Desulfuromonadales bacterium
  REGION 1..123: note = tr|A0A1E7IH66|A0A1E7IH66_9DELT 6-carboxy-5,6,7,8-tetrahydropterin synthase; OS = Desulfuromonadales bacterium C00003107 OX=1869309; GN = BA869_10680 PE=3 SV=1
MYYLTIHTQFAAAHNLLHYQGDCENLHGHNWKVEVTVTARELDKAGLGVDFKVLKRETNRQLDLLDHKYLNDLPAFRELSPSSENIARFLYEGLQGVLNDGNVAIDKVTVWESDYACASYVAD

SEQ ID NO: 19911 - protein, 123 aa, unidentified
  source 1..123: note = Desulfuromonadales bacterium
  REGION 1..123: note = tr|A0A1E7GXJ9|A0A1E7GXJ9_9DELT 6-carboxy-5,6,7,8-tetrahydropterin synthase; OS = Desulfuromonadales bacterium C00003096 OX=1869311; GN = BA871_14695 PE=3 SV=1
MYYLTIHTQFAAAHNLLHYQGDCENLHGHNWKVEVTVTARELDKAGLGVDFKVLKRETNRQLDLLDHKYLNELPAFREHSPSSENIARFLYEELQGVLNDGNVAIDKVTVWESDHACASYVAD

SEQ ID NO: 19912 - protein, 123 aa, Desulfuromonas acetexigens
  REGION 1..123: note = tr|A0A550JL42|A0A550JL42_9DELT 6-carboxy-5,6,7,8-tetrahydropterin synthase; OS = Desulfuromonas acetexigens OX=38815 GN=queD PE=3 SV=1
MYRLKIHTHFAAAHNLINYQGDCENLHGHNWKVEVTVTARELDKAGLGIDFKILKRETKAVLDLLDHKYLNEIEPFVSNSPSSENIARFLFEKLTARLNTDNVTVYKVNVWESEYACASYLAD

SEQ ID NO: 19913 - protein, 123 aa, Desulfuromonas acetoxidans
  REGION 1..123: note = tr|Q1K0N4|Q1K0N4_DESA6 6-carboxy-5,6,7,8-tetrahydropterin synthase; OS = Desulfuromonas acetoxidans (strain DSM 684 / 11070); OX = 281689 GN=Dace_2207 PE=3 SV=1
MYHLKICTHFAAAHNLINYDGDCENLHGHNWKVEVTVRAKELDESGLGIDFKILKARTKELLATLDHKYLNDLPPFKETSPSSENIGRYLFEALEETLNTDNVQVECVNVWESDNACASYSRD

SEQ ID NO: 19914 - protein, 123 aa, unidentified
  source 1..123: note = Desulfuromonas soudanensis
  REGION 1..123: note = tr|A0A0M5IL17|A0A0M5IL17_9DELT 6-carboxy-5,6,7,8-tetrahydropterin synthase; OS = Desulfuromonas soudanensis OX=1603606 GN=queD PE=3 SV=1
MYHLTVYTHFAAAHNLINYQGDCENLHGHNWKVEVTVSARELDKAGLGIDFKILKSETKEVLGLLDHKYLNELPPFTEISPSSENLSRFLFEKLSETFNNDNVRVTKVNVWESDYACASYTAD

SEQ ID NO: 19915 - protein, 123 aa, Desulfuromonas sp.
  REGION 1..123: note = tr|A0A2N6E1T9|A0A2N6E1T9_9DELT 6-carboxy-5,6,7,8-tetrahydropterin synthase; OS = Desulfuromonas sp. OX=892 GN=queD PE=3 SV=1
MYRLTIFTHFAAAHNLVNYQGDCENLHGHNWKVEVTVAARELDKSGLGVDFKVLKRETKQALGLLDHSYLNDLEPFKGLSPSSENIARYLFETLGERLDTDNITVEQVNVWESENACASYRKD

SEQ ID NO: 19916 - protein, 123 aa, Desulfuromonas sp.
  REGION 1..123: note = tr|A0A357YGZ9|A0A357YGZ9_9DELT 6-carboxy-5,6,7,8-tetrahydropterin synthase; OS = Desulfuromonas sp. OX=892 GN=queD PE=3 SV=1
MFHLTVHTFFAAAHNLINYQGDCENLHGHNWKVEVTVGAQELDKAGLGIDFKILKSTLRTLLETLDHKHLNQVPPFDVISPSSENIARFLFDRLSDQLNNANIAVEKVNVWESDYACASYTRD

SEQ ID NO: 19917 - protein, 123 aa, Desulfuromonas thiophila
  REGION 1..123: note = tr|A0A1G7AK65|A0A1G7AK65_9DELT 6-carboxy-5,6,7,8-tetrahydropterin synthase; OS = Desulfuromonas thiophila OX=57664 GN=SAMN05661003_10455; PE = 3 SV=1
MYRLKIFTHFAAAHNLMHYEGDCEHLHGHNWKVEVTVCAQELDQAGLGIDFKILKARTKEVLAQLDHKYLNELEPFNQLSPSSENIACYLFGQLSACLNSANVAVEVVTVWESDQACASYSLT

SEQ ID NO: 19918 - protein, 123 aa, Desulfuromusa kysingii
  REGION 1..123: note = tr|A0A1H4D241|A0A1H4D241_9DELT 6-carboxy-5,6,7,8-tetrahydropterin synthase; OS = Desulfuromusa kysingii OX=37625 GN=SAMN05660420_02788; PE = 3 SV=1
MYHLTILTHFAAAHNLLNYQGDCENLHGHNWKIEVTVNTEELNDAGLGIDFKILKKHTKEVMNYLDHKYLNDLEAFKGISPSSEHIAKFIYDRLLESLSPYAVHLEKITVWESDNAYATYTQS

SEQ ID NO: 19919 - protein, 122 aa, unidentified
  source 1..122: note = Dethiosulfatarculus sandiegensis
  REGION 1..122: note = tr|A0A0D2JUJ3|A0A0D2JUJ3_9DELT 6-carboxy-5,6,7,8-tetrahydropterin synthase; OS = Dethiosulfatarculus sandiegensis OX=1429043; GN = X474_14680 PE=3 SV=1
MYELTVLGKFAAAHSLRNFKGKCEDLHGHNWKIEVVVTGTELDKADLLMDFGDLKALMNQALDRLDHKYLNELPPFDQLNPSSEQIAKHLFSTIAQGLPSQVTMKSVSAWESDNAKATYLGE

SEQ ID NO: 19920 - protein, 139 aa, Dethiosulfatibacter aminovorans
  REGION 1..139: note = tr|A0A1M6AS51|A0A1M6AS51_9FIRM 6-carboxy-5,6,7,8-tetrahydropterin synthase; OS = Dethiosulfatibacter aminovorans DSM 17477 OX=1121476; GN = SAMN02745751_00224 PE=3 SV=1
MYLLKAEHSFDSAHFLAGYDGKCSNIHGHRWTVEVEIQSENLVADGKLKGMIVDFSELKEDVKELVNDLDHALIIQKDTMRKETLNCLVEDGFKMIEVDFRPTAENFSFHFFSEMEKKGYDVKRTRVYETPNNSAVYEK

SEQ ID NO: 19921 - protein, 121 aa, Dethiosulfovibrio peptidovorans
  REGION 1..121: note = tr|D2Z7N8|D2Z7N8_9BACT 6-carboxy-5,6,7,8-tetrahydropterin synthase; OS = Dethiosulfovibrio peptidovorans DSM 11002 OX=469381; GN = Dpep_1459 PE=3 SV=1
MLLRKEFTFDAAHRLERYRGKCEALHGHTYRLAVTLNGRSDDEDMVFDFTELKRIVSEKILTELDHAYLNDVMDQPTAENIALWVWRKLDESVKRPNCELHSVQIWETATSSVIVFREDVE

SEQ ID NO: 19922 - protein, 122 aa, Dethiosulfovibrio peptidovorans
  REGION 1..122: note = tr|A0A2G6M633|A0A2G6M633_9BACT 6-carboxy-5,6,7,8-tetrahydropterin synthase; OS = Dethiosulfovibrio peptidovorans OX=47055 GN=queD PE=3; SV = 1
MFLRKEFTFDAAHRLERYRGKCEALHGHTYRLAVTLQGTPDHEDIVFDFTELKRLVTDQVLSHLDHSYLNDILDQPTAENIALWVWRILDTQVRRPNCELYSIRLWETATSSVIIYREDVTK

SEQ ID NO: 19923 - protein, 123 aa, Dethiosulfovibrio salsuginis
  REGION 1..123: note = tr|A0A1X7KEJ9|A0A1X7KEJ9_9BACT 6-carboxy-5,6,7,8-tetrahydropterin synthase; OS = Dethiosulfovibrio salsuginis OX=561720; GN = SAMN06275492_1263 PE=3 SV=1
MLLKKEFTFDAAHRLERYRGKCEALHGHTYRLAVTLKGHRDDDDMVFDFTELKKLVTAKVLDRLDHAYLNDVMDQPTAENIALWVWDELDGEVNRPNCKLHTVQVWETATSSVIVDREDAESR

SEQ ID NO: 19924 - protein, 115 aa, unidentified
  source 1..115: note = Devosia elaeis
  REGION 1..115: note = tr|A0A178I6K0|A0A178I6K0_9RHIZ 6-carboxy-5,6,7,8-tetrahydropterin synthase OS=Devosia elaeis OX=1770058 GN=A3840_00945 PE=3 SV=1
MTKEFHFSASHQLTSLPPDHQCARLHGHNYVVEVELTANELNEHGFVRDYQDLSVLKRHIDEVFDHRHLNDVLGHDRVTAECLAQYFYVWCKQRLPEASAVRVSETAKTWAEYRP

SEQ ID NO: 19925 - protein, 115 aa, unidentified
  source 1..115: note = Devosia elaeis
  REGION 1..115: note = tr|A0A178HR26|A0A178HR26_9RHIZ 6-carboxy-5,6,7,8-tetrahydropterin synthase OS=Devosia elaeis OX=1770058 GN=A3840_14730 PE=3 SV=1
MTKEFHFSASHQLASLPPDHQCARLHGHNYIVEVELTADELNEHGFVRDYQDLSVLKRHIDEAFDHRHLNDVLGHDKVTAECLAKHFFDWCKQRLPEASAVRVSETAKTWAEYRP

SEQ ID NO: 19926 - protein, 119 aa, Devosia psychrophila
  REGION 1..119: note = tr|A0A0F5PZI0|A0A0F5PZI0_9RHIZ 6-carboxy-5,6,7,8-tetrahydropterin synthase OS=Devosia psychrophila OX=728005 GN=SAMN04488059_13911 PE=3 SV=1
MTFRITKEFHFSASHQLASLPPDHQCARLHGHNYILEVELSADQLNEYGFVRDYQDLSVLKQHIDETFDHRHLNDVLGHDRVTAECLAKHFFDWCNVRLPETSAVRVSETAKTWAEYRP

SEQ ID NO: 19927 - protein, 119 aa, Devosia riboflavina
  REGION 1..119: note = tr|A0A087LYJ7|A0A087LYJ7_9RHIZ 6-carboxy-5,6,7,8-tetrahydropterin synthase OS=Devosia riboflavina OX=46914 GN=JP75_19035 PE=3 SV=1
MTFRITKEFHFSASHQLASLPSDHQCARLHGHNYIVEVELSADQLNEYGFVRDYQDLSLLKQYIDEAFDHRHLNDVLAHDRVTAECLAKHFFDWCKARLPEASAVRVSETAKTWAEYRP

SEQ ID NO: 19928 - protein, 119 aa, Devosia sp.
  REGION 1..119: note = tr|A0A2L1S7B0|A0A2L1S7B0_9RHIZ 6-carboxy-5,6,7,8-tetrahydropterin synthase OS=Devosia sp. I507 OX=2083786 GN=queD PE=3 SV=1
MTFRITKEFHFSASHQLTSLPPDHQCARLHGHNYVVEVELTANELNEHGFVRDYQDLSVLKRHIDEAFDHRHLNDVLGHDRVTAECLAQYFYVWCKQRLPEASAVRVSETAKTWAEYRP

SEQ ID NO: 19929 - protein, 109 aa, Dialister invisus
  REGION 1..109: note = tr|C9LPW8|C9LPW8_9FIRM Putative queuosine biosynthesis protein QueD OS=Dialister invisus DSM 15470; OX = 592028 GN=GCWU000321_01599 PE=4 SV=1
MFTVTKRMEISGAHFLRLNYESKCTSMHGHNWIVTVTVQNDKLDENGMVVDFTKIKDIVNLFDHRCANDIMEGLNPTAENMAKWLCDRIPHCIRVAVQETEGNTAVYEK

SEQ ID NO: 19930 - protein, 109 aa, Dialister invisus; identical to SEQ ID NO: 19929
  REGION 1..109: note = tr|R5SNF6|R5SNF6_9FIRM Putative 6-pyruvoyl tetrahydrobiopterin synthase OS=Dialister invisus CAG:218; OX = 1263072 GN=BN540_01211 PE=4 SV=1

SEQ ID NO: 19931 - protein, 109 aa, Dialister micraerophilus
  REGION 1..109: note = tr|F2BWC7|F2BWC7_9FIRM 6-pyruvoyl-tetrahydropterin synthase OS=Dialister micraerophilus DSM 19965 OX=888062; GN = HMPREF9083_0494 PE=4 SV=1
MYTVTKRMEISGAHFLKLDYESKCKKLHGHNWIVTITVQSETLNEHGMVVDFTDIKKVVNRLDHNVVNEVIGSMNPTAENIAKWLCDQIPNCIKVSVQETEGNIATYEK

SEQ ID NO: 19932 - protein, 109 aa, unidentified; identical to SEQ ID NO: 19931
  source 1..109: note = Dialister microaerophilus
  REGION 1..109: note = tr|E4L7B4|E4L7B4_9FIRM Putative queuosine biosynthesis protein QueD OS=Dialister microaerophilus UPII 345-E OX=910314 GN=HMPREF9220_1262 PE=4 SV=1

SEQ ID NO: 19933 - protein, 109 aa, Dialister pneumosintes
  REGION 1..109: note = tr|A0A1B3WEU1|A0A1B3WEU1_9FIRM 6-carboxytetrahydropterin synthase QueD OS=Dialister pneumosintes OX=39950 GN=BCB69_05785 PE=4 SV=1
MYTITKRMEISGAHILSLEYESKCTKLHGHNWIITVTAQSETLNHNGMVVDFTHIKKVVNQLDHVCINDVIKDRNPTAENIAKWIYDQIPHCVRVSVEETEGNVATYEA

SEQ ID NO: 19934 - protein, 109 aa, Dialister sp.
  REGION 1..109: note = tr|A0A3D2VIV6|A0A3D2VIV6_9FIRM 6-carboxytetrahydropterin synthase QueD OS=Dialister sp.; OX = 1955814 GN=queD PE=4 SV=1
MFTVTKRMEISGAHFLRLNYESKCTSMHGHNWIVTVTVQNDKLDENGMVVDFTKIKDVVNLFDHRCANDIMEGLNPTAENMAKWLCDRIPHCIRVAVQETEGNTAVYEK

SEQ ID NO: 19935 - protein, 109 aa, Dialister sp.
  REGION 1..109: note = tr|R7PR99|R7PR99_9FIRM 6-pyruvoyl-tetrahydropterin synthase OS=Dialister sp. CAG:588 OX=1262871; GN = BN722_00772 PE=4 SV=1
MYTITKRMEISGAHILSLDYESKCTKLHGHNWIITVTAQSETLNHNGMVVDFTHIKKVVNQLDHVCINDVIKDRNPTAENIAKWIYDQIPHCVRVSVEETEGNVATYEA

SEQ ID NO: 19936 - protein, 109 aa, Dialister succinatiphilus
  REGION 1..109: note = tr|H1D0W4|H1D0W4_9FIRM Queuosine biosynthesis protein QueD OS=Dialister succinatiphilus YIT 11850; OX = 742743 GN=HMPREF9453_01252 PE=4 SV=1
MFTVTKRMEVSGAHFLHLDYESKCTNLHGHNWIITVTVQNDTLDKNGMVVDFSKIKEIVNQFDHHLINDVLGDLNPTAENMAKWICDHIPYCIRVSVQETEGNVATYEK

SEQ ID NO: 19937 - protein, 121 aa, Diaphorobacter sp.
  REGION 1..121: note = tr|A0A0J0UP50|A0A0J0UP50_9BURK 6-carboxy-5,6,7,8-tetrahydropterin synthase; OS = Diaphorobacter sp. J5-51 OX=680496 GN=OX89_04845 PE=3; SV = 1
MQFTVHQRIFFDAAHTLRREIEAEGSRRIHGHTYHAEVSLTGPLDPATGMVQDLGYLRQRLAVLRERLDHHLLDEVPGLGAPTLENLCRFIAEALSDMQPPPSRVRVWRDALGDGCTLELS

SEQ ID NO: 19938 - protein, 134 aa, Dichotomicrobium thermohalophilum
  REGION 1..134: note = tr|A0A397Q9U9|A0A397Q9U9_9RHIZ 6-pyruvoyl-tetrahydropterin synthase OS=Dichotomicrobium thermohalophilum OX=933063 GN=BXY53_0071 PE=4 SV=1
MYSVEVSDHIMIAHSLKKEFFGPAQNLHGATFVITVAFFRQTLTENNVVVDIGRALDVLNEVLSPLRYANLDEKPEFAGQLTTTEFLCRHIFDQFALAVRDGRLGDGAEGLERIRVTLQETPNAAATYEGRVGT

SEQ ID NO: 19939 - protein, 123 aa, Dichotomicrobium thermohalophilum
  REGION 1..123: note = tr|A0A397Q5Z5|A0A397Q5Z5_9RHIZ 6-carboxy-5,6,7,8-tetrahydropterin synthase; OS = Dichotomicrobium thermohalophilum OX=933063; GN = BXY53_1618 PE=3 SV=1
MTRIYKEFTFEAAHYLPSAPPGHRNARVHGHSFHVRVSIDGEPDPETGLIYHFDDLSAAIADVREMLDHQMLNDVPGLQAPTLEMISRWIWEQLAPRVPGLAEVALSRPSCQEGCIYTGGSSQ

SEQ ID NO: 19940 - protein, 122 aa, unidentified
  source 1..122: note = Dickeya aquatica
  REGION 1..122: note = tr|A0A375AE28|A0A375AE28_9GAMM 6-carboxy-5,6,7,8-tetrahydropterin synthase OS=Dickeya aquatica OX=1401087 GN=queD PE=3 SV=1
MPTTLFKDFQFEAAHRLPHVPAGHKCGRLHGHSFMVRLEITGEVSPYTGWVMDFAELKAAFKPTWERLDHHYLNDIPGLENPTSEVLARWIWQQLKPTLPLLSAVTVKETCTAGCVYRGEEA

SEQ ID NO: 19941 - protein, 122 aa, Dickeya chrysanthemi
  REGION 1..122: note = tr|C6CLR5|C6CLR5_DICC1 6-carboxy-5,6,7,8-tetrahydropterin synthase OS=Dickeya chrysanthemi (strain Ech1591) OX=561229 GN=Dd1591_0823; PE = 3 SV=1
MPTTLFKDFQFEAAHRLPHVPDGHKCGRLHGHSFMVRLEITGEVDPYTGWVMDFAELKAAFKPTWEQLDHHYLNDIQGLENPTSEVLAHWIWQQLKPTLPLLSAVTVKETCTAGCVYRGEND

SEQ ID NO: 19942 - protein, 122 aa, Dickeya dadantii
  REGION 1..122: note = tr|E0SDK7|E0SDK7_DICD3 6-carboxy-5,6,7,8-tetrahydropterin synthase OS=Dickeya dadantii (strain 3937) OX=198628 GN=ygcM PE=3 SV=1
MPTTLFKDFQFEAAHRLPHVPNGHKCGRLHGHSFMVRLEITGEVDPYTGWVMDFAELKAAFKPTWERLDHHYLNDIPGLENPTSEVLARWIWQQLKPTLPLLSAVTVKETCTAGCVYRGEDD

SEQ ID NO: 19943 - protein, 122 aa, Dickeya dianthicola
  REGION 1..122: note = tr|A0A385Y122|A0A385Y122_9GAMM 6-carboxy-5,6,7,8-tetrahydropterin synthase OS=Dickeya dianthicola OX=204039 GN=queD PE=3 SV=1
MPTTLFKDFQFEAAHRLPHVPNGHKCGRLHGHSFMVRLEVTGEVDPYTGWVMDFAELKAAFKPTWERLDHHYLNDIPGLENPTSEVMARWIWQQLKPTLPLLSAVTVKETCTAGCIYRGEDD

SEQ ID NO: 19944 - protein, 122 aa, unidentified
  source 1..122: note = Dickeya fangzhongdai
  REGION 1..122: note = tr|A0A2K8QQ74|A0A2K8QQ74_9GAMM 6-carboxy-5,6,7,8-tetrahydropterin synthase OS=Dickeya fangzhongdai OX=1778540 GN=queD PE=3 SV=1
MPTTLFKDFQFEAAHRLPHVPNGHKCGRLHGHSFMVRLEITGEVDPYTGWVMDFAELKAAFKPTWEQLDHHYLNDIPGLENPTSEVLARWIWQQLKPTLPLLSAVTVKETCTAGCVYRGEDD

SEQ ID NO: 19945 - protein, 121 aa, Dickeya paradisiaca
  REGION 1..121: note = tr|C6CAW7|C6CAW7_DICP7 6-carboxy-5,6,7,8-tetrahydropterin synthase OS=Dickeya paradisiaca (strain Ech703) OX=579405 GN=Dd703_0857 PE=3; SV = 1
MATTLFKDFQFEAAHRLPHVPEGHKCGRLHGHSFMVRLEVTGEVDPHTGWVMDFAELKAVFKPIWQRLDHYYLNDIPGLENPTSEVLAQWIWQQLKPSLPELSAVTVKETCTAGCVYRGGA

SEQ ID NO: 19946 - protein, 122 aa, unidentified
  source 1..122: note = Dickeya solani
  REGION 1..122: note = tr|A0A2K8VXF7|A0A2K8VXF7_9GAMM 6-carboxy-5,6,7,8-tetrahydropterin synthase OS=Dickeya solani RNS 08.23.3.1.A OX=1240086 GN=D083_1576 PE=3 SV=1
MPTTLFKDFQFEAAHRLPHVPNGHKCGRLHGHSFMVRLEITGEVDPYTGWVMDFAELKAAFKPTWERLDHHYLNDIPGLENPTSEVLARWIWQQLKPTLPLLSAVTVKETCTAGCIYRGEDD

SEQ ID NO: 19947 - protein, 122 aa, Dickeya sp.
  REGION 1..122: note = tr|A0A5B8I345|A0A5B8I345_9GAMM 6-carboxy-5,6,7,8-tetrahydropterin synthase OS=Dickeya sp. NCPPB 569 OX=568768 GN=queD PE=3 SV=1
MPTTLFKDFQFEAAHRLPHVPDGHKCGRLHGHSFMVRLEITGEIDPYTGWVMDFAELKAAFKPTWERLDHHYLNDIPGLENPTSEVLARWIWQQLKPTLPLLSTVTVKETCTAGCVYRGEDN

SEQ ID NO: 19948 - protein, 122 aa, Dickeya sp.; identical to SEQ ID NO: 19944
  REGION 1..122: note = tr|A0A3N0FWZ1|A0A3N0FWZ1_9GAMM 6-carboxy-5,6,7,8-tetrahydropterin synthase OS=Dickeya sp. FVG1-MFV-O17 OX=2487136 GN=queD PE=3 SV=1

SEQ ID NO: 19949 - protein, 122 aa, Dickeya zeae
  REGION 1..122: note = tr|D2BV85|D2BV85_DICZ5 6-carboxy-5,6,7,8-tetrahydropterin synthase OS=Dickeya zeae (strain Ech586) OX=590409 GN=Dd586_3320 PE=3 SV=1
MPTTLFKDFQFEAAHRLPHVPDGHKCGRLHGHSFMVRLEITGEVDPYTGWVMDFAELKAAFKPTWERLDHHYLNEIPGLENPTSEVLARWIWQQLKPTLPLLSAVTVKETCTAGCIYRGEED

SEQ ID NO: 19950 - protein, 122 aa, Dickeya zeae; identical to SEQ ID NO: 19949
  REGION 1..122: note = tr|A0A0A8FGK2|A0A0A8FGK2_9GAMM 6-carboxy-5,6,7,8-tetrahydropterin synthase OS=Dickeya zeae EC1 OX=1427366 GN=W909_15940 PE=3 SV=1

SEQ ID NO: 19951 - protein, 166 aa, unidentified
  source 1..166: note = Dictyobacter alpinus
  REGION 1..166: note = tr|A0A402B0J6|A0A402B0J6_9CHLR 6-pyruvoyl tetrahydrobiopterin synthase OS=Dictyobacter alpinus; OX = 2014873 GN=KDA_03210 PE=4 SV=1
MAGTRILRKVKVEGGYLHFSSAHFITYSGKCERLHGHNYGVLVEVEGELGPDNVVFDFTVLKRRTKEICQHLDHRFLLPLHNAQLELTRLSDAWEIRFRERRYVFPLTDVVELPIENSTAELLAQYICEELCKVLEEYPAANLHTIMVGVEEAPTQMAYYQKDLRS

SEQ ID NO: 19952 - protein, 151 aa, unidentified
  source 1..151: note = Dictyobacter alpinus
  REGION 1..151: note = tr|A0A402BIC7|A0A402BIC7_9CHLR 6-carboxy-5,6,7,8-tetrahydropterin synthase; OS = Dictyobacter alpinus OX=2014873 GN=KDA_66170 PE=4 SV=1
MTKYAIITKEFTFEAAHHLPNHRGKCRRPHGHSYRLQISLRGPIIEAPGESSDGMVMDFDDLKSIVNTTIIDNLSDAVPRGDAAGPLEKGGMDHNDLNTITGIRTTAENLVHWIWDALVAGGIPDPLLYRIRLWETEKGYVEITQAERGEV

SEQ ID NO: 19953 - protein, 151 aa, unidentified
  source 1..151: note = Dictyobacter aurantiacus
  REGION 1..151: note = tr|A0A401ZQB6|A0A401ZQB6_9CHLR 6-carboxy-5,6,7,8-tetrahydropterin synthase; OS = Dictyobacter aurantiacus OX=1936993 GN=KDAU_64000 PE=4; SV = 1
MTRYAIITKEFTFEAAHHLPNHRGKCRRPHGHSYRLQISLRGPILQAPGESSDGMVMDFDDVKTIVNATILEQLSDAVPRGDAAQVVEKGGMDHNDLNALTGIRTTAENLVHWVWDALVAGGIPDALLYRIRLWETEKGYVEITHAEREEV

SEQ ID NO: 19954 - protein, 166 aa, unidentified
  source 1..166: note = Dictyobacter aurantiacus
  REGION 1..166: note = tr|A0A401Z8J3|A0A401Z8J3_9CHLR 6-pyruvoyl tetrahydrobiopterin synthase OS=Dictyobacter aurantiacus; OX = 1936993 GN=KDAU_04670 PE=4 SV=1
MAGTQVMRKVKVEGGYLNFSSAHFITYSGKCERLHGHNYGVLVEVEGELGSDGLVFDFTILKKRTKEICQQLDHRFLLPVRNPHLELTRSSDGWEVRFRERRYVFPHSDVVELPIENSTSELLAQYICEKLCQVLEEYPTAGLRSIMVGVEEAPTQMAFYRQELHL

SEQ ID NO: 19955 - protein, 145 aa, unidentified
  source 1..145: note = Dictyobacter kobayashii
  REGION 1..145: note = tr|A0A402AGI3|A0A402AGI3_9CHLR 6-carboxy-5,6,7,8-tetrahydropterin synthase; OS = Dictyobacter kobayashii OX=2014872 GN=KDK_20280 PE=3; SV = 1
MVYLTRRVTFSAAHRLWSNHLTEEENYQIYDKCANPNGHGHNYILEVTVHGQPDPKTGMVMNLTDMKKITNEQVVDWVDHKHLNYDVPWLEGVIPTAEMLAIKFWERLERGFPTGLLYEVTLHETENNSASYRGEHTDALEAGIA

SEQ ID NO: 19956 - protein, 166 aa, unidentified
  source 1..166: note = Dictyobacter kobayashii
  REGION 1..166: note = tr|A0A402ACL7|A0A402ACL7_9CHLR 6-pyruvoyl tetrahydrobiopterin synthase OS=Dictyobacter kobayashii; OX = 2014872 GN=KDK_06390 PE=4 SV=1
MAGTRIMRKVKVEGGYLNFSSAHFITYSGKCERLHGHNYGVLVEVEGELGPDNLVFDFTVLKKRTKEICQHLDHRFLLPLRNPQLELTRLPDAWDIRFKEKHYVFPLADVVELPIENSTAELLAQYICEELCQLLEEYPTAGLHNIMVGVEEAPTQMAYYQKDLQG

SEQ ID NO: 19957 - protein, 151 aa, unidentified
  source 1..151: note = Dictyobacter sp.
  REGION 1..151: note = tr|A0A5A5T6E4|A0A5A5T6E4_9CHLR 6-carboxy-5,6,7,8-tetrahydropterin synthase; OS = Dictyobacter sp. Uno17 OX=2014874 GN=KDI_05160 PE=4 SV=1
MTRYAIITKEFTFEAAHHLPNHRGKCRRPHGHSYRLQISLRGPINQTPGESSDGMVMDFDDLKTIVNATILEQLSDSVPRGKEAQLVEHGGLDHNDLNALTGIRTTAENLVHWIWDALVAGGVPDTLLYRIRLWETEKGYVEITHAEREEL

SEQ ID NO: 19958 - protein, 145 aa, unidentified
  source 1..145: note = Dictyobacter sp.
  REGION 1..145: note = tr|A0A5A5T8Z1|A0A5A5T8Z1_9CHLR 6-carboxy-5,6,7,8-tetrahydropterin synthase; OS = Dictyobacter sp. Uno17 OX=2014874 GN=KDI_10230 PE=3 SV=1
MVYLTRRVTFSAAHRLWSNHLTEEENYRIYDKCANGNGHGHNYVLEVTVCGEPNEHTGMVINLTDLKRITNEQVVNWVDHKHLNYDVPWLEGVIPTAEMLAIKFWERLERGFPEGLLYEVKLHETENNIATYHGDRESVSKAGQV

SEQ ID NO: 19959 - protein, 125 aa, Dictyoglomus sp.
  REGION 1..125: note = tr|A0A2J6XV97|A0A2J6XV97_9BACT 6-carboxy-5,6,7,8-tetrahydropterin synthase; OS = Dictyoglomus sp. NZ13-RE01 OX=2010949 GN=queD PE=3 SV=1
MFLIKEFYFDSAHNLIKYKGKCENLHGHTYKLVVVIEGIPNDEGMIMDFVELKEIVKEHVLKYLDHAYLNDIIEQPTAENIAIWIWNRLYDLLKRDNCQLFEIQVWETRESGVVYRGEKFERRTE

SEQ ID NO: 19960 - protein, 125 aa, Dictyoglomus thermophilum
  REGION 1..125: note = tr|B5YCT3|B5YCT3_DICT6 6-carboxy-5,6,7,8-tetrahydropterin synthase; OS = Dictyoglomus thermophilum (strain ATCC 35947 / DSM 3960 / H-6-12) OX=309799 GN=DICTH_0459 PE=3SV=1
MFVIRKFKFDAAHNLESYKGKCERLHGHTYRLVVIVEGIPDSEGMIIDFVELKDIVKREVIDILDHSYINEIIKQPTAENIAIWIWQRLEEKLKRGNCHLYEIQVWETEDSGVIYRGEKIERRSE

SEQ ID NO: 19961 - protein, 125 aa, Dictyoglomus thermophilum; identical to SEQ ID NO: 19960
  REGION 1..125: note = tr|A0A5D4XH94|A0A5D4XH94_DICTH 6-carboxy-5,6,7,8-tetrahydropterin synthase; OS = Dictyoglomus thermophilum OX=14 GN=queD PE=3 SV=1

SEQ ID NO: 19962 - protein, 125 aa, Dictyoglomus turgidum
  REGION 1..125: note = tr|B8DZG9|B8DZG9_DICTD 6-carboxy-5,6,7,8-tetrahydropterin synthase; OS = Dictyoglomus turgidum (strain Z-1310 / DSM 6724); OX = 515635 GN=Dtur_0614 PE=3 SV=1
MFLIREFKFDAAHNLESYKGKCEKLHGHTYRLVIVVEGVPDSEGMIIDFVELKDIVKEEVINVLDHSYINEIMNQPTAENIAIWVWKRLEKKLQRDNCHLYEVQVWETEDSGVIYRGEKIEGCSK

SEQ ID NO: 19963 - protein, 138 aa, unidentified
  source 1..138: note = Dinghuibacter silviterrae
  REGION 1..138: note = tr|A0A4R8DEM9|A0A4R8DEM9_9BACT 6-pyruvoyltetrahydropterin/6-carboxytetrahydropterin synthase OS=Dinghuibacter silviterrae OX=1539049; GN = EDB95_3509 PE=4 SV=1
MNTNRVAVYRREHFNAAHRLHNPSWDAATNERVFGKCNLPHYHGHNYELIVKLTGVPDPDTGYVMDLKRLSDLVHEEVIQRFDHKNLNLDTVEFRDLNPTAEHIAMVIYRLLRPHIPVDLDLEVTLYETDRNFVSYPA

SEQ ID NO: 19964 - protein, 136 aa, unidentified
  source 1..136: note = Dinghuibacter silviterrae
  REGION 1..136: note = tr|A0A4R8DE99|A0A4R8DE99_9BACT 6-pyruvoyltetrahydropterin/6-carboxytetrahydropterin synthase OS=Dinghuibacter silviterrae OX=1539049; GN = EDB95_3508 PE=4 SV=1
MVYLTRVEHFNAAHKLYNPRWSTAQNEAVFGKCANENWHGHNYELYVTVKGEVNEDTGFLMDVKVLSDLVKTHVLDIVDHRNLNLDVPFLKDKMCSTENLAKGIWAQLAPHLPQGVRLHAIKLYETPRIYVEFFGE

SEQ ID NO: 19965 - protein, 123 aa, unidentified
  source 1..123: note = Dissulfuribacter thermophilus
  REGION 1..123: note = tr|A0A1B9F7P7|A0A1B9F7P7_9DELT 6-carboxy-5,6,7,8-tetrahydropterin synthase; OS = Dissulfuribacter thermophilus OX=1156395 GN=DBT_0716; PE = 3 SV=1
MYEIFVEREFAAAHYLRDYPGNCEHLHGHNWIVRAFVRVEKLNEIHVGIDFRDLKKALDSVLQELDHTNINDHPAFQERNPSSENIAYFIFHSLKERLQHIEGVEVAKVTVCETPKTGVTYSE

SEQ ID NO: 19966 - protein, 119 aa, Dokdonella fugitiva
  REGION 1..119: note = tr|A0A4R2IA41|A0A4R2IA41_9GAMM 6-carboxy-5,6,7,8-tetrahydropterin synthase OS=Dokdonella fugitiva OX=328517 GN=EV148_103241 PE=3 SV=1
MEISKTFRIEAAHRLPNVPAGHKCSRLHGHSFAIAIHVSGPLDPELGWVMDYADLKAAFAPLYDQLDHRYLNEVPGLENPTSEQLARWIWERLAPRLPLLSKVVVNETCTTACEYRGKD

SEQ ID NO: 19967 - protein, 120 aa, unidentified
  source 1..120: note = Dokdonella immobilis
  REGION 1..120: note = tr|A0A1I4VHL7|A0A1I4VHL7_9GAMM 6-carboxy-5,6,7,8-tetrahydropterin synthase OS=Dokdonella immobilis OX=578942 GN=SAMN05216289_10292 PE=3 SV=1
MEIYKKFRIEAAHRLPNVPDGHKCARLHGHSFEIEVVLRGPVAAEPGWVCDFADVGAAFAPLFEQLDHHYLNDVPGLENPTSENLAIWIWNALQPRLPLLARVTVHETCTSGCHYLGPTA

SEQ ID NO: 19968 - protein, 121 aa, Dokdonella koreensis
  REGION 1..121: note = tr|A0A160DW48|A0A160DW48_9GAMM 6-carboxy-5,6,7,8-tetrahydropterin synthase OS=Dokdonella koreensis DS-123 OX=1300342 GN=I596_2403 PE=3 SV=1
MDIFKIFQVEAAHRLPNVPAGHKCARLHGHSFRIEIHVSGPVDPHAGWVMDFADLKAAFAPIHDRIDHRLLNDIPGLENPTSENLARWLWEALVPHLPQLARVVVHETCTSGCSYAGPDAR

SEQ ID NO: 19969 - protein, 150 aa, Dokdonia donghaensis
  REGION 1..150: note = tr|A0A0A2GX50|A0A0A2GX50_9FLAO 6-pyruvoyl tetrahydropterin synthase OS=Dokdonia donghaensis DSW-1; OX = 1300343 GN=NV36_08410 PE=4 SV=1
MSKIRITKQFTFETGHALYGYDGKCKNVHGHSYKLSVTVIGEPITDMGNAKLGMVIDFGDLKKIVNREIVNVFDHATVFNKNTPHVELAKELSDRGHDVLLVDYQPTSEMMVIDFAAKIQSFLPDTIKLHSLRLSETATSYAEWHAADQL

SEQ ID NO: 19970 - protein, 136 aa, Dokdonia donghaensis
  REGION 1..136: note = tr|A0A0A2GUR5|A0A0A2GUR5_9FLAO 6-carboxy-5,6,7,8-tetrahydropterin synthase OS=Dokdonia donghaensis DSW-1 OX=1300343 GN=NV36_03850 PE=3 SV=1
MRITAHRKAHFNAAHRLYRPDWNDEKNSQIFGKCSNPNFHGHNYDLTVSVTGEIDPETGFLIDLKILKDIIKAQVEDYLDHKNLNLEVQEFKELNPTAENIAVVIYNRIKTVLEPKFDLEVTLYETPRNFVTYKGE

SEQ ID NO: 19971 - protein, 136 aa, unidentified
  source 1..136: note = Dokdonia pacifica
  REGION 1..136: note = tr|A0A239D6L9|A0A239D6L9_9FLAO 6-carboxy-5,6,7,8-tetrahydropterin synthase OS=Dokdonia pacifica OX=1627892 GN=SAMN06265376_1104 PE=3 SV=1
MRITVNRRAHFNAAHRLYRKEWDEETNKSIFGKCSNPHYHGHNYDLIVGITGEIDPETGYLIDLKIVKDLIKSEVEDAFDHKNLNLEVPEFKNLNPTAENIAVVIYNKMKPMLDPKFDLTITLYETPRNFVIYKGE

SEQ ID NO: 19972 - protein, 149 aa, unidentified
  source 1..149: note = Dokdonia pacifica
  REGION 1..149: note = tr|A0A238WDF2|A0A238WDF2_9FLAO 6-carboxy-5,6,7,8-tetrahydropterin synthase OS=Dokdonia pacifica OX=1627892 GN=SAMN06265376_101944 PE=3 SV=1
MANIRITKQFTFETGHALYGYDGKCKNVHGHSYKLSVTVIGSPISDSNHVKYGMVIDFGDLKKIVNKEIVDVFDHATVFNKNTPHVELAKELSDRGHNVLLVDYQPTSEMMVIDFAQKIQPLLPDHIKLHSLRLQETRSSYAEWFASDN

SEQ ID NO: 19973 - protein, 136 aa, Dokdonia sp.
  REGION 1..136: note = tr|A0A3M0FTF4|A0A3M0FTF4_9FLAO 6-carboxy-5,6,7,8-tetrahydropterin synthase OS=Dokdonia sp. SH27 OX=2479847 GN=EAX61_15990 PE=3 SV=1
MRITAYRKAHFNAAHRLYRSDWSDDKNSSVFGKCSNPNFHGHNYDLEVGVTGNIDPETGYLIDLKILKDMIKSEVEDVLDHKNLNLEVDYFKTANPTAENIAVFIYNQLRRVLDQKFELEIKLYETPRNFVVYTGA

SEQ ID NO: 19974 - protein, 150 aa, Dokdonia sp.
  REGION 1..150: note = tr|A0A2S1QB84|A0A2S1QB84_9FLAO 6-carboxytetrahydropterin synthase QueD OS=Dokdonia sp. Dokd-P16 OX=2173169 GN=DCS32_06600 PE=4 SV=1
MSKIRITKQFTFETGHALYGYDGKCKNVHGHSYKLSVTVIGEPITDMDNAKLGMVIDFGDLKKIVNREIVNVFDHATVFNKNTPHVELAKELSDRGHDVLLVDYQPTSEMMVIDFAAKIQSFLPDSIKLHSLRLSETATSYAEWHAADQD

SEQ ID NO: 19975 - protein, 157 aa, unidentified
  source 1..157: note = Dolichospermum compactum
  REGION 1..157: note = tr|A0A1Z4UY01|A0A1Z4UY01_9CYAN Queuosine biosynthesis protein QueD OS=Dolichospermum compactum NIES-806 OX=1973481 GN=NIES806_02340 PE=4 SV=1
MTNQQWLLAKEFRFEAAHKLPYHDGKCSRLHGHSWRGVVYVAGDTLVTEGAKQGMVMDYSEIKKYLQPLLENYLDHYYLNESMGLESPTSEAIAAWIYDKLEQAGLAGLTAVRIDETCTSICLYSKNRISGWLNSGQDLNLLQSGENNHGLGMNLIV

SEQ ID NO: 19976 - protein, 422 aa, unidentified
  source 1..422: note = Dolichospermum compactum
  REGION 1..422: note = tr|A0A1Z4UZM0|A0A1Z4UZM0_9CYAN Uncharacterized protein OS=Dolichospermum compactum NIES-806 OX=1973481; GN = NIES806_08900 PE=4 SV=1
MQCIVNRRDQFSAVGRYWFPELSEIENLEKFGAYSKFPGHGHNYVLFISMIGELDEYGMVLNLSDVKHVIKEEVTSQLDFSYLNDVWTEFQQTLPTTENIARVIWERLSPHLPLVRVQLFEHPQLWADYQGEGKQANLTIRTHFSAAHRLAPNLSVDKYGRCTQTHGHNYHLEVTVEGEIDSRTGMIVDVAALNRVVEDYVVKIFDHSCINEDVPYFADIVPTTENISRYIHGLLESPIDELGVKLSNVKLFESHQLWADYSGQGMEGYLSISTHFSSAHRLAHPDLSLAKNTEIYGKCARVNGHGHNYQLEVTIKGDIDSSKGMVIDLGAVNQIITDYVIEPFDHTFLNKDVAFFNKVVPTAENIALYISNTLRSPIQELGATLYKVKLVESPNNACEIYGADSESTSVNAAVSQPVLAIV

SEQ ID NO: 19977 - protein, 141 aa, unidentified
  source 1..141: note = Dolichospermum planctonicum
  REGION 1..141: note = tr|A0A480ACS4|A0A480ACS4_9CYAN 6-carboxy-5,6,7,8-tetrahydropterin synthase; OS = Dolichospermum planctonicum OX=136072 GN=NIES80_05810; PE = 3 SV=1
MTSKPESESCLETWIIGKEFRFEAAHQLPNHDGKCARLHGHSWRGVVYVTGDKLINSGVKQGMIMDYGDISKYIKPLLENYLDHYHLNESTGLANPTSEAIAKWIYEQLEPQIPGLVAVRIDETCTSQCIYSKGKVNFLGF

SEQ ID NO: 19978 - protein, 422 aa, unidentified
  source 1..422: note = Dolichospermum sp.
  REGION 1..422: note = tr|A0A5C0DRW1|A0A5C0DRW1_9CYAN 6-carboxy-5,6,7,8-tetrahydropterin synthase; OS = Dolichospermum sp. UHCC 0315A OX=1914871 GN=queD_1 PE=4; SV = 1
MQCIVNRRDQFSAVGRYWFPELSQIENLEKFGAYSKFPGHGHNYVLFISMIGELDEYGMVLNLSDVKHVIKGEVTSQLDFSYLNDVWTEFQQTLPTTENIARVIWERLAPHLPLVRVQLFEHPQLWADYQGEGEKANLTIRTHFSAAHRLAPNLSVDKYGRCTQTHGHNYHLEVTVEGEIDSRTGMIVDVAALNRVVEDYVVRIFDHSCVNEDIPYFADIVPTTENISRYIHGLLESPIDELGVKLSNIKLFESHQLWADYSGKDRSGYLSISTHFSSAHRLAHPDLSLAKNTEIYGKCARVNGHGHNYQLEVTIKGEIDSSTGMVIDLGALNQIITDYVIEPFDHTFLNKDVAFFNQVVPTAENIALYISNTLRSPIQELGATLYKVKLVESPNNACEIYAADSESTSVNAAVSQPVLAIV

SEQ ID NO: 19979 - protein, 169 aa, unidentified
  source 1..169: note = Dolichospermum sp.
  REGION 1..169: note = tr|A0A5C0DXI1|A0A5C0DXI1_9CYAN 6-carboxy-5,6,7,8-tetrahydropterin synthase; OS = Dolichospermum sp. UHCC 0315A OX=1914871 GN=queD_2 PE=4; SV = 1
MTNHQWLLAKEFRFEAAHKLPYHDGKCSRLHGHSWRGVVYVAGDTLITKGAKQGMVMDYSDIKKYLKPLLENYLDHYYLNESMGLESPTSEAIAAWIYEKLEQAGLAGLTAVRIDETCTSICLYSKTRISGWLNSGESLNLLQSRQNDDVKIPRSEDAGISEESTKELS

SEQ ID NO: 19980 - protein, 145 aa, unidentified
  source 1..145: note = Domibacillus aminovorans
  REGION 1..145: note = tr|A0A177L7V6|A0A177L7V6_9BACI 6-carboxy-5,6,7,8-tetrahydropterin synthase; OS = Domibacillus aminovorans OX=29332 GN=AWH48_18115 PE=3; SV = 1
MMQQIYPAPAHDFRYELNKDFQFAAAHYVPHDEAGACRKLHGHTYFANVTVAGDELNESGFLTNFQLIKSLIHKRFDHTVLNDDMLFSEDISERFPTTEVVARVIWEVIQKELNETPNKPKCLQVYLRETPTSYVVYRPKQEDFS

SEQ ID NO: 19981 - protein, 145 aa, unidentified
  source 1..145: note = Domibacillus antri
  REGION 1..145: note = tr|A0A1Q8Q8S6|A0A1Q8Q8S6_9BACI 6-carboxy-5,6,7,8-tetrahydropterin synthase; OS = Domibacillus antri OX=1714264 GN=BTO30_03145 PE=3 SV=1
MMQQIYPAPMHDFRYELNKDFQFAAAHYVPHDEAGACRKLHGHTYFANITVAGDDLNDSGFLVNFQLIKSLIHKRFDHTVLNDDPLFSEDISERFPTTEAVARTIWEVVQKELNETPNKPKCLQVYLRETPTSYVVYRPKKGDFS

SEQ ID NO: 19982 - protein, 272 aa, unidentified
  source 1..272: note = Domibacillus antri
  REGION 1..272: note = tr|A0A1Q8Q5Q6|A0A1Q8Q5Q6_9BACI 6-pyruvoyl tetrahydropterin synthase OS=Domibacillus antri OX=1714264; GN = BTO30_08245 PE=4 SV=1
MLYLSRKMYFSAVHSYRIDEWSEEKNRAVFGLCSNISGHGHDYRLEVMVKGKLNKKSGIVVNITDIDKVVKSFVHDNLDGKFLNKENTYFHDNIPTTEVIVDYIWKSLNGKIDHCSLHKIRLYENDFLYSEKEDEEVVRLTRKYHFCTAHRLHSPLLSDDENMSIFGKCNNPYGHGHNYYLEVTVSGKPDPITGMIANIAEIDNLVEKEIMQKFDHKHLNLDTEEFKDLNPTSENVTVVIWDLLSPELKNLYKIGLYETEKNYFEYYGPDKE

SEQ ID NO: 19983 - protein, 275 aa, unidentified
  source 1..275: note = Domibacillus enclensis
  REGION 1..275: note = tr|A0A1N7ABL0|A0A1N7ABL0_9BACI 6-pyruvoyltetrahydropterin/6-carboxytetrahydropterin synthase OS=Domibacillus enclensis OX=1017273; GN = SAMN05443094_107143 PE=4 SV=1
MTVYLSRKLSFSAMHSYRIEQWSDEKNQAVFGLCSNPNGHGHDYVLKVMAGGQIKQDSGIVVNITDIDKTVKTFIEEQMDGKFLNKENAYFQTNIPTTENIVKYVWNSLRDKLEGCRLHTIRLYESDYLYAEKGEDDMVRLTKRYHFCTAHRLHSEQLSQEENDRLFGKCNNPYGHGHNYYLEVTVSDRPDPITGMIVDLSQLDALVEKEIMERFDHKHLNLDTEEFKELNPTSENVTIVIWDLLKDSLKNLYKIGLYETEKNYFEYYGPDQELV

SEQ ID NO: 19984 - protein, 145 aa, unidentified
  source 1..145: note = Domibacillus enclensis
  REGION 1..145: note = tr|A0A1N6YH84|A0A1N6YH84_9BACI 6-carboxy-5,6,7,8-tetrahydropterin synthase; OS = Domibacillus enclensis OX=1017273; GN = SAMN05443094_105275 PE=3 SV=1
MMQQIYPAPAHDFRYELNKDFHFAAAHYVPHDEAGACRKMHGHTYFVNITVAGDTLNDSGFLVNFQLVKSLVHKRFDHTVLNEDGLFSEDLSERFPTTEVVARVIWEVVQKELDQTVNKPKCLQVYVRETPTSYVLFRPKREDFS

SEQ ID NO: 19985 - protein, 145 aa, unidentified
  source 1..145: note = Domibacillus epiphyticus
  REGION 1..145: note = tr|A0A1V2AAE9|A0A1V2AAE9_9BACI 6-carboxy-5,6,7,8-tetrahydropterin synthase; OS = Domibacillus epiphyticus OX=1714355 GN=BTO28_04620 PE=3; SV = 1
MMQQIYPAPAHDFRYELNKDFQFAAAHYVPHDEAGACRNLHGHTYFANITVAGDELNDSGFLVNFQLIKSLIHNRFDHTILNNDALFSEDTSERFPTTEVVARIIWEVVQKELDDTPNKPKCLQVYLRETPTSYVVYRPKKGDFL

SEQ ID NO: 19986 - protein, 272 aa, unidentified
  source 1..272: note = Domibacillus epiphyticus
  REGION 1..272: note = tr|A0A1V2A938|A0A1V2A938_9BACI 6-pyruvoyl tetrahydropterin synthase OS=Domibacillus epiphyticus; OX = 1714355 GN=BTO28_06025 PE=4 SV=1
MLYLSRKMFFSAVHSYRIDEWSEEKNKTVFGLCSNPSGHGHDYRLEVMVKGKLDKTSGIVVNITDIDKVVKSFVQDELDGKFLNKEHKYFQEKIPTTEVIVDYIWNSLDGKIDHCDLHKIRLYENDFLYSEKEDEEVVRLTRKYHFCTAHRLHSNQLSDEENMELFGKCNNPYGHGHNYYLEVTVSGKPDPITGMTANIADIDSLVEKEIMQKFDHKHLNLDTEEFKELNPTSENVTVVIWDLLSSELKNLYKIGLYETEKNYFEYYGPDKE

SEQ ID NO: 19987 - protein, 145 aa, unidentified
  source 1..145: note = Domibacillus iocasae
  REGION 1..145: note = tr|A0A1E7DTV9|A0A1E7DTV9_9BACI 6-carboxy-5,6,7,8-tetrahydropterin synthase; OS = Domibacillus iocasae OX=1714016 GN=BA724_00065 PE=3 SV=1
MMQQIYPAPVHDFRYELNKDFHFAAAHYVPHDEAGNCRKLHGHTYFVNITVAGDELNDSGFLVNFQLLKSLVHKRFDHTVLNEDGLFSEDTSERFPTTEVVARVIWEVVQKELNQTVNKPKCLQVFVRETPTSYVVFRPKKGDFA

SEQ ID NO: 19988 - protein, 276 aa, unidentified
  source 1..276: note = Domibacillus iocasae
  REGION 1..276: note = tr|A0A1E7DTD3|A0A1E7DTD3_9BACI 6-pyruvoyl tetrahydropterin synthase OS=Domibacillus iocasae; OX = 1714016 GN=BA724_15010 PE=4 SV=1
MVLLTRKVEFSSAHSYHVPTWSAEKNKEIFGLCNNPNGHGHDYTLEVTVKGKINSKSGIVVNITDIDRIVKDLVLEELDGKFLNREHPFFKEHIPTTENIVAYIWNELNDKFDDCKLHKIKLHENPFLLSEKGEKSMIQLTRKYHFSAAHRLHSDQLSDEENKMIFGKCNNPHGHGHNYILEVTVDGEADPVTGMVINLADLDRAVDETIIQKFDHKHLNLDTEEFSGLNPTAEVMTVVFWELLQSSLPNLSKIGLWETAKNYFEYSGPEMVEAYK

SEQ ID NO: 19989 - protein, 145 aa, unidentified
  source 1..145: note = Domibacillus mangrovi
  REGION 1..145: note = tr|A0A1Q5P032|A0A1Q5P032_9BACI 6-carboxy-5,6,7,8-tetrahydropterin synthase; OS = Domibacillus mangrovi OX=1714354 GN=BLL40_14835 PE=3; SV = 1
MMQQIYPAPTHGFRYELNKDFQFAAAHYVPHDEAGACRKLHGHTYFANVTVAGDELNESGFLTNFQLIKTLIHKRFDHTVLNDDMLFSEDISERYPTTEVVARVIWEVIQKELNETPNKPKCLQVYLRETPTSYVIYRPKQEDFS

SEQ ID NO: 19990 - protein, 117 aa, Donghicola sp.
  REGION 1..117: note = tr|A0A1M4N469|A0A1M4N469_9RHOB 6-carboxy-5,6,7,8-tetrahydropterin synthase OS=Donghicola sp. KarMa OX=1779855 GN=KARMA_3018 PE=3 SV=1
MFRISKEFHFSASHQLAHLPDDHQCARLHGHNYIVVVELSAAELNSDGFVRDYHELKPLKTYIDDVFDHRHLNDVMDVASTAENMSKHFYDWCKARWPEVTAVKVSETPKTWAEYRP

SEQ ID NO: 19991 - protein, 117 aa, unidentified
  source 1..117: note = Donghicola tyrosinivorans
  REGION 1..117: note = tr|A0A2T0WGD7|A0A2T0WGD7_9RHOB 6-carboxy-5,6,7,8-tetrahydropterin synthase OS=Donghicola tyrosinivorans OX=1652492 GN=CLV74_11537 PE=3 SV=1
MFRISKEFHFSASHQLTHLPADHQCARLHGHNYIVVVELASATLNSDGFVRDYHELKPLKTYIDDSFDHRHLNDVMEGHSTAENMAKHFFDWCKSRWPETSAVKVSETPKTWAEYRP

SEQ ID NO: 19992 - protein, 140 aa, Dorea longicatena
  REGION 1..140: note = tr|A0A3E5GEQ2|A0A3E5GEQ2_9FIRM 6-carboxytetrahydropterin synthase OS=Dorea longicatena; OX = 88431 GN=DW641_12460 PE=4 SV=1
MYYLQTKASFDAAHFLWKYEGKCRNIHGHRWNVVAKIKSQELEREGQTRGMVVDFGNLKNDLKVFCDYFDHSLIYETGSLKAETVAALQKEEFHLEEVSFRPTAENFAYYFYKKLTDSGYGVHCVEVYETPNNCAVYEEE

SEQ ID NO: 19993 - protein, 140 aa, Dorea longicatena
  REGION 1..140: note = tr|A0A414T0Q6|A0A414T0Q6_9FIRM 6-carboxy-5,6,7,8-tetrahydropterin synthase OS=Dorea longicatena OX=88431 GN=DW265_02985 PE=3 SV=1
MYYLQTKASFDAAHFLWKYEGKCRNIHGHRWNVVAKIKSQELEREGQTRGMVVDFGNLKKDLKVLCDYFDHSLIYETGSLKAETVAALQKEEFHLEEVSFRPTAENFAYYFYKKLTDSGYGVHCVEVYETPNNCAVYEEE

SEQ ID NO: 19994 - protein, 149 aa, unidentified
  source 1..149: note = Draconibacterium orientale
  REGION 1..149: note = tr|X5DED3|X5DED3_9BACT 6-carboxy-5,6,7,8-tetrahydropterin synthase; OS = Draconibacterium orientale OX=1168034 GN=FH5T_06530; PE = 3 SV=1
MAKIRVTKKFHFEMGHALHNYDGLCRNIHGHTYNMEVTLLGEIREEKGHPKDGMVIDFGKLKKLVKDKIVNVYDHSLVVSQIYADKNQEHLLKATERLIVHDFQPTSENMCVYFAGVLQQELPEDVSLYSIRLYETATSYAEWFAEDNK

SEQ ID NO: 19995 - protein, 149 aa, unidentified
  source 1..149: note = Draconibacterium sediminis
  REGION 1..149: note = tr|A0A0D8J7L6|A0A0D8J7L6_9BACT 6-pyruvoyl tetrahydropterin synthase OS=Draconibacterium sediminis; OX = 1544798 GN=LH29_15780 PE=4 SV=1
MAKIRVTKKFHFEMGHALHNYDGLCRNIHGHTYNMEVTLLGEIREEKGHPKDGMVIDFGKLKKLVKDKIVNVYDHSLVVSRIYADKNQEHLLKATERLIVHDFQPTSENMCVYFAGVIQQELPEDVSLYSIRLYETATSYAEWFAEDNK

SEQ ID NO: 19996 - protein, 148 aa, unidentified
  source 1..148: note = Duganella phyllosphaerae
  REGION 1..148: note = tr|A0A1E7WP20|A0A1E7WP20_9BURK 6-carboxy-5,6,7,8-tetrahydropterin synthase OS=Duganella phyllosphaerae OX=762836 GN=DUPY_22170 PE=3 SV=1
MLTITRKLEFDAGHRIPDHKSQCRNLHGHRYTLEITLTGEIITAEGNSDNGMIMDFSDVKTLAKQHLVDVWDHAFIVYEKDTAVREFLASLPDHKTVVIDRIPTVENLAYVAFGILKAAFTDRFGTGLRLHKLVLHETPNCWAEITDA

SEQ ID NO: 19997 - protein, 149 aa, unidentified
  source 1..149: note = Duganella sacchari
  REGION 1..149: note = tr|A0A1M7L2N8|A0A1M7L2N8_9BURK 6-pyruvoyltetrahydropterin/6-carboxytetrahydropterin synthase OS=Duganella sacchari OX=551987; GN = SAMN05192549_102315 PE=4 SV=1
MLTITRKLEFDAGHRIPDHKSQCRNLHGHRYTLEITLTGNIIDVEGNSDNGMIMDFSDIKALAKEHLVDVWDHAFIVYEKDDAVREFLASLPNHKTVVIDRIPTVENLAHVAFAILKAAYKDRYGTGLHLHKLVLHETPNCWAEITDGV

SEQ ID NO: 19998 - protein, 148 aa, Duganella sp.
  REGION 1..148: note = tr|A0A3E1S387|A0A3E1S387_9BURK 6-carboxy-5,6,7,8-tetrahydropterin synthase OS=Duganella sp. BJB480 OX=1871181 GN=queD PE=3 SV=1
MLTITRKLEFDAGHRIPDHKSQCRNLHGHRYTLEITLTGNIITAEGNSDNGMIMDFSDIKALAKEHLVDVWDHSFIVYEKDAAVRDFLATLPGHKTVVIDRIPTVENLAHVAFEILKAAYKDRYGTGLHLHKLVLHETPNCWAEITDA

SEQ ID NO: 19999 - protein, 148 aa, Duganella sp.
  REGION 1..148: note = tr|A0A0Q5CZ90|A0A0Q5CZ90_9BURK 6-carboxy-5,6,7,8-tetrahydropterin synthase OS=Duganella sp. Leaf126 OX=1736266 GN=ASF61_15690 PE=4 SV=1
MLTITRKLEFDAGHRIPDHKSQCRNLHGHRYTLEITLTGDIITAEGNSDNGMIMDFSDVKTLAKQHLVDVWDHAFIVYEQDTAVREFLASLPGHKTVVIDRIPTVENLAHVAFGILKAAFIDRFGTGLRLHKLVLHETPNCWAEITDA

SEQ ID NO: 20000 - protein, 111 aa, unidentified
  source 1..111: note = Duncaniella muris
  REGION 1..111: note = tr|A0A2V1IKH6|A0A2V1IKH6_9BACT 6-carboxy-5,6,7,8-tetrahydropterin synthase OS=Duncaniella muris OX=2094150 GN=C5O23_04865 PE=3 SV=1
MYYITKRFELAGCHRLELSYESKCSRLHGHNWIVTVHCRSRQLNADGMVADFSHIKEHITSYLDHGNFNELLPFNPTAENIARWICEQIPHCYRVDVQESEGNVASYETDE

SEQ ID NO: 20001 - protein, 111 aa, unidentified
  source 1..111: note = Duncaniella sp.
  REGION 1..111: note = tr|A0A4P7VUN4|A0A4P7VUN4_9BACT 6-carboxy-5,6,7,8-tetrahydropterin synthase OS=Duncaniella sp. C9 OX=2530392 GN=E7745_05220 PE=3 SV=1
MYYITKRFELAGCHRLELSYESKCSRLHGHNWIVTVHCRSRQLNADGMVADFSHIKKHITSYLDHGNFNELLPFNPTAENIARWICEQIPHCYRVDVQESEGNVASYETDE

SEQ ID NO: 20002 - protein, 113 aa, unidentified
  source 1..113: note = Duncaniella sp.
  REGION 1..113: note = tr|A0A4Z0V2K9|A0A4Z0V2K9_9BACT 6-carboxy-5,6,7,8-tetrahydropterin synthase OS=Duncaniella sp. TLL-A3 OX=2530391 GN=EZ315_01215 PE=3 SV=1
MYYITKTFELAGCHRLELSYPSKCSRLHGHNWIVTVHCRSRELNADGMVIDFSHIKERITAYLDHGNFNELLPFNPTAENIARWVCDQIDTCYRVDVKESEGNVASYVVEEKA

SEQ ID NO: 20003 - protein, 139 aa, Dyadobacter fermentans
  REGION 1..139: note = tr|C6W1R0|C6W1R0_DYAFD Uncharacterized protein; OS = Dyadobacter fermentans (strain ATCC 700827 / DSM 18053 / NS114) OX=471854 GN=Dfer_2573 PE=4 SV=1
MIYVTRKEHFNAAHRLYNPAWSEEKNQEVFGPCANNNWHGHNFELIVTVKGKPDPETGFVIDLKVLGDIMKRQIVDKVDHKNLNLDVDFMQGKMASCEIFVMEIWNILAPAIEQAAPNAKLHYIKLIETPKNFVEYYGE

SEQ ID NO: 20004 - protein, 138 aa, Dyadobacter fermentans
  REGION 1..138: note = tr|C6VZC4|C6VZC4_DYAFD 6-carboxy-5,6,7,8-tetrahydropterin synthase OS=Dyadobacter fermentans (strain ATCC 700827 / DSM 18053 / NS114); OX = 471854 GN=Dfer_0467 PE=3 SV= 1
MVQNVAVFRKEHFNAAHRLHNPAWSDEQNEAVFGKCNNPSFHGHNYELIVQVTGPLDPETGYVMDMKLLSAILKESVIDRFDHRNLNLDVEEFKTLNPTAENIAIVIYSIIRPKIDAGLDLKIRLYETERNFVEYPVR

SEQ ID NO: 20005 - protein, 138 aa, unidentified
  source 1..138: note = Dyadobacter jejuensis
  REGION 1..138: note = tr|A0A316AMD8|A0A316AMD8_9BACT 6-pyruvoyltetrahydropterin/6-carboxytetrahydropterin synthase OS=Dyadobacter jejuensis OX=1082580; GN = CLV98_103270 PE=4 SV=1
MNPRVSVFRKEHFNAAHRLHNKAWTAEQNREVFDKCNNANYHGHNYELIVQVTGRVDPETGFVIDMKYLSRLIRQHVIDRFDHKNLNLDLKEFETLNPTAENITLVIHDILRKLIDPELALKIRLYETERNFVEYPAD

SEQ ID NO: 20006 - protein, 139 aa, unidentified
  source 1..139: note = Dyadobacter jejuensis
  REGION 1..139: note = tr|A0A316AP36|A0A316AP36_9BACT 6-pyruvoyltetrahydropterin/6-carboxytetrahydropterin synthase OS=Dyadobacter jejuensis OX=1082580; GN = CLV98_10293 PE=4 SV=1
MIYITRKEHFNAAHRLFNPKWSDEKNQEVFGPCANNNWHGHNFDLYVTVKGLPDPDTGFVIDLKVLGDIVKATIIDKVDHKNLNLDVDFMQGKMASCEIFVMEIWKILDPAIKAAASQAQLHYIKLVETPKNYVEYYGE

SEQ ID NO: 20007 - protein, 139 aa, unidentified
  source 1..139: note = Dyadobacter jiangsuensis
  REGION 1..139: note = tr|A0A2P8FWK6|A0A2P8FWK6_9BACT 6-pyruvoyltetrahydropterin/6-carboxytetrahydropterin synthase OS=Dyadobacter jiangsuensis OX=1591085; GN = CLV60_11081 PE=4 SV=1
MIYVTRKEHFNAAHRLYNPAWSDEKNQEVFGPCANNNWHGHNFELIVTVKGKPNPDTGFVIDLKVLGDIIKGEVVDKVDHKNLNLDVDFMQGKMASCEIFVMEIWNILEPAIAQAAPNAKLHYIKLIETPKNFVEYYGE

SEQ ID NO: 20008 - protein, 138 aa, unidentified
  source 1..138: note = Dyadobacter jiangsuensis
  REGION 1..138: note = tr|A0A2P8G9F3|A0A2P8G9F3_9BACT 6-carboxy-5,6,7,8-tetrahydropterin synthase OS=Dyadobacter jiangsuensis OX=1591085 GN=CLV60_104447 PE=3 SV=1
MVQKVAVFRKEHFNAAHRLHNPEWSEEKNGEVFGKCNNPNFHGHNYELIVQVTGPVAPETGYVIDMKVLSAILKESVIDRFDHRNLNLDVEEFKTLNPTAENIAIVIYSIIRPKIEAGLDLKIRLYETERNFVEYPVQ

SEQ ID NO: 20009 - protein, 138 aa, Dyadobacter koreensis
  REGION 1..138: note = tr|A0A1H6Y8V0|A0A1H6Y8V0_9BACT 6-pyruvoyltetrahydropterin/6-carboxytetrahydropterin synthase OS=Dyadobacter koreensis OX=408657; GN = SAMN04487995_4272 PE=4 SV=1
MAHKVAVFRKEHFNAAHRLHNPAWSDEKNGEIFGKCNNPNFHGHNYELIIQVVGELNQETGFVIDMKELSVLIQEHVLDRFDHKNLNLDVAEFHHLNPSAENIAIVIYDILRPKIDAELALKIRLYETERNFVEYPVD

SEQ ID NO: 20010 - protein, 139 aa, Dyadobacter koreensis
  REGION 1..139: note = tr|A0A1H6RZX3|A0A1H6RZX3_9BACT 6-pyruvoyltetrahydropterin/6-carboxytetrahydropterin synthase OS=Dyadobacter koreensis OX=408657; GN = SAMN04487995_1470 PE=4 SV=1
MIYVTRKEHFNAAHRLFNPAWSDEKNQEVFGPCANNNWHGHNFELIVTVKGKPDPDTGFVIDLKVLGDLVKEKVVDKVDHKNLNLDVDFMQGKMASCEIFVMEIWNILAPAIQEVSPGSSLHYIKLVETPKNFVEYYGE

SEQ ID NO: 20011 - protein, 139 aa, Dyadobacter psychrophilus
  REGION 1..139: note = tr|A0A1T5FA98|A0A1T5FA98_9BACT 6-pyruvoyltetrahydropterin/6-carboxytetrahydropterin synthase OS=Dyadobacter psychrophilus OX=651661; GN = SAMN05660293_02949 PE=4 SV=1
MIYVTRKEHFNAAHRLFNPAWSEEKNQEVFGPCANNNWHGHNFELIVTVKGKPDPDTGFVIDLKVLGDIVKEKVVDKVDHKNLNLDVDFMQGKMASCEIFVYEIWNILAPAIAEASPNAKLHYIKLVETPKNFVEYYGE

SEQ ID NO: 20012 - protein, 138 aa, Dyadobacter psychrophilus
  REGION 1..138: note = tr|A0A1T5GFE4|A0A1T5GFE4_9BACT 6-carboxy-5,6,7,8-tetrahydropterin synthase OS=Dyadobacter psychrophilus OX=651661 GN=SAMN05660293_04016 PE=3 SV=1
MAQKVAVFRKEHFNAAHRLHNPEWSDEKNENVFGKCNNPNFHGHNYELIVQVTGEVDPETGYVLDMKVLSSILKESVLDRFDHKNLNLDVEEFKSLNPSAENIAIVIYSILRPKIDSGLDLKVRLYETERNFVEYPVD

SEQ ID NO: 20013 - protein, 138 aa, Dyadobacter soli
  REGION 1..138: note = tr|A0A1G8A812|A0A1G8A812_9BACT 6-carboxy-5,6,7,8-tetrahydropterin synthase OS=Dyadobacter soli OX=659014 GN=SAMN04487996_13014 PE=3 SV=1
MVQKVAVFRKEHFNAAHRLHNPDWSEEKNGEVFGKCNNPNFHGHNYELIVQVTGPVDPETGYVMDMKVLSAILKESVIDRFDHRNLNLDVEEFKTLNPTAENIAIVIYSVIRPKIDSGLDLKIRLYETERNFVEYPVQ

SEQ ID NO: 20014 - protein, 139 aa, Dyadobacter soli
  REGION 1..139: note = tr|A0A1G6ZI31|A0A1G6ZI31_9BACT 6-pyruvoyltetrahydropterin/6-carboxytetrahydropterin synthase OS=Dyadobacter soli OX=659014; GN = SAMN04487996_103126 PE=4 SV=1
MIYVTRKEHFNAAHRLYNPAWSDEKNQEVFGPCANNNWHGHNFELIVTVKGKPDPDTGFVIDLKVLGDIVKQEIVDKVDHKNLNLDVDFMQGKMASCEIFVMEIWNILEPAIAQAAPNAKLHYIKLVETPKNFVEYYGE

SEQ ID NO: 20015 - protein, 139 aa, Dyadobacter sp.
  REGION 1..139: note = tr|A0A4U6CT06|A0A4U6CT06_9BACT 6-carboxytetrahydropterin synthase OS=Dyadobacter sp. AR-3-8 OX=2576211 GN=FDK13_30215 PE=4 SV=1
MIYVTRKEHFNAAHRLFNPAWSEDKNQEVFGPCANNNWHGHNFELIVTVKGKPDPDTGFVIDLKVLGDLIKDKVVDKVDHKNLNLDVDFMKDKMASCEIFVTEIWKILAPAIQEVAPTSQLHYIKLVETPKNFVEYYGE

SEQ ID NO: 20016 - protein, 139 aa, Dyadobacter sp.
  REGION 1..139: note = tr|A0A3D8YFD7|A0A3D8YFD7_9BACT 6-carboxy-5,6,7,8-tetrahydropterin synthase OS=Dyadobacter sp. RS19 OX=2259619 GN=DSL64_06210 PE=3 SV=1
MLIHVTRRETFNAAHRMYREEWSAEKNEEVFGRCANPNWHGHNFTLFVTVKGEIDDKKGYLIDLKELKKMIKEYVIEKVDHRNLNLDVDFMKGKMATTEMLCAQIFHQLKKPVEACEGVFMHSVRLHETENNSAEYFGQ

SEQ ID NO: 20017 - protein, 120 aa, Dyella japonica
  REGION 1..120: note = tr|A0A075JYE9|A0A075JYE9_9GAMM 6-carboxy-5,6,7,8-tetrahydropterin synthase OS=Dyella japonica A8 OX=1217721 GN=HY57_04030 PE=3 SV=1
MHIFKEFHIEAAHRLPNVPPGHKCARLHGHSFRIEIHVEGEPDPTLGWVMDFADVKAAFAPLFEQLDHHYLNDIEGLENPTSEMLCRWIFKRLQPSLPGLDKVVVHETCTSGASCSRDSF

SEQ ID NO: 20018 - protein, 120 aa, Dyella japonica
  REGION 1..120: note = tr|A0A0G9H4F2|A0A0G9H4F2_9GAMM 6-carboxy-5,6,7,8-tetrahydropterin synthase OS=Dyella japonica DSM 16301 OX=1440762 GN=Y882_07315 PE=3 SV=1
MHIFKEFHIEAAHRLPNVPPGHKCARLHGHSFRIQIHVEGEPDPTLGWVMDFADVKAAFAPLFDQLDHHYLNDIEGLENPTSEVLCRWIFKRLQPSLPGLDKVVVHETCTSGASCSRDSF

SEQ ID NO: 20019 - protein, 120 aa, unidentified
  source 1..120: note = Dyella jiangningensis
  REGION 1..120: note = tr|A0A023NWL8|A0A023NWL8_9GAMM 6-carboxy-5,6,7,8-tetrahydropterin synthase OS=Dyella jiangningensis OX=1379159 GN=CA260_19840 PE=3 SV=1
MHIFKVFHIEAAHRLPNVPPGHKCARLHGHSFKVEIHVAGEPDPAMGWVMDFADVKAAFAPLYDQLDHHYLNDIEGLENPTSEMLSRWIFRRLEPALPGLDKVVVHETCTSGASCSRDSF

SEQ ID NO: 20020 - protein, 120 aa, Dyella marensis
  REGION 1..120: note = tr|A0A1I2EIF0|A0A1I2EIF0_9GAMM 6-carboxy-5,6,7,8-tetrahydropterin synthase OS=Dyella marensis OX=500610 GN=SAMN02799615_01970 PE=3 SV=1
MHIFKLFHLEAAHRLPNVPPGHKCARLHGHSFRVEIHVAGEPDPHQGWVMDFADVKAAFAPLYDQLDHHYLNDIEGLENPTSENLARWIFRRLEPRLPGLDKVVVHETCTSGASCSRDSF

SEQ ID NO: 20021 - protein, 120 aa, Dyella soli
  REGION 1..120: note = tr|A0A4R0YLP6|A0A4R0YLP6_9GAMM 6-carboxy-5,6,7,8-tetrahydropterin synthase OS=Dyella soli; OX = 522319 GN=queD PE=3 SV=1
MHIFKLFHIEAAHRLPHVPEGHKCARLHGHSFRVEIHVSGEPDPKLGWVMDFADVKAAFAPLYDQLDHHYLNDIEGLENPTSEMLARWIFTRLSKDLPGLDKVVVHETCTSGASCSRDSF

SEQ ID NO: 20022 - protein, 120 aa, Dyella soli
  REGION 1..120: note = tr|A0A4R0YKA0|A0A4R0YKA0_9GAMM 6-carboxy-5,6,7,8-tetrahydropterin synthase OS=Dyella soli; OX = 522319 GN=queD PE=3 SV=1
MHIFKVFHLEAAHRLPNVPPGHKCARLHGHSFRVEIHVAGEPDPALGWVMDFADVKAAFAPIYDQLDHHYLNDIEGLENPTSEVLARWIFRHLESSLPGLDKVVVHETCTSGASCSRDSF

SEQ ID NO: 20023 - protein, 120 aa, Dyella sp.
  REGION 1..120: note = tr|A0A3M0ETA2|A0A3M0ETA2_9GAMM 6-carboxy-5,6,7,8-tetrahydropterin synthase OS=Dyella sp. YR388 OX=2135665 GN=C8J93_3500 PE=3 SV=1
MHIFKEFHIEAAHRLPNVPPGHKCARLHGHSFRVQIHVEGEPDPTLGWVMDFADVKAAFAPLYDQLDHHYLNDIEGLENPTSEMLCRWIFKRLQPALPGLDKVVVHETCTSGASCSRDSF

SEQ ID NO: 20024 - protein, 118 aa, Dyella sp.
  REGION 1..118: note = tr|A0A1G7RXM4|A0A1G7RXM4_9GAMM 6-carboxy-5,6,7,8-tetrahydropterin synthase OS=Dyella sp. 333MFSha OX=1798240 GN=SAMN04515659_2238 PE=3 SV=1
MRIYKTFNIEAAHRLPNVPEGHKCARLHGHSFRVELHVEGPVDPVFGWVMDFGDLKARFQPLYDRLDHNYLNDIDGLENPTSENLARWIFQRLRVDVPGLAKVVVNETCTSGAEYSGD

SEQ ID NO: 20025 - protein, 120 aa, Dyella thiooxydans
  REGION 1..120: note = tr|A0A161J2C8|A0A161J2C8_9GAMM 6-carboxy-5,6,7,8-tetrahydropterin synthase OS=Dyella thiooxydans OX=445710 GN=ATSB10_27250 PE=3 SV=1
MHIFKVFQLEAAHRLPNVPPGHKCSRLHGHSFRIEIHVEGEPDPQLGWVMDFADIKAAFAPLYDQLDHHYLNDIEGLENPTSEMLARWIWQRLGPRLPGLDRVVVHETCTSGASCSSSSF

SEQ ID NO: 20026 - protein, 118 aa, unidentified
  source 1..118: note = Dysgonamonadaceae bacterium
  REGION 1..118: note = tr|A0A2N4S9L1|A0A2N4S9L1_9BACT 6-carboxy-5,6,7,8-tetrahydropterin synthase; OS = Dysgonamonadaceae bacterium OX=2065189 GN=queD PE=3 SV=1
MYKISKQFSFSAAHSLHGLPDSHPCSRLHGHNYVVTIRLKSETLSETGFVRDYHDLKFVKKYIDENLDHRNLNDILNPLNSSAENLAKLLYDVFKPQLPELYAVEVSETPKTNAIYEP

SEQ ID NO: 20027 - protein, 117 aa, unidentified
  source 1..117: note = Dysgonomonas alginatilytica
  REGION 1..117: note = tr|A0A2V3PUU3|A0A2V3PUU3_9BACT 6-carboxy-5,6,7,8-tetrahydropterin synthase; OS = Dysgonomonas alginatilytica OX=1605892 GN=CLV62_103137; PE = 3 SV=1
MYKISKQFAFSASHILEGLSEDHPCSRLHGHNYIITVHLKSETLNEVGFVKDYRELSIIKEYIDNTLDHRHLNDVFSVNPTAENIARELYTIFVKEIPQIYAVEVCETPKTSAIYEA

SEQ ID NO: 20028 - protein, 120 aa, Dysgonomonas capnocytophagoides
  REGION 1..120: note = tr|A0A4Y8L2B3|A0A4Y8L2B3_9BACT 6-carboxy-5,6,7,8-tetrahydropterin synthase; OS = Dysgonomonas capnocytophagoides OX=45254 GN=queD PE=3; SV = 1
MYKISKQFAFSASHILEGLPEGHPCGRMHGHNYIVTIHLKSDVLNDVGFVKDYRELSVIKQFIDDKLDHRHLNDIFDMNPTAENLARTLYEIFAESIPQIYAVEVSETPKTTAIYEADGK

SEQ ID NO: 20029 - protein, 120 aa, Dysgonomonas gadei
  REGION 1..120: note = tr|F5J0D8|F5J0D8_9BACT 6-carboxy-5,6,7,8-tetrahydropterin synthase; OS = Dysgonomonas gadei ATCC BAA-286 OX=742766; GN = HMPREF9455_02805 PE=3 SV=1
MYKISKQFSFSASHILEGLPLEHPCSRLHGHNYVITVHLQAKQLNTVGFIKDYRELDSVKQYIDNTLDHRHLNDILPFNPTAENMAKYLYDIFKKDIPELYAIEVSETPKTTAIYEADSE

SEQ ID NO: 20030 - protein, 120 aa, unidentified
  source 1..120: note = Dysgonomonas macrotermitis
  REGION 1..120: note = tr|A0A1M5D9A7|A0A1M5D9A7_9BACT 6-carboxy-5,6,7,8-tetrahydropterin synthase; OS = Dysgonomonas macrotermitis OX=1346286; GN = SAMN05444362_108108 PE=3 SV=1
MYKISKQFAFSASHILEGLSGDHPCSRMHGHNYIITVHLKSAELNEVGFVKDYRELSFIKKYIDDVLDHRHLNDIFDVNPTAENIARKLYEIFVKQAPQIYAVEVSETPKTTAIYEADGK

SEQ ID NO: 20031 - protein, 120 aa, Dysgonomonas mossii
  REGION 1..120: note = tr|F8WVN7|F8WVN7_9BACT 6-carboxy-5,6,7,8-tetrahydropterin synthase; OS = Dysgonomonas mossii DSM 22836 OX=742767; GN = HMPREF9456_00376 PE=3 SV=1
MYKISKQFSFSASHILEGLPQEHPCSRLHGHNYVITVHLKSKELNEVGFIKDYRELDSVKKYIDEKLDHRHLNDVMSFNPTAENIARYLYDTFVADIPELYAVEVSETPKTTAIYEADSK

SEQ ID NO: 20032 - protein, 120 aa, Dysgonomonas mossii
  REGION 1..120: note = tr|A0A4Y9IL30|A0A4Y9IL30_9BACT 6-carboxy-5,6,7,8-tetrahydropterin synthase; OS = Dysgonomonas mossii OX=163665 GN=queD PE=3 SV=1
MYKISKQFSFSASHILKGLPQEHPCSRLHGHNYVITVHLKSKELNQVGFIKDYRELDSVKKYIDEKLDHRHLNDVLSFNPTAENIARYLYDIFVADIPELYAVEVSETPKTTAIYEADSK

SEQ ID NO: 20033 - protein, 120 aa, Dysgonomonas sp.
  REGION 1..120: note = tr|A0A1M3LBT9|A0A1M3LBT9_9BACT 6-carboxy-5,6,7,8-tetrahydropterin synthase; OS = Dysgonomonas sp. 37-18 OX=1895907 GN=BGO84_13465 PE=3; SV = 1
MYKISKQFSFSASHILEGLPQEHPCSRLHGHNYVITVHLKSKELNQVGFIKDYRELDSVKKYIDEKLDHRHLNDVLSFNPTAENIARYLYDTFVADIPELYAVEVSETPKTTAIYEADSK

SEQ ID NO: 20034 - protein, 136 aa, Echinicola sp.
  REGION 1..136: note = tr|A0A514CIB5|A0A514CIB5_9BACT 6-carboxytetrahydropterin synthase OS=Echinicola sp. LN3S3; OX = 2591634 GN=FKX85_10185 PE=4 SV=1
MKVAVYRKEHFNAAHRLYNADWSEEKNEQVFGKCNNPSYHGHNYDLHVKLVGPINPETGYVYDMKVLSDLIKSKVIKKFDHKNLNLDTDEFKDLNPTAENIAVVIWNILRKEIEEKYDLTVRLYETERNYVEYDGH

SEQ ID NO: 20035 - protein, 139 aa, Echinicola sp.
  REGION 1..139: note = tr|A0A514CNP4|A0A514CNP4_9BACT 6-carboxytetrahydropterin synthase OS=Echinicola sp. LN3S3; OX = 2591634 GN=FKX85_21150 PE=4 SV=1
MIHVSRKEHFNAAHKLWNPNWTEERNKEVFGPCANANWHGHNFELIVTVKGLPDEDTGFVVDLKALSTLIRTLVIDKVDHKNLNVDVDFMQGKMASCENLVMEFWKILQPAVNKITPHGGLYKLKLYETPRNFVDYYGE

SEQ ID NO: 20036 - protein, 139 aa, unidentified
  source 1..139: note = Echinicola strongylocentroti
  REGION 1..139: note = tr|A0A2Z4IFN5|A0A2Z4IFN5_9BACT 6-carboxytetrahydropterin synthase OS=Echinicola strongylocentroti OX=1795355 GN=DN752_06320 PE=4 SV=1
MIHVSRKEHFNAAHKLWNPNWTEEKNIEVFGPCANVNWHGHNFELIVTVKGLPDEGTGFVVDLKALSTLIRTLVIDKVDHKNLNVDVDFMQGKMASCENLVMEFWKILQPAVDKITPHGGLYKLKLYETPRNFVEYYGE

SEQ ID NO: 20037 - protein, 139 aa, Echinicola vietnamensis
  REGION 1..139: note = tr|L0G7H4|L0G7H4_ECHVK 6-pyruvoyl-tetrahydropterin synthase OS=Echinicola vietnamensis (strain DSM 17526 / LMG 23754 / KMM 6221) OX=926556 GN=Echvi_4637 PE=4 SV=1
MIHVSRKEHFNAAHKLWNPNWTEEKNVEVFGPCANANWHGHNFELIVTVKGLPDADTGFVVDLKALSTLIRSLVIDKVDHKNLNVDVDFMQGKMASCENLVMEFWKILQPAVDKITPHGGLYKLKLYETPRNFVEYYGD

SEQ ID NO: 20038 - protein, 136 aa, Echinicola vietnamensis
  REGION 1..136: note = tr|L0G044|L0G044_ECHVK 6-pyruvoyl-tetrahydropterin synthase OS=Echinicola vietnamensis (strain DSM 17526 / LMG 23754 / KMM 6221) OX=926556 GN=Echvi_2135 PE=4 SV=1
MRVAVYRKEHFNAAHRLFNPEWSDEKNSQVFGKCNNPSYHGHNYDLHVKLVGPIDPATGYVYDMKVLSDMIREKVINKFDHKNLNLDTDEFKQLNPTAENIAVVIWNILRKEIEEKYDLTVRLYETERNYVEYDGH

SEQ ID NO: 20039 - protein, 128 aa, Ectothiorhodosinus mongolicus
  REGION 1..128: note = tr|A0A1R3W346|A0A1R3W346_9GAMM 6-carboxy-5,6,7,8-tetrahydropterin synthase; OS = Ectothiorhodosinus mongolicus OX=233100; GN = SAMN05216526_1448 PE=3 SV=1
MATPLYNLKVLTEFCAAHTLRDYPGNCARMHGHNWKVEVEVESSVLDNLGMVLDFKTIKQYAREVTEIVDHRYLNDLPAFQNQNPTAENIAAWFFKEMSERLSNNKGIQLKAITLWETDRACVRYTEN

SEQ ID NO: 20040 - protein, 132 aa, Ectothiorhodospira haloalkaliphila
  REGION 1..132: note = tr|W8KRG7|W8KRG7_9GAMM 6-pyruvoyl tetrahydropterin synthase OS=Ectothiorhodospira haloalkaliphila OX=421628; GN = M911_01845 PE=4 SV=1
MYMVNVRDHMMIAHSFSGETFGPAQRLHGATYVVDACFKRKALDEENLVVDIGRASEVLHQILGEFNYRNLDEVEAFQGQNTTTEFMARVIFDRLAVAIREGRLGASARGLSALAVTLHESHVAQAGFEGPL

SEQ ID NO: 20041 - protein, 132 aa, Ectothiorhodospira haloalkaliphila
  REGION 1..132: note = tr|W8KGP0|W8KGP0_9GAMM 6-carboxy-5,6,7,8-tetrahydropterin synthase; OS = Ectothiorhodospira haloalkaliphila OX=421628; GN = M911_03195 PE=3 SV=1
MSKYTLKVLTDFASAHTLRDYPGDCARLHGHNWKVEAEVEASRLDRLGMAVDFKTIKGLAREIAGQLDHQYLNDLEPFRDVNPTAENIAQWFFREMAARLDAPNVRVSAITLWETERACVRYSEDQSKDSAP

SEQ ID NO: 20042 - protein, 132 aa, Ectothiorhodospira magna
  REGION 1..132: note = tr|A0A1H9FH55|A0A1H9FH55_9GAMM 6-carboxy-5,6,7,8-tetrahydropterin synthase; OS = Ectothiorhodospira magna OX=867345; GN = SAMN05421693_12624 PE=3 SV=1
MPKYTLKVLTDFASAHTLRNYPGNCSRLHGHNWKVEAEVEATVLDALGMAVDFKTIKSLARDIAGELDHTYLNDLPPFRDVNPTAENIAAWFFHEMAARLNAPGVRVSAITLWETERACVRYTEESPKDTPS

SEQ ID NO: 20043 - protein, 132 aa, Ectothiorhodospira marina
  REGION 1..132: note = tr|A0A1H7NMM7|A0A1H7NMM7_9GAMM 6-carboxy-5,6,7,8-tetrahydropterin synthase; OS = Ectothiorhodospira marina OX=1396821; GN = SAMN05444515_11225 PE=3 SV=1
MPKYTLKVLTDFASAHTLRDYPGDCARLHGHNWKVEAEVEASQLDALGMAVDFKTIKGLAREIAGQLDHQYLNDLEPFRDLNPTAENIAAWFFHEMTARLDAPHVRVSAITLWETERACVRYSEDQSKDSAL

SEQ ID NO: 20044 - protein, 132 aa, Ectothiorhodospira marina
  REGION 1..132: note = tr|A0A1H7QLG9|A0A1H7QLG9_9GAMM 6-pyruvoyl-tetrahydropterin synthase OS=Ectothiorhodospira marina OX=1396821 GN=SAMN05444515_11818 PE=4 SV=1
MYTVTVRNHMMIAHSFSGETFGPAQRLHGATYVVDACFKREALDEENLVVDIGRATEVLNEILSEFNYRNLDEVEAFQGRNTTTEFMARVIFDRLAKAIREGRLGASARGLSALAVNLHESHVAHAGFEGPL

SEQ ID NO: 20045 - protein, 126 aa, Ectothiorhodospira mobilis
  REGION 1..126: note = tr|A0A1I4SL43|A0A1I4SL43_ECTMO 6-carboxy-5,6,7,8-tetrahydropterin synthase; OS = Ectothiorhodospira mobilis OX=195064; GN = SAMN05421721_11820 PE=3 SV=1
MPTYTLKVLTDFASAHTLRDYPGDCARLHGHNWKVEVEVRATRLDRLGMAVDFKTVKALAREIAGRLDHRYLNDLEPFRDINPTAEHIAAWFFQEMAGRLDSPGVQVSAVTLWETERACVRYSEDS

SEQ ID NO: 20046 - protein, 132 aa, Ectothiorhodospira sp.
  REGION 1..132: note = tr|A0A161HG34|A0A161HG34_9GAMM 6-carboxy-5,6,7,8-tetrahydropterin synthase; OS = Ectothiorhodospira sp. BSL-9 OX=1442136; GN = ECTOBSL9_1669 PE=3 SV=1
MPKFTLKVLTDFASAHTLRDYPGDCARLHGHNWKVEAEVEASQLDRLGMAVDFKTIKGLAREIAGQLDHQYLNDLEPFRDVNPTAENIAQWFFREMAARLDAPNVRVSAITLWETERACVRYSEDQSKDSAL

SEQ ID NO: 20047 - protein, 132 aa, Ectothiorhodospira sp.
  REGION 1..132: note = tr|A0A161HRA4|A0A161HRA4_9GAMM 6-pyruvoyl tetrahydropterin synthase OS=Ectothiorhodospira sp. BSL-9; OX = 1442136 GN=ECTOBSL9_1278 PE=4 SV=1
MYTVNVRDHMMIAHSFSGETFGPAQRLHGATYVVDACFKREALDEENLVVDIGRASEVLHEILGEFNYRNLDEMEAFQGQNTTTEFMARVIFDRLAGAIHEGRLGASARNLSALAVTLHESHVAQAGFEGPL

SEQ ID NO: 20048 - protein, 145 aa, unidentified
  source 1..145: note = Ectothiorhodospiraceae bacterium
  REGION 1..145: note = tr|A0A2E0UHB1|A0A2E0UHB1_9GAMM 6-carboxy-5,6,7,8-tetrahydropterin synthase; OS = Ectothiorhodospiraceae bacterium OX=2026737; GN = CL946_02485 PE=3 SV=1
MKIAKQFHWEMGHRLPFHKELCANIHGHSYRMWVELEGGLDPNGMLLDYGILKEKVKPIIDEIDHAFMCDENDDVMKQFLAGSDFKHVMVSFTTTAEHISEYLIRKIWFALQGYTNLSRITVRIHETETAMAETSLTREEFQKVV

SEQ ID NO: 20049 - protein, 127 aa, unidentified
  source 1..127: note = Ectothiorhodospiraceae bacterium
  REGION 1..127: note = tr|A0A2A4X4U6|A0A2A4X4U6_9GAMM 6-carboxy-5,6,7,8-tetrahydropterin synthase; OS = Ectothiorhodospiraceae bacterium OX=2026737 GN=queD; PE = 3 SV=1
MPAKYTLKVVSDFASAHTLRDYPGACSRMHGHNWKVEAEVEASRLNNVGMAVDFKAIRQQVRKLTDILDHRYLNDIKPFDMINPTAENIAKFLFNGLAEVLDDENIRVKAITLWETERACVRYEEND

SEQ ID NO: 20050 - protein, 137 aa, Edaphobacter aggregans
  REGION 1..137: note = tr|A0A428ME96|A0A428ME96_9BACT 6-carboxy-5,6,7,8-tetrahydropterin synthase; OS = Edaphobacter aggregans OX=570835 GN=EDE15_0657 PE=3 SV=1
MIFLTRKAEFSSAHYYWNDAWSLEENERIFGKCANRNGHGHNYTLEVTVAGEVDPTSGFVVDLKQLKDILEQEVVSVYDHRHLNLEVPEFAKAIPTTENIAIAVWNRLENKIPNAKLHRVRIYEMPDLFADYYGEQS

SEQ ID NO: 20051 - protein, 135 aa, Edaphobacter aggregans
  REGION 1..135: note = tr|A0A428ME76|A0A428ME76_9BACT 6-pyruvoyltetrahydropterin/6-carboxytetrahydropterin synthase OS=Edaphobacter aggregans OX=570835 GN=EDE15_0656; PE = 4 SV=1
MKAHLSRRYHFSASHRLHAEAYDDDRNRVVYGKCNNPHGHGHNYMVQVTLSGPVDSVTGMVCNLAELDDFAQTNLIAQFDQMNLNTLDCFRDTVTTTENLSIEIYRIFSKFTAAHLESVHVEETSNNSFDFAGAF

SEQ ID NO: 20052 - protein, 140 aa, unidentified
  source 1..140: note = Edaphobacter dinghuensis
  REGION 1..140: note = tr|A0A495BRS1|A0A495BRS1_9BACT 6-pyruvoyltetrahydropterin/6-carboxytetrahydropterin synthase OS=Edaphobacter dinghuensis OX=1560005; GN = C8E94_0580 PE=4 SV=1
MKAYLSRRYNFPASHRLNTDAYDAEQNRAVFGKCNNPHGHGHNYTVQVTVSGEVDPETGMVCNLADLDTFAQTNLLDRFDHANLNTLDCFRESVSTTENLSIEVYRIFRSFTAAHLERVHVEETSNNSFDYAGNVDPGFI

SEQ ID NO: 20053 - protein, 136 aa, unidentified
  source 1..136: note = Edaphobacter dinghuensis
  REGION 1..136: note = tr|A0A495BRZ8|A0A495BRZ8_9BACT 6-pyruvoyltetrahydropterin/6-carboxytetrahydropterin synthase OS=Edaphobacter dinghuensis OX=1560005; GN = C8E94_0581 PE=4 SV=1
MILLTRKAEFSSAHFYWNEAWSAEENQRVFGKCANRNGHGHNYTIEVTVAGEVDPVSGFVVDLKQLKDILEREVISVYDHRHLNLEVPEFSKTIPTTENIAIAIWHRLEGKIPNAKLYRVRVYEMPDLFADFYGER

SEQ ID NO: 20054 - protein, 142 aa, Edaphobacter modestus
  REGION 1..142: note = tr|A0A4Q7YSF1|A0A4Q7YSF1_9BACT 6-pyruvoyltetrahydropterin/6-carboxytetrahydropterin synthase OS=Edaphobacter modestus OX=388466 GN=BDD14_1190; PE = 4 SV=1
MKAYLSRRYHFSASHRLHSEAFDEGQNQQVFGKCNNPHGHGHNYTVEVTFSGRVNPVTGMVCDLGALDAFARENLIDRFDHTNLNLLHCFENRVSTTENLSVEVYRIFAGFSAAHLERVHIEETSNNSFDYAGDAMPAEGTH

SEQ ID NO: 20055 - protein, 125 aa, Edaphobacter modestus
  REGION 1..125: note = tr|A0A4Q7YS99|A0A4Q7YS99_9BACT 6-carboxy-5,6,7,8-tetrahydropterin synthase; OS = Edaphobacter modestus OX=388466 GN=BDD14_2152 PE=3 SV=1
MFEVTVEAGFSSGHYLRNYRGKCENPHGHNYKVFVTLIGEELDEAGLLLDFKLLKQVMRPVVDYLDHQMINELEPFTTLNPSAENLARYFYQETAKQLHEMTTGRVRVKDCTLYETDTSFARYYE

SEQ ID NO: 20056 - protein, 120 aa, unidentified
  source 1..120: note = Edwardsiella anguillarum
  REGION 1..120: note = tr|A0A076LLQ7|A0A076LLQ7_9GAMM 6-carboxy-5,6,7,8-tetrahydropterin synthase; OS = Edwardsiella anguillarum ET080813 OX=667120 GN=queD; PE = 3 SV=1
MTTTLFKEFQFEAAHRLPHVPQGHKCGRLHGHSFLVRIEITGEVDPYTGWVMDFADLKARFQPIYDQLDHHYLNEIAGLENPTSEVLARWIWDQLKPSLPLLSAVRVKETCTAGCTYRGQ

SEQ ID NO: 20057 - protein, 120 aa, Edwardsiella hoshinae
  REGION 1..120: note = tr|A0A376DIG3|A0A376DIG3_9GAMM 6-carboxy-5,6,7,8-tetrahydropterin synthase; OS = Edwardsiella hoshinae OX=93378 GN=queD PE=3 SV=1
MTTTLFKEFQFEAAHRLPHVPQGHKCGRLHGHSFLVRIEISGEVDPYTGWVMDFADLKARFQPIYDQLDHHYLNEIPGLENPTSEVLAHWIWAQLKPRLPLLSAVMVKETCTAGCTYRGA

SEQ ID NO: 20058 - protein, 120 aa, Edwardsiella ictaluri
  REGION 1..120: note = tr|C5BHL2|C5BHL2_EDWI9 6-carboxy-5,6,7,8-tetrahydropterin synthase; OS = Edwardsiella ictaluri (strain 93-146) OX=634503; GN = NT01EI_1146 PE=3 SV=1
MTTTLFKEFQFEAAHRLPHVPQGHKCGRLHGHSFLVRIEITGEVDPHTGWVMDFADLKARFQPIYDQLDHHYLNEVAGLENPTSEVLARWIWDQLKPRLPLLSAVRVKETCTAGCTYRGQ

SEQ ID NO: 20059 - protein, 120 aa, unidentified; identical to SEQ ID NO: 20056
  source 1..120: note = Edwardsiella piscicida
  REGION 1..120: note = tr|A0A034SZS0|A0A034SZS0_9GAMM 6-carboxy-5,6,7,8-tetrahydropterin synthase; OS = Edwardsiella piscicida OX=1263550; GN = MA13_contig00002-0032 PE=3 SV=1

SEQ ID NO: 20060 - protein, 120 aa, unidentified
  source 1..120: note = Edwardsiella piscicida
  REGION 1..120: note = tr|A0A411GZL7|A0A411GZL7_9GAMM 6-carboxy-5,6,7,8-tetrahydropterin synthase; OS = Edwardsiella piscicida OX=1263550 GN=queD PE=3 SV=1
MTTTLFKEFQFEAAHRLPHVPQGHKCGRLHGHSFLVRIEITGEVDPYTGWVMDFADLKARFQPIYDQLDHHYLNEIAGLENPTSEVLARWIWDQLKPCLPLLSAVRVKETCTAGCTYRGQ

SEQ ID NO: 20061 - protein, 120 aa, Edwardsiella tarda; identical to SEQ ID NO: 20060
  REGION 1..120: note = tr|A0A0H3DPA8|A0A0H3DPA8_EDWTF 6-carboxy-5,6,7,8-tetrahydropterin synthase; OS = Edwardsiella tarda (strain FL6-60) OX=718251 GN=queD; PE = 3 SV=1

SEQ ID NO: 20062 - protein, 120 aa, Edwardsiella tarda; identical to SEQ ID NO: 20060
  REGION 1..120: note = tr|D0ZET8|D0ZET8_EDWTE 6-carboxy-5,6,7,8-tetrahydropterin synthase; OS = Edwardsiella tarda (strain EIB202) OX=498217 GN=ygcM; PE = 3 SV=1

SEQ ID NO: 20063 - protein, 140 aa, unidentified
  source 1..140: note = Effusibacillus lacus
  REGION 1..140: note = tr|A0A292YHR6|A0A292YHR6_9BACL 6-carboxy-5,6,7,8-tetrahydropterin synthase; OS = Effusibacillus lacus OX=1348429 GN=EFBL_0158 PE=3 SV=1
MNKERYHNKKVFVTKIFTFDSAHRLDDYIGKCANLHGHTYKLEVEVKGRTDHRGIVIDFTDLKKIVNEQIIAKYDHQFLNDHMPFNTTAENMVVFFFEIIDTYLNKLDDAQNITLQRCRLWETPTCYAEITREEFDRESE

SEQ ID NO: 20064 - protein, 141 aa, Eggerthella lenta
  REGION 1..141: note = tr|A0A369NGT4|A0A369NGT4_EGGLN 6-carboxy-5,6,7,8-tetrahydropterin synthase OS=Eggerthella lenta OX=84112 GN=C1853_02570 PE=3 SV=1
MYGLKTEASFDSAHFLTDYYGKCENLHGHRWRAVVYLEVADLQADGTMKDMVVDFGVFKRAVRDLAEELDHTFLVEEGSLAATTLAALEAEGFSLTVLPFRTTAENLARYVCDRLTEQGFPVSQVDLYETPNNCAIYRRTA

SEQ ID NO: 20065 - protein, 141 aa, Eggerthella lenta; identical to SEQ ID NO: 20064
  REGION 1..141: note = tr|C8WKK4|C8WKK4_EGGLE 6-carboxy-5,6,7,8-tetrahydropterin synthase OS=Eggerthella lenta (strain ATCC 25559 / DSM 2243 / JCM 9979 / NCTC 11813 / VPI 0255) OX=479437 G N=Elen_0320 PE=3 SV=1

SEQ ID NO: 20066 - protein, 140 aa, Eggerthella sinensis
  REGION 1..140: note = tr|A0A3N0IXJ5|A0A3N0IXJ5_9ACTN 6-carboxy-5,6,7,8-tetrahydropterin synthase OS=Eggerthella sinensis OX=242230 GN=DMP09_08465 PE=3 SV=1
MYGLKTEASFDSAHFLTDYYGKCENLHGHRWRCVVYLEADELQDEGTMKDMVLDFGVFKRAVRAVAEELDHTFLVEEGSLKPATVAALEGEGFSLTVLPFRMTAENLARYFHDRLVEQNLPVACVEMYETPNNCALYRAR

SEQ ID NO: 20067 - protein, 139 aa, Eggerthella sp.
  REGION 1..139: note = tr|R7AFG8|R7AFG8_9ACTN 6-carboxy-5,6,7,8-tetrahydropterin synthase OS=Eggerthella sp. CAG:298 OX=1262876 GN=BN592_00806 PE=3 SV=1
MYGLKTESSFDAAHFLTDYHGKCENLHGHRWRVVAYLEQEDLQSEGTMKDMVLDFGEFKQAVRAMTEALDHTFIVEEGSLSPQTITCLEDEGFTLSVMPFRTTAENLARYFFDHLREQSLPIAQIDVYETPNNCAIYRG

SEQ ID NO: 20068 - protein, 139 aa, Eggerthella sp.
  REGION 1..139: note = tr|F7UYB6|F7UYB6_EEGSY 6-carboxy-5,6,7,8-tetrahydropterin synthase OS=Eggerthella sp. (strain YY7918) OX=502558 GN=EGYY_03330 PE=3 SV=1
MYGLKTESSFDAAHFLTDYDGKCENLHGHRWRVVAYIEQDRLQSDGQAKDMVVDFGDFKHALRALTEELDHMFIVEEGSLAPETVACLERETFKLFVVPFRTTSENLARYFYERLEKRGFPVSLVEVYETPLNCAYYSK

SEQ ID NO: 20069 - protein, 139 aa, Ekhidna lutea
  REGION 1..139: note = tr|A0A239K9S1|A0A239K9S1_9BACT 6-pyruvoyltetrahydropterin/6-carboxytetrahydropterin synthase OS=Ekhidna lutea OX=447679 GN=SAMN05421640_2499; PE = 4 SV=1
MIVIKQKHHFSSSHKLFNPSWTEEQNKKVFGPCANENWHGHNFELIVGVKGEPDNESGFVINPEKLNSLVQDKVIVKVDHKNLNLDVPFMKDKIASCENLIIEFWKILYPEVNRIDRNARLNHLRLYETPRNFVDYYGD

SEQ ID NO: 20070 - protein, 136 aa, Ekhidna lutea
  REGION 1..136: note = tr|A0A239L770|A0A239L770_9BACT 6-pyruvoyltetrahydropterin/6-carboxytetrahydropterin synthase OS=Ekhidna lutea OX=447679 GN=SAMN05421640_3027; PE = 4 SV=1
MPRVTINRKEHFNAAHRLYNESWSDEKNEEIFGKCNNPNWHGHNYEIVVSLTGEPDPDTGYVYDMKKLSDVIKERVLSRFDHKNLNLDVTEFKNLNPTAENIVKVIYDLLRPEIEDQYEMKITLYETERNFVEYPG

SEQ ID NO: 20071 - protein, 133 aa, Elioraea sp.
  REGION 1..133: note = tr|A0A541BVX1|A0A541BVX1_9PROT 6-carboxytetrahydropterin synthase OS=Elioraea sp. Yellowstone OX=2592070 GN=FK498_17735 PE=4 SV=1
MFSLTVCDHVMIAHSFRGEVFGPAQKLHGATYAVEAEFRAPSLDAHGLVVDIGLARAELRRALDSFDYDNLDALPQFAGQNTTTEFMAAHVHGLLVAALKAGRLGEGGRRVTSLKVLLRESPLAWAAYEAVVE

SEQ ID NO: 20072 - protein, 150 aa, Elizabethkingia anophelis
  REGION 1..150: note = tr|A0A290N926|A0A290N926_9FLAO 6-carboxytetrahydropterin synthase OS=Elizabethkingia anophelis R26 OX=1246994 GN=BAZ09_014420 PE=4 SV=1
MIRITKIFTFETAHVLYNYDGKCKNMHGHSYKLFVTVKGKPVNDLDNPKNGMVVDFGDIKKIVNEEVVDIWDHAVLINANSPHKELGNELEGRGHKVIYCSFQPTCENMLYEIAAKVQAKLPSDISLAYLKLHETENSYGEWFAEDQSEN

SEQ ID NO: 20073 - protein, 150 aa, Elizabethkingia anophelis; identical to SEQ ID NO: 20072
  REGION 1..150: note = tr|X5KTY1|X5KTY1_9FLAO 6-carboxy-5,6,7,8-tetrahydropterin synthase; OS = Elizabethkingia anophelis OX=1117645 GN=ygcM PE=4 SV=1

SEQ ID NO: 20074 - protein, 150 aa, unidentified
  source 1..150: note = Elizabethkingia bruuniana
  REGION 1..150: note = tr|A0A5E8D1Z1|A0A5E8D1Z1_9FLAO 6-pyruvoyl tetrahydropterin synthase OS=Elizabethkingia bruuniana; OX = 1756149 GN=AYC65_13875 PE=4 SV=1
MIRITKIFTFETAHVLYNYDGKCKNMHGHSYKLFVTVKGKPVNDLDNPKNGMVVDFGDIKKIVNEEIINIWDHAVLINANSPHKELGNELEGRGHKVIYCSFQPTCENMLYEVAAKIQAKLPSEISLAYLKLHETENSYGEWFAEDQTEN

SEQ ID NO: 20075 - protein, 150 aa, Elizabethkingia meningoseptica
  REGION 1..150: note = tr|A0A1V3U4U7|A0A1V3U4U7_ELIME 6-carboxytetrahydropterin synthase QueD OS=Elizabethkingia meningoseptica OX=238 GN=BMF97_01950 PE=4 SV=1
MIRITKIFTFETAHVLYNYDGKCKNMHGHSYKLFVTVKGKPIDNLDHPKNGMVVDFGDIKKIVNEEIVDVWDHAVLINANSPHKELGEDLEAKGHKVIYCSFQPTCENMLYEIADRIQAKLPQEISLAYLKLHETENSYGEWFAEDQREN

SEQ ID NO: 20076 - protein, 150 aa, Elizabethkingia meningoseptica; identical to SEQ ID NO: 20072
  REGION 1..150: note = tr|A0A376EFX0|A0A376EFX0_ELIME Queuosine biosynthesis protein QueD OS=Elizabethkingia meningoseptica OX=238 GN=NCTC10588_02698 PE=4 SV=1

SEQ ID NO: 20077 - protein, 150 aa, Elizabethkingia miricola
  REGION 1..150: note = tr|A0A0W8EZF8|A0A0W8EZF8_ELIMR 6-pyruvoyl tetrahydropterin synthase OS=Elizabethkingia miricola; OX = 172045 GN=AMC91_02740 PE=4 SV=1
MIRITKIFTFETAHVLYNYDGKCKNMHGHSYKLFVTVKGKPVNDLDNPKNGMVVDFGDIKKIVNEEVVDIWDHAVLINANSPHKELGNELEGRGHKVIYCGFQPTCENMLYEIAAKVQAKLPSDISLAYLKLHETENSYGEWFAEDQSEN

SEQ ID NO: 20078 - protein, 150 aa, Elizabethkingia miricola
  REGION 1..150: note = tr|A0A0D5BN66|A0A0D5BN66_ELIMR 6-carboxytetrahydropterin synthase OS=Elizabethkingia miricola OX=172045 GN=DSC47_14885 PE=4 SV=1
MIRITKIFTFETAHVLYNYDGKCKNMHGHSYKLFVTVKGKPINDLDNPKNGMVVDFGDIKKIVNEEVVDIWDHAVLINANSPHKELGNELEGRGHKVIYCSFQPTCENMLYEVAAKIQAKLPSEISLAYLKLHETENSYGEWFAEDQTEN

SEQ ID NO: 20079 - protein, 150 aa, unidentified
  source 1..150: note = Elizabethkingia occulta
  REGION 1..150: note = tr|A0A1T3MMJ9|A0A1T3MMJ9_9FLAO 6-carboxytetrahydropterin synthase QueD OS=Elizabethkingia occulta OX=1867263 GN=BAZ10_01110 PE=4 SV=1
MIRITKIFTFETAHVLYNYDGKCKNMHGHSYKLFVTVKGKPVNDLDNPKNGMVVDFGDIKKIVNEEVVDIWDHAVLINANSPHKELGNELEGRGHKVIYCVFQPTCENMLYEIAAKVQAKLPSEISLAYLKLHETENSYGEWFAEDQSEN

SEQ ID NO: 20080 - protein, 150 aa, Elizabethkingia sp.
  REGION 1..150: note = tr|A0A2T5RWV4|A0A2T5RWV4_9FLAO 6-pyruvoyltetrahydropterin/6-carboxytetrahydropterin synthase OS=Elizabethkingia sp. YR191 OX=2135666; GN = C8J94_102372 PE=4 SV=1
MIRITKIFTFETAHVLYNYDGKCKNMHGHSYKLFVTVKGKPVNDLDNPKNGMVVDFGDIKKIVNEEVVDIWDHAVLINANSPHKELGNELEGRGHKVIYCGFQPTCENMLYEIAAKVQAKLPSEISLAYLKLHETENSYGEWFAEDQSEN

SEQ ID NO: 20081 - protein, 148 aa, Elizabethkingia sp.
  REGION 1..148: note = tr|A0A5B7UCP6|A0A5B7UCP6_9FLAO 6-carboxy-5,6,7,8-tetrahydropterin synthase; OS = Elizabethkingia sp. JS20170427COW OX=2583851; GN = FGE20_03025 PE=3 SV=1
MIRITKIFTFETAHVLYGYDGKCKNLHGHSYKLYVSLKGKPIEDLHHVKNGMVIDFGDLKKIVKDEIQDPWDHGVLVNALSPHLELGENLEKEGHKVIFCNYQPTCENMLYDIAEKIQKHLPEGVELAYLKLHETENSYGEWFAEDQL

SEQ ID NO: 20082 - protein, 150 aa, unidentified; identical to SEQ ID NO: 20080
  source 1..150: note = Elizabethkingia ursingii
  REGION 1..150: note = tr|A0A1T3FBC5|A0A1T3FBC5_9FLAO 6-carboxytetrahydropterin synthase QueD OS=Elizabethkingia ursingii OX=1756150 GN=BAY32_06285 PE=4 SV=1

SEQ ID NO: 20083 - protein, 123 aa, unidentified
  source 1..123: note = Elstera cyanobacteriorum
  REGION 1..123: note = tr|A0A255XKB6|A0A255XKB6_9PROT 6-carboxy-5,6,7,8-tetrahydropterin synthase OS=Elstera cyanobacteriorum OX=2022747 GN=CHR90_15795 PE=3 SV=1
MFELSKQFYFEAAHTLERVIETESSRRIHGHTYHAEITVRGRPDPVSGMILDLGLFTRALEAVRARLDHHFLDDVPDLGPATLENLCVYLWRTLAPDLAGLNRVTVWRQASGDKCTYFGPEVN

SEQ ID NO: 20084 - protein, 133 aa, unidentified
  source 1..133: note = Elstera cyanobacteriorum
  REGION 1..133: note = tr|A0A255XXJ8|A0A255XXJ8_9PROT Uncharacterized protein OS=Elstera cyanobacteriorum OX=2022747; GN = CHR90_03220 PE=4 SV=1
MYALEVRDHIMIAHSLPRPVFGPAQGLHGATYIVDVAFFRETLDPDNLVVDIGLASDALKKLLAPLNYQNLDTVPALAGQITTTEFLARFIFDGMAAAVKAGDLGPHAAGLAKLRVTLEESHVARASFEGALA

SEQ ID NO: 20085 - protein, 123 aa, unidentified
  source 1..123: note = Elstera litoralis
  REGION 1..123: note = tr|A0A0F3IV64|A0A0F3IV64_9PROT 6-carboxy-5,6,7,8-tetrahydropterin synthase OS=Elstera litoralis OX=552518 GN=VZ95_04785 PE=3 SV=1
MFELSKQFYFEAAHTLERSIETESSRRIHGHTYHAEITVRGAPDPATGMILDLGLFTRALDSVRAELDHRFLDDVPGLGPATLENLCVYLWKNLAPSLPGLNRVSVWRQASGDKCTYFGPEEA

SEQ ID NO: 20086 - protein, 133 aa, unidentified
  source 1..133: note = Elstera litoralis
  REGION 1..133: note = tr|A0A0F3INX9|A0A0F3INX9_9PROT 6-pyruvoyl tetrahydropterin synthase OS=Elstera litoralis OX=552518; GN = VZ95_17840 PE=4 SV=1
MFALEVRDHMMIAHSLPRPVFGPAQGLHGATFIVDVAFFRPELDADNLVVDIGLASVALKKILSPLTYQNLDSVPELAGKITTTEFLARYIFDQMCAAVQAGDLGPHAGGLTKIRVSLEESHIARAWYEGALA

SEQ ID NO: 20087 - protein, 118 aa, unidentified
  source 1..118: note = Elusimicrobia bacterium
  REGION 1..118: note = tr|A0A2M7S2X3|A0A2M7S2X3_9BACT 6-carboxy-5,6,7,8-tetrahydropterin synthase; OS = Elusimicrobia bacterium CG_4_10_14_0_8_um_filter_37_32; OX = 2014301 GN=queD PE=3 SV=1
MYEVTVIRHFSGAHNLRNYKGKCEALHGHNWKVEVTLRGGKLNKTGMLMDFTHLKKLLDKVLSKIDHKYLNKTPPFDKLNPTAENIAEYIYRQIAKYFREIYKVTVWESDNSYATYAE

SEQ ID NO: 20088 - protein, 123 aa, unidentified
  source 1..123: note = Elusimicrobia bacterium
  REGION 1..123: note = tr|A0A350W3S1|A0A350W3S1_9BACT 6-carboxy-5,6,7,8-tetrahydropterin synthase; OS = Elusimicrobia bacterium OX=2030800 GN=queD PE=3 SV=1
MYSITVEDNFSAAHNLRNYKGKCEKLHGHNYRVYLTVGGSSLDKSGMLSDFSYLKNVLENILSELDHAYLNRVPPFNKINPTAENIAEFIFTEAELKIKNKMLKVERVKVWETEKNCAEYYEK

SEQ ID NO: 20089 - protein, 120 aa, Elusimicrobium minutum
  REGION 1..120: note = tr|B2KCS0|B2KCS0_ELUMP 6-carboxy-5,6,7,8-tetrahydropterin synthase; OS = Elusimicrobium minutum (strain Pei191) OX=445932; GN = Emin_0761 PE=3 SV=1
MEKHKVYLIKKSSFTAAHSHEGMLNEAQHTHTFHYEIKLCGFTNNEGFLTDFRIVEEDMNTLINKELKDKNLNIFLKDPTTEKLAVWIFRRLKDSYGKMLHCVTVYETPQSAVIYEGEDE

SEQ ID NO: 20090 - protein, 115 aa, Elusimicrobium minutum
  REGION 1..115: note = tr|B2KC64|B2KC64_ELUMP 6-carboxy-5,6,7,8-tetrahydropterin synthase; OS = Elusimicrobium minutum (strain Pei191) OX=445932; GN = Emin_0636 PE=3 SV=1
MLLKLKRKFSSAHRLPDYDGECNNLHGHTWVVEFIIEGETKESGMVEDFKTLKPLLDSVLPDHKYLNDFVQNPTAENMVKYIYDNAAKLLTQRGLKLKQVELWENENASAIFQAY

SEQ ID NO: 20091 - protein, 116 aa, Elusimicrobium sp.
  REGION 1..116: note = tr|A0A1Y4DBH3|A0A1Y4DBH3_9BACT Uncharacterized protein OS=Elusimicrobium sp. An273 OX=1965617; GN = B5F75_04680 PE=4 SV=1
MSKVYLTQCGSFTARHGHGGTLAEEVHTHTFHYEVTFFGPTNAEGYLIDFRQLADTFKKELESRLEGSDLGTFLPQPTTEALCVWMYKRLKERLPHLYSVKVAEEPDRWIEYRGEE

SEQ ID NO: 20092 - protein, 114 aa, Elusimicrobium sp.
  REGION 1..114: note = tr|A0A1Y4DFM1|A0A1Y4DFM1_9BACT 6-carboxy-5,6,7,8-tetrahydropterin synthase; OS = Elusimicrobium sp. An273 OX=1965617 GN=B5F75_04660 PE=3; SV = 1
MLIKLIRTFSSAHRLPHYDGPCHQLHGHTWKAVFVIEGAVREDGMVCDFKVIKKLLDDNLPDHQFLNDWVENPTAENLAQYLFAKIGAELKKQNLTLKTLEIWESDNAAAVVEG

SEQ ID NO: 20093 - protein, 178 aa, unidentified
  source 1..178: note = Emcibacter congregatus
  REGION 1..178: note = tr|A0A2G4YP45|A0A2G4YP45_9PROT 6-pyruvoyl tetrahydropterin synthase OS=Emcibacter congregatus; OX = 2043170 GN=CRD36_12940 PE=4 SV=1
MSFEICFTRRYCMAHRLFNIRNSRCFVPHGHNEFVKVYLVSIGNDTLDGGVNMMAPFAVLKQVWHQWIDDHVDHSLQLSSQDPMLDYFKTRESENLAHLMITPGDPTTEVLAALFMSKINALMADQGLAVRCRKVEIEETPTNTVSFSGDAKDVISAAHYDGPETPWWQRPDMTINDL

SEQ ID NO: 20094 - protein, 178 aa, unidentified
  source 1..178: note = Emcibacter nanhaiensis
  REGION 1..178: note = tr|A0A501PGH7|A0A501PGH7_9PROT 6-carboxytetrahydropterin synthase OS=Emcibacter nanhaiensis OX=1505037 GN=FIV46_13195 PE=4 SV=1
MFEICFTRRYSMSHRLYSLKDSRCFVPHGHNEFVKVYLSRPENDALDGDTNMMAPFDTLKKTWHQWVDNHLDHSLHLSDKDPLIGFFRDNEPENLAHLLVTPGDPTTEALAACLFAKINAFLNDLGLGIVCRRLEIEETPTNTVIFHGDPDKALCTDSYPGPARPWWKRADMSINDLA

SEQ ID NO: 20095 - protein, 136 aa, Empedobacter brevis; identical to SEQ ID NO: 17206
  REGION 1..136: note = tr|A0A3P6N317|A0A3P6N317_9FLAO 6-carboxy-5,6,7,8-tetrahydropterin synthase; OS = Empedobacter brevis OX=247 GN=queD PE=3 SV=1

SEQ ID NO: 20096 - protein, 136 aa, Empedobacter brevis
  REGION 1..136: note = tr|A0A511NHJ6|A0A511NHJ6_9FLAO 6-carboxy-5,6,7,8-tetrahydropterin synthase; OS = Empedobacter brevis NBRC 14943 = ATCC 43319 OX=1218108; GN = ygcM PE=3 SV=1
MKVTVNRKAHFNAAHRLFNQTWSDEQNFKVFGKCSYPNYHGHNYEIIVSVKGEVDPETGFVMNLDQLRKIIEVEVEDYLDHKNLNVDIEEFKTVNPTAENIVILIWNKIRAKLASGLELKVTLYETPRNFVEYTGE

SEQ ID NO: 20097 - protein, 136 aa, unidentified
  source 1..136: note = Empedobacter falsenii
  REGION 1..136: note = tr|A0A376GI85|A0A376GI85_9FLAO 6-carboxy-5,6,7,8-tetrahydropterin synthase; OS = Empedobacter falsenii OX=343874 GN=queD_2 PE=3 SV=1
MKVTVNRKAHFNAAHRLFNKNWSDEQNFEVFGKCSYPNYHGHNYEIIVAVKGEVDPETGFVMNLDELRKIIAVEVEDYLDHKNLNVDIEEFKTINPTAENIVILIWNKIRAKLATDLELKVTLYETPRNFVEYAGE

SEQ ID NO: 20098 - protein, 148 aa, unidentified
  source 1..148: note = Empedobacter falsenii
  REGION 1..148: note = tr|A0A427BS26|A0A427BS26_9FLAO 6-carboxy-5,6,7,8-tetrahydropterin synthase; OS = Empedobacter falsenii OX=343874 GN=queD PE=3 SV=1
MIRLTKAFTFETAHALHGYDGKCKNIHGHSYKLFVTVKGTPSEDTNDVKLGMVMDFGDLKKIVNKEIVNLFDHAILLNENSPHKTLGEKLLAEGHNVVFTDYQPSAENMILWIVDKIKPLLPTNIDLVALKLHETENSYAEWLAEDNQ

SEQ ID NO: 20099 - protein, 148 aa, unidentified
  source 1..148: note = Empedobacter haloabium
  REGION 1..148: note = tr|A0A5C7CBW2|A0A5C7CBW2_9FLAO 6-carboxy-5,6,7,8-tetrahydropterin synthase; OS = Empedobacter haloabium OX=592317 GN=queD PE=3 SV=1
MLTITRKLEFDAGHRIPDHKSQCRNLHGHRYTLEITLTGQVITAEGNSDNGMIMDFSDVKAIAKEHLVDVWDHAFLVYDKDTAVKEFLASLPNHKTVVIDRIPTVENLAAVAFGILKAAFKDRYGTGLHLHKLVLHETPNCWAEIVEG

SEQ ID NO: 20100 - protein, 148 aa, Empedobacter sp.
  REGION 1..148: note = tr|A0A4Z1BSX6|A0A4Z1BSX6_9FLAO 6-carboxy-5,6,7,8-tetrahydropterin synthase; OS = Empedobacter sp. MRS2 OX=2491114 GN=queD PE=3 SV=1
MIRLTKAFTFETAHALHGYDGKCKNIHGHSYKLFVTVKGTPSEDTNDVKLGMVMDFGDLKKIVNKEIVNLFDHAILLNENSPHKTLGEKLLAEGHNVVFTDYQPSAENMILWIVDKIKPLLPINIDLVALKLHETENSYAEWLAEDNQ

SEQ ID NO: 20101 - protein, 136 aa, Empedobacter sp.; identical to SEQ ID NO: 20097
  REGION 1..136: note = tr|A0A4Z1CCA6|A0A4Z1CCA6_9FLAO 6-carboxy-5,6,7,8-tetrahydropterin synthase; OS = Empedobacter sp. MRS2 OX=2491114 GN=E4J94_00480 PE=3; SV = 1

SEQ ID NO: 20102 - protein, 139 aa, Emticicia sp.
  REGION 1..139: note = tr|A0A4Q5M0G2|A0A4Q5M0G2_9BACT 6-carboxy-5,6,7,8-tetrahydropterin synthase OS=Emticicia sp. 17J42-9 OX=2492393 GN=EWM59_11260 PE=3 SV=1
MSSKRVAVFRKEHFNAAHRLNNPNWPDEKNERVYGKCNNYNFHGHNYDLVVQVIGDIDPESGYVMDMKLLSDLIKVEILDKFDHKNLNLDTEEFKDINPSAENIAVVIYEKLRAKLPDHLDLRIRLYETERNFVEYPVI

SEQ ID NO: 20103 - protein, 136 aa, Emticicia sp.
  REGION 1..136: note = tr|A0A2N4XBB6|A0A2N4XBB6_9BACT 6-carboxy-5,6,7,8-tetrahydropterin synthase OS=Emticicia sp. TH156 OX=2067454 GN=C0V77_14615 PE=3 SV=1
MIYITRRERFNAAHRLWNAEWSDEKNREVFGLCSNIHGHNWELVVTVKGEIDPNTGFVMDLKDLSKVMKSEVTDKVDHTFLNEDVPFLKGKYPTTEIFAVEIWKILAPVLQEKYNTTLHCVKLIETPNHYVEYFGD

SEQ ID NO: 20104 - protein, 123 aa, unidentified
  source 1..123: note = Endomicrobium proavitum
  REGION 1..123: note = tr|A0A0G3WIR0|A0A0G3WIR0_9BACT 6-carboxy-5,6,7,8-tetrahydropterin synthase; OS = Endomicrobium proavitum OX=1408281 GN=ptpS PE=3 SV=1
MKYKLSVTKGFASAHCLREYKGKCENVHGHNWKIRAAFGGTQLDKTGMLIDFTDLKAHLDKIMTYLDHKFLNETAPFDKINPTAENIALYIFEELKKAETLTAKVAEVEVWESDTSSATITAE

SEQ ID NO: 20105 - protein, 123 aa, unidentified
  source 1..123: note = Bathymodiolus septemdierum
  REGION 1..123: note = tr|A0A0P0USB2|A0A0P0USB2_9GAMM 6-carboxy-5,6,7,8-tetrahydropterin synthase; OS = endosymbiont of Bathymodiolus septemdierum str. Myojin knoll OX=1303921 GN=queD PE=3 SV =1
MFVLKIVTDFGAAHSLRDYPGDCARLHGHNWGVEMSVEAQELDANGIAIDFRVIKKQTKEVVKRLDHQYLNEISPFDKLNPTAENIAKYMYHEVGKLINNQAVRVSEVIIWETPRASVAYSEQ

SEQ ID NO: 20106 - protein, 125 aa, unidentified
  source 1..125: note = Galathealinum brachiosum
  REGION 1..125: note = tr|A0A370D8M1|A0A370D8M1_9GAMM 6-carboxy-5,6,7,8-tetrahydropterin synthase; OS = endosymbiont of Galathealinum brachiosum OX=2200906; GN = queD PE=3 SV=1
MPAKYTLKIVTDFASAHTLRDYPGACSRMHGHNWKVELELESSQLDNVGMAIDFKAMKKATNDVCDKLDHRYLNEIEPFTEINPTAENMAAWIFQEIAKKLNTDTLRVSSLTLWETERACVTYSE

SEQ ID NO: 20107 - protein, 118 aa, unidentified
  source 1..118: note = Endozoicomonadaceae bacterium
  REGION 1..118: note = tr|A0A3S3QV71|A0A3S3QV71_9GAMM 6-carboxy-5,6,7,8-tetrahydropterin synthase; OS = Endozoicomonadaceae bacterium GTF-13 OX=2506149 GN=queD; PE = 3 SV=1
MEIYKDFTFEAAHRLPNVPDGHKCGRLHGHSFQVRIVVSGEVDSHTGWILDFADLKAAFKPIYERLDHHYLNEIEGLDNPTSEVLARWIWQQLKPGLELLSRVEVKETCTCGCVYRGD

SEQ ID NO: 20108 - protein, 285 aa, Endozoicomonas elysicola
  REGION 1..285: note = tr|A0A081K8E0|A0A081K8E0_9GAMM 6-pyruvoyl tetrahydropterin reductase OS=Endozoicomonas elysicola; OX = 305900 GN=GV64_06420 PE=4 SV=1
MQALFVNQLSTLDFSFLCPERGIVGETWLVDVTLWGELDEQGMVFDFSHVKKQIKASLDTLSDHRLLVPLLAEETTITHEKKQLTVRFEAAEGQITCSAPAQAMLLVDAAAITPELLRPFLEEAVIKELPDNVTKVDLRLYPEEIGGAYYHYSHGLKKHDGDCQRIAHGHRSQIRVFVDEQRDQVLEALWAKQWRDIYIATREDLRETFTEKSVEYYRFNYTANQGYFEISLPSTYCYLIDTDSTVELLASHIAQSLSTQKTGKTIRVVAFEGLNKGAIATHSLK

SEQ ID NO: 20109 - protein, 287 aa, Endozoicomonas montiporae
  REGION 1..287: note = tr|A0A081N8S1|A0A081N8S1_9GAMM 6-pyruvoyl tetrahydropterin reductase OS=Endozoicomonas montiporae; OX = 1027273 GN=GZ77_11265 PE=4 SV=1
MTALFVNQLTTLDFSFLSPDRGVVGETWLVDVVLYGDLDEQGMVFDFGHVKKQVKASLDFMADHRLLVPVAHPSIKVEAEKDRLDVTLDSPVTGTINCKAPAQAMLLVDAEEIATETLTPILEKALMSELPDNVKDVKLKLYNEFIKGAYYHYSHGLKKHLGDCQRIAHGHRSAINVQVNGEDSPQLEKDWAEKWSDIYIATREDRLDCFEENGRQYNRFGYTADQGYFELTLASELCYLIDTDSTVELLAQHMAAEMYQSLPADSDLEVTAYEGFNKGSIARINSY

SEQ ID NO: 20110 - protein, 287 aa, Endozoicomonas montiporae; identical to SEQ ID NO: 20109
  REGION 1..287: note = tr|A0A142B921|A0A142B921_9GAMM Uncharacterized protein OS=Endozoicomonas montiporae CL-33 OX=570277; GN = EZMO1_1040 PE=4 SV=1

SEQ ID NO: 20111 - protein, 284 aa, unidentified
  source 1..284: note = Endozoicomonas numazuensis
  REGION 1..284: note = tr|A0A081NL01|A0A081NL01_9GAMM 6-pyruvoyl tetrahydropterin reductase OS=Endozoicomonas numazuensis; OX = 1137799 GN=GZ78_03715 PE=4 SV=1
MTALFVNQLTTLDFSYLSPERGVVGETWLVDVVLKGNLDEQGMVFDFGHVKKQIKASLDLLADHRLLVPTAHQALTIKADNEERLSVQMQTSSGDIIECKAPAQAILLVNAQEITPQALTPFLEKTLLDELPDNVSGVELQIYPEQFSGAFYHYSHGLKKHLGDCQRIAHGHRSPIHIYLNGQRDPMEEAGWAETWKDIYIATREDLLETVTLGKQEHFRFGYTSDQGYFELTIAEDRCYLIDTDSTVELLAEHIASMLKSRHPDQSVRVVAFEGFNKGAVAEK

SEQ ID NO: 20112 - protein, 118 aa, Endozoicomonas sp.; identical to SEQ ID NO: 20107
  REGION 1..118: note = tr|A0A3P3VJF0|A0A3P3VJF0_9GAMM 6-carboxytetrahydropterin synthase QueD OS=Endozoicomonas sp. GTF13 OX=2528527 GN=queD PE=4 SV=1

SEQ ID NO: 20113 - protein, 120 aa, Enhydrobacter aerosaccus
  REGION 1..120: note = tr|A0A1T4LAN6|A0A1T4LAN6_9PROT 6-carboxy-5,6,7,8-tetrahydropterin synthase; OS = Enhydrobacter aerosaccus OX=225324; GN = SAMN02745126_01448 PE=3 SV=1
MWELTKSFRFDAAHTLKRSIDAESSKRIHGHSYRAEVTLRGEPDPETGMVVDFGLLERTLAQARDGLDHHMLDDVPDLGPATMENLAAWIWRRLAPATKGLVKVTVYRDSNDESVTYRGP

SEQ ID NO: 20114 - protein, 133 aa, Enhydrobacter sp.
  REGION 1..133: note = tr|A0A5C8PAL7|A0A5C8PAL7_9PROT 6-carboxytetrahydropterin synthase OS=Enhydrobacter sp. CC-CFT640 OX=2586908 GN=FHP25_36290 PE=4 SV=1
MFAVEVRDHIMVAHSFRGEIFGPAQRVHGATFVVDAAFMTRDLDAAGLVVDIGRAIAILREVLEPLNYRNLDEMPAFAGRNTTTEFLARHIHERIAACARDGRLGRAASEIDALRVTLSESHVARGWYEAPLA

SEQ ID NO: 20115 - protein, 197 aa, Enhydrobacter sp.; identical to SEQ ID NO: 18110
  REGION 1..197: note = tr|A0A1V2GRN8|A0A1V2GRN8_9PROT 6-carboxytetrahydropterin synthase QueD OS=Enhydrobacter sp. H5 OX=1907940 GN=BKE17_03025 PE=4 SV=1

SEQ ID NO: 20116 - protein, 150 aa, Enhygromyxa salina
  REGION 1..150: note = tr|A0A2S9XL02|A0A2S9XL02_9DELT 6-pyruvoyl tetrahydropterin synthase OS=Enhygromyxa salina OX=215803; GN = ENSA7_79610 PE=4 SV=1
MRYRSTKTFTNLPCAHRLHSHPGHCRFVHGYSRSFKFYFEASELDEHNFVVDFAALKDVRQWLEHMYDHTLLIGEHDPELAFFREMEARKLCDLRVVPSVTMEGTAALVFEHVDALIRDKTNGRAWVAKVEVHENDKNSAELERIDDRAQ

SEQ ID NO: 20117 - protein, 120 aa, Enhygromyxa salina
  REGION 1..120: note = tr|A0A2S9XUG9|A0A2S9XUG9_9DELT 6-carboxy-5,6,7,8-tetrahydropterin synthase OS=Enhygromyxa salina OX=215803 GN=queD PE=3 SV=1
MDVFKEFRFEAAHLLPNVPPGHKCGRLHGHSFRVEVHIRGPVDPASGWVLDFADIKQAFKPLYERLDHHYLNEIPGLDNPTSENLARWIWRELGDSLPGLSKIVVRETCTSGCIYEGESD

SEQ ID NO: 20118 - protein, 118 aa, Ensifer adhaerens
  REGION 1..118: note = tr|A0A0L8BRN3|A0A0L8BRN3_ENSAD 6-carboxy-5,6,7,8-tetrahydropterin synthase OS=Ensifer adhaerens OX=106592 GN=AC244_17750 PE=3 SV=1
MYRITKEFHFSASHQLSHLPADHQCARLHGHNYIVEVELAAADLDENGFVRDYHDLAPLKRYIDDSFDHRHLNEVLGHDRVTSECLARHFYDWCKERLPETSAVRVSETPKTWAEYRP

SEQ ID NO: 20119 - protein, 118 aa, Ensifer adhaerens
  REGION 1..118: note = tr|W8I6L1|W8I6L1_ENSAD 6-carboxy-5,6,7,8-tetrahydropterin synthase OS=Ensifer adhaerens OV14 OX=1416753 GN=OV14_a0985 PE=3 SV=1
MYRITKEFHFSASHQLSHLPADHQCARLHGHNYIVEVELAAADLNDDGFVRDYHDLAPLKHYIDGSFDHRHLNDVLGHDRVTSECLARHFYDWCKERLPETSAVRVSETPKTWAEYRP

SEQ ID NO: 20120 - protein, 118 aa, unidentified
  source 1..118: note = Ensifer alkalisoli
  REGION 1..118: note = tr|A0A1E3V7S9|A0A1E3V7S9_9RHIZ 6-carboxy-5,6,7,8-tetrahydropterin synthase OS=Ensifer alkalisoli OX=1752398 GN=A8M32_19890 PE=3 SV=1
MFRITKEFHFSASHQLKSLPPEHQCARLHGHNYIVEVELSAETLNEHGFVRDYHELAPLKRYIDEAFDHRHLNDVLGHDRVTAECLAQHFFEWCKGRFPETAAVRVSETAKTWAEYRP

SEQ ID NO: 20121 - protein, 168 aa, unidentified
  source 1..168: note = Ensifer alkalisoli
  REGION 1..168: note = tr|A0A1E3VID7|A0A1E3VID7_9RHIZ Uncharacterized protein OS=Ensifer alkalisoli OX=1752398 GN=A8M32_00235; PE = 4 SV=1
MVLDFGFLKTEMMGEIDACCDHGMMIWVDDPWIASFLPFTSREASAEVMQQYRAEVRETGQKLIEGPFGKTLLLSQVPTAENLAKHWFRRLAPRVRLRSGNRADLLSVVVWETPNCMATYHAPDLGRSRPGLSPRHSHSEKFPNEIGGIAGEGGNLGSHERSTFSQRF

SEQ ID NO: 20122 - protein, 118 aa, unidentified
  source 1..118: note = Ensifer glycinis
  REGION 1..118: note = tr|A0A178XX75|A0A178XX75_9RHIZ 6-carboxy-5,6,7,8-tetrahydropterin synthase OS=Ensifer glycinis OX=1472378 GN=AU381_10320 PE=3 SV=1
MFRITKEFHFSASHQLTSLPPEHQCARLHGHNYIVEVELSAETLNEHGFVRDYHELAPLKRYIDEVFDHRHLNDVLGHDRVTAECLAQHFYVWCKARLPETSAVRVSETAKTWAEYRP

SEQ ID NO: 20123 - protein, 119 aa, Ensifer sojae
  REGION 1..119: note = tr|A0A249PJB2|A0A249PJB2_9RHIZ 6-carboxy-5,6,7,8-tetrahydropterin synthase OS=Ensifer sojae CCBAU 05684 OX=716928 GN=SJ05684_b48400 PE=3 SV=1
MMFRITKEFHFSASHQLKSLPPEHQCARLHGHNYVVEVELSAGALNEHGFVRDYHDLASLKHYIDEAFDHRHLNDVLGHDRVTAECLAQHFFEWCKARFPETTAVRVSETAKTWAEYRP

SEQ ID NO: 20124 - protein, 118 aa, Ensifer sp.
  REGION 1..118: note = tr|A0A395KZG0|A0A395KZG0_9RHIZ 6-carboxy-5,6,7,8-tetrahydropterin synthase OS=Ensifer sp. M14 OX=2203782 GN=queD PE=3 SV=1
MYRITKEFHFSASHQLSHLPADHQCARLHGHNYIVEVELAANELDENGFVRDYHDLAPLKRYIDGSFDHRHLNDVLGHDRVTSECLARHFYDWCKQRLPETSAVRVSETPKTWAEYRP

SEQ ID NO: 20125 - protein, 118 aa, Ensifer sp.
  REGION 1..118: note = tr|A0A1C0SH49|A0A1C0SH49_9RHIZ 6-carboxy-5,6,7,8-tetrahydropterin synthase OS=Ensifer sp. LC14 OX=1873714 GN=BC362_11965 PE=3 SV=1
MFRITKEFHFSASHQLKSLPADHQCARLHGHNYIVEVELTGQELNEHGFVRDYHELSPLKRYIDDSFDHRHLNDVLGHDRVTAECLAKHFYDWCKARLPETSAVRVSETPKTWAEYRP

SEQ ID NO: 20126 - protein, 127 aa, unidentified
  source 1..127: note = Enteractinococcus coprophilus
  REGION 1..127: note = tr|A0A543AN69|A0A543AN69_9MICC 6-pyruvoyl-tetrahydropterin synthase OS=Enteractinococcus coprophilus OX=1027633 GN=FB556_0425 PE=4 SV=1
MFSLTVNDYVMIAHSLPNEFFGPAQQLHGATLTVEATFTRPELDEHSVVLDIGHATQLLDDALAPLRYADLDSHPDFEGRLSTSEVIAQYIGDKLAASLAEQPDIGISVTIHENPRARVSYTVADRG

SEQ ID NO: 20127 - protein, 127 aa, unidentified
  source 1..127: note = Enteractinococcus helveticum
  REGION 1..127: note = tr|A0A1B7M0J4|A0A1B7M0J4_9MICC 6-pyruvoyl tetrahydrobiopterin synthase OS=Enteractinococcus helveticum OX=1837282 GN=A6F49_08960 PE=4 SV=1
MFSLTVNDYVMIAHSLPNEFFGPAQQLHGATLTVEATFTRAALDEHSVVLDIGHATQLLDDALAPLRYADLDSHPDFAGRLSTTEVIAQYIGDALAASLAEQPYIGISVTLHENPRARVSYTVADRG

SEQ ID NO: 20128 - protein, 120 aa, unidentified
  source 1..120: note = Enterobacillus tribolii
  REGION 1..120: note = tr|A0A370QT67|A0A370QT67_9ENTR 6-carboxy-5,6,7,8-tetrahydropterin synthase; OS = Enterobacillus tribolii OX=1487935 GN=C8D90_104281 PE=3; SV = 1
MTTTLFKDFQFEAAHHLPHVPSGHKCGRLHGHSFLVRVEVTGEVDPHTGWVIDFAEIKAAFKPILDRLDHYYLNDIPGLENPTSEVLAQWIWQMLKPALPLLSAIMVKETCTAGCTYRGE

SEQ ID NO: 20129 - protein, 119 aa, unidentified; identical to SEQ ID NO: 19595
  source 1..119: note = Enterobacter agglomerans
  REGION 1..119: note = tr|A0A2V1YJ13|A0A2V1YJ13_ENTAG 6-carboxy-5,6,7,8-tetrahydropterin synthase; OS = Enterobacter agglomerans OX=549 GN=queD PE=3 SV=1

SEQ ID NO: 20130 - protein, 119 aa, unidentified
  source 1..119: note = Enterobacter agglomerans
  REGION 1..119: note = tr|A0A2A7V9B0|A0A2A7V9B0_ENTAG 6-carboxy-5,6,7,8-tetrahydropterin synthase; OS = Enterobacter agglomerans OX=549 GN=queD PE=3 SV=1
MSTTLFKEFQFEAAHHLPNVPAGHKCGRLHGHSFLVRLEITGEVDAHTGWVMDFAELKAAFKPLYNQLDHYYLNDIPGLENPTSEVLAKWIWDQMKPQLPLLSAVMIKETCTAGCVYRG

SEQ ID NO: 20131 - protein, 120 aa, Enterobacter asburiae
  REGION 1..120: note = tr|A0A0D9HAQ8|A0A0D9HAQ8_ENTAS 6-carboxy-5,6,7,8-tetrahydropterin synthase; OS = Enterobacter asburiae OX=61645 GN=queD PE=3 SV=1
MSTTLFKDFTFEAAHHLPHVPEGHKCGRLHGHSFMVRLEITGEVDPHTGWIMDFAELKAAFKPTYDRLDHYYLNDIPGLENPTSEVLAKWIWDQMKPLVPLLSAVMIKETCTAGCIYRGE

SEQ ID NO: 20132 - protein, 120 aa, Enterobacter asburiae
  REGION 1..120: note = tr|A0A5A8ZVW2|A0A5A8ZVW2_ENTAS 6-carboxy-5,6,7,8-tetrahydropterin synthase; OS = Enterobacter asburiae OX=61645 GN=queD PE=3 SV=1
MSTTLFKDFTFEAAHHLPHVPEGHKCGRLHGHSFMVRLEITGEVDPHTGWIMDFAELKAAFKPTYDRLDHYYLNEIPGLENPTSEVLAKWIWDQMKPLVPLLSAVMIKETCTAGCIYRGE

SEQ ID NO: 20133 - protein, 120 aa, unidentified
  source 1..120: note = Enterobacter bugandensis
  REGION 1..120: note = tr|A0A2J7T7G2|A0A2J7T7G2_9ENTR 6-carboxy-5,6,7,8-tetrahydropterin synthase; OS = Enterobacter bugandensis OX=881260 GN=queD PE=3 SV=1
MSTTLFKDFTFEAAHHLPHVPAGHKCGRLHGHSFMVRLEITGEVDPHTGWIMDFAELKAAFKPTYDRLDHYYLNDIPGLENPTSEVLAKWIWDQMKPLVPLLSAVMIKETCTAGCVYRGE

SEQ ID NO: 20134 - protein, 120 aa, unidentified
  source 1..120: note = Enterobacter bugandensis
  REGION 1..120: note = tr|A0A3S0I8K2|A0A3S0I8K2_9ENTR 6-carboxy-5,6,7,8-tetrahydropterin synthase; OS = Enterobacter bugandensis OX=881260 GN=queD PE=3 SV=1
MSTTLFKDFTFEAAHHLPHVPEGHKCGRLHGHSFMVRLEITGEVDPHTGWIMDFAELKAAFKPTYDRLDHYYLNDIPGLENPTSEVLAKWIWDQMKPLVPLLSAVMIKETCTAGCVYRGE

SEQ ID NO: 20135 - protein, 121 aa, Enterobacter cancerogenus
  REGION 1..121: note = tr|D2ZJN7|D2ZJN7_9ENTR 6-carboxy-5,6,7,8-tetrahydropterin synthase; OS = Enterobacter cancerogenus ATCC 35316 OX=500639 GN=queD; PE = 3 SV=1
MMSTTLFKDFIFEAAHHLPHVPAGHKCGRLHGHSFMVRLEITGEVDPHTGWIMDFAELKAAFKPTYDRLDHYYLNDIPGLENPTSEVLAKWIWDQVKPLVPQLSAVMIKETCTAGCIYRGE

SEQ ID NO: 20136 - protein, 120 aa, Enterobacter cancerogenus
  REGION 1..120: note = tr|A0A2J7NZZ6|A0A2J7NZZ6_9ENTR 6-carboxy-5,6,7,8-tetrahydropterin synthase; OS = Enterobacter cancerogenus OX=69218 GN=queD PE=3 SV=1
MSTTLFKDFIFEAAHHLPHVPAGHKCGRLHGHSFMVRLEITGEVDPHTGWIMDFAELKAAFKPTYDRLDHYYLNDIPGLENPTSEVLAKWIWDQVKPLVPLLSAVMIKETCTAGCIYRGE

SEQ ID NO: 20137 - protein, 120 aa, unidentified
  source 1..120: note = Enterobacter chengduensis
  REGION 1..120: note = tr|A0A0F4BCN6|A0A0F4BCN6_9ENTR 6-carboxy-5,6,7,8-tetrahydropterin synthase; OS = Enterobacter chengduensis OX=2494701 GN=SG71_18005 PE=3; SV = 1
MSTTLFKDFTFEAAHHLPHVPAGHKCGRLHGHSFMVRLEITGEVDPHTGWIMDFAELKAAFKPTYDRLDHYYLNEIPGLENPTSEVLAKWIWDQMKPLVPLLSAVMIKETCTAGCIYRGE

SEQ ID NO: 20138 - protein, 120 aa, unidentified
  source 1..120: note = Enterobacter chuandaensis
  REGION 1..120: note = tr|A0A3A3Z7T8|A0A3A3Z7T8_9ENTR 6-carboxy-5,6,7,8-tetrahydropterin synthase; OS = Enterobacter chuandaensis OX=2497875 GN=queD PE=3 SV=1
MSTTLFKDFTFEAAHHLPHVPAGHKCGRLHGHSFMVRLEITGEVDPHTGWIMDFAELKAAFKPTYDRLDHYYLNDIPGLENPTSEVLAKWIWDQMKPLVPLLSAVMIKETCTAGCIYRGE

SEQ ID NO: 20139 - protein, 120 aa, Enterobacter cloacae; identical to SEQ ID NO: 20133
  REGION 1..120: note = tr|A0A0A5QUN8|A0A0A5QUN8_ENTCL 6-carboxy-5,6,7,8-tetrahydropterin synthase; OS = Enterobacter cloacae OX=550 GN=queD PE=3 SV=1

SEQ ID NO: 20140 - protein, 120 aa, Enterobacter cloacae
  REGION 1..120: note = tr|A0A5E0IGI7|A0A5E0IGI7_ENTCL 6-carboxy-5,6,7,8-tetrahydropterin synthase; OS = Enterobacter cloacae OX=550 GN=queD PE=3 SV=1
MSTTLFKDFTFEAAHHLPHVPEGHKCGRLHGHSFMVRLEITGDVDPHTGWIMDFAELKAAFKPTYDRLDHYYLNDIPGLENPTSEVLAKWIWDQMKPQVPLLSAVMIKETCTAGCIYRGE

SEQ ID NO: 20141 - protein, 120 aa, unidentified; identical to SEQ ID NO: 20134
  source 1..120: note = Enterobacter genomosp.
  REGION 1..120: note = tr|A0A0X4EM38|A0A0X4EM38_9ENTR 6-carboxy-5,6,7,8-tetrahydropterin synthase; OS = Enterobacter genomosp. O OX=2364150 GN=AWI28_00730 PE=3; SV = 1

SEQ ID NO: 20142 - protein, 121 aa, Enterobacter hormaechei
  REGION 1..121: note = tr|F5S184|F5S184_9ENTR 6-carboxy-5,6,7,8-tetrahydropterin synthase; OS = Enterobacter hormaechei ATCC 49162 OX=888063 GN=queD; PE = 3 SV=1
MMSTTLFKDFTFEAAHHLPHVPAGHKCGRLHGHSFMVRLEITGEVDPHTGWIMDFAELKAAFKPTYDRLDHYYLNDIPGLENPTSEVLAKWIWDQMKPLVPLLSAVMIKETCTAGCVYRGE

SEQ ID NO: 20143 - protein, 120 aa, Enterobacter hormaechei; identical to SEQ ID NO: 20133
  REGION 1..120: note = tr|A0A2J0PXM6|A0A2J0PXM6_9ENTR 6-carboxy-5,6,7,8-tetrahydropterin synthase; OS = Enterobacter hormaechei OX=158836 GN=queD PE=3 SV=1

SEQ ID NO: 20144 - protein, 121 aa, unidentified
  source 1..121: note = Enterobacter huaxiensis
  REGION 1..121: note = tr|A0A3R9NIF5|A0A3R9NIF5_9ENTR 6-carboxy-5,6,7,8-tetrahydropterin synthase; OS = Enterobacter huaxiensis OX=2494702 GN=queD PE=3 SV=1
MMSTTLFKDFIFEAAHHLPHVPAGHKCGRLHGHSFMVRLEITGEVDPHTGWIIDFAELKAAFKPTYDRLDHYYLNDIPGLENPTSEVLAKWIWDQMKPLIPLLSAVTIKETCTAGCVYRGE

SEQ ID NO: 20145 - protein, 120 aa, unidentified
  source 1..120: note = Enterobacter huaxiensis
  REGION 1..120: note = tr|A0A3R9PD69|A0A3R9PD69_9ENTR 6-carboxy-5,6,7,8-tetrahydropterin synthase; OS = Enterobacter huaxiensis OX=2494702 GN=queD PE=3 SV=1
MKTTLYKDFTFEAAHRLPNVPEGHKCGRLHGHSFVVRLEITGDVDKHTGWIIDFAELKAIFKPTLDRLDHYYLNDIPGLENPTSEVLAEWIWNQIKPQLPTLSAVVVKETCSAGCIYRGE

SEQ ID NO: 20146 - protein, 120 aa, Enterobacter kobei; identical to SEQ ID NO: 20133
  REGION 1..120: note = tr|A0A5E0W9H5|A0A5E0W9H5_9ENTR 6-carboxy-5,6,7,8-tetrahydropterin synthase; OS = Enterobacter kobei OX=208224 GN=queD_1 PE=3 SV=1

SEQ ID NO: 20147 - protein, 120 aa, Enterobacter kobei
  REGION 1..120: note = tr|A0A0P8LEX4|A0A0P8LEX4_9ENTR 6-carboxy-5,6,7,8-tetrahydropterin synthase; OS = Enterobacter kobei OX=208224 GN=queD PE=3 SV=1
MSTTLFKDFTFEAAHHLPHVPEGHKCGRLHGHSFMVRLEITGEVDPHTGWIMDFAELKAAFKPTYDRLDHYYLNEIPGLENPTSEVLAKWIWDQMKPLVPLLSAVMIKETCTAGCVYRGE

SEQ ID NO: 20148 - protein, 120 aa, unidentified
  source 1..120: note = Enterobacter lignolyticus
  REGION 1..120: note = tr|E3GCD4|E3GCD4_ENTLS 6-carboxy-5,6,7,8-tetrahydropterin synthase; OS = Enterobacter lignolyticus (strain SCF1) OX=701347; GN = Entcl_3865 PE=3 SV=1
MKTTLYKDFTFEAAHRLPNVPEGHKCGRLHGHSFVVRLEITGEVDPHTGWIIDFAELKAIFKPTLDRLDHYYLNDIPGLENPTSEVLAEWVWQQIKPQLPLLSAVVVKETCTAGCIYRGE

SEQ ID NO: 20149 - protein, 121 aa, unidentified
  source 1..121: note = Enterobacter lignolyticus
  REGION 1..121: note = tr|E3G5S8|E3G5S8_ENTLS 6-carboxy-5,6,7,8-tetrahydropterin synthase; OS = Enterobacter lignolyticus (strain SCF1) OX=701347; GN = Entcl_0941 PE=3 SV=1
MMSTTLFKDFTFEAAHHLPHVPEGHKCGRLHGHSFMVRLEITGEVDPYTGWIMDFAELKAAFKPTYDRLDHYYLNDIPGLENPTSEVLAKWIWDQMKPQVPLLSAVMVKETCTAGCVYRGE

SEQ ID NO: 20150 - protein, 120 aa, Enterobacter ludwigii; identical to SEQ ID NO: 20140
  REGION 1..120: note = tr|G8LCJ1|G8LCJ1_9ENTR 6-carboxy-5,6,7,8-tetrahydropterin synthase; OS = Enterobacter ludwigii OX=299767 GN=queD PE=3 SV=1

SEQ ID NO: 20151 - protein, 120 aa, Enterobacter mori
  REGION 1..120: note = tr|A0A2J0NF55|A0A2J0NF55_9ENTR 6-carboxy-5,6,7,8-tetrahydropterin synthase; OS = Enterobacter mori OX=539813 GN=B9Q20_12430 PE=3 SV=1
MSTKLFKDFTFEAAHHLPHVPEGHKCGRLHGHSFMVRLEITGEVDPHTGWIMDFAELKAAFKPTYDRLDHYYLNDIPGLENPTSEVLAKWIWDQMKPLVPLLSAVMIKETCTAGCIYRGE

SEQ ID NO: 20152 - protein, 120 aa, Enterobacter mori; identical to SEQ ID NO: 20131
  REGION 1..120: note = tr|A0A2U2NLY6|A0A2U2NLY6_9ENTR 6-carboxy-5,6,7,8-tetrahydropterin synthase; OS = Enterobacter mori OX=539813 GN=queD PE=3 SV=1

SEQ ID NO: 20153 - protein, 120 aa, unidentified
  source 1..120: note = Enterobacter roggenkampii
  REGION 1..120: note = tr|A0A1C7ZNV7|A0A1C7ZNV7_9ENTR 6-carboxy-5,6,7,8-tetrahydropterin synthase; OS = Enterobacter roggenkampii OX=1812935 GN=BBX43_13120; PE = 3 SV=1
MSTTLFKDFTFEAAHHLPHVPEGHKCGRLHGHSFMVRLEITGEVDPHTGWIMDFAELKAAFKPTYDRLDHYYLNEIPGLENPTSEVLAKWIWDQMKPRVPLLSAVMIKETCTAGCIYRGE

SEQ ID NO: 20154 - protein, 120 aa, unidentified
  source 1..120: note = Enterobacter roggenkampii
  REGION 1..120: note = tr|A0A384GQN0|A0A384GQN0_9ENTR 6-carboxy-5,6,7,8-tetrahydropterin synthase; OS = Enterobacter roggenkampii OX=1812935 GN=ASU87_02275; PE = 3 SV=1
MSTTLFKDFTFEAAHHLPHVPEGHKCGRLHGHSFMVRLEITGEVDPHTGWIMDFAELKAAFKPTYDRLDHYYLNEIPGLENPTSEVLAKWIWDQMKPRVPLLSAVMIKETCTAGCVYRGE

SEQ ID NO: 20155 - protein, 120 aa, unidentified
  source 1..120: note = Enterobacter sichuanensis
  REGION 1..120: note = tr|A0A0F1AGZ2|A0A0F1AGZ2_9ENTR 6-carboxy-5,6,7,8-tetrahydropterin synthase; OS = Enterobacter sichuanensis OX=2071710 GN=SS37_20335 PE=3; SV = 1
MSTTLFKDFTFEAAHHLPHVPAGHKCGRLHGHSFMVRLEITGEVDPHTGWIMDFAELKAAFKPTYDRLDHYYLNDIPGLENPTSEVLAKWIWDQMKPQVPLLSAVMIKETCTAGCVYRGE

SEQ ID NO: 20156 - protein, 120 aa, Enterobacter soli
  REGION 1..120: note = tr|A0A198H2R9|A0A198H2R9_9ENTR 6-carboxy-5,6,7,8-tetrahydropterin synthase; OS = Enterobacter soli ATCC BAA-2102 OX=1354262; GN = M987_00177 PE=3 SV=1
MMSTTLFKDFVFEAAHHLPHVPAGHKCGRLHGHSFMVRLEITGEVDPHTGWIMDFAELKAAFKPTYDRLDHYYLNDIPGLENPTSEVLAKWIWDQMKPLVPLLSAVMIKETCTAGCVYRG

SEQ ID NO: 20157 - protein, 119 aa, Enterobacter sp.
  REGION 1..119: note = tr|A0A495API6|A0A495API6_9ENTR 6-carboxy-5,6,7,8-tetrahydropterin synthase; OS = Enterobacter sp. R1(2018) OX=2447891 GN=queD PE=3 SV=1
MATTLFKDFTFEAAHRLPHVPEGHKCGRLHGHSFMVRLEITGEVDPHTGWIMDFSELKAAFKPTYDRLDHYYLNDIPGLENPTSEVLAKWIWEQMKPVVPLLSAVMVKETCTAGCVYKG

SEQ ID NO: 20158 - protein, 120 aa, Enterobacter sp.; identical to SEQ ID NO: 20132
  REGION 1..120: note = tr|A0A4S3ERB2|A0A4S3ERB2_9ENTR 6-carboxy-5,6,7,8-tetrahydropterin synthase; OS = Enterobacter sp. AD2-3 OX=2547834 GN=queD PE=3 SV=1

SEQ ID NO: 20159 - protein, 119 aa, unidentified
  source 1..119: note = Enterobacterales bacterium
  REGION 1..119: note = tr|A0A389M7R4|A0A389M7R4_9GAMM 6-carboxy-5,6,7,8-tetrahydropterin synthase; OS = Enterobacterales bacterium OX=1993870 GN=queD PE=3 SV=1
MTTTLFKDFQFEAAHHLPNVPAGHKCGRLHGHSFTVRIEITGEVDPYTGWVMDFADLKAAFNPTLDRLDHYNLNDIPGLENPTSEVLAEWIWNEMKPKLPLLSAVRVKETCTAGCVYKG

SEQ ID NO: 20160 - protein, 120 aa, unidentified
  source 1..120: note = Enterobacterales bacterium
  REGION 1..120: note = tr|A0A2I0FQA8|A0A2I0FQA8_9GAMM 6-carboxy-5,6,7,8-tetrahydropterin synthase; OS = Enterobacterales bacterium CwR94 OX=2025587 GN=queD; PE = 3 SV=1
MAITLFKDFTFEAAHRLPNVPVGHKCNRIHGHSFTVRLEITGDIDPHTGWLMDFSELKAAFQPTYDRLDHHYLNDIPGLENPTSEVLSRWIWEQIKPLVPQLSRVLIKETCTSGSIYRGE

SEQ ID NO: 20161 - protein, 120 aa, unidentified
  source 1..120: note = Enterobacteriaceae bacterium
  REGION 1..120: note = tr|A0A351NL55|A0A351NL55_9ENTR 6-carboxy-5,6,7,8-tetrahydropterin synthase; OS = Enterobacteriaceae bacterium OX=1849603 GN=queD PE=3; SV = 1
MSTTLFKDFIFEAAHRLPHVPEGHKCGRLHGHSFMVRLEITGDVDPHTGWIMDFSELKAAFKPTYDRLDHYYLNDIPGLENPTSEVLAKWIWEEMKPLVPLLSAVTIKETCTAGCVYRGE

SEQ ID NO: 20162 - protein, 119 aa, unidentified
  source 1..119: note = Enterobacteriaceae bacterium
  REGION 1..119: note = tr|A0A286BW05|A0A286BW05_9ENTR 6-carboxy-5,6,7,8-tetrahydropterin synthase; OS = Enterobacteriaceae bacterium JKS000234 OX=1938870; GN = SAMN06273570_2707 PE=3 SV=1
MSTTLFKEFQFESAHRLPHVPEGHKCGRLHGHSFLVRLEITGEVDAHTGWVMDFAELKAAFKPLYERLDHHYLNDIPGLENPTSEVLAKWIWDQMKPLLPELSAVMIKETCTAGCVYRG

SEQ ID NO: 20163 - protein, 104 aa, Enterococcus faecium
  REGION 1..104: note = tr|A0A2S7M949|A0A2S7M949_ENTFC 6-pyruvoyl tetrahydropterin synthase OS=Enterococcus faecium OX=1352; GN = CUN04_07750 PE=4 SV=1
MRWEGGMGAKHNHTWEIICEIKSNNGEMHLFEEIEGVLKDFFQPFSGCFLNEMSPFVEINPSVENVANYFYDQLFHRFAAIQTELIRIEVGESPTRFYCIEKQG

SEQ ID NO: 20164 - protein, 123 aa, Enterococcus gallinarum
  REGION 1..123: note = tr|A0A366U922|A0A366U922_ENTGA 6-pyruvoyl tetrahydropterin synthase OS=Enterococcus gallinarum; OX = 1353 GN=EB54_00826 PE=4 SV=1
MVEKRCIYKFKSHVNASHAMRWEGGMGAKHNHTWEIICEIKSQDDEMHLFEEIEGVLKDFFQPFSGSFLNEMPPFLEINPSVENVTNYFYDQLSLRLAAIQTELIRIEVGESPTRFYCIEKQA

SEQ ID NO: 20165 - protein, 123 aa, Enterococcus gallinarum
  REGION 1..123: note = tr|A0A1L8TZV8|A0A1L8TZV8_ENTGA 6-pyruvoyl tetrahydropterin synthase OS=Enterococcus gallinarum; OX = 1353 GN=E4T76_11205 PE=4 SV=1
MAEKRCIYKFKSHVNASHAMRWEGGMGAKHNHTWEIICEIKSQDDEMHLFEEIEGVLKDFFQPFSGSFLNEMPPFLEINPSVENVTNYFYDQLSLRLAAIQTELIRIEVGESPTRFYCIEKQA

SEQ ID NO: 20166 - protein, 123 aa, Enterococcus hirae
  REGION 1..123: note = tr|A0A4S3PTE9|A0A4S3PTE9_ENTHR 6-pyruvoyl tetrahydropterin synthase OS=Enterococcus hirae OX=1354; GN = E1H99_06715 PE=4 SV=1
MVEKRCIYKFKSHVNASHAMRWEDGMGARHNHTWEIICEIKSNDDEMHLFEEIESVLKDFFQPFSGSFLNETPPFVEINPSVENVANYFYDQLSLRLAEIQTELIRIEVGESPTRFYCIEKQE

SEQ ID NO: 20167 - protein, 123 aa, Enterococcus sp.; identical to SEQ ID NO: 20166
  REGION 1..123: note = tr|A0A242JYT3|A0A242JYT3_9ENTE Uncharacterized protein OS=Enterococcus sp. 10A9_DIV0425 OX=1987383; GN = A5844_002176 PE=4 SV=1

SEQ ID NO: 20168 - protein, 123 aa, Enterococcus sp.; identical to SEQ ID NO: 20165
  REGION 1..123: note = tr|T0U8R5|T0U8R5_9ENTE 6-pyruvoyl-tetrahydropterin synthaserelatedprotein OS=Enterococcus sp. HSIEG1; OX = 1316414 GN=HSIEG1_1875 PE=4 SV=1

SEQ ID NO: 20169 - protein, 141 aa, Enterorhabdus caecimuris
  REGION 1..141: note = tr|A0A4S4G562|A0A4S4G562_9ACTN 6-carboxy-5,6,7,8-tetrahydropterin synthase; OS = Enterorhabdus caecimuris OX=671266 GN=E5986_00385 PE=3; SV = 1
MYGLKTESSFDASHFLTDYHGKCENLHGHRWRVVAYLEVERLQTEGTCKDMVVDFGDFKGAVRALTDKLDHHFIIEEGSLAPDTLACLEREGFALFTVPFRTTAENLAKWFFDELAAQGLPVAQVDVYETPNNCAFYRKDV

SEQ ID NO: 20170 - protein, 141 aa, Enterorhabdus caecimuris
  REGION 1..141: note = tr|R9KW85|R9KW85_9ACTN 6-carboxy-5,6,7,8-tetrahydropterin synthase; OS = Enterorhabdus caecimuris B7 OX=1235794 GN=C811_01059; PE = 3 SV=1
MYGLKTESSFDASHFLTDYHGKCENLHGHRWRVVAYLEVERLQTEGTCKDMVVDFGDFKAAVRALTDKLDHHFIIEEGSLAPDTLACLEREGFALFTVPFRTTAENLAKWFFDELAAQGLPVSQVDVYETPNNCAFYRKDV

SEQ ID NO: 20171 - protein, 98 aa, Enterorhabdus sp.
  REGION 1..98: note = tr|A0A4S2G0M9|A0A4S2G0M9_9ACTN 6-carboxytetrahydropterin synthase (Fragment); OS = Enterorhabdus sp. NM05_H27 OX=2516956 GN=E5332_00735; PE = 4 SV=1
MYGLKTESSFDASHFLTDYHGKCENLHGHRWRVVAYLEAAELQTEGTCKDMVVDFGDFKGALRSLTERLDHHFIIEEGSLAPDTLACLEREGFALFTV

SEQ ID NO: 20172 - protein, 61 aa, Enterorhabdus sp.
  REGION 1..61: note = tr|A0A4S2FCH7|A0A4S2FCH7_9ACTN 6-carboxytetrahydropterin synthase QueD (Fragment); OS = Enterorhabdus sp. NM05_H27 OX=2516956 GN=E5332_11220; PE = 4 SV=1
APDTLACLEREGFALFTVPFRTTAENLAKWFFDELAAQGLPVAQVDVYETPNNCAFYRKGA

SEQ ID NO: 20173 - protein, 142 aa, unidentified
  source 1..142: note = Enteroscipio rubneri
  REGION 1..142: note = tr|A0A2K2UC84|A0A2K2UC84_9ACTN 6-carboxy-5,6,7,8-tetrahydropterin synthase; OS = Enteroscipio rubneri OX=2070686 GN=C2L71_05310 PE=3 SV=1
MYGLKTEASFDSAHFLTDYYGKCENLHGHRWRVVVHLAVDDLQTEGTMKGMVLDFGVFKRAVRELAEELDHTFLVEEGSLADATLAALESEGFSLTLLPFRTTAENLARYFCDCLAEQGLPVSQVEMYETPNNCALYRPLQR

SEQ ID NO: 20174 - protein, 120 aa, Enterovibrio coralii
  REGION 1..120: note = tr|A0A135I8P5|A0A135I8P5_9GAMM 6-carboxy-5,6,7,8-tetrahydropterin synthase; OS = Enterovibrio coralii OX=294935 GN=ATN88_03700 PE=3 SV=1
MHTELFKEFMFEAAHRLPHVPEGHKCGRLHGHSFLVRIYVAGEVDPHTGWVIDFSEIKKAFQPIYDRLDHYYLNDIEGLENPTSEVLAKWIWDELKPALPCLNKIMIKETCTAGCIYTGE

SEQ ID NO: 20175 - protein, 169 aa, Enterovibrio coralii
  REGION 1..169: note = tr|A0A135I7T5|A0A135I7T5_9GAMM Queuosine biosynthesis protein QueD OS=Enterovibrio coralii; OX = 294935 GN=ATN88_02045 PE=4 SV=1
MQVHALDKANLITDVQLGNHLSHAVTQGRRSDFALMLALLSGDATETTPLNPTYPEKTTDAMLRQALELPEPNRLAAEEIDYELCGEQASAFHSSSITSARFNHCVTPSALHFPAHGTHDLGEDVYHNLSGHTRRQLAEEKPNLTAYDPVNLYNQLVLSKRFQELNTTV

SEQ ID NO: 20176 - protein, 120 aa, Enterovibrio nigricans
  REGION 1..120: note = tr|A0A1T4VBV7|A0A1T4VBV7_9GAMM 6-carboxy-5,6,7,8-tetrahydropterin synthase; OS = Enterovibrio nigricans DSM 22720 OX=1121868; GN = SAMN02745132_03619 PE=3 SV=1
MHTELFKEFMFEAAHHLPHVPEGHKCGRLHGHSFLVRIYVAGEVDPHTGWVIDFSEIKKAFQPIYDRLDHYYLNDIEGLENPTSEVLSKWIWDELKPALPCLSKIMIKETCTAGCIYTGE

SEQ ID NO: 20177 - protein, 120 aa, Enterovibrio norvegicus
  REGION 1..120: note = tr|A0A2N7LAI7|A0A2N7LAI7_9GAMM 6-carboxy-5,6,7,8-tetrahydropterin synthase; OS = Enterovibrio norvegicus OX=188144 GN=queD PE=3 SV=1
MHTELFKEFMFEAAHHLPHVPEGHKCGRLHGHSFLVRLYVTGEVDPHTGWIIDFSEIKAAFKPIYDRLDHYYLNDIEGLENPTSEVLAKWIWDQLKPELPCLSKVMIKETCTAGCIYTGE

SEQ ID NO: 20178 - protein, 120 aa, Enterovibrio norvegicus
  REGION 1..120: note = tr|A0A1E5C190|A0A1E5C190_9GAMM 6-carboxy-5,6,7,8-tetrahydropterin synthase; OS = Enterovibrio norvegicus FF-454 OX=1185651 GN=A1OK_14590; PE = 3 SV=1
MHTELFKEFMFEAAHHLPHVPEGHKCGRLHGHSFLVRLYVAGEVDPYTGWVIDFSEIKEAFKPIYDRLDHYYLNDIEGLENPTSEVLAKWIWDQLKPSLPCLSKVMIKETCTAGCIYTGE

SEQ ID NO: 20179 - protein, 169 aa, unidentified
  source 1..169: note = Enterovibrio pacificus
  REGION 1..169: note = tr|A0A1C3ERR7|A0A1C3ERR7_9GAMM Queuosine biosynthesis protein QueD OS=Enterovibrio pacificus; OX = 1080227 GN=A8L45_02550 PE=4 SV=1
MQLHTLDKAALISDIQLGDKLNHAVSQGRRSDFALMLALLSGDSTETEPVEVVCTEEKTDDELRRLFQLSEPERLSADSLDYERAEQQSHAFHYAGLTSAKLSGYVSPPALHFPAEGTHNLGEDVYHNLSGHQRRRLSGEKSKETGLDPANLYRQLNEARRFKEINSYA

SEQ ID NO: 20180 - protein, 120 aa, unidentified
  source 1..120: note = Enterovibrio pacificus
  REGION 1..120: note = tr|A0A1C3EPV2|A0A1C3EPV2_9GAMM 6-carboxy-5,6,7,8-tetrahydropterin synthase; OS = Enterovibrio pacificus OX=1080227 GN=A8L45_04935 PE=3; SV = 1
MHTELFKEFMFEAAHHLPNVPEGHKCGRLHGHSFMVRIYVAGEVDPHTGWLIDFAEIKAAFKPIYDRLDHYYLNDIEGLENPTSEVLAQWIWNELKPALPCLSKVMIKETCTAGCVYTGE

SEQ ID NO: 20181 - protein, 120 aa, Enterovibrio sp.
  REGION 1..120: note = tr|A0A4V1LTE9|A0A4V1LTE9_9GAMM 6-carboxy-5,6,7,8-tetrahydropterin synthase; OS = Enterovibrio sp. CAIM 600 OX=1278244 GN=queD PE=3 SV=1
MQTELFKEFMFEAAHHLPNVPEGHKCGRLHGHSFLVRIYVAGDVDPCTGWVIDFAEIKAAFKPIYDRLDHYYLNDIEGLENPTSEVLSKWIWNELKPSLPCLSKVMIKETCTAGCIYTGE

SEQ ID NO: 20182 - protein, 296 aa, Enterovibrio sp.
  REGION 1..296: note = tr|A0A4Q0YRZ1|A0A4Q0YRZ1_9GAMM Uncharacterized protein OS=Enterovibrio sp. CAIM 600 OX=1278244; GN = CS022_06525 PE=4 SV=1
MSSPQWSTLFIKGFTVIDSSFASKTRGLVGESWLVDITLKGTLNDESMIFDFGLVKKHIKSIIDEVADHKLIIPATCSGIEVVRENDTTSVTADFDNENNFVVKAPENAFYFIDEDEVSASCIQVDLERKILAKMPANVTEVSIVLRTEALGDAPYYHYSHGLKKHQGNCQRIVHGHRSKIEIYEDGVRSDSLQRHWEKRWQDIYLVSEEDINGYQSWQHTEVENQTFIHSSYSSSEGDFELLVHKSKCEVIPTDTTVEFLAEYIAHESLKKSQCSRLEVFAYEGIEKGAYVELTQ

SEQ ID NO: 20183 - protein, 118 aa, unidentified
  source 1..118: note = Enterovirga rhinocerotis
  REGION 1..118: note = tr|A0A4R7CAP7|A0A4R7CAP7_9RHIZ 6-carboxy-5,6,7,8-tetrahydropterin synthase OS=Enterovirga rhinocerotis OX=1339210 GN=EV668_1146 PE=3 SV=1
MKITQAFTFEAAHRLPNVPETHRCFRMHGHSYRIELTLEGPVDPRSGFVIDFFDVEAVFAPLLERLDHHCLNEVEGLENPTAEHIAIWIWQRVKPLLPLVSSVRVYETPQSWAEYEGV

SEQ ID NO: 20184 - protein, 135 aa, unidentified
  source 1..135: note = Enterovirga rhinocerotis
  REGION 1..135: note = tr|A0A4R7BUF6|A0A4R7BUF6_9RHIZ 6-pyruvoyl-tetrahydropterin synthase OS=Enterovirga rhinocerotis OX=1339210 GN=EV668_3508 PE=4 SV=1
MYAVEVRDHVMIAHSFRGDLFGPAQALHGATFVVDVAFFREALTEDGVVVDIGRAGEALKAILGPLNYRNLDDLPAFAGRNTTTEFLSGHIHKAMSAAIRAGDLGPGGEGVDRIRVTLHESHIARAWFEGPVADG

SEQ ID NO: 20185 - protein, 117 aa, unidentified
  source 1..117: note = Epibacterium mobile
  REGION 1..117: note = tr|A0A1B1A2X0|A0A1B1A2X0_9RHOB 6-carboxy-5,6,7,8-tetrahydropterin synthase; OS = Epibacterium mobile F1926 OX=1265309 GN=K529_009165; PE = 3 SV=1
MFRIRKEFHFSASHQLSHLPDDHQCARLHGHNYIVVVELAAETLNTEGFVRDYHDLKPLKTYIDDTFDHRHLNDVLEGPSTAENMAKHFHDWCAARWPETRAVLVSETPKTWAEYRP

SEQ ID NO: 20186 - protein, 117 aa, unidentified
  source 1..117: note = Epibacterium mobile
  REGION 1..117: note = tr|A0A1H3DHH5|A0A1H3DHH5_9RHOB 6-carboxy-5,6,7,8-tetrahydropterin synthase; OS = Epibacterium mobile OX=379347 GN=SAMN05444385_110113; PE = 3 SV=1
MFRIRKEFHFSASHQLSHLPDDHQCARLHGHNYIVVVELAAETLNPEGFVRDYHDLKPLKTYIDDTFDHRHLNDVLEGSSTAENMAKHFHDWCAARWPETRAVLVSETPKTWAEYRP

SEQ ID NO: 20187 - protein, 121 aa, unidentified
  source 1..121: note = Epibacterium multivorans
  REGION 1..121: note = tr|A0A0P1GWS6|A0A0P1GWS6_9RHOB 6-carboxy-5,6,7,8-tetrahydropterin synthase; OS = Epibacterium multivorans OX=928856 GN=queD PE=3 SV=1
MFRICKEFHFCASHSLDTLPEGHKCAGLHGHNYIVYLELESETLDDTGFIIDFHELDTFKAYIDEEFDHKHLNNVMDLPPTTENVAYHFYTWCKARWPQTSAVRVSETPKTWAEYRPRPAS

SEQ ID NO: 20188 - protein, 116 aa, unidentified
  source 1..116: note = Epibacterium ulvae
  REGION 1..116: note = tr|A0A1G5PIT0|A0A1G5PIT0_9RHOB 6-carboxy-5,6,7,8-tetrahydropterin synthase; OS = Epibacterium ulvae OX=1156985 GN=SAMN04488118_10167; PE = 3 SV=1
MYRITKEFQFSASHRLTTLQDGHPCTRVHGHNYVVVVELASATLDEHGFVREYRDLDLLKAYIDENFDHRHLNDVLEMPTSEVLAKHFYDWCRERWEEVTSVRISETPKIWAEYRP

SEQ ID NO: 20189 - protein, 131 aa, unidentified
  source 1..131: note = Epibacterium ulvae
  REGION 1..131: note = tr|A0A1G5R9T0|A0A1G5R9T0_9RHOB 6-pyruvoyl-tetrahydropterin synthase OS=Epibacterium ulvae; OX = 1156985 GN=SAMN04488118_11126 PE=4 SV=1
MFAVEVRDHIMIAHSLPSPVFGPAQGMHGATFVVDAAFFTDSLDDNGLVVDMGLALDALAEALAPLKYANLDEVPEFKGKITTTEFLCHHIWQQLRDAVKTTGLGAGDRVRRIKVSLHESHTARGWYEADI

SEQ ID NO: 20190 - protein, 155 aa, unidentified
  source 1..155: note = Epsilonproteobacteria bacterium
  REGION 1..155: note = tr|A0A496XSG2|A0A496XSG2_9PROT 6-carboxytetrahydropterin synthase; OS = Epsilonproteobacteria bacterium OX=2026809; GN = DRQ89_04265 PE=4 SV=1
METCVRKIHFCYGHRVMRHESKCATLHGHNGIVWAHATPIEGLDELGRVIDFSVLKDEVGGWIDKNWDHTMILFKDDQETVELCQKAPSYKDVFILPTNPTAENLAHYLLYEVCPKVLKGKGVVVHKITFWETENCYATQSLDPKDEKIIALYSN

SEQ ID NO: 20191 - protein, 193 aa, unidentified
  source 1..193: note = Epsilonproteobacteria bacterium
  REGION 1..193: note = tr|A0A426VXC7|A0A426VXC7_9PROT 6-carboxy-5,6,7,8-tetrahydropterin synthase; OS = Epsilonproteobacteria bacterium (ex Lamellibrachia satsuma) OX=2496635 GN=P794_06210 PE =4 SV=1
MLIRKLFKFENAHIVRGCSTQRCSENIHGHSYKVEVLLESNYLDNGQMVYDFGLTKLYIKELIDSFDHGITLWSKDDADYIEAMKKYSHRWVELPVSPSAEQFSRVIYLMVERVLACTAMVNGEREVKLHSIIVHETDTGYAQGFKEDAHSELMGKIGLEDISFSEQVKKEWSDSELWEKLISHTLMKNPEKV

SEQ ID NO: 20192 - protein, 141 aa, unidentified
  source 1..141: note = Epulopiscium sp.
  REGION 1..141: note = tr|A0A1V2YHY9|A0A1V2YHY9_9FIRM 6-carboxy-5,6,7,8-tetrahydropterin synthase; OS = Epulopiscium sp. Nuni2H_MBin001 OX=1884656; GN = BEN18_05040 PE=3 SV=1
MFILKNEIQFDLAHYLSGYNGKCANIHGHRYKLVVKVASETLHEQGQLRGMVDDFSNIKSILKEVENYFDHKLIIEDNEDGRKVGEVLSGFDILYFPHRTTAEEMSRFIYHMIKQKGINVYEVELYETPTNSCIYTEVDNK

SEQ ID NO: 20193 - protein, 119 aa, Erwinia amylovora
  REGION 1..119: note = tr|D4HWM0|D4HWM0_ERWAC 6-carboxy-5,6,7,8-tetrahydropterin synthase OS=Erwinia amylovora (strain CFBP1430) OX=665029 GN=ygcM PE=3 SV=1
MATTLFKEFQFEAAHHLPHVPAGHKCGRLHGHSFMVRLEITGEVDAHTGWVMDFSEIKSAFKPVYDRLDHYYLNDIPGLENPTSEVLAEWIWQQMKPALPLLSAVMVKETCTAGCVYRG

SEQ ID NO: 20194 - protein, 155 aa, Erwinia amylovora
  REGION 1..155: note = tr|E5B290|E5B290_ERWAM K01737 6-pyruvoyl tetrahydrobiopterin synthase OS=Erwinia amylovora ATCC BAA-2158 OX=889211 GN=ygcM PE=4 SV=1
MSLLFRPQPLVCKRVRKKRISVILRRFARPSQRPGTMATTLFKEFQFEAAHHLPHVPAGHKCGRLHGHSFMVRLEITGEVDAHTGWVMDFSEIKSAFKPVYDRLDHYYLNDIPGLENPTSEVLAEWIWQQMKPALPLLSAVMVKETCTAGCVYRG

SEQ ID NO: 20195 - protein, 119 aa, Erwinia aphidicola; identical to SEQ ID NO: 17982
  REGION 1..119: note = tr|A0A4R6PAQ6|A0A4R6PAQ6_ERWAP 6-carboxy-5,6,7,8-tetrahydropterin synthase OS=Erwinia aphidicola OX=68334 GN=B0I34_1321 PE=3 SV=1

SEQ ID NO: 20196 - protein, 119 aa, Erwinia billingiae
  REGION 1..119: note = tr|D8MW64|D8MW64_ERWBE 6-carboxy-5,6,7,8-tetrahydropterin synthase OS=Erwinia billingiae (strain Eb661) OX=634500 GN=EbC_35400 PE=3 SV=1
MATTLFKDFMFEAAHHLPNVPAGHKCGRLHGHSFLVRLEITGEVDAHTGWIMDFAELKAAFKPIYDQLDHYYLNEIAGLENPTSEVLAKWIWDQMKPKLAELSAVTIKETCTAGCIYRG

SEQ ID NO: 20197 - protein, 119 aa, Erwinia billingiae; identical to SEQ ID NO: 20196
  REGION 1..119: note = tr|A0A5J6LS78|A0A5J6LS78_9GAMM 6-carboxytetrahydropterin synthase QueD OS=Erwinia billingiae OX=182337 GN=queD PE=4 SV=1

SEQ ID NO: 20198 - protein, 119 aa, unidentified
  source 1..119: note = Erwinia citreus
  REGION 1..119: note = tr|A0A358L743|A0A358L743_ERWCI 6-carboxy-5,6,7,8-tetrahydropterin synthase OS=Erwinia citreus OX=558 GN=queD PE=3 SV=1
MATTLFKDFQFEAAHHLPNVPEGHKCGRLHGHSFLVRLEITGEVDAHTGWIMDFAELKAAFRPLYDRLDHYYLNDIPGLENPTSEVLAKWIWDRMKPTLPLLSAVMIKETCTAGCVYKG

SEQ ID NO: 20199 - protein, 120 aa, unidentified
  source 1..120: note = Erwinia gerundensis
  REGION 1..120: note = tr|A0A0U5L942|A0A0U5L942_9GAMM 6-carboxy-5,6,7,8-tetrahydropterin synthase OS=Erwinia gerundensis OX=1619313 GN=queD PE=3 SV=1
MATTLFKDFHFEAAHHLPHVPEGHKCGRLHGHSFMVRIEITGEVDAHTGWVMDFADLKAAFKPIYDRLDHYYLNDIAGLENPTSEVLAQWIWQNLKPDLPELSAVMIKETCTAGCIYRGE

SEQ ID NO: 20200 - protein, 119 aa, unidentified
  source 1..119: note = Erwinia iniecta
  REGION 1..119: note = tr|A0A0L7T113|A0A0L7T113_9GAMM 6-carboxy-5,6,7,8-tetrahydropterin synthase OS=Erwinia iniecta OX=1560201 GN=NG42_13545 PE=3 SV=1
MATTLFKDFQFEAAHHLPNVPEGHKCGRLHGHSFMVRIEITGEVDAHTGWVMDFAELKAAFKPLYDRLDHYYLNDIPGLENPTSEVLAAWIWEQMKPTLPELSAVMVKETCTAGCVYKG

SEQ ID NO: 20201 - protein, 120 aa, Erwinia mallotivora
  REGION 1..120: note = tr|A0A014PVP5|A0A014PVP5_9GAMM 6-carboxy-5,6,7,8-tetrahydropterin synthase OS=Erwinia mallotivora OX=69222 GN=BG55_14695 PE=3 SV=1
MATTLFKDFQFEAAHHLPNVPAGHKCGRLHGHSFLVRLEITGEVDAHTGWVMDFAELKAAFKPVYDRLDHYYLNEIPGLSNPTSEVLAKWIWDQMKPTLPLLSAVMIKETCTAGCVYRGE

SEQ ID NO: 20202 - protein, 119 aa, Erwinia persicina
  REGION 1..119: note = tr|A0A354AEE5|A0A354AEE5_9GAMM 6-carboxy-5,6,7,8-tetrahydropterin synthase OS=Erwinia persicina OX=55211 GN=queD PE=3 SV=1
MATTLFKDFQFEAAHHLPNVPEGHKCGRLHGHSFMVRLEITGEVDAHTGWVMDFSEIKAAFKPIYDRLDHYYLNDIPGLENPTSEVLAAWIWQQMKPVLPLLSAVLVKETCTAGCVYRG

SEQ ID NO: 20203 - protein, 119 aa, Erwinia piriflorinigrans
  REGION 1..119: note = tr|V5Z5H8|V5Z5H8_9GAMM 6-carboxy-5,6,7,8-tetrahydropterin synthase OS=Erwinia piriflorinigrans CFBP 5888 OX=1161919 GN=ygcM PE=3 SV=1
MATTLFKEFQFEAAHLLPHVPAGHKCGRLHGHSFMVRLEITGDVDPYTGWVMDFSEIKRAFKPVYDRLDHYYLNDIPGLENPTSEVLAEWIWQQMKPALPLLSAVMVKETCTAGCVYRG

SEQ ID NO: 20204 - protein, 119 aa, Erwinia psidii
  REGION 1..119: note = tr|A0A3N6S3G8|A0A3N6S3G8_9GAMM 6-carboxy-5,6,7,8-tetrahydropterin synthase OS=Erwinia psidii OX=69224 GN=queD PE=3 SV=1
MATTLFKDFQFEAAHHLPNVPAGHKCGRLHGHSFLVRLEITGEVDEHTGWVMDFAELKAAFKPVYDRLDHYYLNEIPGLSNPTSEVLAKWIWEQMKPTLPLLSAVMIKETCTAGCVYKG

SEQ ID NO: 20205 - protein, 119 aa, Erwinia pyrifoliae
  REGION 1..119: note = tr|D2T5L6|D2T5L6_ERWP6 6-carboxy-5,6,7,8-tetrahydropterin synthase OS=Erwinia pyrifoliae (strain DSM 12163 / CIP 106111 / Ep16/96); OX = 644651 GN=ygcM PE=3 SV=1
MATTLFKEFQFEAAHLLPHVPAGHKCGRLHGHSFMIRLEITGEVNPHTGWVMDFSEIKSAFKPIYDRLDHYYLNDIPGLENPTSEVLAEWIWQQMKPALPLLSAVMVKETCTAGCVYRG

SEQ ID NO: 20206 - protein, 119 aa, Erwinia rhapontici
  REGION 1..119: note = tr|A0A4R7GIA9|A0A4R7GIA9_ERWRD 6-carboxy-5,6,7,8-tetrahydropterin synthase OS=Erwinia rhapontici OX=55212 GN=EDF84_10986 PE=3 SV=1
MATTLFKDFQFEAAHHLPNVPAGHKCGRLHGHSFMVRLEITGEVDAHTGWVMDFSEIKAAFKPVYDRLDHYYLNDIPGLENPTSEVLAEWIWQQMKPVLPLLSAVLVKETCTAGCVYRG

SEQ ID NO: 20207 - protein, 119 aa, Erwinia sp.
  REGION 1..119: note = tr|A0A3R8ZU66|A0A3R8ZU66_9GAMM 6-carboxy-5,6,7,8-tetrahydropterin synthase OS=Erwinia sp. 198 OX=2022746 GN=queD PE=3 SV=1
MATTLFKDFQFEAAHHLPNVPEGHKCGRLHGHSFLVRLEITGEVDAHTGWVMDFAELKAAFRPLYDRLDHYYLNEIPGLENPTSEVLAKWIWDRMKPTLPLLSAVMIKETCTAGCVYKG

SEQ ID NO: 20208 - protein, 119 aa, Erwinia sp.; identical to SEQ ID NO: 17982
  REGION 1..119: note = tr|A0A0Q4N9J5|A0A0Q4N9J5_9GAMM 6-carboxy-5,6,7,8-tetrahydropterin synthase OS=Erwinia sp. Leaf53 OX=1736225 GN=ASF13_02380 PE=3 SV=1

SEQ ID NO: 20209 - protein, 119 aa, Erwinia tasmaniensis
  REGION 1..119: note = tr|B2VG08|B2VG08_ERWT9 6-carboxy-5,6,7,8-tetrahydropterin synthase OS=Erwinia tasmaniensis (strain DSM 17950 / CIP 109463 / Et1/99); OX = 465817 GN=ptpS PE=3 SV=1
MATTLFKEFQFEAAHLLPHVPAGHKCGRLHGHSFMVRLEITGEVDQHTGWVMDFSDIKRAFKPIYDRLDHYYLNDIPGLENPTSEVLAEWIWQQMKPALPLLSAVMVKETCTAGCVYRG

SEQ ID NO: 20210 - protein, 120 aa, Erwinia tracheiphila
  REGION 1..120: note = tr|A0A0M2K8V6|A0A0M2K8V6_9GAMM 6-carboxy-5,6,7,8-tetrahydropterin synthase OS=Erwinia tracheiphila OX=65700 GN=SY86_07975 PE=3 SV=1
MATTLFKDFHFEAAHHLPDVPAGHKCGRLHGHSFMVRIEITGEVDAHTGWVMDFAELKAAFRPIYDRLDHYYLNDIPGLSNPTSEVLAKWIWEQMKPCLPLLSAVMIKETCTAGCVYRGG

SEQ ID NO: 20211 - protein, 120 aa, Erwinia tracheiphila
  REGION 1..120: note = tr|A0A345CTG2|A0A345CTG2_9GAMM 6-carboxy-5,6,7,8-tetrahydropterin synthase OS=Erwinia tracheiphila OX=65700 GN=queD PE=3 SV=1
MATTLFKDFHFEAAHHLPNVPAGHKCGRLHGHSFMVRIEITGEVDAHTGWVMDFAELKAAFRPIYDRLDHYYLNDIPGLSNPTSEVLAKWIWEQMKPCLPLLSAVMIKETCTAGCVYRGG

SEQ ID NO: 20212 - protein, 119 aa, Erwinia typographi
  REGION 1..119: note = tr|A0A0A3Z6A9|A0A0A3Z6A9_9GAMM 6-carboxy-5,6,7,8-tetrahydropterin synthase OS=Erwinia typographi OX=371042 GN=NG99_11560 PE=3 SV=1
MATTLFKDFMFEAAHHLPNVPAGHKCGRLHGHSFLVRLEITGEVDAHTGWIIDFAELKAAFKPIYDQLDHYYLNEIPGLENPTSEVLAKWIWDRMKPRLAQLSAVTIKETCTAGCIYKG

SEQ ID NO: 20213 - protein, 120 aa, unidentified
  source 1..120: note = Erwiniaceae bacterium
  REGION 1..120: note = tr|A0A3D5MAT6|A0A3D5MAT6_9GAMM 6-carboxy-5,6,7,8-tetrahydropterin synthase OS=Erwiniaceae bacterium OX=2053552 GN=queD PE=3 SV=1
MATTLFKDFQFEAAHRLPHVPEGHKCGRLHGHSFLVRLEITGDVDPYTGWIMDFAELKAAFKPLYDRLDHYYLNDIPGLENPTSEVLAQWIWQQMKPVVPLLSAVMIKETCTAGCVYRGE

SEQ ID NO: 20214 - protein, 162 aa, unidentified
  source 1..162: note = Erysipelatoclostridium ramosum
  REGION 1..162: note = tr|B0N7X8|B0N7X8_9FIRM Queuosine biosynthesis protein QueD OS=Erysipelatoclostridium ramosum DSM 1402; OX = 445974 GN=queD PE=4 SV=1
MLFLSRLFSEPAFLFDGIEGGKMYFLKTEQSFDSAHFLAGYHGKCANIHGHRWKVIATIKSEKLLEDPQNKGMVTDFGDLKKDLKIIADSFDHALIIETGSLSEKLYQALIDENFKIINLPFRPTAENLAKYIYEALSKNYLVDCLDVYETPNNCASYRGKL

SEQ ID NO: 20215 - protein, 140 aa, unidentified; identical to SEQ ID NO: 19477
  source 1..140: note = Erysipelatoclostridium ramosum
  REGION 1..140: note = tr|A0A3E3EH81|A0A3E3EH81_9FIRM 6-carboxy-5,6,7,8-tetrahydropterin synthase; OS = Erysipelatoclostridium ramosum OX=1547 GN=queD PE=3 SV=1

SEQ ID NO: 20216 - protein, 141 aa, unidentified
  source 1..141: note = Erysipelatoclostridium sp.
  REGION 1..141: note = tr|A0A1Y4MWP9|A0A1Y4MWP9_9FIRM 6-carboxy-5,6,7,8-tetrahydropterin synthase; OS = Erysipelatoclostridium sp. An173 OX=1965571; GN = B5F09_11945 PE=3 SV=1
MYYLKTEQSFDSAHFLAGYNGKCANIHGHRWRVVVSIKSTSLLEDKQNNGMIIDFTDLKNDLKQITDSLDHTLIIETNSLSTDLYQALINENFKIVSLPFRPTAENLARYIFELLAKKYNLDCIDVYETPNNCASYRGNDE

SEQ ID NO: 20217 - protein, 141 aa, unidentified; identical to SEQ ID NO: 20216
  source 1..141: note = Erysipelatoclostridium sp.
  REGION 1..141: note = tr|A0A1Y4QSU5|A0A1Y4QSU5_9FIRM 6-carboxy-5,6,7,8-tetrahydropterin synthase; OS = Erysipelatoclostridium sp. An15 OX=1965566; GN = B5E92_07425 PE=3 SV=1

SEQ ID NO: 20218 - protein, 133 aa, unidentified
  source 1..133: note = Erysipelotrichaceae bacterium
  REGION 1..133: note = tr|A0A3G9JRC9|A0A3G9JRC9_9FIRM 6-carboxy-5,6,7,8-tetrahydropterin synthase; OS = Erysipelotrichaceae bacterium SG0102 OX=2487118; GN = SG0102_05330 PE=3 SV=1
MYVITTEASFDAAHFLKDYPGKCHNIHGHRWKVQVSLQAETLGAEGMVIDFGIIKKDLKALCETFDHTLIIEEGSLKPQTVAALQEEDFALSFVPFRPTAEHLSRYFFEALQKYPVLSVDVYETPGNKAHYEL

SEQ ID NO: 20219 - protein, 133 aa, unidentified; identical to SEQ ID NO: 20218
  source 1..133: note = Erysipelotrichaceae bacterium
  REGION 1..133: note = tr|A0A3C1MZR1|A0A3C1MZR1_9FIRM 6-carboxy-5,6,7,8-tetrahydropterin synthase; OS = Erysipelotrichaceae bacterium OX=2049044 GN=queD PE=3; SV = 1

SEQ ID NO: 20220 - protein, 76 aa, Erythrobacter citreus
  REGION 1..76: note = tr|A0A0L1KGG2|A0A0L1KGG2_9SPHN Queuosine biosynthesis QueD, PTPS-I OS=Erythrobacter citreus LAMA 915 OX=1306953 GN=J121_893 PE=4 SV=1
MIVDVGILEKELESVRDALDHRFLDDINDLGPATMENLCRWIWNRLKPEFPALSKVSVYRDSNSDAVTYWGEEELA

SEQ ID NO: 20221 - protein, 128 aa, Erythrobacter sp.
  REGION 1..128: note = tr|A0A165QDA7|A0A165QDA7_9SPHN 6-carboxy-5,6,7,8-tetrahydropterin synthase; OS = Erythrobacter sp. HI00D59 OX=1822215 GN=A3711_07410; PE = 3 SV=1
MIEVTKRFGFDAAHTLQRHVDAEGSRRIHGHSYQAEVAIEGEIDPTSGMVVDLGILARTLEGVRDGLDHRFLDEVEGLGPATLENLAMWIWAKLQDASIGGLTRVTVLRESAGETCTYRGPMRRESLS

SEQ ID NO: 20222 - protein, 124 aa, Erythrobacter sp.
  REGION 1..124: note = tr|A0A2D8MEX6|A0A2D8MEX6_9SPHN 6-carboxy-5,6,7,8-tetrahydropterin synthase; OS = Erythrobacter sp. OX=1042 GN=CL949_13555 PE=3 SV=1
MYELSKQFRFDAAHTLDRIVQTESSRRIHGHSYRGEVTLRGRPDPESGMIVDVGILERELESVRDALDHRFLDDINDLGPATMENLCRWIWERLKPSFPALTKVSVYRDSNSDACSYWGEEELA

SEQ ID NO: 20223 - protein, 120 aa, Escherichia albertii
  REGION 1..120: note = tr|W0AS21|W0AS21_9ESCH 6-carboxy-5,6,7,8-tetrahydropterin synthase OS=Escherichia albertii KF1 OX=1440052 GN=queD PE=3 SV=1
MSTTLFKDFTFEAAHRLPHVPQGHKCGRLHGHSFMVRLEITGEVDPHTGWIIDFAELKAAFKPTYDRLDHHYLNEIPGLENPTSEVLAKWIWDQVKPVVPLLSAVMVKETCTAGCIYRGE

SEQ ID NO: 20224 - protein, 120 aa, Escherichia albertii; identical to SEQ ID NO: 20223
  REGION 1..120: note = tr|B1EGN1|B1EGN1_ESCAT 6-carboxy-5,6,7,8-tetrahydropterin synthase OS=Escherichia albertii (strain TW07627) OX=502347 GN=queD PE=3 SV=1

SEQ ID NO: 20225 - protein, 161 aa, Escherichia fergusonii
  REGION 1..161: note = tr|F0JRQ1|F0JRQ1_ESCFE Putative 6-pyruvoyl tetrahydrobiopterin synthase OS=Escherichia fergusonii ECD227 OX=981367 GN=ygcM PE=4 SV=1
MNIAHHQDKSAILRNKGVLDNAKKQAFRYSTAVLSSCREIMMSTTLFKDFTFEAAHRLPHVPEGHKCGRLHGHSFMVRLEITGEVDPHTGWIIDFAELKAAFKPTYERLDHHYLNDIPGLENPTSEVLAKWIWDQVKPVVPLLSAVMVKETCTAGCIYRGE

SEQ ID NO: 20226 - protein, 121 aa, unidentified
  source 1..121: note = Escherichia marmotae
  REGION 1..121: note = tr|A0A370V712|A0A370V712_9ESCH 6-carboxy-5,6,7,8-tetrahydropterin synthase OS=Escherichia marmotae OX=1499973 GN=queD PE=3 SV=1
MMSTTLFKDFTFEAAHRLPHVPEGHKCGRLHGHSFMVRLEITGEVDPHTGWIIDFAELKAAFKPTYDRLDHYYLNDIPGLENPTSEVLAKWIWDQVKPVVPLLSAVMVKETCTAGCIYRGE

SEQ ID NO: 20227 - protein, 121 aa, Escherichia sp.
  REGION 1..121: note = tr|A0A4U6CR26|A0A4U6CR26_9ESCH 6-carboxy-5,6,7,8-tetrahydropterin synthase OS=Escherichia sp. MR OX=2575922 GN=queD PE=3 SV=1
MMSTTLFKDFTFEAAHHLPHVPQGHKCGRLHGHSFMVRLEITGEVDPHTGWIIDFAELKAAFKPTYDRLDHYYLNDIPGLENPTSEVLAKWIWDQVKPVVPLLSAVMVKETCTAGCIYRGE

SEQ ID NO: 20228 - protein, 121 aa, Escherichia sp.
  REGION 1..121: note = tr|A0A4Q9JJ04|A0A4Q9JJ04_9ESCH 6-carboxy-5,6,7,8-tetrahydropterin synthase OS=Escherichia sp. E10V4 OX=2478971 GN=queD PE=3 SV=1
MMSTTLFKDFTFEAAHRLPHVPQGHKCGRLHGHSFMVRLEITGEVDPHTGWIIDFAELKAAFKPTYDRLDHYYLNDIPGLENPTSEVLAKWIWDQVKPVVPLLSAVMVKETCTAGCIYRGE

SEQ ID NO: 20229 - protein, 122 aa, unidentified
  source 1..122: note = Estrella lausannensis
  REGION 1..122: note = tr|A0A0H5DRR9|A0A0H5DRR9_9BACT 6-carboxy-5,6,7,8-tetrahydropterin synthase OS=Estrella lausannensis OX=483423 GN=queD PE=3 SV=1
MFELEKTFRFEAGHVLAHHDGKCKIPHGHSYVLTVRVRSPHLQTEGPKRNMVIDFQDISSTVKPLIKEKLDHCWLNDSLETDSPTVEYIALWIFNQLKEKIRGLHSVTLQETESCKVTYFVN

SEQ ID NO: 20230 - protein, 140 aa, unidentified
  source 1..140: note = Eubacteriaceae bacterium
  REGION 1..140: note = tr|A0A143XYE8|A0A143XYE8_9FIRM 6-pyruvoyl tetrahydropterin synthase OS=Eubacteriaceae bacterium CHKCI004 OX=1780380 GN=BN3660_02550 PE=4 SV=1
MYILETEQAFDSAHFLSGYEGKCRNLHGHRWRIVARIAADHLSEERQTRDMVIDFGDFKDALKELTETLDHCLIVETGSLRPKTMEALREEEFRIVELPFRPTAEQLSRYFYMQLKERAFPVYNVSVYETPNNCATYQEA

SEQ ID NO: 20231 - protein, 147 aa, unidentified
  source 1..147: note = Eubacteriaceae bacterium
  REGION 1..147: note = tr|A0A425W6P4|A0A425W6P4_9FIRM 6-carboxy-5,6,7,8-tetrahydropterin synthase; OS = Eubacteriaceae bacterium OX=2049045 GN=queD PE=3 SV=1
MYTLKTKGHFDAAHFLKGYAGKCANLHGHHWTVTVEIQGETLQTDEQHRGMLVDFGDLKADLKAACDGFDHRLIYEAGSLSETAMQALSEEGFSGRAIPVRPTAENLAKLFCDEMTAKGYDVRRVEVYETPNNMAAYEPEDKDQGGH

SEQ ID NO: 20232 - protein, 140 aa, unidentified
  source 1..140: note = [Eubacterium] cellulosolvens
  REGION 1..140: note = tr|I5AU64|I5AU64_EUBCE 6-carboxy-5,6,7,8-tetrahydropterin synthase; OS = [Eubacterium] cellulosolvens 6 OX=633697; GN = EubceDRAFT1_1548 PE=3 SV=1
MYYLKSEHSFDAAHFLKDYCGKCHNLHGHRWRVVVELKGETLSEETQTRGMMIDFSDLKEVVKTLCDHLDHCLIYETGSLKERTKEALMDEDFRLVEVPFRPTAENFARYFYEEITAKKLPVHRVEVYETPNNCAAYEGH

SEQ ID NO: 20233 - protein, 139 aa, unidentified
  source 1..139: note = [Eubacterium] eligens
  REGION 1..139: note = tr|A0A174YSY0|A0A174YSY0_9FIRM 6-carboxy-5,6,7,8-tetrahydropterin synthase; OS = [Eubacterium] eligens OX=39485 GN=queD_2 PE=3 SV=1
MYILKTEASFDSAHFLAGYNGKCSNLHGHRWKIVLEVQTEELKEDVQHKGMYVDFGELKKDLRNIADSMDHALIIERNSLKETTFEALKSENFKIIELDFRPTAENMAKYFYEKIKILGYNMRAVTVYETPANSATYME

SEQ ID NO: 20234 - protein, 154 aa, unidentified
  source 1..154: note = [Eubacterium] eligens
  REGION 1..154: note = tr|A0A414DID3|A0A414DID3_9FIRM 6-pyruvoyl tetrahydrobiopterin synthase OS=[Eubacterium] eligens; OX = 39485 GN=DW007_05290 PE=4 SV=1
MAVNMYREYRLKFYLNMRHYIIINEVKGETHPHTWEFALDIKFSRNLFVEFNIFEQGISQFLEKYQNKILNEAEPFDAMMPTLENVTDYFAEEFFKIIYKTGGMLTRVEASETPTRSYIVNMAEQERNSILNKKADEKIISEVMDAVLDDIVKQ

SEQ ID NO: 20235 - protein, 139 aa, Eubacterium eligens
  REGION 1..139: note = tr|C4Z7K7|C4Z7K7_EUBE2 6-carboxy-5,6,7,8-tetrahydropterin synthase OS=Eubacterium eligens (strain ATCC 27750 / VPI C15-48) OX=515620; GN = EUBELI_20139 PE=3 SV=1
MYYLKTESSFDSAHFLKGYDGKCRNLHGHRWRVVVEIAADQLKDEGQTRGMLVDFSDLKNALKDICDDFDHSLIYEKGSLKGATIAALQAEEFRMIEVGFRPTAEHFSKYFYELMSAKGFPIHRVEVYETPNNVAAYEE

SEQ ID NO: 20236 - protein, 139 aa, Eubacterium eligens
  REGION 1..139: note = tr|R5ZWW4|R5ZWW4_9FIRM 6-carboxy-5,6,7,8-tetrahydropterin synthase OS=Eubacterium eligens CAG:72 OX=1263077 GN=BN765_01345 PE=3 SV=1
MYYLKTESSFDSAHFLKGYDGKCRNLHGHRWRVVVEIAADQLKDEGQTRGMLVDFSDLKNALKDICDDFDHSLIYEKGSLKGATIAALQAEEFRMIEVGFRPTAEHFSKYFYELMSVKGFPIHRVEVYETPNNVAAYEQ

SEQ ID NO: 20237 - protein, 142 aa, Eubacterium hallii
  REGION 1..142: note = tr|R6G2K0|R6G2K0_9FIRM Queuosine biosynthesis protein QueD OS=Eubacterium hallii CAG:12 OX=1263078; GN = BN476_01987 PE=4 SV=1
MYILETEQSFDSAHFLSGYEGKCSNLHGHRWRVVARIAMDELNKEGQTRDMVIDFGDFKNALKKLTDALDHSFIFETGSLKERTVAALKDEGFLLHEVPFRPTAEQFSRYFYEQLKGLNFPVYDISVYETPTNCSTYQEASL

SEQ ID NO: 20238 - protein, 118 aa, Eubacterium minutum
  REGION 1..118: note = tr|A0A223B153|A0A223B153_9FIRM 6-carboxy-5,6,7,8-tetrahydropterin synthase OS=Eubacterium minutum ATCC 700079 OX=888721 GN=AXF21_02890 PE=3 SV=1
MILVKEFEFDAAHNLINYHGKCERLHGHTYKLVVKLKGKPDHEDMVYDFVDLKRLVKKEVIEEFDHHYINDFIEQPTAENIAVYIWDKLEPKVRTDNACLHEIEVWETKTSGIVYNGE

SEQ ID NO: 20239 - protein, 119 aa, Eubacterium nodatum
  REGION 1..119: note = tr|W2BZU8|W2BZU8_9FIRM 6-carboxy-5,6,7,8-tetrahydropterin synthase OS=Eubacterium nodatum ATCC 33099 OX=1161902 GN=queD PE=3 SV=1
MILIKEFEFDAAHNLINYHGKCERLHGHTYKLVVKLKGTRDHEDMVYDFVDLKNLVKKEILEDFDHHYINDFIKQPTAENIAVYIWDKLEPKVKTDNSRLYEIEVWETKTSGIVYNGEE

SEQ ID NO: 20240 - protein, 140 aa, Eubacterium oxidoreducens
  REGION 1..140: note = tr|A0A1G6A6D2|A0A1G6A6D2_EUBOX 6-carboxy-5,6,7,8-tetrahydropterin synthase OS=Eubacterium oxidoreducens OX=1732 GN=SAMN02910417_00279 PE=3 SV=1
MYFLKTEQSFDAAHFLSGYDGKCKNLHGHRWRVVAQISGECLNDDTQTRGMLVDFGELKSELKKLCDDFDHSFIYEKGSLKEKTVVALREEDFRMVEVDFRPTAECFAKYFFDKMKERGYAPHRIEVYETVNNCAAYEES

SEQ ID NO: 20241 - protein, 110 aa, Eubacterium pyruvativorans
  REGION 1..110: note = tr|A0A1I7FDQ9|A0A1I7FDQ9_9FIRM 6-carboxy-5,6,7,8-tetrahydropterin synthase OS=Eubacterium pyruvativorans OX=155865 GN=SAMN05216508_10276 PE=3 SV=1
MYRIHKRLEISAAHRLDLNYESKCSRIHGHNWMIDVYMQSEKLDENGMVCDFTLIKQRVKDRLDHRFLNEVLDVNPTAENIAKWIADQLGEKCYLVRVKESEGNTAEYER

SEQ ID NO: 20242 - protein, 139 aa, Eubacterium ramulus
  REGION 1..139: note = tr|A0A4Q5CVD9|A0A4Q5CVD9_EUBRA 6-carboxy-5,6,7,8-tetrahydropterin synthase OS=Eubacterium ramulus OX=39490 GN=EAI88_09665 PE=3 SV=1
MYKIRIEESFDSAHFLAGYDGKCSNLHGHHWRIVMEAKADKLHEEGQLRGMVTDFGDIRRDLKELADFYDHALIYESGTLKSLTIQALKDEQFRLIEVPFRPTAENFAKFFYEKMTLKGYAVQEIAVYETPNNCAVYQM

SEQ ID NO: 20243 - protein, 139 aa, Eubacterium ramulus
  REGION 1..139: note = tr|U2R0X2|U2R0X2_EUBRA 6-carboxy-5,6,7,8-tetrahydropterin synthase OS=Eubacterium ramulus ATCC 29099 OX=1256908 GN=HMPREF0373_01368 PE=3 SV=1
MYKIRIEESFDSAHFLAGYDGKCSNLHGHRWRIVMEAKADKLHEEGQLRGMVTDFGDIRRDLKELADFYDHALIYESGTLKSLTIQALKDEQFRLIEVPFRPTAENFAKFFYEKMTLKGYAVQEIAVYETPNNCAVYQM

SEQ ID NO: 20244 - protein, 142 aa, Eubacterium ruminantium
  REGION 1..142: note = tr|A0A1H5Y9V8|A0A1H5Y9V8_9FIRM 6-carboxy-5,6,7,8-tetrahydropterin synthase OS=Eubacterium ruminantium OX=42322 GN=SAMN04487934_11051 PE=3 SV=1
MYILSTKSDFDSAHFLKDYDGKCANIHGHRWTVSIDVEGSKLEESGSYRGMVVDFSELKKSLRKLTKALDHAFIMEEGSLKASTRAALEEEGFKLITFPFRPTAENFAKYFYDKMSEAGYKVAKVSVYETPNNIASYVPDKN

SEQ ID NO: 20245 - protein, 141 aa, Eubacterium ruminantium
  REGION 1..141: note = tr|A0A1T4Q7M2|A0A1T4Q7M2_9FIRM 6-carboxy-5,6,7,8-tetrahydropterin synthase OS=Eubacterium ruminantium OX=42322 GN=SAMN02745110_02289 PE=3 SV=1
MYILSTKSDFDSAHFLKGYDGKCANIHGHRWTVSVDVKGNKLIESGSYRGMVVDFSDLKGSLKKLTKNLDHSLIIEENSLKEKTMEALEEEGFRIIKFPFRPTAENFAKYFYDAMSKEGYEVVKVSVYETPNNVATYMPGE

SEQ ID NO: 20246 - protein, 140 aa, Eubacterium sp.
  REGION 1..140: note = tr|A0A1Y4UZY6|A0A1Y4UZY6_9FIRM 6-carboxy-5,6,7,8-tetrahydropterin synthase OS=Eubacterium sp. An11 OX=1965542 GN=B5E53_15925 PE=3 SV=1
MYILETEQAFDSAHFLSGYEGKCRNLHGHRWRIVARIAAEELSRERQTRDMVIDFGDFKDALKALTEELDHCLIIETGSLRPKTMEALKEEDFRIVELPFRPTAEQLSRYFYMRLKQYSFPVYSVSVYETPNNCATYQES

SEQ ID NO: 20247 - protein, 152 aa, Eubacterium sp.
  REGION 1..152: note = tr|A0A351PUP7|A0A351PUP7_9FIRM 6-pyruvoyl tetrahydrobiopterin synthase OS=Eubacterium sp. OX=142586; GN = DCX21_04755 PE=4 SV=1
MANKIFREYRFKFYLNAQHFVLINGKKGSTHPHTWEFTLDILINRNIFVEFGEFEKKIEEYLERYQDKLMNDVAPFDVVIPTLENMSDIFAKDFSEEIREMGARLVRLEGKETPTRGYIVDFTETDEYMNDIKDFSHDAVIDIIDSVIDATL

SEQ ID NO: 20248 - protein, 139 aa, Eubacterium ventriosum; identical to SEQ ID NO: 18296
  REGION 1..139: note = tr|A0A414R2B2|A0A414R2B2_9FIRM 6-carboxy-5,6,7,8-tetrahydropterin synthase OS=Eubacterium ventriosum OX=39496 GN=queD PE=3 SV=1

SEQ ID NO: 20249 - protein, 125 aa, unidentified
  source 1..125: note = Euhalothece natronophila
  REGION 1..125: note = tr|A0A5B8NU95|A0A5B8NU95_9CHRO 6-carboxy-5,6,7,8-tetrahydropterin synthase OS=Euhalothece natronophila Z-M001 OX=522448 GN=queD PE=3 SV=1
MDQWVIYKEFYFEAAHQLPNHNGKCRRLHGHSWVGRVYLQGKTLHQHGSQQGMLMDYGEIKKYIQPLLDHYLDHYYLNETTGLENPTSEEIAKWIFNQLEKAGCPNLYAVEIQETCTSGCKYIKD

SEQ ID NO: 20250 - protein, 290 aa, unidentified
  source 1..290: note = Euhalothece natronophila
  REGION 1..290: note = tr|A0A5B8NKA4|A0A5B8NKA4_9CHRO 6-pyruvoyl tetrahydropterin synthase OS=Euhalothece natronophila Z-M001 OX=522448 GN=FRE64_05880 PE=4 SV=1
MKCIINRRAQFSAAHRYWLPELSEAENQAQFGEGSRFPGHGHNYVLYVSLEQDIDQYGMVMNLSEVKPVIREKITSQLNNAYLNDVWEEFSETLPTTENVARVIWQRLSPDLPLVNIRLFEHPELWADYQGKDMEASLTVGTHFSAAHRLARPDLSYEENCKIYGKCARPHGHGHNYHLEVTVTGEIHPRTGMVVNLEKLHQVLEDEVVEPFDHYFLNEDIPYFAEVVPTAENIAIYIAQLLRQPIEELGVTLERVKLIESPNNSCEINCRSLFTETTNEATREPALASY

SEQ ID NO: 20251 - protein, 131 aa, unidentified
  source 1..131: note = Euhalothece sp.
  REGION 1..131: note = tr|A0A2K3AN67|A0A2K3AN67_9CHRO 6-pyruvoyl tetrahydropterin synthase OS=Euhalothece sp. KZN 001; OX = 1884791 GN=BEN50_12415 PE=4 SV=1
MQLSDPPYALRIERELIAQHYLTVPDPGPEGQIHSHRYTVGVTLLADELNRYGYVIDIDAFTERVEAIADRYRDTLLNDHADAEATNPSVEWFATVFADELAATVESDRIVGIDLEVHEDDIASVRYRRTV

SEQ ID NO: 20252 - protein, 290 aa, unidentified; identical to SEQ ID NO: 19666
  source 1..290: note = Euhalothece sp.
  REGION 1..290: note = tr|A0A2K2ZV82|A0A2K2ZV82_9CHRO 6-pyruvoyl tetrahydropterin synthase OS=Euhalothece sp. KZN 001; OX = 1884791 GN=BEN50_17595 PE=4 SV=1

SEQ ID NO: 20253 - protein, 438 aa, Euzebya sp.; identical to SEQ ID NO: 7997
  REGION 1..438: note = tr|A0A346XS57|A0A346XS57_9ACTN GTP cyclohydrolase FolE2 OS=Euzebya sp. DY32-46 OX=1608957 GN=folE2 PE=3 SV=1

SEQ ID NO: 20254 - protein, 150 aa, unidentified
  source 1..150: note = Euzebyella marina
  REGION 1..150: note = tr|A0A3G2LBB6|A0A3G2LBB6_9FLAO 6-carboxytetrahydropterin synthase OS=Euzebyella marina; OX = 1761453 GN=D1013_00360 PE=4 SV=1
MANIRITKQFNFETGHALFGYDGKCRNVHGHSYKLSVTVIGRPITDTSHVKLGMVIDFGDLKKIVKEEIVDKFDHATVFNKNTPHVELAQELTDRGHNVILADYQPTSENMVIDFAKKIGDRLPENIKLHSLKLQETDTSYAEWYASDNS

SEQ ID NO: 20255 - protein, 135 aa, unidentified
  source 1..135: note = Euzebyella marina
  REGION 1..135: note = tr|A0A3G2L472|A0A3G2L472_9FLAO 6-carboxy-5,6,7,8-tetrahydropterin synthase OS=Euzebyella marina OX=1761453 GN=D1013_06570 PE=3 SV=1
MKVKVSRKAHFNAAHRLFRKDWDEEKNDSVFGKCNNPNFHGHNYELVVSVTGEIDPATGFVIDMKVLKDLIYEHVEEAFDHKNLNIEVAEFKDLNPTAENIAVVIWQKLRPYIETDHDLEIILYETPRNFVTFSG

SEQ ID NO: 20256 - protein, 139 aa, Ewingella americana
  REGION 1..139: note = tr|A0A085GNV2|A0A085GNV2_9GAMM 6-carboxy-5,6,7,8-tetrahydropterin synthase OS=Ewingella americana ATCC 33852 OX=910964 GN=queD PE=3 SV=1
MAPTRDFRYYAAFFEQRDSAMTTTLFKDFQFEAAHHLPHVPAGHKCGRLHGHSFTVRLEITGEVDPHTGWVMDFADLKAAFAPTLDRLDHYNLNDIPGLENPTSEVLAEWIWNEMKPKLPLLSAVRVKETCTAGCVYKG

SEQ ID NO: 20257 - protein, 346 aa, Ewingella americana
  REGION 1..346: note = tr|A0A502GGR2|A0A502GGR2_9GAMM Uncharacterized protein OS=Ewingella americana OX=41202 GN=EAH77_16385; PE = 4 SV=1
MTTSTIFFANQNCIDFGFLRADGCPIGYSVNPSFTLTGRIEEKEQVVIDFSDAKKKLKQFMDDSFDHRLVVFKNADGSLLGVESTETNAENRTVFHLKNALGRIELPEDAFCIVDIVGESPDVDSFVQNNLQIFLKDYCEKALLAHYGFAVEVQVKMATLMMSYGDLNNTVFPTLKFNYVHGLKNSTSYGCKNIGHGHLSYLHFEHDIKLPDQHSPDNKLVIEAFKEYSHLEKVLTNCIFVKRENLDHQQNGDEEFMVISYSTEERGFMEMTLNVNELEHYPDVNIHICDKETTIENLAERISEIIARECPNLSGFVNQLFVSEGLTKGCVYDRSAHQVKFGQKAA

SEQ ID NO: 20258 - protein, 151 aa, Exiguobacterium antarcticum
  REGION 1..151: note = tr|K0AH61|K0AH61_EXIAB Queuosine biosynthesis protein QueD OS=Exiguobacterium antarcticum (strain B7); OX = 1087448 GN=Eab7_2718 PE=4 SV=1
MKFNYEAPETVERPTGDSLIYTTSRVMIVKKLTFDAAHHLYDYDGKCRALHGHTYHVDLGISGFLDHRGMTLDFGDLKKIFKEHLEPLLDHRYLNESLPYMNTTAENMSAWIFETLGKHLPDERGLRVEFVKLYETPTAFAEVRREWMLES

SEQ ID NO: 20259 - protein, 151 aa, Exiguobacterium aurantiacum
  REGION 1..151: note = tr|A0A377FY09|A0A377FY09_9BACL 6-carboxy-5,6,7,8-tetrahydropterin synthase; OS = Exiguobacterium aurantiacum OX=33987 GN=queD PE=4 SV=1
MKNAPFLAPTSVEAKQDGSLIYCKHRVQIVKEVTFDAAHHLFDYDGKCRALHGHTYKLQMGISGFLDNRGMTLDFGDLKAIFKEELEPYLDHRYLNESLPYMNTTAENMCYWIFEQLAKHLPDERDVRVEFVKLYETPTSYAEFRREWLVD

SEQ ID NO: 20260 - protein, 151 aa, unidentified
  source 1..151: note = Exiguobacterium chiriqhucha
  REGION 1..151: note = tr|U1LF40|U1LF40_9BACL 6-pyruvoyl tetrahydrobiopterin synthase OS=Exiguobacterium chiriqhucha RW-2 OX=1345023 GN=M467_01410 PE=4 SV=1
MKNAPFLAPTSVEAKQDGSLIYCPHRVQIVKEVTFDAAHHLFDYDGKCRALHGHTYKLQMGISGFLDNRGMTLDFGDLKAIFKEELEPYLDHRYLNESLPYMNTTAENMCYWIFEQLAKHLPDERDVRVEFVKLYETPTSYAEFRREWLVD

SEQ ID NO: 20261 - protein, 151 aa, unidentified
  source 1..151: note = Exiguobacterium enclense
  REGION 1..151: note = tr|A0A0V8GDR7|A0A0V8GDR7_9BACL 6-pyruvoyl tetrahydrobiopterin synthase OS=Exiguobacterium enclense; OX = 1017277 GN=AS033_12300 PE=4 SV=1
MTFNYEAPETVERPTGDSLIYTKSRVMIVKKLTFDAAHHLYDYDGKCRALHGHTYHVDMGISGFLDHRGMTLDFGDLKKIFKTHLEPLLDHRYLNESLPYMNTTAENMAAWIFETLGQHLPDERGLRVEFVKLYETPTAFAEVRREWMNEA

SEQ ID NO: 20262 - protein, 151 aa, Exiguobacterium mexicanum
  REGION 1..151: note = tr|A0A099DEP0|A0A099DEP0_9BACL 6-pyruvoyl tetrahydrobiopterin synthase OS=Exiguobacterium mexicanum; OX = 340146 GN=JY98_12380 PE=4 SV=1
MKNAPFLAPTSVEAKQDGSLIYCPHRVQIVKEVTFDAAHHLFDYDGKCRALHGHTYKLQMGISGFLDNRGMTLDFGDLKAIFKEELEPYLDHRYLNESLPYMNTTAENMCYWIFEQLAKHLPDEHDVRVEFVKLYETPTSYAEFRREWLVD

SEQ ID NO: 20263 - protein, 151 aa, Exiguobacterium sibiricum
  REGION 1..151: note = tr|B1YFM7|B1YFM7_EXIS2 Queuosine biosynthesis protein QueD OS=Exiguobacterium sibiricum (strain DSM 17290 / JCM 13490 / 255-15) OX=262543 GN=Exig_2906 PE=4; SV = 1
MKFNYEAPETVERPTGDSLIYTKSRVMIVKKLTFDAAHHLYDYDGKCRALHGHTYHVDLGISGFLDHRGMTLDFGDLKKIFKEHLEPLLDHRYLNESLPYMNTTAENMSAWIFETLGKHLPDERGLRVEFVKLYETPTAFAEVRREWMLES

SEQ ID NO: 20264 - protein, 151 aa, Exiguobacterium sp.
  REGION 1..151: note = tr|S3FEQ8|S3FEQ8_9BACL Queuosine biosynthesis protein QueD OS=Exiguobacterium sp. S17 OX=856854 GN=queD; PE = 4 SV=1
MKHAPFLAPTSVEAKQDGSLIYCPHRVQIVKEVTFDAAHHLFDYDGKCRALHGHTYKLQMGISGFLDNRGMTLDFGDLKAIFKEELEPYLDHRYLNESLPYMNTTAENMCYWIFDQLAKHLPDERDVRVEFVRLYETPTSYAEFRREWLVD

SEQ ID NO: 20265 - protein, 151 aa, Exiguobacterium sp.; identical to SEQ ID NO: 20260
  REGION 1..151: note = tr|A0A4R0ZV22|A0A4R0ZV22_9BACL 6-carboxytetrahydropterin synthase QueD OS=Exiguobacterium sp. IPBC4 OX=2510946 GN=queD PE=4 SV=1

SEQ ID NO: 20266 - protein, 139 aa, unidentified
  source 1..139: note = Fabibacter misakiensis
  REGION 1..139: note = tr|A0A1E5T2R7|A0A1E5T2R7_9BACT 6-carboxytetrahydropterin synthase QueD OS=Fabibacter misakiensis OX=1563681 GN=BFP71_06025 PE=4 SV=1
MVYVSRKEHFNAAHKLYNPNWSEEKNQEVFGPCANANWHGHNFELITTVKGLPDPDTGFVVDLKALSVLIKNEVIEKLDHKNLNIDVDFMQGKMASCEILVMEIWKILAPKVNEITKEGGLHSLKLYETPRNFVEYFGE

SEQ ID NO: 20267 - protein, 135 aa, unidentified
  source 1..135: note = Fabibacter misakiensis
  REGION 1..135: note = tr|A0A1E5SYD3|A0A1E5SYD3_9BACT 6-pyruvoyl tetrahydrobiopterin synthase OS=Fabibacter misakiensis; OX = 1563681 GN=BFP71_11630 PE=4 SV=1
MKVAVYRKEHFNAAHRLHNPNWSDEKNEEIFGKCNNKYYHGHNYELIVKVSGESDPDTGYVYDMKLLSDLIKEHVADKFDHKNLNLDVEEFKSLNPTAENIVVVIYDILRNKIEEHLDLKVTLYETERNYVEYPA

SEQ ID NO: 20268 - protein, 135 aa, unidentified
  source 1..135: note = Fabibacter pacificus
  REGION 1..135: note = tr|A0A1I0R693|A0A1I0R693_9BACT 6-carboxy-5,6,7,8-tetrahydropterin synthase OS=Fabibacter pacificus OX=1267423 GN=SAMN05216290_3139 PE=3 SV=1
MKVAVFRKEHFNAAHRLHNADWSDEMNQKVFGKCNNPNYHGHNYELVVKLTGETNPETGYVYDMKVLSDIIKEHVTKRFDHKNLNLDVEEFKTLNPTAENIAVVIYNILREQIEADYDLKVTLYETERNYVEYPA

SEQ ID NO: 20269 - protein, 138 aa, unidentified
  source 1..138: note = Fabibacter pacificus
  REGION 1..138: note = tr|A0A1I0M3M0|A0A1I0M3M0_9BACT 6-pyruvoyltetrahydropterin/6-carboxytetrahydropterin synthase OS=Fabibacter pacificus OX=1267423; GN = SAMN05216290_0014 PE=4 SV=1
MVYVSRKEHFNAAHKLYNPNWSLEKNVEVFGPCANANWHGHNFELITTVKGEPNPETGFVIDLKQLSTLIRREVIDKLDHKNLNMDVDFLEGKMASCEILVMEIWKILAPKIKKISETGELHSLKLYETPRNYVEYFG

SEQ ID NO: 20270 - protein, 135 aa, Fabibacter sp.
  REGION 1..135: note = tr|A0A1E5SQP5|A0A1E5SQP5_9BACT 6-carboxy-5,6,7,8-tetrahydropterin synthase OS=Fabibacter sp. 4D4 OX=1889784 GN=BFP97_07835 PE=3 SV=1
MKVAVFRKEHFNAAHRLHNPNWSEEKNEQVFGKCNNKYYHGHNYELIVKVSGEPDPETGYVYDMKVLSDLIKENVSDKLDHKNLNLDVPEFENLNPTAENIVVVIYNILREKIEPELDLKVTLYETERNYVEYPA

SEQ ID NO: 20271 - protein, 139 aa, Fabibacter sp.
  REGION 1..139: note = tr|A0A1E5SWI5|A0A1E5SWI5_9BACT 6-carboxytetrahydropterin synthase QueD OS=Fabibacter sp. 4D4 OX=1889784 GN=BFP97_18590 PE=4 SV=1
MVYVSRKEHFNAAHKLYNPNWSLEKNQEVFGPCANVNWHGHNFELITTVKGNPDPDTGFVVDLKALSVLINKEVIDKLDHKNLNLDVDFMKGKMASCEILVMEIWRILAPKVKELANDGELHSLKLYETPRNFVEYLGE

SEQ ID NO: 20272 - protein, 187 aa, Faecalibacterium sp.
  REGION 1..187: note = tr|A0A1Y4SVM0|A0A1Y4SVM0_9FIRM Rubredoxin; OS = Faecalibacterium sp. An122 OX=1965551 GN=B5E67_14815; PE = 4 SV=1
MRSITTLDLQYAHRFYGFKGEAQYLHGHTGVLTIEVEDTVEPGVNMVFPCNEIQKTAWSVLKNFDHALILRQDDPLLPAILKVYEEQGIRNGAPQNQMKGPAFQTELATAYPECRLVVTKETMTVEGMIKIVYDLLKDKLNIAKITFSSGVNAASQEFTPQNVIDRCPLCGIALNENGVCPKCGYKK

SEQ ID NO: 20273 - protein, 144 aa, Falsibacillus pallidus
  REGION 1..144: note = tr|A0A370GIG9|A0A370GIG9_9BACI 6-carboxy-5,6,7,8-tetrahydropterin synthase; OS = Falsibacillus pallidus OX=493781 GN=DFR59_104215 PE=3; SV = 1
MIQQIYPSPAHNYSYELNKDFQFASAHYVPDERAGKCMNVHGHTYFANVTIAGDLLDETGFLINFQKIKQLIHDRFDHSLLNEDGLFSDENAEDYPTTEVVARKVAEIIQEHLDTLSNKPVCLQVFLRETPTSYVIYRPKRGNS

SEQ ID NO: 20274 - protein, 146 aa, Falsibacillus sp.
  REGION 1..146: note = tr|A0A3L7JXB7|A0A3L7JXB7_9BACI 6-carboxy-5,6,7,8-tetrahydropterin synthase; OS = Falsibacillus sp. GY 10110 OX=2478915 GN=queD PE=3 SV=1
MIQQIYPSVDHGFSFELNKDFQFAAAHYIPDERAGKCHQVHGHTYFANVTIVGDQLDDTGFLVNFQQIKKLIHDRFDHTLLNDDSLFSDEAPEQYPTTEIVAQSIFEVIQNHLDELENKPRCVQVFLRETPTSYVVYRPKRGGKNE

SEQ ID NO: 20275 - protein, 118 aa, unidentified
  source 1..118: note = Falsochrobactrum sp.
  REGION 1..118: note = tr|A0A316JCG0|A0A316JCG0_9RHIZ 6-carboxy-5,6,7,8-tetrahydropterin synthase; OS = Falsochrobactrum sp. HN4 OX=2201899 GN=queD PE=3 SV=1
MFRITKEFHFSASHQLTELPADHQCARLHGHNYIVVVELCADKLDQHGFVRDYHELAPLKHYIDDAFDHRHLNEVLGHNRVTAECLARHFYDWCRVRWPEISAVRVSETPKTWAEYRL

SEQ ID NO: 20276 - protein, 118 aa, unidentified
  source 1..118: note = Fermentimonas caenicola
  REGION 1..118: note = tr|A0A098C2D0|A0A098C2D0_9PORP 6-carboxy-5,6,7,8-tetrahydropterin synthase; OS = Fermentimonas caenicola OX=1562970 GN=EWM46_02095 PE=3; SV = 1
MYKISKEFAFSAAHSLFGLPEEHPCSRLHGHNYVVTVHLKADKLNPQGFVRDYNELSFVKDYIDKNLDHRNLNDIMAPLNSSAENIAKMLFEAFKPKLPELYAVEVSETPKTSAIYEP

SEQ ID NO: 20277 - protein, 117 aa, Ferrimicrobium acidiphilum
  REGION 1..117: note = tr|A0A0D8FT82|A0A0D8FT82_9ACTN 6-carboxy-5,6,7,8-tetrahydropterin synthase; OS = Ferrimicrobium acidiphilum DSM 19497 OX=1121877 GN=queD; PE = 3 SV=1
MEIFKEFTFEAAHRLPNVSEGHKCAQLHGHSYRVEVHVSGQVDAVTGWVMDFADITEAFAPIRSQLDHHLLNEIEGLTNPTSEHLAIWIWSQLKNLLPLSSIVVRETPTSGSIYRGD

SEQ ID NO: 20278 - protein, 122 aa, Ferrimonas balearica
  REGION 1..122: note = tr|E1SMP8|E1SMP8_FERBD 6-carboxy-5,6,7,8-tetrahydropterin synthase OS=Ferrimonas balearica (strain DSM 9799 / CCM 4581 / PAT) OX=550540; GN = Fbal_1383 PE=3 SV=1
MSVEIYKEFTFEAAHKLPHVPAGHKCGRLHGHSFLVRISVAGDVDPHTGWVMDFAELKAHFKPIWERLDHHYLNDIPGLENPTSEVLAKWVWAELKPSLPQLSEVAIKETCTSGCIYRGPDA

SEQ ID NO: 20279 - protein, 293 aa, Ferrimonas balearica
  REGION 1..293: note = tr|E1SVZ4|E1SVZ4_FERBD Uncharacterized protein; OS = Ferrimonas balearica (strain DSM 9799 / CCM 4581 / PAT); OX = 550540 GN=Fbal_3246 PE=4 SV=1
MKLFVNDLTVIDSSVVHVERGIVGESWIVDLQLSGDLNNESMVLDFGIVKKQIKSLIDELVDHCLLVPASASSLEFCQEPERTWVKNNHSRHATFYVQGPEQAFCFIDADSIDEQSVSLFLEESILPQLPSNVQGLKLTLRSEQIDEPYYHYSHGLKKHSGNCQRIAHGHRSRVRVFNDGQLDRELQTLWAKRWEDIYLITEDDIAEVEAMSMHAQDIRLENAIGASYVSPQGYFEILLPVERVEVMVADSTVECIAEYIATRLAELRPNHKIEVHAFEGVGKGAIAEQILIV

SEQ ID NO: 20280 - protein, 291 aa, Ferrimonas marina
  REGION 1..291: note = tr|A0A1M5RJF1|A0A1M5RJF1_9GAMM 6-pyruvoyl-tetrahydropterin synthase OS=Ferrimonas marina; OX = 299255 GN=SAMN02745129_1642 PE=4 SV=1
MKLFVNDLTVIDSSFVDTTRGIVGESWIVDLQLTGGLNEESMVLDFGVVKKQIKALIDDLADHRLIVPTQAPELALHRDVDATWVSNSATRQGSFFVQGPEQAFCFIEAPRIDEQSVAQYLERMILPQLPSNVKAMSLSLRSEAIDEPYYHYSHGLKKHSGNCQRIAHGHRSRIRIYKDGQLDPQLQALWAERWEDIYLITEEDIVELDTLSEGVQGLPAEDLICASYQSPQGHFEIALPRERSEVMTTDSTVERIAEYIAEQVAQMQPGHAIEVYAYEGVSKGAIAESRV

SEQ ID NO: 20281 - protein, 119 aa, unidentified
  source 1..119: note = Ferrimonas sediminum
  REGION 1..119: note = tr|A0A1G8R8I6|A0A1G8R8I6_9GAMM 6-carboxy-5,6,7,8-tetrahydropterin synthase OS=Ferrimonas sediminum OX=718193 GN=SAMN04488540_10593 PE=3 SV=1
MSTEIYKEFHFEAAHHLPNVPEGHKCGRLHGHSFLVRIYISGEVDAHTGWIMDFGDLKAAFKPIYDRLDHYYLNEIPGLENPTSEVLARWIWNELKPTLPQLSMVEIKETCTSGCRYRG

SEQ ID NO: 20282 - protein, 120 aa, Ferrimonas sp.
  REGION 1..120: note = tr|A0A4V5NUX7|A0A4V5NUX7_9GAMM 6-carboxy-5,6,7,8-tetrahydropterin synthase OS=Ferrimonas sp. IMCC35001 OX=2569538 GN=queD PE=3 SV=1
MSTEIYKEFYFEAAHKLPHVPEGHKCGRLHGHSFLVRIYIQGQVDAHTGWIMDFADLKAAFKPIYDRLDHHYLNEIPGLENPTSEVLARWVWEQLKPALPELSMVEIKETCTAGCRYRGE

SEQ ID NO: 20283 - protein, 120 aa, Ferrimonas sp.
  REGION 1..120: note = tr|A0A4U1BSV7|A0A4U1BSV7_9GAMM 6-carboxy-5,6,7,8-tetrahydropterin synthase OS=Ferrimonas sp. IMCC35002 OX=2569539 GN=queD PE=3 SV=1
MSTEIYKEFYFEAAHRLPHVPEGHKCGRLHGHSFLVRIYISGEVDPHTGWIMDFGDLKATFKPIYDRLDHHYLNDIPGLENPTSEVLAKWIWNELKPLLPQLSMVEIKETCTAGCRYRGE

SEQ ID NO: 20284 - protein, 148 aa, unidentified
  source 1..148: note = Ferriphaselus amnicola
  REGION 1..148: note = tr|A0A2Z6GAK9|A0A2Z6GAK9_9PROT 6-carboxy-5,6,7,8-tetrahydropterin synthase; OS = Ferriphaselus amnicola OX=1188319 GN=OYT1_ch0770 PE=3; SV = 1
MQITRRLEFDAGHRIPNHNSQCRHLHGHRYALEITLSGDIITTEGVSEQGMVMDFSEVKRIANEVVVEVWDHAFLVYRGDRAVLDFLETMPGHKTVVLDVPPTAEHLAMIAFNLLNSAYRDTYGNHLRLERVRLYETPNNWADHLRTE

SEQ ID NO: 20285 - protein, 346 aa, unidentified
  source 1..346: note = Ferrovum sp.
  REGION 1..346: note = tr|A0A149VWN9|A0A149VWN9_9PROT 6-carboxy-5,6,7,8-tetrahydropterin synthase OS=Ferrovum sp. Z-31 OX=1789004 GN=queD PE=4 SV=1
MKAEATESAGARHDWQARGFEASRRVPGAADLRLQGRHGHSFRVEVCHPLQGESSGGLGDLLSNVVERLDYQDLDLLFSQRHDGEIWHWIEKQLDLAPGSHGCLASGPRQGVVRDTAGRLHGWMRDRFESAHFLPNVPAGHKCGRLHGHGFEAVLFFPWEEGQVMQLKTQWARLHAQLHGQCLNELRGLDIPTSEILASWIWSRLQAQGQVLTQVTVYETASSGSSFDGTRYRIWKEQSFDSALRSPEGGLWGHTYRLRLGLSAPLDEMMGWTQDFGEVKRLFDPLYRELDHQPLHDKVPAGTTLALLDWIVARTRPLLPALDRLDLYDTPGSGKVWTLPIHGPLR

SEQ ID NO: 20286 - protein, 331 aa, unidentified
  source 1..331: note = Ferrovum sp.
  REGION 1..331: note = tr|A0A149VSQ1|A0A149VSQ1_9PROT 6-carboxy-5,6,7,8-tetrahydropterin synthase OS=Ferrovum sp. PN-J185 OX=1356306 GN=queD PE=4 SV=1
MVQELYLSSAGFEAARHSALTEGAKPILHGHSFRVDCVSYECMSPQLTQLCTSLNLTHLNDKLTDTNNESLMTWFIKQLGHENIKRLQIWSGPHYGITFVSGYQQNTWFRSRFEAAHFLPQVGKDHKCGRLHGHGFEVLIHCALQQYEKVYAYWQQLHNQLHHQVLNEINGLTNPTSEMIAYWIWQQFTQGGLSITEVTVFETRSTGSVFNGRDFYIWKEFSFDSATRLPNSQQIVGHTYLLRVGLSSSLDKVFQWVEDFGDVKKVFSPLMNQLDHQPLQDVFGQGQLQDCLHAIEKETLGLLPKIARVSLWQTPSEGLRRNYSELPTWVE

SEQ ID NO: 20287 - protein, 136 aa, Ferruginibacter sp.
  REGION 1..136: note = tr|A0A3M9NRP5|A0A3M9NRP5_9BACT 6-carboxytetrahydropterin synthase OS=Ferruginibacter sp. BO-59 OX=2294116 GN=EFY79_01290 PE=4 SV=1
MIFLTRVEHFNAAHKLYNEAWSKEKNEEEFGKCANENWHGHNYDLHVTVKGEVSADTGFVINASTLGKLINKFVIEEIDHKNLNVDVAMMKGKLCSAENLAIAIWQQLSLHLPPGVILHSVKLYETPRIFVEYFGS

SEQ ID NO: 20288 - protein, 138 aa, Ferruginibacter sp.
  REGION 1..138: note = tr|A0A3M9NSD5|A0A3M9NSD5_9BACT 6-carboxy-5,6,7,8-tetrahydropterin synthase; OS = Ferruginibacter sp. BO-59 OX=2294116 GN=EFY79_01295; PE = 3 SV=1
MNKKVSVFRKQHFCAAHRLNNPEWDVNKNVAVFGKCNNPNYHGHNYELVVKVTGEPAPDTGFVIDLKLLSDLIKQHVTNKLDHRNLNLDIAEFSHMNPTTENIAILIYNILREKIDDELQLQVRLYETERNFVEYPAA

SEQ ID NO: 20289 - protein, 151 aa, Fervidicella metallireducens
  REGION 1..151: note = tr|A0A017RVB2|A0A017RVB2_9CLOT Precorrin-3B C17-methyltransferase OS=Fervidicella metallireducens AeB; OX = 1403537 GN=Q428_11085 PE=4 SV=1
MDNISVTKEFTWDMAHMLAHHEGMCQNLHGHTYKMQVEIVRFTGNLIKGSDPSKGMVLDFKDLKDIVNERIVKELDHAFMYWVNSPDKTEHEIARILIESGKKVVKVDYRPTAEEMALNFLRILRDEFKKFDVDVKSVKVWETPTSYAKAW

SEQ ID NO: 20290 - protein, 117 aa, Fervidicella metallireducens
  REGION 1..117: note = tr|A0A017RXR0|A0A017RXR0_9CLOT 6-carboxy-5,6,7,8-tetrahydropterin synthase; OS = Fervidicella metallireducens AeB OX=1403537; GN = Q428_02805 PE=3 SV=1
MILIKEFEFDAAHNLIHYHGKCEKLHGHTYKMVVKLEGQPDDEGMVYDFVELKKLVKEKIIDKFDHAYLNDIIPQPTAENIAVYVWDALVDVVKRDNCRLYEVEIWETKTSGIIYRG

SEQ ID NO: 20291 - protein, 125 aa, Fervidicola ferrireducens
  REGION 1..125: note = tr|A0A140LAE3|A0A140LAE3_9THEO 6-carboxy-5,6,7,8-tetrahydropterin synthase OS=Fervidicola ferrireducens OX=520764 GN=queD PE=3 SV=1
MFLIKEFKFDAAHNLVSYKGKCEKLHGHTYRLVVVLDGVPDREGMIMDFLELKEIVNEKVLKKLDHSYINDIIKQPSAENIAVWVWEQLEKSVRRENCRLYEVQVWETATSGVVYRGESLEGRSK

SEQ ID NO: 20292 - protein, 119 aa, Fervidobacterium changbaicum
  REGION 1..119: note = tr|A0A1G8F382|A0A1G8F382_9BACT 6-carboxy-5,6,7,8-tetrahydropterin synthase; OS = Fervidobacterium changbaicum OX=310769; GN = SAMN04488510_1326 PE=3 SV=1
MLCVVKEFTFDAAHNLVQYHGKCEKLHGHTYKLQIIVCGEKDEEGMVIDFVELKEIVKKEVLNYLDHAYINEIIPQPSAENIAEWIWDRLEKHLTTKRYKLSEVRLWETPTSFVIYRKD

SEQ ID NO: 20293 - protein, 118 aa, Fervidobacterium gondwanense
  REGION 1..118: note = tr|A0A1M7RVM9|A0A1M7RVM9_FERGO 6-carboxy-5,6,7,8-tetrahydropterin synthase; OS = Fervidobacterium gondwanense DSM 13020 OX=1121883; GN = SAMN02745226_00238 PE=3 SV=1
MLCVVKEFTFDAAHNLVEYHGKCEKLHGHTYKLQIMVCGEKDREGMVIDFVELKEIVKREVLNYLDHAYINEIIPQPSAENIAEWIWKKLEPHLSNERYKLSEIRLWETPTSFVIYRK

SEQ ID NO: 20294 - protein, 119 aa, Fervidobacterium islandicum
  REGION 1..119: note = tr|A0A1B0VLP3|A0A1B0VLP3_FERIS 6-carboxy-5,6,7,8-tetrahydropterin synthase; OS = Fervidobacterium islandicum OX=2423 GN=NA23_10390 PE=3; SV = 1
MLCVVKEFTFDAAHNLVQYHGKCEKLHGHTYKLQIIVCGEKDEEGMVIDFVELKEIVKKEVLNYLDHAYINEIIPQPSAENIAEWIWDRLEKHLTTERYKLTEVRLWETPTSWVVYRKE

SEQ ID NO: 20295 - protein, 118 aa, Fervidobacterium nodosum
  REGION 1..118: note = tr|A7HNY0|A7HNY0_FERNB 6-carboxy-5,6,7,8-tetrahydropterin synthase; OS = Fervidobacterium nodosum (strain ATCC 35602 / DSM 5306 / Rt17-B1) OX=381764 GN=Fnod_1780 PE=3 S V=1
MFCVVKEFTFDAAHNLVEYHGKCEKLHGHTYKLQIMVCGERDKEGMVIDFIDLKKIVQEEVLSYLDHAYINEIIPQPSAENIAEWIWNKLEEKLSSERYKLSEVRLWETPTSFVIYRK

SEQ ID NO: 20296 - protein, 119 aa, Fervidobacterium pennivorans
  REGION 1..119: note = tr|A0A172T4B6|A0A172T4B6_FERPE 6-carboxy-5,6,7,8-tetrahydropterin synthase; OS = Fervidobacterium pennivorans OX=93466 GN=JM64_07550; PE = 3 SV=1
MLCVVKEFTFDAAHNLVQYHGKCEKLHGHTYKLQIVVCGEKDEEGMVIDFVELKEIVKREVLSYLDHAYINEIIPQPSAENIAEWIWDKLEKHLTTERYKLTEVRLWETPTSWVVYRKD

SEQ ID NO: 20297 - protein, 119 aa, Fervidobacterium pennivorans
  REGION 1..119: note = tr|H9UF07|H9UF07_FERPD 6-carboxy-5,6,7,8-tetrahydropterin synthase; OS = Fervidobacterium pennivorans (strain DSM 9078 / Ven5); OX = 771875 GN=Ferpe_2054 PE=3 SV=1
MLCVVKEFTFDAAHNLVQYHGKCEKLHGHTYKLQIVVCGEKDEEGMVIDFIELKEIVKREVLNYLDHAYINEIIPQPSAENIAEWIWERLEKYLTTERYKLTEVRLWETPTSWVVYRKD

SEQ ID NO: 20298 - protein, 121 aa, Fervidobacterium sp.
  REGION 1..121: note = tr|A0A3D3E0X0|A0A3D3E0X0_9BACT 6-carboxy-5,6,7,8-tetrahydropterin synthase; OS = Fervidobacterium sp. OX=1871331 GN=queD PE=3 SV=1
MLCVVKEFTFDAAHNLVSYHGKCEKLHGHTYKLQIVVCGEKDEEGMVIDFTQLKELVNEYVLKYLDHAYINDIIQQPSAENIAQWIWDRIEVPLSSERYSLKEVRLWETPTSHVIYSKYNK

SEQ ID NO: 20299 - protein, 118 aa, unidentified
  source 1..118: note = Fervidobacterium thailandense
  REGION 1..118: note = tr|A0A1E3G215|A0A1E3G215_9BACT 6-carboxy-5,6,7,8-tetrahydropterin synthase; OS = Fervidobacterium thailandense OX=1008305 GN=A4H02_08385; PE = 3 SV=1
MLCVVKEFTFDAAHNLVSYKGKCEKLHGHTYKLQVVVCGERDEEGMVIDFIELKRIVQEHVLSVLDHSYINEILQQPSAENIAEWIWNRLYPHLSTERYRLSEIRLWETPTSFVIYSK

SEQ ID NO: 20300 - protein, 144 aa, Fibrella aestuarina
  REGION 1..144: note = tr|I0K9X5|I0K9X5_9BACT Uncharacterized protein; OS = Fibrella aestuarina BUZ 2 OX=1166018 GN=FAES_2919 PE=4; SV = 1
MMDPNGAEAPRVAVFRKEHFNAAHRLNNPNWSDEKNTRVYGKCNNPNYHGHNYELTVQVVGPIDPETGYVIDMKVLGDLIKTQVTDRFDHKNLNLDTDEFRDLNPSAENIAIVIYTILRKHIEPSLDLKIRLHETERNFVEYPV

SEQ ID NO: 20301 - protein, 138 aa, Fibrella aestuarina
  REGION 1..138: note = tr|I0K9H4|I0K9H4_9BACT Uncharacterized protein; OS = Fibrella aestuarina BUZ 2 OX=1166018 GN=FAES_2768 PE=4; SV = 1
MVYISRKEHFNAAHRLYNPNWSDERNKEVFGPCANHNWHGHNFELIVTVKGELDPDTGFVIDLKVLGDVIKREIIEQLDHKNINLDVPFMQGKMASCEVLVMEIWKILETALQPLTEARLYQIRLIETPKNFVDYYGE

SEQ ID NO: 20302 - protein, 138 aa, Fibrella sp.
  REGION 1..138: note = tr|A0A1W6EC54|A0A1W6EC54_9BACT 6-pyruvoyl tetrahydrobiopterin synthase OS=Fibrella sp. ES10-3-2-2; OX = 1834519 GN=A6C57_23140 PE=4 SV=1
MVYISRKEHFNAAHRLFNPNWSDERNKEVFGPCANHNWHGHNFELIVTVKGEPDPDTGFVIDLKVLGDVIKREIIEQLDHKNINLDVPFMQGKMASCEILVMEIWRLLEQALSPLTEARLYQIRLYETERNFVDYYGE

SEQ ID NO: 20303 - protein, 145 aa, Fibrella sp.
  REGION 1..145: note = tr|A0A1W6EB00|A0A1W6EB00_9BACT 6-pyruvoyl tetrahydrobiopterin synthase OS=Fibrella sp. ES10-3-2-2; OX = 1834519 GN=A6C57_20905 PE=4 SV=1
MTETIGEDTPRVAVFRKEHFNAAHRLNNPNWTDEKNARVYGKCNNPNYHGHNYDLIVQVNGPIHPETGYVIDMKYLGDLIKTHVTDRFDHKNLNLDTDEFRDLNPSAENIAITIYNILRTQLEPTLDLKIRLYETERNFVEYPVN

SEQ ID NO: 20304 - protein, 159 aa, Fibrisoma limi
  REGION 1..159: note = tr|I2GF46|I2GF46_9BACT Uncharacterized protein; OS = Fibrisoma limi BUZ 3 OX=1185876 GN=BN8_01528 PE=4 SV=1
MDTLQAESPRVNTAGMVVPRVAVFRKEHFNAAHRLHNPNWSDEKNERVYGKCNNPHYHGHNYELIVQVVGPVDPETGYVIDMKYLGDLIKEHVTERFDHKNLNLDTEEFADLNPSAENIAIVIYNILRNVLSDSLDLKIRLYETERNFVEYPVNPDRVA

SEQ ID NO: 20305 - protein, 138 aa, Fibrisoma limi
  REGION 1..138: note = tr|I2GMQ1|I2GMQ1_9BACT Uncharacterized protein; OS = Fibrisoma limi BUZ 3 OX=1185876 GN=BN8_04420 PE=4 SV=1
MVYINRIEHFNAAHRLYNPAWSDEKNKEVFGPCANHNWHGHNFELIVTVKGEPDPDTGFVIDLKLLGDIIRREVIEKVDHKNLNLDVDFMQGKMASCEIFIMEIWKILERALAPVTEAHLHQIRLYETPKNFVDYFGE

SEQ ID NO: 20306 - protein, 154 aa, Fibrisoma sp.
  REGION 1..154: note = tr|A0A418M6S4|A0A418M6S4_9BACT 6-carboxytetrahydropterin synthase OS=Fibrisoma sp. HYT19; OX = 2305895 GN=DYU11_18805 PE=4 SV=1
MDILQVESPRVNTTDVVVPRVAVFRKEHFNAAHRLHNPNWSDEKNERVYGKCNNPHYHGHNYELIVQVAGPVDPETGYVIDMKYLGDLIKEHVTERFDHKNLNLDTEEFADLNPSAENIAIVIYNILRNLLSDSLDLKIRLYETERNFVEYPVA

SEQ ID NO: 20307 - protein, 138 aa, Fibrisoma sp.
  REGION 1..138: note = tr|A0A418MDN7|A0A418MDN7_9BACT 6-carboxytetrahydropterin synthase OS=Fibrisoma sp. HYT19; OX = 2305895 GN=DYU11_06205 PE=4 SV=1
MVYINRIEHFNAAHRLYNPAWSDEKNKEVFGPCANHNWHGHNFELIVTVKGEPDPDTGFVIDLKLLGDIIRREVIEKVDHKNLNLDVDFMQGKMASCEIFIMEIWKILERALAPVTEAHLHQLRLYETPKNFVDYFGE

SEQ ID NO: 20308 - protein, 109 aa, Fibrobacter sp.
  REGION 1..109: note = tr|A0A1M6XW60|A0A1M6XW60_9BACT 6-pyruvoyltetrahydropterin/6-carboxytetrahydropterin synthase OS=Fibrobacter sp. UWH4 OX=1896210; GN = SAMN05720762_104192 PE=4 SV=1
MYRVIKRMEISGAHRLNLPYESKCSGLHGHNWIITVYCQSETLDENGMVVDFSHIKEIVKGKLDHKFLNDVMDANPTAENMARWICEQVPHCYKVQIQESEGNLVEYEV

SEQ ID NO: 20309 - protein, 113 aa, Fibrobacter sp.
  REGION 1..113: note = tr|A0A254SVY6|A0A254SVY6_9BACT 6-carboxy-5,6,7,8-tetrahydropterin synthase OS=Fibrobacter sp. UWB1 OX=1964355 GN=B7988_02930 PE=3 SV=1
MYRVCKRLEISGAHRLELPYPSKCSNLHGHNWLVTIFCKSKTLDNDGMVIDFTHIKKIIMEKLDHAYINDVVDFNPTAENMAKWICDQVPFCHKVVIQESEGNLAQYDKDEED

SEQ ID NO: 20310 - protein, 109 aa, Fibrobacter succinogenes
  REGION 1..109: note = tr|A0A380RWV0|A0A380RWV0_FIBSU 6-pyruvoyltetrahydropterin/6-carboxytetrahydropterin synthase OS=Fibrobacter succinogenes OX=833; GN = SAMN05661053_0593 PE=4 SV=1
MYRVIKRIEISGAHKLSLPYESKCRGLHGHNWIITVFCQSETLDENGMVVDFSRIKEIVKGKLDHQFLNDVVDFNPTAENMARWICEQVPHCYKVQVQESEGNTVEYEV

SEQ ID NO: 20311 - protein, 109 aa, Fibrobacter succinogenes
  REGION 1..109: note = tr|C9RPK0|C9RPK0_FIBSS Putative 6-pyruvoyl tetrahydrobiopterin synthase OS=Fibrobacter succinogenes (strain ATCC 19169 / S85) OX=59374 GN=FSU_0217 PE=4 SV=1
MYRVIKRIEISGAHKLSLPYESKCRGLHGHNWIITVFCQSETLDENGMVVDFSRIKEIVKGKLDHQFLNDVVNFNPTAENMARWICEQVPHCYKVQVQESEGNTVEYEV

SEQ ID NO: 20312 - protein, 161 aa, unidentified
  source 1..161: note = Fictibacillus aquaticus
  REGION 1..161: note = tr|A0A235FA86|A0A235FA86_9BACI 6-carboxytetrahydropterin synthase QueD OS=Fictibacillus aquaticus OX=2021314 GN=queD PE=4 SV=1
MMEFKIPEKVQKFNVDIKKEELKYHNKRVAVTKEFTFDAAHHLHHYEGKCKNLHGHTYRLIITISGYVDEVGIAVDFGDIKRIYKEVIDSKLDHRYLNEVLPNMNTTAENMIVWIWEQLDERLEEEGLKKQGHRLEELKLYETPTSYATLKREWMISDENI

SEQ ID NO: 20313 - protein, 157 aa, unidentified
  source 1..157: note = Fictibacillus arsenicus
  REGION 1..157: note = tr|A0A1V3GAR9|A0A1V3GAR9_9BACI 6-carboxytetrahydropterin synthase QueD OS=Fictibacillus arsenicus OX=255247 GN=UN64_01660 PE=4 SV=1
MTYKIPKDVQMLDRDIKREQLKYHNKRVAVCKEFTFDAAHHLHCYEGKCKNLHGHTYKLVITMSGYVNEIGIAVDFGEIKEIFKKAIDEKLDHRYLNEVLPPMNTTAENMIVWIWEQIDAELEERSLSEQGHRLEELKLYETPTSYAVIKREWMVGE

SEQ ID NO: 20314 - protein, 157 aa, unidentified
  source 1..157: note = Fictibacillus arsenicus
  REGION 1..157: note = tr|A0A1B1Z715|A0A1B1Z715_9BACI 6-carboxytetrahydropterin synthase QueD OS=Fictibacillus arsenicus OX=255247 GN=ABE41_014665 PE=4 SV=1
MTYKIPKDVQMLDRDIKREQLKYHNKRVAVCKEFTFDAAHHLHCYEGKCKNLHGHTYKLVITMSGYVNEIGISVDFGEIKEIFKTAIDEKLDHRYLNEVLPPMNTTAENMVVWMWEQIDAELKQRGLSEKGHRIEELKLYETPTSFAVMKREWMVGE

SEQ ID NO: 20315 - protein, 160 aa, unidentified
  source 1..160: note = Fictibacillus enclensis
  REGION 1..160: note = tr|A0A0V8J9M8|A0A0V8J9M8_9BACI 6-pyruvoyl tetrahydrobiopterin synthase OS=Fictibacillus enclensis; OX = 1017270 GN=AS030_13775 PE=4 SV=1
MEFEIPKKVQKIDEDIQREKLKYHNKRVAVTKEFTFDAAHHLHCYEGKCKNLHGHTYRLVLTISGFVDPVGISMDFGDIKKIYKEAIESRLDHRYLNDVLPPMNTTAENMIVWIWEEFDQKLDDYQWKEKGFLLEEIVLYETPTSYATMKREWMDHDESL

SEQ ID NO: 20316 - protein, 160 aa, unidentified
  source 1..160: note = Fictibacillus macauensis
  REGION 1..160: note = tr|I8J1A3|I8J1A3_9BACI 6-pyruvoyl tetrahydrobiopterin synthase OS=Fictibacillus macauensis ZFHKF-1 OX=1196324 GN=A374_09698 PE=4 SV=1
MEFTIPKKVQTLGQDIEQHQLKYHHKRVAVTKEFTFDAAHHLHCYEGKCKSLHGHTYKLIVTVSGFVDEIGISMDFGDLKRIYKETIDAKLDHRYLNDVLPLMNTTAENMIVWIWEQFDDKLACYGWKDKAFRIEEMVLYETPTSYATMKREWMEDDRSL

SEQ ID NO: 20317 - protein, 145 aa, unidentified
  source 1..145: note = Fictibacillus macauensis
  REGION 1..145: note = tr|I8AK51|I8AK51_9BACI Uncharacterized protein; OS = Fictibacillus macauensis ZFHKF-1 OX=1196324; GN = A374_06396 PE=4 SV=1
MASTNGPISATTLAVQNKVYIDRVLTDYGYVPKYPIINVTIGVSNTKPIFPEPGFIIDALTVQDVFNRLIRSRYDRRTLVQEGEPVPPEIKYPPAFVPFSPSLEQTSRYFYNILRPVFTKLGVRLDFVAVTTPIATARFTGQGIL

SEQ ID NO: 20318 - protein, 159 aa, unidentified
  source 1..159: note = Fictibacillus phosphorivorans
  REGION 1..159: note = tr|A0A160IQ23|A0A160IQ23_9BACI 6-pyruvoyl tetrahydrobiopterin synthase OS=Fictibacillus phosphorivorans OX=1221500 GN=ABE65_015850 PE=4 SV=1
MTYKIPKDVQILGRDIQSEQLKYHNKRVAVCKEFTFDAAHHLHCYEGKCKNLHGHTYKLVITMSGFVNAIGIAVDFGEIKEIFKSAIDSKLDHQYLNEVLPPMNTTAENMVVWIWEQIDSELNNRGLSEQGHRLEELKLYETPTSYAVMKREWMVERDV

SEQ ID NO: 20319 - protein, 155 aa, unidentified
  source 1..155: note = Fictibacillus phosphorivorans
  REGION 1..155: note = tr|A0A163Q6I0|A0A163Q6I0_9BACI 6-pyruvoyl tetrahydrobiopterin synthase OS=Fictibacillus phosphorivorans OX=1221500 GN=AWM68_10790 PE=4 SV=1
MNYKIPTDVQVLNRDIKREQLKYHNKRVAVCKEFTFDAAHHLHCYEGKCKNLHGHTYKLVITMSGFVNEIGIAVDFGEIKEIFKTAIDSKLDHRYLNEVLPPMNTTAENMVVWIWEQIDIELQKRGLSEQGHRLEELKLFETPTSFAIMKREWMV

SEQ ID NO: 20320 - protein, 160 aa, unidentified
  source 1..160: note = Fictibacillus solisalsi
  REGION 1..160: note = tr|A0A1G9X295|A0A1G9X295_9BACI 6-pyruvoyltetrahydropterin/6-carboxytetrahydropterin synthase OS=Fictibacillus solisalsi OX=459525; GN = SAMN04488137_2526 PE=4 SV=1
MEFEIPKKVQKIDEDIQRDKLKYHHKRVAVTKEFTFDAAHHLHCYEGKCKNLHGHTYRLVLTISGFVDPVGISMDFGDIKKIYKEAIESRLDHRYLNDVMPPMNTTAENMIVWIWEEFDKKLDQYQWKEKGFRLEEIVLYETPTSYATMKREWMEHDESL

SEQ ID NO: 20321 - protein, 160 aa, unidentified
  source 1..160: note = Fictibacillus sp.
  REGION 1..160: note = tr|A0A4Q2I2J3|A0A4Q2I2J3_9BACI 6-carboxytetrahydropterin synthase QueD OS=Fictibacillus sp. S7 OX=2212476 GN=queD PE=4 SV=1
MEFEIPKKVQKIDEDIQREKLKYHHKRVAVTKEFTFDAAHHLHCYEGKCKNLHGHTYRLVLTISGFVDPVGISMDFGDIKKIYKEAIESRLDHRYLNDVLPPMNTTAENMIVWIWEEFDQKLDDYQWKEKGFRLEEIVLYETPTSYATMKREWMDHDESL

SEQ ID NO: 20322 - protein, 157 aa, unidentified
  source 1..157: note = Fictibacillus sp.
  REGION 1..157: note = tr|A0A4Q7QPM3|A0A4Q7QPM3_9BACI 6-pyruvoyltetrahydropterin/6-carboxytetrahydropterin synthase OS=Fictibacillus sp. BK138 OX=2512121; GN = EV282_1073 PE=4 SV=1
MTYKIPKDVQMLDRDIQREQLKYHNKRVAVCKEFTFDAAHHLHCYEGKCKNLHGHTYKLVITMSGYVNEIGIAVDFGEIKEIFKKAIDEKLDHRYLNEVLPPMNTTAENMVVWIWEQIDAELKERGLSAQGHRIEELKLYETPTSYAVIKREWMVGE

SEQ ID NO: 20323 - protein, 129 aa, unidentified
  source 1..129: note = Unknown
  REGION 1..129: note = tr|A0A2T1DP80|A0A2T1DP80_9CYAN 6-carboxy-5,6,7,8-tetrahydropterin synthase OS=filamentous cyanobacterium CCP2 OX=2107700 GN=C7B76_04610 PE=3 SV=1
MPTWKLSTEFSFDAAHFIRDYDGPCGRMHGHTYKVRIEATAHQLHGSAYCPHPVMVTDFRTLRWAKQDALKGGLDHCVLNEVLPEGYETTAEMIAQYIYEKTKKQVPEGVRLKVAVSETPNSWVEYTDD

SEQ ID NO: 20324 - protein, 129 aa, unidentified
  source 1..129: note = Unknown
  REGION 1..129: note = tr|A0A2P8WB08|A0A2P8WB08_9CYAN 6-carboxy-5,6,7,8-tetrahydropterin synthase OS=filamentous cyanobacterium CCT1 OX=2107702 GN=C7293_00295 PE=3 SV=1
MPKWSVKTEFSFDAAHYIKDYDGPCGRMHGHTYRVRVEATTSQLRASEFCPYPVMVADFRTLRWAKKDMLKGGLDHCVLNDVLPEGYETTAEMIAQYIYDKTKKSLPDGIQLKVAVSETPNSWVEYEDD

SEQ ID NO: 20325 - protein, 136 aa, unidentified
  source 1..136: note = Filimonas endophytica
  REGION 1..136: note = tr|A0A561I9E8|A0A561I9E8_9BACT 6-pyruvoyltetrahydropterin/6-carboxytetrahydropterin synthase OS=Filimonas endophytica OX=1500311; GN = FHW48_112105 PE=4 SV=1
MVYLTRLEHFNAAHKLYNPNWSKEQNDAVFGVCANENWHGHNFDLYITIKGTVDPDTGFLMDVKKLSKLVQEKVIKKVDHRNLNLDVDFLRGKMCSTENLAIGIWNELAPHLPEHVKLHCVKLYETQRIYVEYFGE

SEQ ID NO: 20326 - protein, 138 aa, unidentified
  source 1..138: note = Filimonas endophytica
  REGION 1..138: note = tr|A0A561I9N8|A0A561I9N8_9BACT 6-pyruvoyltetrahydropterin/6-carboxytetrahydropterin synthase OS=Filimonas endophytica OX=1500311; GN = FHW48_112106 PE=4 SV=1
MPDNKVAVFRHEHFNAAHRLHVPEWDEARNNTVFGKCNNANYHGHNYELIVKVTGVPDTVTGYVIDLKILSDIIKVQVLDRFDHKNLNLDTVEFAQVNPTAENIVVVIYHLLRPHIDASLDLQVRLYETPRNFVEYPA

SEQ ID NO: 20327 - protein, 138 aa, Filimonas lacunae
  REGION 1..138: note = tr|A0A173M9G2|A0A173M9G2_9BACT 6-pyruvoyltetrahydropterin/6-carboxytetrahydropterin synthase OS=Filimonas lacunae OX=477680; GN = SAMN05421788_10483 PE=4 SV=1
MPDNKVAVYRLEHFNAAHRLHVPEWNDVKNDAVFGKCNNANYHGHNYELIVKVVGVPDATTGYVIDLKILSDIIKEQVLDRFDHKNLNLDTAEFKELNPTAENIAVVIYNLLRPCIDASLDMQVRLYETPRNFVEYPV

SEQ ID NO: 20328 - protein, 136 aa, Filimonas lacunae
  REGION 1..136: note = tr|A0A173M9H1|A0A173M9H1_9BACT 6-pyruvoyltetrahydropterin/6-carboxytetrahydropterin synthase OS=Filimonas lacunae OX=477680; GN = SAMN05421788_10484 PE=4 SV=1
MVYLTRLEHFNAAHKLYNPNWSKEQNDAVFGVCANENWHGHNFDLYITIKGTVDPDTGFLMDVKKLSKLVQEKVIKKVDHKNLNLDVDFLRGKMCSTENLAMGIWHELAPHLPEHVKLHCVKLYETQRIYVEYFGD

SEQ ID NO: 20329 - protein, 138 aa, Filimonas sp.
  REGION 1..138: note = tr|A0A2U0ZR19|A0A2U0ZR19_9BACT 6-pyruvoyltetrahydropterin/6-carboxytetrahydropterin synthase OS=Filimonas sp. YR581 OX=2135469 GN=C7485_105436; PE = 4 SV=1
MPDNKVAVYRHEHFNAAHRLHVPGWDNATNDAVFGKCNNANYHGHNYELIVKVVGIPDAITGYVIDLKILSDIIKAQVLDRFDHKNLNLDTVEFASLNPTAENIAVVIYNLLRPHLDEGLELQVRLYETPRNFVEYPV

SEQ ID NO: 20330 - protein, 138 aa, Filimonas sp.
  REGION 1..138: note = tr|A0A4Q1D253|A0A4Q1D253_9BACT 6-carboxytetrahydropterin synthase OS=Filimonas sp. TTM-71; OX = 2508721 GN=ESB13_20865 PE=4 SV=1
MENNKVAVFRTEHFNAAHRLHVPDWSKAMNESVFGKCNNPNYHGHNYELTVKVTGVPDERTGYVIDLKILSDIIQKQVLDKFDHKNLNLDTEEFRQLNPTAENIAIVIYYLLRPHIDERLLLQVRLYETPRNFVEYPV

SEQ ID NO: 20331 - protein, 155 aa, Filobacillus milosensis
  REGION 1..155: note = tr|A0A4Y8IM34|A0A4Y8IM34_9BACI 6-carboxytetrahydropterin synthase QueD OS=Filobacillus milosensis OX=94137 GN=queD PE=4 SV=1
MYGFTIVEKLEKIDQDIQRHELKYHNKRVLVSKEFTFDAAHHLHCYEGKCKNLHGHTYKVIFGISGYTDEIGLVIDFGDIKKIWKEQIEVHLDHRYLNDTLPNMNTSAENMVVWIYEKMEEALKKDPNDCRVEFVKLYETPTSYAEARREWMRGE

SEQ ID NO: 20332 - protein, 134 aa, Filomicrobium sp.
  REGION 1..134: note = tr|A0A2D7FG02|A0A2D7FG02_9RHIZ Uncharacterized protein OS=Filomicrobium sp. OX=2024831 GN=CMB79_18735; PE = 4 SV=1
MFAVEVREAIMIAHSLPDPFFGPAQNKHGATFVVDVTFFRKELSEHNVVVDIGRAGTALKKVLSPLNYSDLDTTPQFAGKLTTTEFLCKHIFDEMRSCIASGELGPGSEDLVKMRVTLGETHLARAWYEGDLGD

SEQ ID NO: 20333 - protein, 157 aa, unidentified
  source 1..157: note = Fimbriiglobus ruber
  REGION 1..157: note = tr|A0A225DCZ0|A0A225DCZ0_9BACT 6-carboxytetrahydropterin synthase OS=Fimbriiglobus ruber; OX = 1908690 GN=FRUB_09861 PE=4 SV=1
MSSESRSSPLAFSVGPTIPGGTAVYRVTKEIPFCYGHRLLNYTGKCRHLHGHNGKAVVTLQSPELDDLGMVVDFTDVKRVLGRWIDENLDHRLLLHKDDPLIPELRRQGEPFVTLDANPTAENIARLIYHFAANQHLPVVEVTLWETENSYATYRGE

SEQ ID NO: 20334 - protein, 165 aa, unidentified
  source 1..165: note = Fimbriiglobus ruber
  REGION 1..165: note = tr|A0A225DF51|A0A225DF51_9BACT 6-carboxytetrahydropterin synthase OS=Fimbriiglobus ruber; OX = 1908690 GN=FRUB_08342 PE=4 SV=1
MGTERFKVRVTKDHLVFCCGHFISYEGHRCERLHGHNYRAAVEVEGPLNATDFYVFDFVALKARTKTITDELDHHMLLATRNPVIRVDEHPANVRVAYKDREWVFPRGDCVLLPIENTTAELLARYIAGRLLDSLRKHHAFTPDALRVEVEENVGQSATYEWRPA

SEQ ID NO: 20335 - protein, 271 aa, unidentified
  source 1..271: note = Fimbriimonas ginsengisoli
  REGION 1..271: note = tr|A0A068NYY6|A0A068NYY6_9BACT Putative 6-pyruvoyl tetrahydropterin synthase OS=Fimbriimonas ginsengisoli Gsoil 348 OX=661478 GN=OP10G_4271 PE=4 SV=1
MVKMTRRVTFSSGHRYWVPALSESENRALFGPWASPYNHGHNYVLDVTVEGNVDPQTGMVVNIKRIDAVLKGGLVKEFDGKSLNDEVAWFYDRPSTLENLIEYIRGRLDGTLPSEARMVGVRLEEMPTFWAEWQDGKGMTLTRSYEFAAAHRLHVPALSHEENLDLFGKCNNPAGHGHNYVLEVSVAGDPDPATGMLLDIGELDAAVHREVVDRYDHKNLNEDLPEFAGKATTSEVVAQEIFSRLQNKIPGRLARVRLWETARNAFDVEAA

SEQ ID NO: 20336 - protein, 156 aa, unidentified
  source 1..156: note = Fimbriimonas ginsengisoli
  REGION 1..156: note = tr|A0A068NU21|A0A068NU21_9BACT Queuosine biosynthesis QueD, PTPS-I OS=Fimbriimonas ginsengisoli Gsoil 348 OX=661478 GN=OP10G_1701 PE=4 SV=1
MPRFRVCKTFTVESGHMLSKHPDRCRFPHGHTRKVEVIVSSERLDENDMVIDFKALKLAVADYIERYDHAMAINSEDPLLPEILRVHPTSAIVFEGVDPTTEVIAKDLYDHVACILRDGFAGSSSTGIPYTIHANAVSLERVRVWETPSSWAEYGD

SEQ ID NO: 20337 - protein, 142 aa, unidentified
  source 1..142: note = Firmicutes bacterium
  REGION 1..142: note = tr|R6ERG3|R6ERG3_9FIRM Uncharacterized protein; OS = Firmicutes bacterium CAG:145 OX=1263005 GN=BN497_00790; PE = 4 SV=1
MVFPCNEIQKTAWDVLKNFDHALILREDDPLLPAILDVYEKQDIKNGAPQNKMKGEAFKTELATAYPDCRLVVTKETMTVEGMIKIVYDLLKDKLNIAKLTFTSGVNAATSEFETKNKIDRCPLCGIVLNENGVCPKCGYKK

SEQ ID NO: 20338 - protein, 126 aa, unidentified
  source 1..126: note = Firmicutes bacterium
  REGION 1..126: note = tr|A0A350NRG3|A0A350NRG3_9FIRM 6-carboxy-5,6,7,8-tetrahydropterin synthase OS=Firmicutes bacterium OX=1879010 GN=queD PE=3 SV=1
MYEVTVSAHFDSAHYLREYHGRCENLHGHRWQVEASVRSNKLNQIGLALDFTELKKALRETVAQLDHVCLNDLPEFSNINPSSENIASAIFEKVTKRLHEQGLDFTIYSIKVYESPDAWVTYYGAC

SEQ ID NO: 20339 - protein, 290 aa, Fischerella major
  REGION 1..290: note = tr|A0A1U7GUQ0|A0A1U7GUQ0_9CYAN 6-pyruvoyl tetrahydropterin synthase OS=Fischerella major NIES-592; OX = 210994 GN=NIES592_20265 PE=4 SV=1
MQCVVNRRAQFSASHRYWLPELSKAENLKKFGACSRFPGHGHNYILFVSLIGELDKYGMVLNLSDVKHVIKQEVTSQLDFSYLNDVWAEFQQTLPTTENIARVIWQRLAPHLPLVRVQLFENPELWADYMGNGMEAYLSVSTHFSAAHRLAHPDLSDQDNFEIYGKCARPNGHGHNYHLEVTVKGEIDPRTGMIVDLGALNQVIENYVVEPFDHTFLNKDISYFSEVVPTAENIALYISNLLRSPIQKLGAKLYKVKLIESPNNSCEIYCTDTESNSVNVAANQPVLARI

SEQ ID NO: 20340 - protein, 129 aa, Fischerella major
  REGION 1..129: note = tr|A0A1U7GT63|A0A1U7GT63_9CYAN 6-carboxy-5,6,7,8-tetrahydropterin synthase OS=Fischerella major NIES-592 OX=210994 GN=NIES592_22895 PE=3 SV=1
MPKWKLVTEFSFNSAHYIKDYDGPCGRMHGHNYTVRIEATSSKLHSSQYCPHPVMVADFRTLRWAKQDVSKGGLDHCILNEVLPPEYETTAEMIAKYIYDETKKRVPADVQLKVAVSETPNSWAEYEDD

SEQ ID NO: 20341 - protein, 290 aa, unidentified
  source 1..290: note = Fischerella muscicola
  REGION 1..290: note = tr|A0A2N6JWD1|A0A2N6JWD1_FISMU 6-pyruvoyl tetrahydropterin synthase OS=Fischerella muscicola CCMEE 5323 OX=2019572 GN=CEN44_25065 PE=4 SV=1
MQCVVNRRAQFSASHRYWLPELSEAENLEKFGACSRFPGHGHNYVLFVSLIGELDKYGMVLNLSDVKHVIKQEVTSQLDFSYLNDVWSEFQQTLPTTENIARVIWQRLAPHLPLVRVQLFENPELWADYMGNGMEAYLNVSTHFSAAHRLAHPDLSDQDNFEIYGKCARPNGHGHNYHLEVTVKGEIDPRTGMIVDLGALNQVIEDYVVEPFDHTFLNKDISYFSEVVPTAENIALHISNLLRSPIQKLGASLYKVKLIESPNNSCEIYCTQTESNSVNVAANQPVLARI

SEQ ID NO: 20342 - protein, 128 aa, unidentified
  source 1..128: note = Fischerella muscicola
  REGION 1..128: note = tr|A0A2N6K141|A0A2N6K141_FISMU 6-carboxy-5,6,7,8-tetrahydropterin synthase OS=Fischerella muscicola CCMEE 5323 OX=2019572 GN=CEN44_15935 PE=3 SV=1
MPKWKLVTEFSFNSAHYIKDYDGPCGRMHGHNYMVRIEATSSKLHSSQYCPHPVMVADFRTLRWAKQDVSKGGLDHCILNEVLPPEYETTAEMIAKYIYDETKKRVPADVQLKVAVSETPNSWAEYEE

SEQ ID NO: 20343 - protein, 290 aa, Fischerella sp.; identical to SEQ ID NO: 20339
  REGION 1..290: note = tr|A0A0S3TUI8|A0A0S3TUI8_9CYAN Uncharacterized protein OS=Fischerella sp. NIES-3754 OX=1752063; GN = FIS3754_47070 PE=4 SV=1

SEQ ID NO: 20344 - protein, 129 aa, Fischerella sp.; identical to SEQ ID NO: 20340
  REGION 1..129: note = tr|A0A0S3TVE0|A0A0S3TVE0_9CYAN 6-carboxy-5,6,7,8-tetrahydropterin synthase OS=Fischerella sp. NIES-3754 OX=1752063 GN=FIS3754_49970 PE=3 SV=1

SEQ ID NO: 20345 - protein, 129 aa, Fischerella thermalis; identical to SEQ ID NO: 20340
  REGION 1..129: note = tr|A0A2N6LQE6|A0A2N6LQE6_9CYAN 6-carboxy-5,6,7,8-tetrahydropterin synthase OS=Fischerella thermalis CCMEE 5319 OX=2019665 GN=CEN47_14010 PE=3 SV=1

SEQ ID NO: 20346 - protein, 129 aa, Fischerella thermalis
  REGION 1..129: note = tr|A0A2N6MS21|A0A2N6MS21_9CYAN 6-carboxy-5,6,7,8-tetrahydropterin synthase OS=Fischerella thermalis CCMEE 5205 OX=2019671 GN=CEN40_04575 PE=3 SV=1
MPKWKLVTEFSFNSAHYIKDYDGPCGRMHGHNYTVRIEVTSSKLHSSQYCPHPVMVADFRTLRWAKQDVSKGGLDHCILNEVLPPEYETTAEMIAKYIYDETKKRVPADVQLKVAVSETPNSWAEYEDD

SEQ ID NO: 20347 - protein, 149 aa, unidentified
  source 1..149: note = Flagellimonas aquimarina
  REGION 1..149: note = tr|A0A316L508|A0A316L508_9FLAO 6-carboxy-5,6,7,8-tetrahydropterin synthase; OS = Flagellimonas aquimarina OX=2201895 GN=DKG77_03975 PE=3; SV = 1
MGSIRITKQFTFETGHALFGYDGKCRNVHGHSYKLSVTVIGTPITDTDHVKLGMVIDFGDLKTIVKEEVVDKFDHATVFNKNTPHIELAKELSKRGHNVILADYQPTSENMVIDFASKIRARLPKNIQLHSLKLQETETSFAEWFAEDN

SEQ ID NO: 20348 - protein, 135 aa, unidentified
  source 1..135: note = Flagellimonas aquimarina
  REGION 1..135: note = tr|A0A316KWW8|A0A316KWW8_9FLAO 6-carboxy-5,6,7,8-tetrahydropterin synthase; OS = Flagellimonas aquimarina OX=2201895 GN=DKG77_16105 PE=3; SV = 1
MKVKVSRKANFNAAHRLYRPDWSFEKNDAVFGKCNNPNYHGHNYDLIVSVTGEIDQQTGFVMDLKVLKDLIKEHVEEALDHKNLNKDVPEFEDLNPTAENIAVVIWNKIRPHIEKTKELEVVLYETPRNFVTYSG

SEQ ID NO: 20349 - protein, 135 aa, Flagellimonas eckloniae
  REGION 1..135: note = tr|A0A0Q1DL40|A0A0Q1DL40_9FLAO 6-carboxy-5,6,7,8-tetrahydropterin synthase; OS = Flagellimonas eckloniae OX=346185 GN=AAY42_06810 PE=3; SV = 1
MKVKVSRKANFNAAHRLYRSDWSFEKNDEVFGKCNNPNYHGHNYDLIVSVKGEIDQETGYVMDMKVLKDLIKEHVEEALDHKNLNEDVPDFKNLNPTAENIAVVIWNKLRPHIKKTNELEVLLYETPRNFVTYSG

SEQ ID NO: 20350 - protein, 136 aa, Flagellimonas eckloniae
  REGION 1..136: note = tr|A0A0Q1HCI8|A0A0Q1HCI8_9FLAO 6-carboxy-5,6,7,8-tetrahydropterin synthase; OS = Flagellimonas eckloniae OX=346185 GN=AAY42_15765 PE=3; SV = 1
MIATICRKAHFNAAHRLHNPKWSNEKNREVFGKCNSPNYHGHNFDLEVRIRGEVNPDTGFVMDLAVLGTLIEEEIEDRFDHKNLNTDCPEFEGLLPSTEHFVKVIYDILKPKLGKEQLLHISLHETQKNSAEYGDW

SEQ ID NO: 20351 - protein, 149 aa, unidentified
  source 1..149: note = Flagellimonas flava
  REGION 1..149: note = tr|A0A1M5KSZ7|A0A1M5KSZ7_9FLAO 6-carboxy-5,6,7,8-tetrahydropterin synthase; OS = Flagellimonas flava OX=570519 GN=SAMN04488116_1759 PE=3; SV = 1
MGKIRITKQFAFETGHALYGYDGKCRNVHGHSYKLSVTVIGTPITDANHVKLGMVIDFGDLKKIVNQEIVDKFDHATVFNKNTPHKELAKELSERGHQIILADYQPTSENMVLDFAEKIKTRLPKGIELYALKLQETETSYAEWFAGDN

SEQ ID NO: 20352 - protein, 135 aa, unidentified
  source 1..135: note = Flagellimonas flava
  REGION 1..135: note = tr|A0A1M5PK40|A0A1M5PK40_9FLAO 6-carboxy-5,6,7,8-tetrahydropterin synthase; OS = Flagellimonas flava OX=570519 GN=SAMN04488116_3239 PE=3; SV = 1
MKVKVSRKASFNAAHRLYRPDWSDSKNDAVFGKCNNPRFHGHNYELIVSVNGEIDQETGFVMDLKVLKDLIKEHVEEALDHKNLNMDVPEFKDLNPTAENIAVVIWNKLRPHIEKNKELEVVLYETPRNFVTYSG

SEQ ID NO: 20353 - protein, 135 aa, unidentified
  source 1..135: note = Flagellimonas maritima
  REGION 1..135: note = tr|A0A2Z4LUR7|A0A2Z4LUR7_9FLAO 6-carboxy-5,6,7,8-tetrahydropterin synthase; OS = Flagellimonas maritima OX=1383885 GN=HME9304_02498 PE=3; SV = 1
MKVKVSRKANFNAAHRLYRPDWSFDKNDAVFGKCNNPNYHGHNYDLIVSITGEIDKETGFVMDLKVLKDLIKEYVEEALDHKNLNEDVPEFKKLNPTAENIAVVIWNKLRPYIAETKELEIVLYETPRNFVTYSG

SEQ ID NO: 20354 - protein, 136 aa, unidentified
  source 1..136: note = Flagellimonas maritima
  REGION 1..136: note = tr|A0A2Z4LRA6|A0A2Z4LRA6_9FLAO 6-carboxy-5,6,7,8-tetrahydropterin synthase; OS = Flagellimonas maritima OX=1383885 GN=queD PE=3 SV=1
MIATICRKAHFNAAHRLHNPNWSDAKNIEVFGKCNSPNYHGHNFDLEVRIRGEVNPDTGFVMDLAVLGILIKEEVEDRFDHKNLNIDCPEFDEILPTTEYFVKIIYDILRPKLQKEQLLHITLHETQKNSAEYGDW

SEQ ID NO: 20355 - protein, 136 aa, unidentified
  source 1..136: note = Flagellimonas pacifica
  REGION 1..136: note = tr|A0A285MWC7|A0A285MWC7_9FLAO 6-carboxy-5,6,7,8-tetrahydropterin synthase; OS = Flagellimonas pacifica OX=1247520 GN=SAMN06265377_3337; PE = 3 SV=1
MIATICRKAHFNAAHRLHNPKWSQEKNIEVFGKCNSPNYHGHNFDLEVRIRGNVNPDTGFVMDLAVLGNLIQKEIEDRFDHKNLNEDCPEFENLLPSTEHFVKVIYDILKPKLEKDQLLHITLYETKKNSAEYGDW

SEQ ID NO: 20356 - protein, 149 aa, unidentified
  source 1..149: note = Flagellimonas pacifica
  REGION 1..149: note = tr|A0A285MDU1|A0A285MDU1_9FLAO 6-carboxy-5,6,7,8-tetrahydropterin synthase; OS = Flagellimonas pacifica OX=1247520 GN=SAMN06265377_0534; PE = 3 SV=1
MGKIRITKQFNFEAGHALYGYDGKCRNVHGHSYKLSVTVIGTPISDADHVKHGMVIDFGDLKKVVNEEIVDQFDHATIFNKNSPHVELANELSERGHSIILADYQPTSENMVIDFASKIKARLPENIQLHSIKLQETETSFAEWYASDN

SEQ ID NO: 20357 - protein, 135 aa, Flagellimonas sp.
  REGION 1..135: note = tr|A0A5C8V099|A0A5C8V099_9FLAO 6-carboxy-5,6,7,8-tetrahydropterin synthase; OS = Flagellimonas sp. 176CP5-101 OX=2603628 GN=FVB32_17130; PE = 3 SV=1
MMVKVSRKANFNAAHRLYRPDWSDEKNDAVFGKCNNPNYHGHNYDLVVSVTGEIDQQTGFVMDLKVLKGLIKEHVEEALDHKNLNKDVPEFEGLNPTAENIAVVIWNKLRPHIEKTKTLEIVLYETPRNFVTYSG

SEQ ID NO: 20358 - protein, 136 aa, Flagellimonas sp.
  REGION 1..136: note = tr|A0A5C8V005|A0A5C8V005_9FLAO 6-carboxy-5,6,7,8-tetrahydropterin synthase; OS = Flagellimonas sp. 176CP5-101 OX=2603628 GN=FVB32_08950; PE = 3 SV=1
MISTICRKAHFNAAHRLHNPNWSDEKNVEIFGKCNSRNYHGHNFDLEVRIRGEIDPNTGFVMDLAVLGALIADEIEERFDHKNLNEDCPEFKELLPTTEYFVKVIYDILKPKLDKEQLLHITLHETQKNSAEYGDW

SEQ ID NO: 20359 - protein, 136 aa, Flammeovirga kamogawensis
  REGION 1..136: note = tr|A0A553GCY9|A0A553GCY9_9BACT 6-carboxy-5,6,7,8-tetrahydropterin synthase; OS = Flammeovirga kamogawensis OX=373891 GN=EO216_03975 PE=3; SV = 1
MKVTVSRKAHFNAAHRLHNSALSPEENTKIFGKCNNPYYHGHNYDLYVKVTGEIDPITGYVIDMKILKDIMKEHVLDRLDHKNLNEEVDEFKGLNPTAENICVVIWQILRDQLESKFDLKVILYETERNFVEYPSI

SEQ ID NO: 20360 - protein, 139 aa, Flammeovirga kamogawensis
  REGION 1..139: note = tr|A0A553GIE4|A0A553GIE4_9BACT 6-carboxytetrahydropterin synthase OS=Flammeovirga kamogawensis OX=373891 GN=EO216_14470 PE=4 SV=1
MIYINRREFFNAAHKLYNPKWTKEQNEDFFGPCANENWHGHNFEMLVTVKGLPDPDTGYVMNMKDLGKIMNEFIIDKVDHKNLNLDVDFLKDKMTSCETLAIEFWKILAPKVKEFAPNADLHCIELHETRKNFVQYYGE

SEQ ID NO: 20361 - protein, 118 aa, Flammeovirga pacifica
  REGION 1..118: note = tr|A0A1S1YY94|A0A1S1YY94_9BACT 6-carboxy-5,6,7,8-tetrahydropterin synthase; OS = Flammeovirga pacifica OX=915059 GN=NH26_06275 PE=3 SV=1
MKIFKSYMFEAAHFLPHMPEGHPCRRIHGHSWKMELHFDGELVMPYEWVIDFNEIDEVVNPIWKVLDHNFLNEVEGLENPTSEVISMWVWNKIKTALPALYKVVIFETPEAGTEYCGK

SEQ ID NO: 20362 - protein, 136 aa, Flammeovirga pacifica
  REGION 1..136: note = tr|A0A1S1Z3T3|A0A1S1Z3T3_9BACT 6-carboxy-5,6,7,8-tetrahydropterin synthase; OS = Flammeovirga pacifica OX=915059 GN=NH26_17160 PE=3 SV=1
MKVTVSRTAHFNAAHRLHNPDLSDELNKKIFGKCNNPYYHGHNYNLTVKVTGKIDEVTGYVIDMKILRDIIQQHVLDRLDHKNLNEEVEEFSSLNPTAENICVVIWQILRDQLEEKFDLKVILYETERNFVEYPSV

SEQ ID NO: 20363 - protein, 136 aa, Flammeovirga sp.
  REGION 1..136: note = tr|A0A1B1FYS7|A0A1B1FYS7_9BACT 6-carboxy-5,6,7,8-tetrahydropterin synthase; OS = Flammeovirga sp. MY04 OX=1191459 GN=MY04_3944 PE=3 SV=1
MKVTVSRTAHFNAAHRLHNPNLSDELNKKIFGKCNNPYYHGHNYNLTVKVTGEIDEVTGYVIDMKILRDIIQKHVLDKFDHKNLNEEVEEFSSLNPTAENICVVIWQLLRNQLEEKFDLKVILYETERNFVEYPSI

SEQ ID NO: 20364 - protein, 136 aa, Flammeovirga sp.
  REGION 1..136: note = tr|A0A150AJE7|A0A150AJE7_9BACT 6-carboxy-5,6,7,8-tetrahydropterin synthase; OS = Flammeovirga sp. SJP92 OX=1775430 GN=AVL50_14325 PE=3; SV = 1
MKVTVSRKAHFNAAHRLHNEQLSAEENRKMFGKCNNPYYHGHNYNLIVKVTGEIDPISGYVIDMKILKDIIQEHVLDYLDHKNLNEEVKEFSSLNPTAENICVVIWNILRDQLDDKFALKIILYETERNFVEYPSA

SEQ ID NO: 20365 - protein, 135 aa, unidentified
  source 1..135: note = Flammeovirgaceae bacterium
  REGION 1..135: note = tr|A0A2D6AS89|A0A2D6AS89_9BACT 6-pyruvoyl tetrahydrobiopterin synthase OS=Flammeovirgaceae bacterium; OX = 2026740 GN=CMB80_16195 PE=4 SV=1
MKIAVYRKEHFNAAHRLNNPEWSDEKNDEVFGKCNNPNWHGHNYELVVKLVGEPNPDTGYVYDMKELSDLIKENVLVRFDHKNLNLDTEEFKELNPTAENIAVVIFNILRPKIDERLEMKITLYETERNYVEYPA

SEQ ID NO: 20366 - protein, 139 aa, unidentified
  source 1..139: note = Flammeovirgaceae bacterium
  REGION 1..139: note = tr|A0A1Z9SCK4|A0A1Z9SCK4_9BACT 6-carboxytetrahydropterin synthase QueD; OS = Flammeovirgaceae bacterium TMED262 OX=1986699; GN = CBE22_03185 PE=4 SV=1
MIYISRKEHFNAAHKLFNPLWSDERNREEFGVCSNENWHGHNYEIIVTVKGTVNKESGMIINLKMLSDIIKEEILDKVDHKNLNIDVPFLKGIITTTENVTIKFWEVLEKRLKEKNICKLHRIRVYETPRNFIDYYGEK

SEQ ID NO: 20367 - protein, 138 aa, unidentified
  source 1..138: note = Flaviaesturariibacter sp.
  REGION 1..138: note = tr|A0A4R4E0N3|A0A4R4E0N3_9BACT 6-carboxy-5,6,7,8-tetrahydropterin synthase; OS = Flaviaesturariibacter sp. 17J68-15 OX=2545761; GN = E0486_15275 PE=3 SV=1
MGERVSVYRREHFNAAHRLFNREWSDDLNTKVFGKCSLPHYHGHNYELEIKVTGDVDPRTGFVMDMKVLSELVQEQVVERFDHKNLNLDTKEFRELNPTAENIAIVIYRLLRPYIDNQLDLKLRLYETPRNYVEYPAE

SEQ ID NO: 20368 - protein, 138 aa, unidentified
  source 1..138: note = Flaviaesturariibacter sp.
  REGION 1..138: note = tr|A0A4R1BKJ5|A0A4R1BKJ5_9BACT 6-carboxytetrahydropterin synthase; OS = Flaviaesturariibacter sp. 17J68-12 OX=2502780; GN = EPD60_06670 PE=4 SV=1
MVFLTRVEHFNAAHKLYNPNWSEEQNEAVFGKCANSNWHGHNYELYVTVKGRPNPDTGFVMDVKRLSGIIKEQVIEKVDHRNLNLDVDFLEGQFCSTENLAIGIWNQLVPHLPEDVRLHCIKLYETPRIFVEYFGDEG

SEQ ID NO: 20369 - protein, 118 aa, Flavihumibacter petaseus
  REGION 1..118: note = tr|A0A0E9N1D6|A0A0E9N1D6_9BACT 6-carboxy-5,6,7,8-tetrahydropterin synthase; OS = Flavihumibacter petaseus NBRC 106054 OX=1220578 GN=queD; PE = 3 SV=1
MLLFKEFTFDSAHFLPNVPEGHKCREMHGHTYRLKVWLEGPLHPELQWVMDFAELKKVVKPVVERLDHKCLNNIEGLTNPTCERIAVYIWDAIKPFLPLLVKVELHETPTSGVIYHGN

SEQ ID NO: 20370 - protein, 137 aa, Flavihumibacter petaseus
  REGION 1..137: note = tr|A0A0E9N799|A0A0E9N799_9BACT 6-pyruvoyltetrahydrobiopterin synthase OS=Flavihumibacter petaseus NBRC 106054 OX=1220578 GN=queD PE=4 SV=1
MGNKVAVYRKEHFNAAHRLHRSDWDDAQNYEVFGKCSYPNYHGHNYELVVKVVGEINPATGFVIDMKTLSDIIQQEILNRFDHRNLNLDTAEFADRNPTAENIVMVIYNLLRPHIDPEHDLFVRLYETERNFVEYPI

SEQ ID NO: 20371 - protein, 138 aa, unidentified
  source 1..138: note = Flavihumibacter solisilvae
  REGION 1..138: note = tr|A0A0C1IGD0|A0A0C1IGD0_9BACT 6-pyruvoyl tetrahydrobiopterin synthase OS=Flavihumibacter solisilvae; OX = 1349421 GN=OI18_18505 PE=4 SV=1
MVKKVSVFRKEHFNAAHRLHNPDWDDAQNFEVFGKCSFPNYHGHNYDLIVKVTGEPNAATGYVIDLKILSDIIQREIIERFDHRNLNTDTQEFRKLNPTAENIAIVIYDLLRPHIDPKHELGIRLYETERNFVEYNGN

SEQ ID NO: 20372 - protein, 118 aa, unidentified
  source 1..118: note = Flavihumibacter solisilvae
  REGION 1..118: note = tr|A0A0C1KZG7|A0A0C1KZG7_9BACT 6-carboxy-5,6,7,8-tetrahydropterin synthase; OS = Flavihumibacter solisilvae OX=1349421 GN=OI18_19350; PE = 3 SV=1
MLLFKEFTFDSAHFLPNVPEGHKCKEMHGHTYRLRVWLEGPLHPELGWVMDFADLKRVVKPVVASLDHKCLNNLVGLENPTCERIAVYIWDQIKPHLSLLTKVELHETPTSGVIYDGK

SEQ ID NO: 20373 - protein, 138 aa, Flavihumibacter sp.
  REGION 1..138: note = tr|A0A0C1KP41|A0A0C1KP41_9BACT 6-pyruvoyl tetrahydrobiopterin synthase OS=Flavihumibacter sp. ZG627; OX = 1463156 GN=HY58_16895 PE=4 SV=1
MGNKVAVFRKEHFNAAHRLYHAGWDEARNLEMFGKCSYPNYHGHNYNLEVKVTGIPDKDTGYVMDMKHLSDLIHAVIIERFDHKNLNLDTVEFSQLNPTAENIAIVIYDLLRPHIDAQHDLMIRLYETERNFVEYPAS

SEQ ID NO: 20374 - protein, 118 aa, Flavihumibacter sp.
  REGION 1..118: note = tr|A0A162N5H6|A0A162N5H6_9BACT 6-carboxy-5,6,7,8-tetrahydropterin synthase; OS = Flavihumibacter sp. CACIAM 22H1 OX=1812911; GN = A1D16_03230 PE=3 SV=1
MLLFKEFTFDSAHFLPNVPEGHKCKEMHGHTYRLRVWVEGPLDPVLGWVMDFADLKKVVKPVVNRLDHKCLNKIEGLENPTCERIAVYIWDQVKPLLPLLAKIELHETPSSGVIYTGQ

SEQ ID NO: 20375 - protein, 137 aa, unidentified
  source 1..137: note = Flavipsychrobacter stenotrophus
  REGION 1..137: note = tr|A0A2S7SYW8|A0A2S7SYW8_9BACT 6-pyruvoyl tetrahydrobiopterin synthase OS=Flavipsychrobacter stenotrophus OX=2077091 GN=CJD36_008410 PE=4 SV=1
MAERIAIYRKEHFNSAHRLHNPDLPDEENKRLYGKCNNENYHGHNYDLVVKVTGEVDKVTGFVIDTKQLSDIIKTFVIEEFDHRNMNLDVEMMQGINPTTENVAIAIYNVLRQKIDARAEVKIFLYETERNFVEYPA

SEQ ID NO: 20376 - protein, 136 aa, unidentified
  source 1..136: note = Flavipsychrobacter stenotrophus
  REGION 1..136: note = tr|A0A2S7SXY5|A0A2S7SXY5_9BACT 6-pyruvoyl tetrahydrobiopterin synthase OS=Flavipsychrobacter stenotrophus OX=2077091 GN=CJD36_008335 PE=4 SV=1
MIYLTRVEHFNAAHKLYNPNWTEEKNKEVFGKCSNTNWHGHNYELHVTVKGNPHPETGFVYNAKTLGNLIKDVIIEKVDHSNLNMDVDFMKDKFTSAENLAIGIWNELRPHIDSEETKLHCVKLVETKSIFVEYFG

SEQ ID NO: 20377 - protein, 151 aa, Flaviramulus basaltis
  REGION 1..151: note = tr|A0A1K2IDJ6|A0A1K2IDJ6_9FLAO 6-pyruvoyltetrahydropterin/6-carboxytetrahydropterin synthase OS=Flaviramulus basaltis OX=369401; GN = SAMN05428642_101875 PE=4 SV=1
MSNHIRITKQFSFETGHALYGYDGKCKNVHGHSYKLSVTVIGKPISDSTNVKFGMVIDFADLKKIVKEEIVNVFDHATVFNKNTPHVELAKELQDRGHNVLLVDYQPTSEMMVIDFAKKIKKRLPSHISLHSLKLQETESSFAEWFDYDNI

SEQ ID NO: 20378 - protein, 136 aa, Flaviramulus basaltis
  REGION 1..136: note = tr|A0A1K2IJT2|A0A1K2IJT2_9FLAO 6-carboxy-5,6,7,8-tetrahydropterin synthase; OS = Flaviramulus basaltis OX=369401 GN=SAMN05428642_102848; PE = 3 SV=1
MKVTVSRKAHFNAAHRLYRKDWSFEKNDEIFGKCNNPNFHGHNYELIVSVNGEIDQETGYVIDMKVLKDIIKSEVEDAFDHKNLNLEVPEFQDLNPTAENIAVVIYNKMKPKLDANLDLEITLYETPRNFVTYSGK

SEQ ID NO: 20379 - protein, 137 aa, Flavisolibacter ginsengisoli
  REGION 1..137: note = tr|A0A1M5FCX7|A0A1M5FCX7_9BACT 6-carboxy-5,6,7,8-tetrahydropterin synthase; OS = Flavisolibacter ginsengisoli DSM 18119 OX=1121884; GN = SAMN02745131_03793 PE=3 SV=1
MNNKVAVVRREHFNAAHRLYRPDWSSEANTATFGKCSLPNFHGHNYELEVKVVGDINKETGFVMDLKMLSDLVNDKVLEKFDHKNLNIDLEEFKNLNPTAENIAVVIYNILRPHIEPSLELFIRLFETPRNYVEYPA

SEQ ID NO: 20380 - protein, 118 aa, Flavisolibacter ginsengisoli
  REGION 1..118: note = tr|A0A1M5BY54|A0A1M5BY54_9BACT 6-carboxy-5,6,7,8-tetrahydropterin synthase; OS = Flavisolibacter ginsengisoli DSM 18119 OX=1121884; GN = SAMN02745131_02729 PE=3 SV=1
MEIYKEFSFDSAHFLPNVPDGHKCKNMHGHTYRLRVFIKGPIDPQLGWIMDFKELKDALSGVIDQLDHQLINDIKGLENPTAENITSWIWTQIKPLLPLLFKIELYETPTTGVIYYGD

SEQ ID NO: 20381 - protein, 118 aa, unidentified
  source 1..118: note = Flavisolibacter ginsenosidimutans
  REGION 1..118: note = tr|A0A5B8UI71|A0A5B8UI71_9BACT 6-carboxy-5,6,7,8-tetrahydropterin synthase; OS = Flavisolibacter ginsenosidimutans OX=661481 GN=queD; PE = 3 SV=1
MEIYKDFSFDSAHFLPHVPEGHKCKNMHGHTYRLRVFVKGERHPHLGWIMDFKELKDIINPLIDQLDHKLINDIKGLENPTAENITVWIWDNIKPLLSNLSKIELYETPTTGVIYNGE

SEQ ID NO: 20382 - protein, 138 aa, unidentified
  source 1..138: note = Flavisolibacter ginsenosidimutans
  REGION 1..138: note = tr|A0A5B8UIJ7|A0A5B8UIJ7_9BACT 6-carboxy-5,6,7,8-tetrahydropterin synthase; OS = Flavisolibacter ginsenosidimutans OX=661481; GN = FSB75_07935 PE=3 SV=1
MKQKVAVVRREHFNAAHRLYRKDWSDEQNTQTFGKCSLPHYHGHNYELEIKVVGEIDEATGFVMDLGELSNIVNEQVLERFDHKNLNVDVEEFKTLNPTAENIAVVIYNLLRPHIAGENELFIRLFETPRNYVEYPAK

SEQ ID NO: 20383 - protein, 138 aa, unidentified
  source 1..138: note = Flavisolibacter tropicus
  REGION 1..138: note = tr|A0A172TTW9|A0A172TTW9_9BACT 6-carboxy-5,6,7,8-tetrahydropterin synthase; OS = Flavisolibacter tropicus OX=1492898 GN=SY85_08210 PE=3; SV = 1
MGQKVAVFRREHFNAAHRLYNMDWDEARNTEVFGKCSWPHFHGHNYELEIKVVGEIDDETGFVMDTKRLSLLANKYVLQKFDHKNLNLDTEEFKSLNPTAENIAIVIYNLLRPHLEEKLELYIRLYETPRNYVEYPVA

SEQ ID NO: 20384 - protein, 136 aa, unidentified
  source 1..136: note = Flavisolibacter tropicus
  REGION 1..136: note = tr|A0A172TTP6|A0A172TTP6_9BACT 6-pyruvoyl tetrahydrobiopterin synthase OS=Flavisolibacter tropicus; OX = 1492898 GN=SY85_08215 PE=4 SV=1
MVYLTRVEHFNAAHKLYNPSWSKEKNEEVFGKCANENWHGHNYELLVTVKGKPHPDTGFVMDVKRLSLLIKDQVIEKVDHRNLNMDVDFLEGQFCSTENLAIGIWKQLAKHLPEGVQLYCIKLYETPRIYVEYFGE

SEQ ID NO: 20385 - protein, 136 aa, unidentified
  source 1..136: note = Flavivirga eckloniae
  REGION 1..136: note = tr|A0A2K9PMF2|A0A2K9PMF2_9FLAO 6-carboxy-5,6,7,8-tetrahydropterin synthase OS=Flavivirga eckloniae OX=1803846 GN=C1H87_05755 PE=3 SV=1
MKVTVSRKAHFNAAHRLYRKDWSFEKNDAVFGKCNNPNFHGHNYELIVSITGEIDKETGYVIDMKILKDIIKTEVEDVFDHKNLNVEVPEFQDLNPTAENIAVVIYNKMKPKLAAHLELEVTLFETPRNFVTYSGK

SEQ ID NO: 20386 - protein, 151 aa, unidentified
  source 1..151: note = Flavivirga eckloniae
  REGION 1..151: note = tr|A0A2K9PSP9|A0A2K9PSP9_9FLAO 6-carboxytetrahydropterin synthase QueD OS=Flavivirga eckloniae OX=1803846 GN=C1H87_12960 PE=4 SV=1
MDNNIRITKQFSFETGHALYGYDGKCKNVHGHSYKLSVTVIGKPITDNTNVKFGMVIDFGDLKKIVKEEIVYVFDHATVFNKNTPHVELAKELENRGHNVLLVDYQPTSEMMVIDFSKKIKSRLPEHISLHSLKLQETDSSFAEWYASDNV

SEQ ID NO: 20387 - protein, 151 aa, Flavivirga sp.
  REGION 1..151: note = tr|A0A4S1DZA8|A0A4S1DZA8_9FLAO 6-carboxytetrahydropterin synthase OS=Flavivirga sp. RZ03; OX = 2559571 GN=EM932_05510 PE=4 SV=1
MSHNIRITKQFSFETGHALYGYDGKCKNVHGHSYKLSVTVIGQPITDNTNVKFGMVIDFGDLKKIVKEEIVNVFDHATVFNKNTPHVELAKELEDRGHNVLLVDYQPTSEMMVIDFSKKIKKRLPKHISLHSLKLQETDTSFAEWYASDNN

SEQ ID NO: 20388 - protein, 136 aa, Flavivirga sp.
  REGION 1..136: note = tr|A0A4S1DRU5|A0A4S1DRU5_9FLAO 6-carboxy-5,6,7,8-tetrahydropterin synthase OS=Flavivirga sp. RZ03 OX=2559571 GN=EM932_19020 PE=3 SV=1
MKVTVSRKAHFNAAHRLYRKDWSFEKNDAIFGKCNNPNFHGHNYELIVSITGEIDQETGYVIDMKILKEIIKAEVEDAFDHKNLNVEVPEFKDLNPTAENIAVVIYNKMKSKLASHLELEITLFETPRNFVTYSGK

SEQ ID NO: 20389 - protein, 150 aa, unidentified
  source 1..150: note = Flavobacteria bacterium
  REGION 1..150: note = tr|Q26GK8|Q26GK8_FLABB 6-pyruvoyl-tetrahydropterin synthase OS=Flavobacteria bacterium (strain BBFL7); OX = 156586 GN=BBFL7_01749 PE=4 SV=1
MKKVRITKEFTFETGHALYGYDGKCRNVHGHSYKLAVTVIGTPINDTSNVKHGMVIDFTDLKKIVKEEIVDPFDHATVFNKNTPHVELAQELRERGHEVILADYQPTSEMMILDFANKIKSRLPENIELFSLRLRETETSYAEWHASDQL

SEQ ID NO: 20390 - protein, 136 aa, unidentified
  source 1..136: note = Flavobacteria bacterium
  REGION 1..136: note = tr|A3J1P0|A3J1P0_9FLAO 6-carboxy-5,6,7,8-tetrahydropterin synthase; OS = Flavobacteria bacterium BAL38 OX=391598; GN = FBBAL38_02275 PE=3 SV=1
MRVTVSRKAHFNAAHRLYRKDWSMEKNQEVFGKCNNPNFHGHNYELIVSVTGEVDPETGYVMDTKILSDLIKEHIEEAFDHKNLNKDVPEFKDLNPTAEHIAYIIWNKLRVLIATTIDLEITLYETPRNFITYKGN

SEQ ID NO: 20391 - protein, 148 aa, unidentified
  source 1..148: note = Flavobacteriaceae bacterium
  REGION 1..148: note = tr|A0A3L9MG39|A0A3L9MG39_9FLAO 6-carboxy-5,6,7,8-tetrahydropterin synthase; OS = Flavobacteriaceae bacterium YIM 102668 OX=2479857; GN = queD PE=3 SV=1
MVRLTKTFNFETAHALHGYDGKCKNIHGHSYKLFVTVKGQPSEDVSDVKLGMVMDFGDLKKIVNEEVVDIFDHAILLNQNSPHKSLGDNLMKEGHQVIFTDYQPSCENMMLWMVDRIKNRLPENIELVALKLHETENSYGEWLAEDNQ

SEQ ID NO: 20392 - protein, 135 aa, unidentified
  source 1..135: note = Flavobacteriaceae bacterium
  REGION 1..135: note = tr|A0A5B7SL28|A0A5B7SL28_9FLAO 6-carboxy-5,6,7,8-tetrahydropterin synthase; OS = Flavobacteriaceae bacterium F202Z8 OX=2583587; GN = FGM00_03640 PE=3 SV=1
MKVKVSRRAHFNAAHRLFRADWSFEKNDAIFGKCNNPNYHGHNYELIVSVTGEIDQETGFVMDVKILKDLIKSEIEDAFDHKNLNVDVPDFKDLNPTAENIAVVIWNKLRKHIDTDKQLEVILYETPRNFVTFSG

SEQ ID NO: 20393 - protein, 137 aa, unidentified
  source 1..137: note = Flavobacteriales bacterium
  REGION 1..137: note = tr|A0A2H0GEP9|A0A2H0GEP9_9FLAO 6-pyruvoyl tetrahydrobiopterin synthase OS=Flavobacteriales bacterium CG18_big_fil_WC_8_21_14_2_50_32_9 OX=1974008; GN = COW67_01840 PE=4SV=1
MIYLTRRERFNAAHRLFLSEWSDEKNLEVFGKCSNPNWHGHNYELFVTVKGEINPKIGFVINLKHLSKIVRELIIEKVDHKNLNIDVPFMLGKITSAENIAISFWEELEPEINKLNCELHCIKIVETENNYIEYFGK

SEQ ID NO: 20394 - protein, 140 aa, unidentified
  source 1..140: note = Flavobacteriales bacterium
  REGION 1..140: note = tr|A0A357K5R1|A0A357K5R1_9FLAO 6-pyruvoyl tetrahydrobiopterin synthase OS=Flavobacteriales bacterium; OX = 2021391 GN=DEA66_05525 PE=4 SV=1
MKNVYVTRRARFNAAHKLWNDEWDEAKNLEVFGKCANPNWHGHNYELHVTVKGVPAEDTGYCMNLKDLKDIIKEHVEEPLDHRNLNIDVPFMKGKRTSTEILIIAIWEELEGPIAEHGCHLHHIRLYETENNYADYYGGE

SEQ ID NO: 20395 - protein, 136 aa, unidentified
  source 1..136: note = Flavobacteriia bacterium
  REGION 1..136: note = tr|A0A432IN50|A0A432IN50_9BACT 6-carboxy-5,6,7,8-tetrahydropterin synthase; OS = Flavobacteriia bacterium OX=2044941 GN=DSY83_15700 PE=3; SV = 1
MIATICRKAHFNAAHRLHNPKWSKEKNIEVFGKCNSPSYHGHNFDLEVRIKGEVDPDTGFVMDLAVLGNLIRDEVEERFDHKNLNEDCPEFQVLLPTTEHFVKVIYDILKPKLKKDQLLQIILHETQKNSAEYGDW

SEQ ID NO: 20396 - protein, 134 aa, unidentified
  source 1..134: note = Flavobacteriia bacterium
  REGION 1..134: note = tr|A0A1Q3ZGP5|A0A1Q3ZGP5_9BACT 6-carboxy-5,6,7,8-tetrahydropterin synthase; OS = Flavobacteriia bacterium 40-80 OX=1895763; GN = BGO87_06750 PE=3 SV=1
MKICRRETFNAAHRLYNPDFDEATNQRIYDKCSNPNYHGHNYVLEVWVEGQIDAETGYLIDLKTLSDVIHEEVLERFDHRNLNLDCPEFSNLIPTVENIAVVIWDLLKARIDAKYGLEIRLWETDKNSVWYNGK

SEQ ID NO: 20397 - protein, 150 aa, unidentified
  source 1..150: note = Flavobacterium aciduliphilum
  REGION 1..150: note = tr|A0A328YDZ6|A0A328YDZ6_9FLAO 6-pyruvoyltetrahydropterin/6-carboxytetrahydropterin synthase OS=Flavobacterium aciduliphilum OX=1101402; GN = CLV55_106111 PE=4 SV=1
MSTIRITKIFNFETGHALFGYDGKCKNVHGHSYKLYVTVIGKPITDTKNTKYGMVIDFSDLKKIVKEEIVDVFDHATVFNKNTPHIELAAELQTRGHHVILVEYQPTSENMVIDFAKKITNRLPEGIQLHALKLQETESSYAEWYASDNE

SEQ ID NO: 20398 - protein, 136 aa, unidentified
  source 1..136: note = Flavobacterium aciduliphilum
  REGION 1..136: note = tr|A0A328YAJ7|A0A328YAJ7_9FLAO 6-carboxy-5,6,7,8-tetrahydropterin synthase; OS = Flavobacterium aciduliphilum OX=1101402 GN=CLV55_11128; PE = 3 SV=1
MRVTVSRKAHFNAAHRLYRKDWSMEQNDLVFGKCNNPNFHGHNYELIVSVTGEIDSETGYVIDTKVLSDFIRMYVEDAFDHKNLNLDVPEFADLNPTAENIAVVIWNKLRKHIDETKELEVVLYETPRNFVTYKGN

SEQ ID NO: 20399 - protein, 150 aa, unidentified
  source 1..150: note = Flavobacterium akiainvivens
  REGION 1..150: note = tr|A0A0M8MJC9|A0A0M8MJC9_9FLAO 6-pyruvoyl tetrahydropterin synthase OS=Flavobacterium akiainvivens; OX = 1202724 GN=AM493_12540 PE=4 SV=1
MSKIRITKQFTFETGHALYGYDGKCKNVHGHSYKLSVTVIGEPIADKNNVKYGMVIDFGDLKHIVKEEVVDIFDHATVFNQNTPHVELAAELKNRGHHVILVDYQPTSENMVIDFAAKISSRLPENIKLHSLRLQETETSYAEWYLSDNQ

SEQ ID NO: 20400 - protein, 136 aa, unidentified
  source 1..136: note = Flavobacterium akiainvivens
  REGION 1..136: note = tr|A0A0M8MAL6|A0A0M8MAL6_9FLAO 6-carboxy-5,6,7,8-tetrahydropterin synthase; OS = Flavobacterium akiainvivens OX=1202724 GN=AM493_08510; PE = 3 SV=1
MKVTVSRSAHFNAAHRLYRKDWDEQRNAEIFGKCNNPNYHGHNYELIVSVTGAIDPETGYVIDIKILKDIITQEVEEPFDHKNLNLDVPEFANLNPTAENIVVVIWNRIRRRIDSQMELEVTLYETPRNFVTYKGQ

SEQ ID NO: 20401 - protein, 136 aa, unidentified
  source 1..136: note = Flavobacterium album
  REGION 1..136: note = tr|A0A2S1QTK1|A0A2S1QTK1_9FLAO 6-carboxy-5,6,7,8-tetrahydropterin synthase; OS = Flavobacterium album OX=2175091 GN=HYN59_00835 PE=3 SV=1
MKVTVSRNAHFNAAHRLYRKDWDDAQNEAVFGKCNNHNFHGHNYELTVSVTGEIDPQTGYVMDMKILKDIIADEVETPFDHKNLNLDVPEFADLNPTAENIAVVIWNRIRKRIEPAMALEVVLYETPRNFVTYKGE

SEQ ID NO: 20402 - protein, 150 aa, unidentified
  source 1..150: note = Flavobacterium album
  REGION 1..150: note = tr|A0A2S1QVF2|A0A2S1QVF2_9FLAO 6-carboxytetrahydropterin synthase QueD OS=Flavobacterium album OX=2175091 GN=HYN59_04195 PE=4 SV=1
MSRIRITKQFTFETGHALYGYDGKCKNVHGHSYKLSVTVIGTPITDSGNVKFGMVIDFGDLKKIVKEEIVDVFDHATVFNQNTPHIELANELKDRGHHVILVDYQPTSENMVIDFADKIKKRLPSSIALHSLKLQETETSFAEWYQSDNQ

SEQ ID NO: 20403 - protein, 136 aa, unidentified
  source 1..136: note = Flavobacterium alvei
  REGION 1..136: note = tr|A0A2S4ZZI4|A0A2S4ZZI4_9FLAO 6-carboxy-5,6,7,8-tetrahydropterin synthase; OS = Flavobacterium alvei OX=2080416 GN=C3L50_15935 PE=3 SV=1
MKVTVSRKAHFNAAHRLYRKDWTFEQNDAVFGKCNNPNFHGHNYELIVSVTGEINPETGYVIDIKDLSDLILEEVEKPFDHKNLNLDVPEFENLNPTAENIVVVIWNKIRKKIEPELDLEVVLFETPRNFVTYKGE

SEQ ID NO: 20404 - protein, 150 aa, unidentified
  source 1..150: note = Flavobacterium alvei
  REGION 1..150: note = tr|A0A2S5AAV9|A0A2S5AAV9_9FLAO 6-carboxytetrahydropterin synthase QueD OS=Flavobacterium alvei OX=2080416 GN=C3L50_07615 PE=4 SV=1
MSKIRITKQFGFETGHALYGYDGKCKNVHGHSYKLSVTVIGTPITDRNNAKFGMVIDFTDLKKIVKEEIVDQFDHASVFNGTTPHIELANELKSRGHHVILVDYQPTSENMVVDFSKRIIGRLPENIKLFSLKLQETESSFAEWFASDNL

SEQ ID NO: 20405 - protein, 150 aa, Flavobacterium anhuiense
  REGION 1..150: note = tr|A0A444W0C0|A0A444W0C0_9FLAO 6-pyruvoyl tetrahydrobiopterin synthase OS=Flavobacterium anhuiense; OX = 459526 GN=NU08_1607 PE=4 SV=1
MSNIRITKQFSFETGHALYGYDGKCKNVHGHSYKLSVTVIGSPITDRSNVKFGMVIDFSDLKKIVKEEIVDQFDHATVFNQTTPHVELAAELKNRGHHVILVDYQPTSENMVVDFAERIVARLPEGISLFSLKLQETESSFAEWYASDNL

SEQ ID NO: 20406 - protein, 136 aa, Flavobacterium anhuiense
  REGION 1..136: note = tr|A0A1G5JBT9|A0A1G5JBT9_9FLAO 6-carboxy-5,6,7,8-tetrahydropterin synthase; OS = Flavobacterium anhuiense OX=459526 GN=NU08_4376 PE=3; SV = 1
MRVTISRKAHFNAAHRLHRKDWSFEKNDAVFGKCNNPNFHGHNYGLTVSVTGKIDPETGFVLDVKVLADIIREEVEIPFDHKNLNLDVPEFADLNPTAENIAVVIWNKIRQRIHADFDLEVVLNETERNFVTYKGE

SEQ ID NO: 20407 - protein, 136 aa, unidentified
  source 1..136: note = Flavobacterium aquaticum
  REGION 1..136: note = tr|A0A327YP01|A0A327YP01_9FLAO 6-pyruvoyltetrahydropterin/6-carboxytetrahydropterin synthase OS=Flavobacterium aquaticum OX=1236486; GN = B0I03_104166 PE=4 SV=1
MRVTVSRKAHFNAAHRLYRKDWSMEKNQEVFGKCNNPNFHGHNYELIVSVTGEVDKETGYVIDTKILSDLIKEHIEEAFDHKNLNEDVPEFKDLNPTAEHIAYIIWNKLRVLIDADKELEITLYETPRNFVTYKGL

SEQ ID NO: 20408 - protein, 150 aa, unidentified
  source 1..150: note = Flavobacterium aquaticum
  REGION 1..150: note = tr|A0A327YKM9|A0A327YKM9_9FLAO 6-pyruvoyltetrahydropterin/6-carboxytetrahydropterin synthase OS=Flavobacterium aquaticum OX=1236486; GN = B0I03_106173 PE=4 SV=1
MSNIRITKQFNFETGHALYGYDGKCKNVHGHSYKLSVTVIGKPIKDTSNVKYGMVIDFGDLKKIVKEQIVDVFDHATVFNKNTPHIELAHELKSRGHDVILVDYQPTSENMVIDFSNKIKNLLPENIKLHSLRLQETETSFAEWYASDNE

SEQ ID NO: 20409 - protein, 149 aa, Flavobacterium aquatile
  REGION 1..149: note = tr|A0A095SWS6|A0A095SWS6_9FLAO 6-carboxy-5,6,7,8-tetrahydropterin synthase; OS = Flavobacterium aquatile LMG 4008 = ATCC 11947; OX = 1453498 GN=LG45_05575 PE=3 SV=1
MSKIRITKQFSFETGHALYGYDGKCKNVHGHSYKLSVTVIGTPITDNSNVKFGMVIDFTDLKKIVREEIVDLFDHATVFNKNTPHVELAQELKNRGHHVILVDYQPTSENMVIDFAKKIQDRLPNDIQLHSLKLQETESSFAEWYASDN

SEQ ID NO: 20410 - protein, 136 aa, Flavobacterium aquatile
  REGION 1..136: note = tr|A0A095U0Q3|A0A095U0Q3_9FLAO 6-pyruvoyl tetrahydrobiopterin synthase OS=Flavobacterium aquatile LMG 4008 = ATCC 11947 OX=1453498 GN=LG45_07740 PE=4 SV=1
MKVTVSRKAHFNAAHRLYRKDWTMEQNDLVFGKCNNPNFHGHNYELIVSVTGEIDQETGFVIDVKILSDLIKAHIENAFDHKNLNLDVSDFVDLNPTAENIAVVIWNKLRKFIDANKELEVVLYETPRNFVTYKGT

SEQ ID NO: 20411 - protein, 136 aa, unidentified
  source 1..136: note = Flavobacterium aquicola
  REGION 1..136: note = tr|A0A3E0EJI2|A0A3E0EJI2_9FLAO 6-carboxy-5,6,7,8-tetrahydropterin synthase; OS = Flavobacterium aquicola OX=1682742 GN=C8P67_107242 PE=3; SV = 1
MRVTISRKAHFNAAHRLYRKDWTFEQNDAVFGKCNNPNFHGHNYELIVSVTGEIDQETGYVMDVKFLTDIIKEEVENQMDHKNLNLDVPEFQDLNPTAENIVVVIWNKIRKKVKPELDLEVILYETPRNFVTYKGE

SEQ ID NO: 20412 - protein, 150 aa, unidentified
  source 1..150: note = Flavobacterium aquicola
  REGION 1..150: note = tr|A0A3E0EP86|A0A3E0EP86_9FLAO 6-pyruvoyltetrahydropterin/6-carboxytetrahydropterin synthase OS=Flavobacterium aquicola OX=1682742; GN = C8P67_105346 PE=4 SV=1
MSNIRITKQFNFETGHALYGYDGKCKNVHGHSYKLSVTVIGKPITDRNNVKFGMVIDFSDLKKIVKEEIVDQFDHATVFNETTPHIELAKELKSRDHHVILVNYQPTSENMVVDFSQRIIRRLPENIKLFSLKLQETESSFAEWFASDNQ

SEQ ID NO: 20413 - protein, 150 aa, Flavobacterium aquidurense
  REGION 1..150: note = tr|A0A0N8VN20|A0A0N8VN20_9FLAO 6-pyruvoyl-tetrahydropterin synthase OS=Flavobacterium aquidurense OX=362413 GN=RC62_4273 PE=4 SV=1
MSNIRITKQFSFETGHALYGYDGKCKNVHGHSYKLSVTVIGSPITDRSNVKFGMVIDFSDLKKIVKEEIVDQFDHATVFNETTPHIELANELKNRGHHVILVDYQPTSENMVVDFADRIIARLPKDISLYSLKLQETESSFAEWYASDNL

SEQ ID NO: 20414 - protein, 136 aa, Flavobacterium aquidurense
  REGION 1..136: note = tr|A0A0Q0SBZ9|A0A0Q0SBZ9_9FLAO 6-carboxy-5,6,7,8-tetrahydropterin synthase; OS = Flavobacterium aquidurense OX=362413 GN=RC62_3952 PE=3; SV = 1
MKVTISRKAHFNAAHRLHRKDWTFEKNNAVFGKCNNPNFHGHNYGLTVSVTGKIDPETGFVLDVKVLADIINEEVEIPFDHKNLNLDVPEFQDLNPTAENIAVVIWNKIRKRIQPDFDLEIVLNETDRNFVTYKGE

SEQ ID NO: 20415 - protein, 137 aa, Flavobacterium araucananum
  REGION 1..137: note = tr|A0A227PGY9|A0A227PGY9_9FLAO 6-carboxy-5,6,7,8-tetrahydropterin synthase; OS = Flavobacterium araucananum OX=946678 GN=B0A64_05215; PE = 3 SV=1
MKVTISRKAHFNAAHRLHRKDWTFEKNDAVFGKCNNPNFHGHNYGLTVSVTGKIDPETGFVVDVKVLADIIHEEVEIPFDHKNLNLDVPEFQDLNPTAENIAVVIWNKIKKRIQPDFDLEIVLNETDRNFVTYKGEE

SEQ ID NO: 20416 - protein, 150 aa, Flavobacterium araucananum
  REGION 1..150: note = tr|A0A227PF20|A0A227PF20_9FLAO 6-carboxytetrahydropterin synthase QueD OS=Flavobacterium araucananum OX=946678 GN=B0A64_07855 PE=4 SV=1
MSNIRITKQFSFETGHALYGYDGKCKNVHGHSYKLSVTVIGSPITDRSNVKFGMVIDFSDLKKIVKEEIVDQFDHATVFNETTPHVELANELKNRGHHVILVDYQPTSENMVVDFAERIIARLPKEIALFSLKLQETESSFAEWYASDNI

SEQ ID NO: 20417 - protein, 136 aa, unidentified
  source 1..136: note = Flavobacterium arcticum
  REGION 1..136: note = tr|A0A345H964|A0A345H964_9FLAO 6-carboxy-5,6,7,8-tetrahydropterin synthase; OS = Flavobacterium arcticum OX=1784713 GN=DVK85_02325 PE=3; SV = 1
MKVTVSRKAHFNAAHRLYRPDWAEERNDAVFGKCNNPNFHGHNYDLIVSVTGDIDPDTGYVIDIKVLKDIIKEEVEDAFDHKNLNLDVPEFADLNPTAENIVVVIWNKIRKRIANTMALEVVLYETPRNFVTYKGE

SEQ ID NO: 20418 - protein, 149 aa, unidentified
  source 1..149: note = Flavobacterium arcticum
  REGION 1..149: note = tr|A0A345HBU7|A0A345HBU7_9FLAO 6-carboxy-5,6,7,8-tetrahydropterin synthase; OS = Flavobacterium arcticum OX=1784713 GN=DVK85_07275 PE=3; SV = 1
MSKIRITKQFTFETGHALYGYDGKCKNVHGHSYKLSVTVIGIPITDNNHVKYGMVIDFGDLKKIVKEEIVDVFDHATVFNQNTPHIELAKELQKREHHVILVDYQPTSENMVIDFAKKIKNRLPDSIKLHSLKLQETESSFAEWYQSDN

SEQ ID NO: 20419 - protein, 136 aa, unidentified
  source 1..136: note = Flavobacterium aurantiibacter
  REGION 1..136: note = tr|A0A256ABV5|A0A256ABV5_9FLAO 6-pyruvoyl tetrahydrobiopterin synthase OS=Flavobacterium aurantiibacter OX=2023067 GN=CHX27_00785 PE=4 SV=1
MRVTVSRHAHFNAAHRLYRKDWTFEKNQEVFGKCNNPNYHGHNYELIAAVTGEVDPETGYVIDVKILADIIKAEVEQKFDHKNLNLDCEEFANLNPTAEHIAYVIYHKVKPKLPEHLDLNITLYETPRNFVSYDGR

SEQ ID NO: 20420 - protein, 150 aa, unidentified
  source 1..150: note = Flavobacterium aurantiibacter
  REGION 1..150: note = tr|A0A255ZRF3|A0A255ZRF3_9FLAO 6-carboxytetrahydropterin synthase QueD OS=Flavobacterium aurantiibacter OX=2023067 GN=CHX27_10340 PE=4 SV=1
MSKIRITKQFNFETGHALYGYDGKCKNVHGHSYKLSVTVIGVPIADPNNVKFGMVIDFSDLKRIVKEEIVDQFDHATVFNKNTPHVELAAELIQRQHHVLLVDYQPTSENMVIDFAARIKARLPQNIELHSLKLQETGTSFAEWYAADQA

SEQ ID NO: 20421 - protein, 136 aa, Flavobacterium beibuense
  REGION 1..136: note = tr|A0A444WIC7|A0A444WIC7_9FLAO 6-carboxy-5,6,7,8-tetrahydropterin synthase; OS = Flavobacterium beibuense OX=657326 GN=NU09_0210 PE=3; SV = 1
MRVTVSRKAHFNAAHRLYRKDWSEEQNDTVFGKCNNPNFHGHNYELIVGVTGEIDPQTGYVIDIKVLKDIIAEEVEVPFDHKNLNLDVPEFKDLNPTAENIVVVIWNRIRRRIDSQMDLEVVLYETPRNFVTYKGI

SEQ ID NO: 20422 - protein, 149 aa, Flavobacterium beibuense
  REGION 1..149: note = tr|A0A0A2LJ82|A0A0A2LJ82_9FLAO 6-carboxy-5,6,7,8-tetrahydropterin synthase; OS = Flavobacterium beibuense F44-8 OX=1406840 GN=Q763_12320; PE = 3 SV=1
MSKIRITKQFNFETGHALYGYDGKCKNVHGHSYKLSVTVIGSPITDTSNVKYGMVIDFGDLKKIVKEEIVDIFDHATVFNQNTPHIELANELKTRGHHVILVDYQPTSENMVIDFAAKIKSRLPENIALHSLRLQETETSFAEWYQSDN

SEQ ID NO: 20423 - protein, 136 aa, Flavobacterium branchiophilum
  REGION 1..136: note = tr|A0A543G4E7|A0A543G4E7_9FLAO 6-carboxy-5,6,7,8-tetrahydropterin synthase; OS = Flavobacterium branchiophilum OX=55197 GN=BC670_1810; PE = 3 SV=1
MIVTVSRKAHFNAAHRLYRKDWSMQQNDAVFGKCNNPHFHGHNYELIVSVTGAVNPETGFVIDVKILADLIKIHIEEAFDHRNLNLDVPEFEHLNPTAEHIAVVIWNKLRPYIDPAHLLEIQLYETNRNFVTYKGT

SEQ ID NO: 20424 - protein, 136 aa, Flavobacterium branchiophilum
  REGION 1..136: note = tr|G2Z712|G2Z712_FLABF 6-carboxy-5,6,7,8-tetrahydropterin synthase; OS = Flavobacterium branchiophilum (strain FL-15) OX=1034807; GN = ygcM PE=3 SV=1
MIVTVSRKAHFNAAHRLYRKDWSMQQNDAVFGKCNNPHFHGHNYELIVSVTGAVNPETGFVIDVKILADLIKIHIEEAFDHRNLNLDVPEFEHLNPTAEHIAVVIWNKLRPYIDPAHLLEIQLYETNRNFVTYKGS

SEQ ID NO: 20425 - protein, 136 aa, Flavobacterium caeni
  REGION 1..136: note = tr|A0A1G5FNS4|A0A1G5FNS4_9FLAO 6-carboxy-5,6,7,8-tetrahydropterin synthase; OS = Flavobacterium caeni OX=490189 GN=SAMN02927903_01353; PE = 3 SV=1
MRVTVSRKSHFNAAHRLYRKDWSMEKNDSVFGKCNNANFHGHNYEVIASVTGEIDPETGYVIDIKELAQYIYEEVELPLDHKNLNLDVPEFANLNPTAEHIVVVIWNKLRKRVKSEHELEVVLYETPRNFVSYRGQ

SEQ ID NO: 20426 - protein, 150 aa, Flavobacterium caeni
  REGION 1..150: note = tr|A0A1G5HA66|A0A1G5HA66_9FLAO 6-pyruvoyltetrahydropterin/6-carboxytetrahydropterin synthase OS=Flavobacterium caeni OX=490189; GN = SAMN02927903_01830 PE=4 SV=1
MTKIRITKQFSFETGHALFGYDGKCKNVHGHSYKLSVTVIGTPITDRDNVKFGMVIDFSDLKTIVKEEIVDLFDHATVFNQTTPHVELAKELKQRGHHVILVDYQPTSENMVVDFAKKIINRLPNSIALHSLRLQETETSYAEWYASDNL

SEQ ID NO: 20427 - protein, 136 aa, Flavobacterium cauense
  REGION 1..136: note = tr|V6S3D3|V6S3D3_9FLAO 6-carboxy-5,6,7,8-tetrahydropterin synthase; OS = Flavobacterium cauense R2A-7 OX=1341154 GN=IP98_01674; PE = 3 SV=1
MRVTVSRKAHFNAAHRLYRKDWTAEQNEAVFGKCNNPNFHGHNYELIVSVTGKINPETGYVMDIKDLADIIYEEVETQFDHKNLNLDVPEFQDLNPTAENIVVVIWNKIRKRIMAGNDLEVVLYETPRNFVTYKGE

SEQ ID NO: 20428 - protein, 149 aa, Flavobacterium cauense
  REGION 1..149: note = tr|V6S0C8|V6S0C8_9FLAO 6-carboxy-5,6,7,8-tetrahydropterin synthase; OS = Flavobacterium cauense R2A-7 OX=1341154 GN=IP98_01493; PE = 3 SV=1
MSNIRITKQFTFETGHALYGYDGKCKNVHGHSYKLSVTVIGKPITDTSNVKFGMVIDFGDLKKIVKEEIVDVFDHATVFNQNTPHIELANELKSRGHHVILVDYQPTSENMVIDFAEKIKSRLPQNIRLHSLKLQETESSFAEWYQSDN

SEQ ID NO: 20429 - protein, 136 aa, Flavobacterium cheniae
  REGION 1..136: note = tr|A0A562KNY8|A0A562KNY8_9FLAO 6-pyruvoyltetrahydropterin/6-carboxytetrahydropterin synthase OS=Flavobacterium cheniae OX=295428 GN=IP97_00575; PE = 4 SV=1
MRVTVSRKAHFNAAHRLYRKDWSMEKNQEVFGKCNNPNFHGHNYELIVSVTGEVDMETGYVIDTKILSDLIKEHIEEAFDHKNLNEDVPEFKDLNPTAEHIAYIIWNKLRVLIASDKELEITLYETPRNFVTYKGN

SEQ ID NO: 20430 - protein, 150 aa, Flavobacterium cheniae
  REGION 1..150: note = tr|A0A562KFP4|A0A562KFP4_9FLAO 6-pyruvoyltetrahydropterin/6-carboxytetrahydropterin synthase OS=Flavobacterium cheniae OX=295428 GN=IP97_01816; PE = 4 SV=1
MSNIRITKQFNFETGHALYGYDGKCKNVHGHSYKLSVTVIGKPIKDTSNVKYGMVIDFGDLKKIVKEQIVDVFDHATVFNKNTPHIELAHELKSRGHDVILVDYQPTSENMVIDFSNKIKNLLPNNIKLHSLRLQETETSFAEWFASDNE

SEQ ID NO: 20431 - protein, 150 aa, Flavobacterium chilense
  REGION 1..150: note = tr|A0A1M7DVD6|A0A1M7DVD6_9FLAO 6-pyruvoyltetrahydropterin/6-carboxytetrahydropterin synthase OS=Flavobacterium chilense OX=946677; GN = SAMN05444484_102739 PE=4 SV=1
MSNIRITKQFSFETGHALYGYDGKCKNVHGHSYKLSVTVIGSPITDRSNVKFGMVIDFSDLKKIVKEEIVDQFDHATVFNETTPHIELANELKNRGHHVILVDYQPTSENMVVDFADRIRARLPKEISLFSLKLQETESSFAEWYASDNL

SEQ ID NO: 20432 - protein, 137 aa, Flavobacterium chilense
  REGION 1..137: note = tr|A0A1M7GKL9|A0A1M7GKL9_9FLAO 6-carboxy-5,6,7,8-tetrahydropterin synthase; OS = Flavobacterium chilense OX=946677; GN = SAMN05444484_104258 PE=3 SV=1
MKVTISRKAHFNAAHRLHRKDWTFEKNDAVFGKCNNPNFHGHNYGLTVSVTGKIDPETGFVLDVKVLADIIRDEVEIPFDHKNLNLDVPEFQDLNPTAENIAVVIWNKIKKRIQPDFDLEIVLNETDRNFVTYKGEE

SEQ ID NO: 20433 - protein, 150 aa, unidentified
  source 1..150: note = Flavobacterium circumlabens
  REGION 1..150: note = tr|A0A4Y7U7Z0|A0A4Y7U7Z0_9FLAO 6-carboxytetrahydropterin synthase OS=Flavobacterium circumlabens OX=2133765 GN=D0809_19440 PE=4 SV=1
MSNIRITKQFSFETGHALYGYDGKCKNVHGHSYKLSVTVIGSPITDRSNVKYGMVIDFSDLKKIVKEEIVDQFDHATVFNETTPHIELANELKNRGHHVILVDYQPTSENMVVDFSDRIIARLPAGISLFSLKLQETESSFAEWFASDNV

SEQ ID NO: 20434 - protein, 135 aa, unidentified
  source 1..135: note = Flavobacterium circumlabens
  REGION 1..135: note = tr|A0A4Y7UAB0|A0A4Y7UAB0_9FLAO 6-carboxytetrahydropterin synthase OS=Flavobacterium circumlabens OX=2133765 GN=D0809_17225 PE=4 SV=1
MNITVCRKAYFNACHRMHNPNWSDAKNKSVFGVCNNANYHGHNYELIVKLTGQINPETGYIMDMKILADLIKVEIEDRFDHKNLNLDCPEFAHKIASTENFALVIFSILQPLIPKEHQMAITLFETNKNYVEIRE

SEQ ID NO: 20435 - protein, 135 aa, Flavobacterium columnare
  REGION 1..135: note = tr|A0A2T4HKN7|A0A2T4HKN7_9FLAO 6-carboxy-5,6,7,8-tetrahydropterin synthase; OS = Flavobacterium columnare OX=996 GN=C6N29_01740 PE=3 SV=1
MRVTVSRKAHFNAAHRLYRKDWTDEQNQKVFGKCNNPNFHGHNYELIVSVTGSINPETGYVIDIKDLADIIYEEVEIPFDHKNLNLDVPEFENVIPTAENIVVVIWNKIRKRIKKENDLEVTLFETPRNFVTYKG

SEQ ID NO: 20436 - protein, 150 aa, Flavobacterium columnare
  REGION 1..150: note = tr|A0A2T4HDC5|A0A2T4HDC5_9FLAO 6-carboxytetrahydropterin synthase OS=Flavobacterium columnare OX=996 GN=C6N29_04455 PE=4 SV=1
MSKIRITKQFNFETGHALYGYDGKCKNVHGHSYKLSVTVIGSPIADRENVKYGMVIDFSDLKKIVKDEIVDVFDHATVFNATTPHIELANELKQRGHHVILVDYQPTSENMVIDFAAKISKHLPSQIKLHSLRLQETESSFAEWYASDNL

SEQ ID NO: 20437 - protein, 136 aa, unidentified
  source 1..136: note = Flavobacterium commune
  REGION 1..136: note = tr|A0A1D9P794|A0A1D9P794_9FLAO 6-carboxy-5,6,7,8-tetrahydropterin synthase; OS = Flavobacterium commune OX=1306519 GN=BIW12_02970 PE=3; SV = 1
MRVTISRKAHFNAAHRLYRKDWTFEKNDAVFGKCNNPNFHGHNYELIVSVTGAIDPETGFVMDAKILAAIIKEEVEDAFDHKNLNLDVAEFENLNPTAENIAVVIWNKVRKRIDSQFDLEVVLYETPRNFVTYKGE

SEQ ID NO: 20438 - protein, 150 aa, unidentified
  source 1..150: note = Flavobacterium commune
  REGION 1..150: note = tr|A0A1D9PB61|A0A1D9PB61_9FLAO 6-carboxytetrahydropterin synthase QueD OS=Flavobacterium commune OX=1306519 GN=BIW12_07705 PE=4 SV=1
MSNIRITKQFSFETGHALYGYDGKCKNVHGHSYKLSVTVIGKPITNRNDVKFGMVIDFSDLKKIVKEEIVDQFDHATVFNETTPHVELAQELKNRGHHVILVDYQPTSENMVVDFAERIIRRLPERITLFSLKLQETESSFAEWFASDNL

SEQ ID NO: 20439 - protein, 150 aa, unidentified
  source 1..150: note = Flavobacterium crassostreae
  REGION 1..150: note = tr|A0A1B9E667|A0A1B9E667_9FLAO 6-pyruvoyl tetrahydropterin synthase OS=Flavobacterium crassostreae; OX = 1763534 GN=LPBF_05060 PE=4 SV=1
MSNIRITKQFNFETGHALYGYDGKCKNVHGHSYKLSVTVIGRPITNREDAKFGMVIDFSDLKKIVKEEIVDQFDHATVFNQTTPHIELAMELKKRGHHVILVDYQPTSENMVIDFAQRIKSRLPIGIQLFSLKLQETESSFAEWFASDNI

SEQ ID NO: 20440 - protein, 136 aa, unidentified
  source 1..136: note = Flavobacterium crassostreae
  REGION 1..136: note = tr|A0A1B9E3J4|A0A1B9E3J4_9FLAO 6-carboxy-5,6,7,8-tetrahydropterin synthase; OS = Flavobacterium crassostreae OX=1763534 GN=LPBF_06200; PE = 3 SV=1
MKVTISRKAHFNAAHRLYRKDWSLEKNDAVFGKCNNPNFHGHNYDLIVSVTGPIDPETGFVMDVKFLAEIIKEEVELQLDHKNLNLDVPEFQDLNPTAENIAVVIWNKIRKRIQKTFELEVVLYETARNFVTYKGE

SEQ ID NO: 20441 - protein, 136 aa, Flavobacterium croceum
  REGION 1..136: note = tr|A0A2S4N912|A0A2S4N912_9FLAO 6-pyruvoyltetrahydropterin/6-carboxytetrahydropterin synthase OS=Flavobacterium croceum DSM 17960 OX=1121886; GN = Q361_10561 PE=4 SV=1
MKATVSRKAHFNAAHRLYRKDWDNAKNEAVFGKCNNPNFHGHNYELIVSVTGEISQETGYVVDTKVLSDLIKIHIEDVLDHKNLNLDVPDFQNLIPTAENIAVVIWNKLRPYIDINCKLEITLYETPRNFVTFCGE

SEQ ID NO: 20442 - protein, 152 aa, Flavobacterium croceum
  REGION 1..152: note = tr|A0A2S4NBD9|A0A2S4NBD9_9FLAO 6-pyruvoyltetrahydropterin/6-carboxytetrahydropterin synthase OS=Flavobacterium croceum DSM 17960 OX=1121886; GN = Q361_101125 PE=4 SV=1
MQQKIRITKIFNFETGHALYGYDGKCKNVHGHSYKLFVTVIGVPIHDTSHVKYGMVIDFSDLKKIVKEEIVDVFDHATVFNQNTPHIELAHELKQRGHHVILVNYQPTSENMVIDFAKKIQSRLPQDIVLYSLKLQETESSFAEWYAEDNTL

SEQ ID NO: 20443 - protein, 136 aa, unidentified
  source 1..136: note = Flavobacterium crocinum
  REGION 1..136: note = tr|A0A2S1YFY9|A0A2S1YFY9_9FLAO 6-carboxy-5,6,7,8-tetrahydropterin synthase; OS = Flavobacterium crocinum OX=2183896 GN=HYN56_01390 PE=3; SV = 1
MRVTISRKAHFNAAHRLHRKDWSFEKNDAVFGKCNNPNFHGHNYGLTVSVTGKIDPETGFVLDVKVLADIIREEVEIPFDHKNLNLDVPEFLDLNPTAENIAVVIWNKIRQRIHTDFDLEVVLNETDRNFVTYKGE

SEQ ID NO: 20444 - protein, 150 aa, unidentified
  source 1..150: note = Flavobacterium crocinum
  REGION 1..150: note = tr|A0A2S1YGS3|A0A2S1YGS3_9FLAO 6-carboxytetrahydropterin synthase QueD OS=Flavobacterium crocinum OX=2183896 GN=HYN56_03065 PE=4 SV=1
MSNIRITKQFSFETGHALYGYDGKCKNVHGHSYKLSVTVIGSPITDRSNVKFGMVIDFSDLKKIVKEEIVDQFDHATVFNQTTPHIELANELKNRGHHVILVDYQPTSENMVVDFAERIKNRLPAGIALFSLKLQETESSFAEWYASDNV

SEQ ID NO: 20445 - protein, 136 aa, Flavobacterium cucumis
  REGION 1..136: note = tr|A0A1M7ZWC2|A0A1M7ZWC2_9FLAO 6-pyruvoyltetrahydropterin/6-carboxytetrahydropterin synthase OS=Flavobacterium cucumis OX=416016; GN = SAMN05443547_1535 PE=4 SV=1
MRVTVSRKAHFNAAHRLYRKDWSMEKNQDVFGKCNNPNFHGHNYELIVSVTGVVDKETGYVIDTKILSDLIKEHIEEAFDHKNLNEDVLEFKDLNPTAEHIAYVIWNKLRVLIDVDKELEITLYETPRNFVTYKGL

SEQ ID NO: 20446 - protein, 149 aa, Flavobacterium cucumis
  REGION 1..149: note = tr|A0A1M7ZV47|A0A1M7ZV47_9FLAO 6-carboxy-5,6,7,8-tetrahydropterin synthase; OS = Flavobacterium cucumis OX=416016 GN=SAMN05443547_1021; PE = 3 SV=1
MSKIRITKQFSFETGHALYGYDGKCKNVHGHSYKLSVTVIGTPITDTNNVKYGMVIDFGDLKKIVKEQIVDVFDHATVFNKNTPHIELANELKSRGHDVILVDYQPTSENMVIDFSNKIKNLLPENIRLHSLKLQETETSFAEWYASDN

SEQ ID NO: 20447 - protein, 150 aa, unidentified
  source 1..150: note = Flavobacterium cupreum
  REGION 1..150: note = tr|A0A434A1R0|A0A434A1R0_9FLAO 6-carboxytetrahydropterin synthase OS=Flavobacterium cupreum OX=2133766 GN=D0817_22425 PE=4 SV=1
MSNIRITKQFSFETGHALYGYDGKCKNVHGHSYKLSVTVIGSPITDRSNVKYGMVIDFSDLKKIVKEEIVDQFDHATVFNETTPHIELANELKNRGHHVILVDYQPTSENMVVDFSERIIARLPAGISLFSLKLQETESSFAEWFASDNV

SEQ ID NO: 20448 - protein, 136 aa, unidentified
  source 1..136: note = Flavobacterium cupreum
  REGION 1..136: note = tr|A0A434A7G1|A0A434A7G1_9FLAO 6-carboxy-5,6,7,8-tetrahydropterin synthase; OS = Flavobacterium cupreum OX=2133766 GN=D0817_11070 PE=3; SV = 1
MRVTISRKAHFNAAHRLHRKDWTSEKNSAVFGKCNNPNFHGHNYGLTVSVTGKIDPETGFVLDVKVLADIILEEVEIPFDHKNLNLDVPEFQDLNPTAENIAVVIWNKIRKRIQPDFDLEIVLNETDRNFVTYKGE

SEQ ID NO: 20449 - protein, 150 aa, unidentified
  source 1..150: note = Flavobacterium cutihirudinis
  REGION 1..150: note = tr|A0A3D9FV56|A0A3D9FV56_9FLAO 6-pyruvoyltetrahydropterin/6-carboxytetrahydropterin synthase OS=Flavobacterium cutihirudinis OX=1265740; GN = BD847_1316 PE=4 SV=1
MSNIRITKQFSFETGHALYGYDGKCKNVHGHSYKLSVTVIGSPITDRSNVKFGMVIDFSDLKKIVKEEIVDQFDHATVFNQTTPHIELANELKNRGHHVILVDYQPTSENMVVDFAERIIGRLPAGISLFSLKLQETESSFAEWYASDNL

SEQ ID NO: 20450 - protein, 136 aa, unidentified
  source 1..136: note = Flavobacterium cutihirudinis
  REGION 1..136: note = tr|A0A3D9FK32|A0A3D9FK32_9FLAO 6-carboxy-5,6,7,8-tetrahydropterin synthase; OS = Flavobacterium cutihirudinis OX=1265740 GN=BD847_3827; PE = 3 SV=1
MKVTISRKAHFNAAHRLHRKDWTFEKNEAVFGKCNNPNFHGHNYGLTVSVTGKIDPETGFVLDVKVLADIIRDEVEIPFDHKNLNLDVPEFQDLNPTAENIAVVIWNKIRKRIHTDFDLEIVLNETDRNFVTYKGE

SEQ ID NO: 20451 - protein, 136 aa, unidentified
  source 1..136: note = Flavobacterium cyanobacteriorum
  REGION 1..136: note = tr|A0A256A2U4|A0A256A2U4_9FLAO 6-carboxy-5,6,7,8-tetrahydropterin synthase; OS = Flavobacterium cyanobacteriorum OX=2022802; GN = CHU92_00910 PE=3 SV=1
MKVTVSRSAHFNAAHRLYRKDWPDERNQAVFGKCSNPNFHGHNYELIVNVKGEIDPETGYVMDMKILKDIIAQEVEEPFDHKNLNLEVPDFADLNPTAENIAVVIWNRLRRRIENTMELEVVLYETPRNFVTYKGE

SEQ ID NO: 20452 - protein, 149 aa, unidentified
  source 1..149: note = Flavobacterium cyanobacteriorum
  REGION 1..149: note = tr|A0A255YZU1|A0A255YZU1_9FLAO 6-carboxy-5,6,7,8-tetrahydropterin synthase; OS = Flavobacterium cyanobacteriorum OX=2022802; GN = CHU92_12650 PE=3 SV=1
MSTIRITKQFSFETGHALYGYDGKCKNVHGHSYKLSVTVIGTPITDTDNVKYGMVIDFGDLKNIVKQHIVDVFDHATVFNKNTPHVELANELRERGHDVILVDYQPTSENMVIDFAEKIKRHLPPSIQLHSLRLQETETSYAEWYQSDN

SEQ ID NO: 20453 - protein, 136 aa, Flavobacterium daejeonense
  REGION 1..136: note = tr|A0A0Q0W476|A0A0Q0W476_9FLAO 6-carboxy-5,6,7,8-tetrahydropterin synthase; OS = Flavobacterium daejeonense OX=350893 GN=RCH33_1594 PE=3; SV = 1
MKVTISRKAHFNAAHRLYRKDWTFEQNDAVFGKCNNPNFHGHNYELVVSVTGAVDPETGFVMDAKILADIIKIEIEDAFDHKNLNLDVPEFENLNPTAENIAIVIWNKIRKRIESKFELEVVLYETPRNFVTYKGL

SEQ ID NO: 20454 - protein, 150 aa, Flavobacterium daejeonense
  REGION 1..150: note = tr|A0A0Q0WGN9|A0A0Q0WGN9_9FLAO Queuosine biosynthesis QueD, PTPS-I OS=Flavobacterium daejeonense; OX = 350893 GN=RCH33_592 PE=4 SV=1
MSKIRITKQFSFETGHALYGYDGKCKNVHGHSYKLSVTVIGKPIKNRNDVKFGMVIDFGDLKKIVKEEVVDQFDHATVFNETTPHVELAAELKNRGHHVILVDYQPTSENMVIDFAQRISGRLPEGIELFSLKLQETDSSFAEWFASDNL

SEQ ID NO: 20455 - protein, 149 aa, unidentified
  source 1..149: note = Flavobacterium dankookense
  REGION 1..149: note = tr|A0A4R6QDM5|A0A4R6QDM5_9FLAO 6-carboxy-5,6,7,8-tetrahydropterin synthase; OS = Flavobacterium dankookense OX=706186 GN=BC748_1280 PE=3; SV = 1
MSNIRITKQFSFETGHALYGYDGKCKNVHGHSYKLSVTVIGKPITDNSNVKFGMVIDFSDLKKIVKEEIVDIFDHATVFNQNTPHIELANELKNRGHHVILVEYQPTSENMVIDFAKKIKDRLPKEILLHSLKLQETETSFAEWYASDN

SEQ ID NO: 20456 - protein, 136 aa, unidentified
  source 1..136: note = Flavobacterium dankookense
  REGION 1..136: note = tr|A0A4R6QAN7|A0A4R6QAN7_9FLAO 6-carboxy-5,6,7,8-tetrahydropterin synthase; OS = Flavobacterium dankookense OX=706186 GN=BC748_1494 PE=3; SV = 1
MKVTVSRKAHFNAAHRLYRKDWTMEQNDLVFGKCNNPNYHGHNYELIVSVTGEIDQETGFVIDVKILSDLIKEHIENAFDHKNLNLDVVDFADLNPTAENIAVVIWNKLRKFIDANKELEVVLYETPRNFVTYKGN

SEQ ID NO: 20457 - protein, 150 aa, Flavobacterium defluvii
  REGION 1..150: note = tr|A0A1M5LRL8|A0A1M5LRL8_9FLAO 6-pyruvoyltetrahydropterin/6-carboxytetrahydropterin synthase OS=Flavobacterium defluvii OX=370979; GN = SAMN05443663_103445 PE=4 SV=1
MSNIRITKQFSFETGHALYGYDGKCKNVHGHSYKLSVTVIGSPITDRSNVKFGMVIDFSDLKKIVKEEIVDQFDHATVFNQTTPHVELANELKNRGHHVILVDYQPTSENMVVDFAERIMARLPKGISLFSLKLQETESSFAEWYASDNL

SEQ ID NO: 20458 - protein, 136 aa, Flavobacterium defluvii
  REGION 1..136: note = tr|A0A1M5NP75|A0A1M5NP75_9FLAO 6-carboxy-5,6,7,8-tetrahydropterin synthase; OS = Flavobacterium defluvii OX=370979; GN = SAMN05443663_104263 PE=3 SV=1
MRVTISRKAHFNAAHRLHRKDWSLEKNNAVFGKCNNPNFHGHNYGLTVSVTGKIDPETGFVLDVKVLADIILEEVEIPFDHKNLNLDVPEFQDLNPTAENIAVVIWNKIRKRIQPDFDLEVVLYETDRNFVTYKGE

SEQ ID NO: 20459 - protein, 150 aa, Flavobacterium degerlachei
  REGION 1..150: note = tr|A0A1H3D4L7|A0A1H3D4L7_9FLAO 6-pyruvoyltetrahydropterin/6-carboxytetrahydropterin synthase OS=Flavobacterium degerlachei OX=229203; GN = SAMN05444338_11279 PE=4 SV=1
MSNIRITKKFSFETGHALYGYDGKCKNVHGHSYKLSVTVIGSPIENRNDVKFGMVIDFTDLKKIVKEEIVDQFDHATVFNETTPHVELAHELKNRGHHVILVDYQPTSENMVIDFAQRIIGRLPADIRLFSLKLQETDSSFAEWYASDNL

SEQ ID NO: 20460 - protein, 136 aa, Flavobacterium degerlachei
  REGION 1..136: note = tr|A0A1H2W0M5|A0A1H2W0M5_9FLAO 6-carboxy-5,6,7,8-tetrahydropterin synthase; OS = Flavobacterium degerlachei OX=229203; GN = SAMN05444338_104201 PE=3 SV=1
MRVTISRKAHFNAAHRLYRKDWTFEQNDTVFGKCNNPNFHGHNYDLIVSVTGEIDQETGFVMDVKILADLIKEEVENKFDHKNLNVDVPEFENLNPTAENIVVVIWDKLRKKIKSEFDLEVVLYETPRNFVTYKGE

SEQ ID NO: 20461 - protein, 149 aa, unidentified
  source 1..149: note = Flavobacterium endophyticum
  REGION 1..149: note = tr|A0A495MNT3|A0A495MNT3_9FLAO 6-carboxy-5,6,7,8-tetrahydropterin synthase; OS = Flavobacterium endophyticum OX=1540163 GN=CLV94_1100; PE = 3 SV=1
MSKIRITKQFSFETGHALYGYDGKCKNVHGHSYKLSVTVIGTPISDNTNVKFGMVIDFSDLKKIVREEVVDVFDHATVFNKNTPHIELAEELKSRDHHVILVNYQPTSENMVIDFAAKIKSRLPENITLHSLRLQETETSFAEWFQSDN

SEQ ID NO: 20462 - protein, 136 aa, unidentified
  source 1..136: note = Flavobacterium endophyticum
  REGION 1..136: note = tr|A0A495M6T2|A0A495M6T2_9FLAO 6-carboxy-5,6,7,8-tetrahydropterin synthase; OS = Flavobacterium endophyticum OX=1540163 GN=CLV94_2369; PE = 3 SV=1
MRVTVSRKAHFNAAHRLYRKDWSDEKNNSVFGKCNNPNFHGHNYELVASVTGSINPDTGYVIDIKDLADIILEEVEKPFDHKNLNLDVPEFFELNPTAENIAVVIWNKIRKRLGADMDLEIVLYETPRNFVSYKGE

SEQ ID NO: 20463 - protein, 136 aa, unidentified
  source 1..136: note = Flavobacterium enshiense
  REGION 1..136: note = tr|A0A0A2MX16|A0A0A2MX16_9FLAO 6-carboxy-5,6,7,8-tetrahydropterin synthase; OS = Flavobacterium enshiense DK69 OX=1107311 GN=Q767_01040; PE = 3 SV=1
MRVTVSRKAHFNAAHRLYRKDWSDEQNNRVFGKCNNPNFHGHNYELIVSVTGKINPETGYVMDIKDLADIIYEEVESRFDHKNLNLDVVEFQELNPTAENIVVVIWNLIRKRITPENDLEVVLYETPRNFVTYSGK

SEQ ID NO: 20464 - protein, 149 aa, unidentified
  source 1..149: note = Flavobacterium enshiense
  REGION 1..149: note = tr|V6SB98|V6SB98_9FLAO 6-carboxy-5,6,7,8-tetrahydropterin synthase; OS = Flavobacterium enshiense DK69 OX=1107311 GN=Q767_07800; PE = 3 SV=1
MSNIRITKQFSFETGHALYGYDGKCKNVHGHSYKLSVTVIGKPITDTSNVKYGMVIDFGDLKKIVKEEIVDLFDHATVFNKNTPHIELANELKNRGHHVILVDYQPTSENMVIDFAEKIKSRLPQDIRLHSLKLQETESSFAEWYHSDN

SEQ ID NO: 20465 - protein, 150 aa, unidentified
  source 1..150: note = Flavobacterium faecale
  REGION 1..150: note = tr|A0A2S1LC07|A0A2S1LC07_9FLAO 6-carboxytetrahydropterin synthase QueD OS=Flavobacterium faecale OX=1355330 GN=FFWV33_05835 PE=4 SV=1
MSNIRITKQFNFETGHALYGYDGKCKNVHGHSYKLSVTVMGRPIKDRTNVKFGMVIDFSDLKKIVTEEVVDQFDHATVFNETTPHVELAKELQIRGHHVILVDYQPTSENMVIDFAERIKRRLPVGIELFSLKLQETESSFAEWYASDNL

SEQ ID NO: 20466 - protein, 136 aa, unidentified
  source 1..136: note = Flavobacterium faecale
  REGION 1..136: note = tr|A0A2S1LCL9|A0A2S1LCL9_9FLAO 6-carboxy-5,6,7,8-tetrahydropterin synthase; OS = Flavobacterium faecale OX=1355330 GN=FFWV33_08065 PE=3; SV = 1
MKVTISRKAHFNAAHRLYRKDWSFEKNDAIFGKCNNPNYHGHNYELIVSVTGPIDPETGFVVDVKILSDIIKEEVENPFDHKNLNLDVAEFQDLNPTAENIAVVIWNKIKKRINPDFDLEVVLYETPRNFVTYKGE

SEQ ID NO: 20467 - protein, 150 aa, Flavobacterium flevense
  REGION 1..150: note = tr|A0A4Y4AUS1|A0A4Y4AUS1_9FLAO 6-carboxytetrahydropterin synthase QueD OS=Flavobacterium flevense OX=983 GN=FFL01_15000 PE=4 SV=1
MSNIRITKQFSFETGHALYGYDGKCKNVHGHSYKLSVTVIGKPITNRNDVKFGMVIDFSDLKKIVKEEIVDQFDHATVFNETTPHIELAMELKNRGHHVILVDYQPTSENMVVDFAQRIIGRLPAGITLFSLKLQETESSFAEWFASDNL

SEQ ID NO: 20468 - protein, 136 aa, Flavobacterium flevense
  REGION 1..136: note = tr|A0A4Y4B2H6|A0A4Y4B2H6_9FLAO 6-carboxy-5,6,7,8-tetrahydropterin synthase; OS = Flavobacterium flevense OX=983 GN=ygcM PE=3 SV=1
MIVTISRKAHFNAAHRLYRKDWTFEQNDAVFGKCNNPNFHGHNYELIVSVTGAVDPETGFVMDAKVLAAIIKEEVEDPFDHKNLNVDVAEFENLNPTAENIAVVIWNKIRKKIASKFELEVVLYETPRNFVTYKGL

SEQ ID NO: 20469 - protein, 136 aa, Flavobacterium fluvii
  REGION 1..136: note = tr|A0A1M5K2E1|A0A1M5K2E1_9FLAO 6-carboxy-5,6,7,8-tetrahydropterin synthase; OS = Flavobacterium fluvii OX=468056 GN=SAMN05443549_104152; PE = 3 SV=1
MRVTISRKAHFNAAHRLYRKDWTFEQNDAVFGKCNNPNFHGHNYELIVSVTGKINPETGYVMDVKDLSDLIFEEVEKPFDHKNLNLDVAEFENLNPTAENIVVVIWNKIRKRIKPELDLEITLYETPRNFVTYKGE

SEQ ID NO: 20470 - protein, 150 aa, Flavobacterium fluvii
  REGION 1..150: note = tr|A0A1M5EDD6|A0A1M5EDD6_9FLAO 6-pyruvoyltetrahydropterin/6-carboxytetrahydropterin synthase OS=Flavobacterium fluvii OX=468056; GN = SAMN05443549_101295 PE=4 SV=1
MSKIRITKQFGFETGHALYGYDGKCKNVHGHSYKLSVTVIGTPITDRKNVKFGMVIDFTDLKKIVKEEIVDQFDHATVFNETTPHIELANELKSRGHHVILVDYQPTSENMVVDFSKRIISRLPENINLFSLKLQETESSFAEWFASDNL

SEQ ID NO: 20471 - protein, 150 aa, unidentified
  source 1..150: note = Flavobacterium fontis
  REGION 1..150: note = tr|A0A1M4YNX5|A0A1M4YNX5_9FLAO 6-pyruvoyltetrahydropterin/6-carboxytetrahydropterin synthase OS=Flavobacterium fontis OX=1124188; GN = SAMN05444377_103175 PE=4 SV=1
MSTIRITKQFSFETGHALYGYDGKCKNVHGHSYKLSVTVIGQPITDTAHVKYGMVIDFTDLKKIVKEEVVDVFDHATVFNKNTPHIELAQELQQRGHHVILVDYQPTSENMVIDFAAKISNRLPATIQLFSLRLQETETSYAEWYASDNT

SEQ ID NO: 20472 - protein, 136 aa, unidentified
  source 1..136: note = Flavobacterium fontis
  REGION 1..136: note = tr|A0A1M5CJJ2|A0A1M5CJJ2_9FLAO 6-carboxy-5,6,7,8-tetrahydropterin synthase; OS = Flavobacterium fontis OX=1124188 GN=SAMN05444377_11228; PE = 3 SV=1
MRVTVSRKAHFNAAHRLYRKDWTMEQNQAVFGKCNNPNFHGHNYELIVSVTGEIDPETGYVIDVKIISDLVKTLVEDAFDHKNLNLDVPEFHDLNPTAENIAVVIWHKLRPHIGLDKDLEVVLYETPRNFVTYKGN

SEQ ID NO: 20473 - protein, 150 aa, Flavobacterium frigidimaris
  REGION 1..150: note = tr|A0A1M5WJF3|A0A1M5WJF3_FLAFR 6-pyruvoyltetrahydropterin/6-carboxytetrahydropterin synthase OS=Flavobacterium frigidimaris OX=262320; GN = SAMN05444481_1379 PE=4 SV=1
MSNIRITKQFSFETGHALYGYDGKCKNVHGHSYKLSVTVIGSPITDRSNVKFGMVIDFSDLKKIVKEEIVDQFDHATVFNETTPHIELANELKNRGHHVILVDYQPTSENMVVDFADRIVARLPNDISLFSLKLQETESSFAEWYASDNI

SEQ ID NO: 20474 - protein, 136 aa, Flavobacterium frigidimaris
  REGION 1..136: note = tr|A0A1M5P3Z8|A0A1M5P3Z8_FLAFR 6-carboxy-5,6,7,8-tetrahydropterin synthase; OS = Flavobacterium frigidimaris OX=262320; GN = SAMN05444481_109163 PE=3 SV=1
MKVTISRKAHFNAAHRLHRKDWTSEKNNAVFGKCNNPNFHGHNYGLTVSVTGKIDPETGFVVDVKVLADIIHEEVEIPFDHKNLNLDVPEFQDLNPTAENIAVVIWNKIRKRIQPDFDLEIVLNETDRNFVTYKGE

SEQ ID NO: 20475 - protein, 136 aa, Flavobacterium frigoris
  REGION 1..136: note = tr|H7FM42|H7FM42_FLAFP 6-carboxy-5,6,7,8-tetrahydropterin synthase; OS = Flavobacterium frigoris (strain PS1) OX=1086011; GN = HJ01_00240 PE=3 SV=1
MRVTISRKAHFNSAHRLYRKDWTLEKNDMVFGKCNNPNFHGHNYDLIVSVTGEIDQETGFVMDVKILADIIKEEVENQFDHKNLNLDVPEFENLNPTAENIVVVIWNKIRKRIESEFDLEVVLYETARNFVTYKGE

SEQ ID NO: 20476 - protein, 136 aa, Flavobacterium frigoris
  REGION 1..136: note = tr|A0A1H9QUZ7|A0A1H9QUZ7_FLAFI 6-carboxy-5,6,7,8-tetrahydropterin synthase; OS = Flavobacterium frigoris OX=229204 GN=SAMN05444355_1186; PE = 3 SV=1
MKVTISRKAHFNAAHRLYRKDWTFEKNDAVFGKCNNPNYHGHNYELIVGVTGEIDPETGYVMDIKILSDIIKDEVENQFDHKNLNVDVPEFENLNPTAENIVVVIWNKIRKRIKAEFDLEVILYETPRNFVTYKGE

SEQ ID NO: 20477 - protein, 136 aa, Flavobacterium fryxellicola
  REGION 1..136: note = tr|A0A167UNK2|A0A167UNK2_9FLAO 6-carboxy-5,6,7,8-tetrahydropterin synthase; OS = Flavobacterium fryxellicola OX=249352 GN=FBFR_14655; PE = 3 SV=1
MKVTISRKAHFNAAHRLHRKDWSFEQNDAIFGKCNNPNFHGHNYELIVSVTGEIDPETGYVMDVKFLSDIIKEDVENQFDHKNLNLDVPEFQDLNPTAENIVVVIWNKIRKKIKSEFELEVVLYETPRNFVTYKGE

SEQ ID NO: 20478 - protein, 154 aa, Flavobacterium fryxellicola
  REGION 1..154: note = tr|A0A168ABK6|A0A168ABK6_9FLAO 6-pyruvoyl tetrahydropterin synthase OS=Flavobacterium fryxellicola; OX = 249352 GN=FBFR_00275 PE=4 SV=1
MSNIRITKQFSFETGHALYGYDGKCKNVHGHSYKLSVTVIGSPITDRSNVKYGMVIDFTDLKKIVKEEIVDQFDHATVFNGTTPHIELANELITRGHHVILVDYQPTSENMVIDFAQRISNRLPEGIALFSLKLQETESSFAEWFASDNLKSIL

SEQ ID NO: 20479 - protein, 150 aa, Flavobacterium gillisiae; identical to SEQ ID NO: 20459
  REGION 1..150: note = tr|A0A1H4E9L3|A0A1H4E9L3_9FLAO 6-pyruvoyltetrahydropterin/6-carboxytetrahydropterin synthase OS=Flavobacterium gillisiae OX=150146; GN = SAMN05443667_10968 PE=4 SV=1

SEQ ID NO: 20480 - protein, 136 aa, Flavobacterium gillisiae
  REGION 1..136: note = tr|A0A1H4EXM5|A0A1H4EXM5_9FLAO 6-carboxy-5,6,7,8-tetrahydropterin synthase; OS = Flavobacterium gillisiae OX=150146; GN = SAMN05443667_11156 PE=3 SV=1
MKVTISRKAHFNAAHRLYRKDWTFEKNDAVFGKCNNPNYHGHNYELIVGVTGEIDRETGYVMDIKILSDIIKEEVENQFDHKNLNVDVPEFENLNPTAENIVVVIWNKIRKRIKAEFDLEVVLYETPRNFVTYKGE

SEQ ID NO: 20481 - protein, 136 aa, unidentified
  source 1..136: note = Flavobacterium gilvum
  REGION 1..136: note = tr|A0A085EI13|A0A085EI13_9FLAO 6-carboxy-5,6,7,8-tetrahydropterin synthase; OS = Flavobacterium gilvum OX=1492737 GN=FEM08_23460 PE=3; SV = 1
MRVTISRKAHFNAAHRLYRKDWTFEQNETVFGKCNNPNFHGHNYELIVSVTGEIDQETGYVMDVKFLTDIIKEQVEDQFDHKNLNLDVPEFQDLNPTAENIVVVIWNKIRKKVKSELDLEVVLYETPRNFVTYKGE

SEQ ID NO: 20482 - protein, 150 aa, unidentified
  source 1..150: note = Flavobacterium gilvum
  REGION 1..150: note = tr|A0A085EGA1|A0A085EGA1_9FLAO 6-pyruvoyl tetrahydropterin synthase OS=Flavobacterium gilvum; OX = 1492737 GN=FEM08_30160 PE=4 SV=1
MSNIRITKQFNFETGHALYGYDGKCKNVHGHSYKLSVTVIGKPITDRSNVKFGMVIDFSDLKKIVKEEIVDQFDHATVFNQTTPHIELAQELKERGHHVILVDYQPTSENMVVDFSQRIIRRLPQNIELFSLKLQETESSFAEWFASDNQ

SEQ ID NO: 20483 - protein, 154 aa, Flavobacterium glaciei
  REGION 1..154: note = tr|A0A562PYM7|A0A562PYM7_9FLAO 6-pyruvoyltetrahydropterin/6-carboxytetrahydropterin synthase OS=Flavobacterium glaciei OX=386300 GN=IQ02_00898; PE = 4 SV=1
MSNIRITKQFSFETGHALYGYDGKCKNVHGHSYKLSVTVIGTPITDRSNVKFGMVIDFTDLKKIVKEEIVDQFDHATVFNGTTPHIELANELMSRGHHVILVDYQPTSENMVVDFSQRIISRLPQGIMLFSLKLQETDSSFAEWYASDNMNSIL

SEQ ID NO: 20484 - protein, 136 aa, Flavobacterium glaciei
  REGION 1..136: note = tr|A0A562Q5R4|A0A562Q5R4_9FLAO 6-carboxy-5,6,7,8-tetrahydropterin synthase; OS = Flavobacterium glaciei OX=386300 GN=IQ02_00211 PE=3 SV=1
MKVTISRKAHFNAAHRLYRKDWTFEQNDAIFGKCNNPNFHGHNYELIVSVTGEIDPETGYVMDVKFLSDIIKEDVENQFDHKNLNLDVPEFQDLNPTAENIVVVIWNKIRKRIKSEFELEVVLYETPRNFVTYRGE

SEQ ID NO: 20485 - protein, 136 aa, Flavobacterium glycines
  REGION 1..136: note = tr|A0A1B9DH35|A0A1B9DH35_9FLAO 6-carboxy-5,6,7,8-tetrahydropterin synthase; OS = Flavobacterium glycines OX=551990 GN=ygcM PE=3 SV=1
MRVTISRKAHFNAAHRLYRKDWTFEQNNAVFGKCNNPNFHGHNYELIVSVTGAIDPETGYVMDAKILADIIKEEVEDAFDHKNLNLDVAEFENLNPTAENIVVVIWNKIRKRVASEFELEVVLYETPRNFVSYKGL

SEQ ID NO: 20486 - protein, 150 aa, Flavobacterium glycines
  REGION 1..150: note = tr|A0A1B9DSE7|A0A1B9DSE7_9FLAO 6-carboxytetrahydropterin synthase QueD OS=Flavobacterium glycines OX=551990 GN=FBGL_08295 PE=4 SV=1
MSKIRITKQFSFETGHALYGYDGKCKNVHGHSYKLSVTVIGSPITNRNDVKFGMVIDFSDLKKIVKEEIVDQFDHATVFNETTPHVELAEELKNRGHHVILVDYQPTSENMVVDFAQRIVRRLPNGIELFSLKLQETESSFAEWFASDNF

SEQ ID NO: 20487 - protein, 152 aa, Flavobacterium granuli
  REGION 1..152: note = tr|A0A1M5PEI3|A0A1M5PEI3_9FLAO 6-pyruvoyltetrahydropterin/6-carboxytetrahydropterin synthase OS=Flavobacterium granuli OX=280093; GN = SAMN05443373_10622 PE=4 SV=1
MAMSNIRITKKFSFETGHALYGYDGKCKNVHGHSYKLSVTVIGSPIENRNDVKFGMVIDFTDLKKIVKEEIVDQFDHATVFNETTPHVELAEELKNRGHHVILVDYQPTSENMVIDFSKRIMSRLPENIRLFSLKLQETESSFAEWYASDNL

SEQ ID NO: 20488 - protein, 136 aa, Flavobacterium granuli
  REGION 1..136: note = tr|A0A1M5QNX7|A0A1M5QNX7_9FLAO 6-carboxy-5,6,7,8-tetrahydropterin synthase; OS = Flavobacterium granuli OX=280093 GN=SAMN05443373_10870; PE = 3 SV=1
MRVTISRKAHFNAAHRLYRKDWTFEQNDAVFGKCNNPNFHGHNYDLIVSVTGQVNQETGFVMDVKILSDIIREEVESQFDHKNLNLDVPEFKNLNPTAENIVVVIWNKIRKRIKSEFDLEVVLYETPRNFVTYKGE

SEQ ID NO: 20489 - protein, 136 aa, Flavobacterium haoranii
  REGION 1..136: note = tr|A0A1M6BSA2|A0A1M6BSA2_9FLAO 6-carboxy-5,6,7,8-tetrahydropterin synthase; OS = Flavobacterium haoranii OX=683124 GN=SAMN05444337_0186; PE = 3 SV=1
MKVTVSRKAHFNAAHRLYRKDWSMEQNDAVFGKCNNPKFHGHNYEMIVSVTGEIDPETGFVMDVKILSDLIKEHIEEAFDHKNLNEDVEEFKNLNPTAENICVVIWNKLRKQIASDKDLEVVLYETPRNFVTYRGN

SEQ ID NO: 20490 - protein, 176 aa, Flavobacterium haoranii
  REGION 1..176: note = tr|A0A1M6DUP8|A0A1M6DUP8_9FLAO 6-pyruvoyltetrahydropterin/6-carboxytetrahydropterin synthase OS=Flavobacterium haoranii OX=683124; GN = SAMN05444337_0747 PE=4 SV=1
MSKCSSKNNTKITLFNFIPLQNNIFRMSTIRITKQFNFETGHALYGYDGKCKNVHGHSYKLSVTVVGKPITDTNNVKYGMVIDFSDLKKIVKEEIVDIFDHATVFNQNTPHIELANELKNRGHHVILVDYQPTSENMVIDFAAKIKARLPESINLFSLRLQETETSYAEWYQSDNE

SEQ ID NO: 20491 - protein, 149 aa, Flavobacterium hercynium
  REGION 1..149: note = tr|A0A226H134|A0A226H134_9FLAO 6-carboxy-5,6,7,8-tetrahydropterin synthase; OS = Flavobacterium hercynium OX=387094 GN=B0A66_16400 PE=3; SV = 1
MSNIRITKQFSFETGHALYGYDGKCKNVHGHSYKLSVTVIGSPITDRSNVKFGMVIDFSDLKKIVKEEIVDQFDHATVFNETTPHIELANELKSRDHHVILVDYQPTSENMVVDFANRIMKRLPAGISLFSLKLQETESSFAEWYASDN

SEQ ID NO: 20492 - protein, 137 aa, Flavobacterium hercynium
  REGION 1..137: note = tr|A0A226HFL8|A0A226HFL8_9FLAO 6-carboxy-5,6,7,8-tetrahydropterin synthase; OS = Flavobacterium hercynium OX=387094 GN=B0A66_10860 PE=3; SV = 1
MRVTISRKAHFNAAHRLHRKDWTFEKNDAVFGKCNNANFHGHNYGLTVSVTGKIDPETGFVLDVKVLADIILEEVEIPFDHKNLNLDVPEFEDLNPTAENIAVVIWNKIRKRIQPDFDLEIVLNETDRNFVTYKGEE

SEQ ID NO: 20493 - protein, 150 aa, Flavobacterium hibernum
  REGION 1..150: note = tr|A0A0D0EY40|A0A0D0EY40_9FLAO 6-pyruvoyl tetrahydropterin synthase OS=Flavobacterium hibernum; OX = 37752 GN=IW18_14045 PE=4 SV=1
MSNIRITKQFSFETGHALYGYDGKCKNVHGHSYKLSVTVIGSPITDRSNVKFGMVIDFSDLKKIVKEEIVDQFDHATVFNETTPHIELANELKNRGHHVILVDYQPTSENMVVDFADRIIARLPADISLFSLKLQETESSFAEWYASDNL

SEQ ID NO: 20494 - protein, 137 aa, Flavobacterium hibernum
  REGION 1..137: note = tr|A0A0D0F829|A0A0D0F829_9FLAO 6-carboxy-5,6,7,8-tetrahydropterin synthase; OS = Flavobacterium hibernum OX=37752 GN=IW18_04355 PE=3 SV=1
MKVTISRKAHFNAAHRLHRKDWSFEKNDAVFGKCNNPNFHGHNYGLTVSVTGKIDPETGFVLDVKVLADIIREEVEIPFDHKNLNLDVPEFQDLNPTAENIAVVIWNKIRKRIQADFDLEIVLNETDRNFVTYKGEE

SEQ ID NO: 20495 - protein, 150 aa, Flavobacterium hydatis
  REGION 1..150: note = tr|A0A086AUC6|A0A086AUC6_FLAHY 6-pyruvoyl tetrahydropterin synthase OS=Flavobacterium hydatis OX=991; GN = IW20_00585 PE=4 SV=1
MSNIRITKQFSFETGHALYGYDGKCKNVHGHSYKLSVTVIGSPITDRDNVKHGMVIDFSDLKKIVKEEIVDQFDHATVFNETTPHIELANELKNRGHHVILVKYQPTSENMVVDFSERIIKRLPTNISLFSLKLQETESSFAEWYASDNL

SEQ ID NO: 20496 - protein, 136 aa, Flavobacterium hydatis
  REGION 1..136: note = tr|A0A086ANF4|A0A086ANF4_FLAHY 6-carboxy-5,6,7,8-tetrahydropterin synthase; OS = Flavobacterium hydatis OX=991 GN=IW20_04765 PE=3 SV=1
MRVTISRKAHFNAAHRLYRKDWTLEKNDAVFGKCNNPNFHGHNYDLTVSVTGEVDPETGFVIDVKILADIIYEEVELPFDHKNLNLDVPEFQDLNPTAEHIAVVIWNKIRKKINPDFDLEIVLYETARNFVTYKGE

SEQ ID NO: 20497 - protein, 149 aa, Flavobacterium indicum
  REGION 1..149: note = tr|H8XP16|H8XP16_FLAIG 6-carboxy-5,6,7,8-tetrahydropterin synthase; OS = Flavobacterium indicum (strain DSM 17447 / CIP 109464 / GPTSA100-9) OX=1094466 GN=KQS_01450 PE= 3 SV=1
MSKIRITKQFNFETGHALYGYDGKCKNVHGHSYKLSVTVIGEPITNTENVKFGMVIDFGDLKKIVKEEVVDIFDHATVFNKNTPHIELAKELQDRGHHVILVDYQPTSENMVIDFAAKISARLPHSIQLHSLKLQETETSFAEWYASDN

SEQ ID NO: 20498 - protein, 136 aa, Flavobacterium indicum
  REGION 1..136: note = tr|H8XVS1|H8XVS1_FLAIG 6-carboxy-5,6,7,8-tetrahydropterin synthase; OS = Flavobacterium indicum (strain DSM 17447 / CIP 109464 / GPTSA100-9) OX=1094466 GN=ygcM PE=3 SV= 1
MRVTVSRKAHFNAAHRLYRKDWSMEQNDAVFGKCNNPNYHGHNYELIVSVTGEIDPETGFVMDVKILSDLIKEQIENKFDHKNLNLDVPEFAELNPTAENIVVVIWNKLRNHIAAKLDLEVVLYETPRNFVTYKGN

SEQ ID NO: 20499 - protein, 136 aa, Flavobacterium johnsoniae; identical to SEQ ID NO: 20458
  REGION 1..136: note = tr|A5FNA9|A5FNA9_FLAJ1 6-carboxy-5,6,7,8-tetrahydropterin synthase; OS = Flavobacterium johnsoniae (strain ATCC 17061 / DSM 2064 / UW101) OX=376686 GN=Fjoh_0268 PE=3 SV =1

SEQ ID NO: 20500 - protein, 136 aa, Flavobacterium johnsoniae
  REGION 1..136: note = tr|A0A1M5KX98|A0A1M5KX98_FLAJO 6-carboxy-5,6,7,8-tetrahydropterin synthase; OS = Flavobacterium johnsoniae OX=986 GN=DFS20_3955 PE=3 SV=1
MRVTISRKAHFNAAHRLHRKDWSLEKNNAVFGKCNNPNFHGHNYGLTVSVTGKIDPETGFVLDVKVLADIILEEVEIPFDHKNLNLDVPEFQDLNPTAENIAVVIWNKIRKRIQPDFDLEIVLYETDRNFVTYKGE

SEQ ID NO: 20501 - protein, 150 aa, unidentified
  source 1..150: note = Flavobacterium kingsejongi
  REGION 1..150: note = tr|A0A2S1LK96|A0A2S1LK96_9FLAO 6-carboxytetrahydropterin synthase QueD OS=Flavobacterium kingsejongi OX=1678728 GN=FK004_02575 PE=4 SV=1
MSKIRITKQFSFETGHALYGYDGKCKNVHGHSYKLSVTVIGTPITQRDNVKFGMVIDFGDLKKIVKEEIVDVFDHATVFNETTPHIELANELKSRGHDVILVNYQPTSENMVIDFAKKIKNRLPDSISLFSLRLQETETSFAEWFQSDNL

SEQ ID NO: 20502 - protein, 136 aa, unidentified
  source 1..136: note = Flavobacterium kingsejongi
  REGION 1..136: note = tr|A0A2S1LP25|A0A2S1LP25_9FLAO 6-carboxy-5,6,7,8-tetrahydropterin synthase; OS = Flavobacterium kingsejongi OX=1678728 GN=FK004_09255; PE = 3 SV=1
MRVTVSRKAHFNAAHRLYRKDWSFEKNDAVFGKCNNPNFHGHNYELTVSVTGEIDAETGYVIDIKELREIIEQEVEKPFDHKNLNLDVPEFEDLNPTAENIVVVIWNKIRKRLPLTLELEVIVYETPRNFVSYRGA

SEQ ID NO: 20503 - protein, 150 aa, unidentified
  source 1..150: note = Flavobacterium lacus
  REGION 1..150: note = tr|A0A328WUE4|A0A328WUE4_9FLAO 6-pyruvoyltetrahydropterin/6-carboxytetrahydropterin synthase OS=Flavobacterium lacus OX=1353778; GN = B0I10_103274 PE=4 SV=1
MAKIRITKQFSFETGHALYGYDGKCKNVHGHSYKLSVTVIGTPIMDNTNVKFGMVIDFGDLKKIVKEEIVDLFDHATVFNQNTPHIELAHELKNRDHHVILVDYQPTSENMVIDFAEKIKNRLPDSIKLHSLKLQETETSFAEWFASDNV

SEQ ID NO: 20504 - protein, 136 aa, unidentified
  source 1..136: note = Flavobacterium lacus
  REGION 1..136: note = tr|A0A328WS04|A0A328WS04_9FLAO 6-carboxy-5,6,7,8-tetrahydropterin synthase; OS = Flavobacterium lacus OX=1353778 GN=B0I10_11637 PE=3 SV=1
MKVTVSRKAHFNAAHRLYRKDWSMEKNDLVFGKCNNPNYHGHNYELIVSVTGEIDQETGFVMDVKILSDLIKEHIENAFDHKNLNVDVPDFADLNPTAENIAVVIWNKLRNHIKTALDLEVVLYETPRNFVTYKGN

SEQ ID NO: 20505 - protein, 136 aa, Flavobacterium limicola
  REGION 1..136: note = tr|A0A495RSF8|A0A495RSF8_9FLAO 6-carboxy-5,6,7,8-tetrahydropterin synthase; OS = Flavobacterium limicola OX=180441 GN=BC952_2896 PE=3; SV = 1
MKVTISRKAHFNAAHRLYRKDWSFEQNDAIFGKCNNPNFHGHNYELIVSVTGAIDPETGYVMDVKFLSDIIKEDVENQFDHKNLNLDVPEFQDLNPTAENIVVVIWNKIRKRIKPEFELEVVLYETPRNFVTYRGE

SEQ ID NO: 20506 - protein, 154 aa, Flavobacterium limicola
  REGION 1..154: note = tr|A0A495S655|A0A495S655_9FLAO 6-pyruvoyltetrahydropterin/6-carboxytetrahydropterin synthase OS=Flavobacterium limicola OX=180441; GN = BC952_0697 PE=4 SV=1
MSNIRITKQFSFETGHALYGYDGKCKNVHGHSYKLSVTVIGTPITDRSNVKFGMVIDFTDLKKIVKEEIVDQFDHATVFNGTTPHIELANELMSRGHHVILVDYQPTSENMVVDFSQRIINRLPQGITLFSLKLQETESSFAEWFASDNMKSIL

SEQ ID NO: 20507 - protein, 136 aa, unidentified
  source 1..136: note = Flavobacterium limnosediminis
  REGION 1..136: note = tr|V6SHQ1|V6SHQ1_9FLAO 6-carboxy-5,6,7,8-tetrahydropterin synthase; OS = Flavobacterium limnosediminis JC2902 OX=1341181; GN = FLJC2902T_29310 PE=3 SV=1
MRVTVSRKAHFNAAHRLYRKDWTDAQNEHVFGKCNNPNFHGHNYELIVSVTGKINPETGYVMDIKELADIIYEEVESRFDHKNLNLDVPEFQELNPTAENIVVVIWNKIRKRIAPGNDLEVVLYETPRNFVTYSGE

SEQ ID NO: 20508 - protein, 149 aa, unidentified
  source 1..149: note = Flavobacterium limnosediminis
  REGION 1..149: note = tr|V6SS80|V6SS80_9FLAO 6-carboxy-5,6,7,8-tetrahydropterin synthase; OS = Flavobacterium limnosediminis JC2902 OX=1341181; GN = FLJC2902T_10770 PE=3 SV=1
MSNIRITKQFSFETGHALYGYDGKCKNVHGHSYKLSVTVIGKPITDTSNVKFGMVIDFGDLKKIVKEEIVDVFDHATVFNQNTPHIELANELKNRGHHVILVDYQPTSENMVVDFAAKIKSRLPDNIQLHSLKLQETESSFAEWYQSDN

SEQ ID NO: 20509 - protein, 149 aa, Flavobacterium lindanitolerans
  REGION 1..149: note = tr|A0A497V3J5|A0A497V3J5_9FLAO 6-carboxy-5,6,7,8-tetrahydropterin synthase; OS = Flavobacterium lindanitolerans OX=428988 GN=CLV50_0663; PE = 3 SV=1
MSKIRITKQFSFETGHALYGYDGKCKNVHGHSYKLSVTVIGTPISDTANVKFGMVIDFSDLKKIVREEVVDVFDHATVFNKNTPHVELAEQLRNRGHHVILVGYQPTSENMVIDFAEKIKSRLPENIALHSLRLQETETSYAEWFQSDN

SEQ ID NO: 20510 - protein, 139 aa, Flavobacterium lindanitolerans
  REGION 1..139: note = tr|A0A497UGS8|A0A497UGS8_9FLAO 6-carboxy-5,6,7,8-tetrahydropterin synthase; OS = Flavobacterium lindanitolerans OX=428988 GN=CLV50_3108; PE = 3 SV=1
MRVTVSRKAHFNAAHRLYRKDWSDEKNDLVFGKCNNPNFHGHNYELIVSVTGKINPDTGYVIDIKDLADIILEEVERPFDHKNLNLDVPEFSDLNPTAENIAVVIWNKIRKRIEADKDLEVILYETPRNFVSYKGESAN

SEQ ID NO: 20511 - protein, 149 aa, unidentified
  source 1..149: note = Flavobacterium macacae
  REGION 1..149: note = tr|A0A3P3WDJ3|A0A3P3WDJ3_9FLAO 6-carboxytetrahydropterin synthase OS=Flavobacterium macacae OX=2488993 GN=EG849_07370 PE=4 SV=1
MSKIRITKQFSFETGHALYGYDGKCKNVHGHSYKLSVTVIGSPITDVNNVKFGMVIDFTDLKKIVKEEIVDNFDHATVFNKNTPHIELAKELQNRDHHVILVDYQPTSENMVIDFAAKIKSRLPENINLHSLRLQETDTSFAEWFQSDN

SEQ ID NO: 20512 - protein, 136 aa, unidentified
  source 1..136: note = Flavobacterium macacae
  REGION 1..136: note = tr|A0A3P3WEU9|A0A3P3WEU9_9FLAO 6-carboxytetrahydropterin synthase OS=Flavobacterium macacae OX=2488993 GN=EG849_06335 PE=4 SV=1
MKVTVSRKAHFNAAHRLHRKDWTDEKNNAVFGKCNNANFHGHNYELTVSVSGAIDPETGYVIDIKDLADLILEEVEKPFDHKNLNLDVPEFFDLNPTAENIAVVIWNKIRKKIDMALDLEVILYETPRNFVSYRGA

SEQ ID NO: 20513 - protein, 136 aa, unidentified
  source 1..136: note = Flavobacterium magnum
  REGION 1..136: note = tr|A0A2S0RGH3|A0A2S0RGH3_9FLAO 6-carboxy-5,6,7,8-tetrahydropterin synthase; OS = Flavobacterium magnum OX=2162713 GN=HYN48_06825 PE=3; SV = 1
MKATISRKAHFNAAHRLFRSDWTDERNNAVFGKCNNPNFHGHNYELIVSVTGDIDPETGYVMDIKDLSMMISEEVEDAFDHKNLNLDVPEFKNLNPTAENISVVIWNKLRNRIKADSQLEVVLYETPRNFVTYRGE

SEQ ID NO: 20514 - protein, 149 aa, unidentified
  source 1..149: note = Flavobacterium magnum
  REGION 1..149: note = tr|A0A2S0RJJ9|A0A2S0RJJ9_9FLAO 6-carboxytetrahydropterin synthase QueD OS=Flavobacterium magnum OX=2162713 GN=HYN48_03955 PE=4 SV=1
MSKIRITKQFSFETGHALYGYDGKCKNVHGHSYKLSVTVIGTPISDAGNVKFGMVIDFTDLKHIVKEEIVDHFDHATVFNKNTPHVELASELKTRGHHVILVDYQPTSENMVIDFAQKIQKRLPAGISLFSLKLQETETSFAEWYASDN

SEQ ID NO: 20515 - protein, 136 aa, unidentified
  source 1..136: note = Flavobacterium marinum
  REGION 1..136: note = tr|A0A1H6IV98|A0A1H6IV98_9FLAO 6-carboxy-5,6,7,8-tetrahydropterin synthase; OS = Flavobacterium marinum OX=1159016 GN=SAMN02927937_00026; PE = 3 SV=1
MRVTVCRKAHFNAAHRLYRKDWTDEKNQEIFGKCNNPNFHGHNYELIVEVTGTVNPETGYVIDIKDLSDMIYEEVELPFDHKNLNLDVPEFQELNPTAEHIAYVIWHKIRKRLPLKLDLEIILYETPRNFVKYCGL

SEQ ID NO: 20516 - protein, 150 aa, unidentified
  source 1..150: note = Flavobacterium marinum
  REGION 1..150: note = tr|A0A1H6JSE0|A0A1H6JSE0_9FLAO 6-pyruvoyltetrahydropterin/6-carboxytetrahydropterin synthase OS=Flavobacterium marinum OX=1159016; GN = SAMN02927937_00540 PE=4 SV=1
MSFIRITKQFTFETGHALYGYDGKCRNVHGHSYKLSVTVIGEPISDKNHVKYGMVIDFTDLKVIVKEEVVDQFDHATVFNQNTPHVELAKELEQRGHHVILVDYQPTSENMVIDFAQRIKNRLPQNIKLLSLRLQETESSYAEWFATDNE

SEQ ID NO: 20517 - protein, 150 aa, Flavobacterium micromati
  REGION 1..150: note = tr|A0A1M5FSZ2|A0A1M5FSZ2_9FLAO 6-pyruvoyltetrahydropterin/6-carboxytetrahydropterin synthase OS=Flavobacterium micromati OX=229205; GN = SAMN05444372_101266 PE=4 SV=1
MSNIRITKQFSFETGHALYGYDGKCKNVHGHSYKLSVTVIGTPITDRSNVKFGMVIDFTDLKHIVKEEVVDQFDHATVFNGTTPHVELAHELINRGHHVILVDYQPTSENMVVDFSTRISRRLPEGITLFSLKLQETESSFAEWFASDNS

SEQ ID NO: 20518 - protein, 136 aa, Flavobacterium micromati
  REGION 1..136: note = tr|A0A1M5H3D0|A0A1M5H3D0_9FLAO 6-carboxy-5,6,7,8-tetrahydropterin synthase; OS = Flavobacterium micromati OX=229205; GN = SAMN05444372_102271 PE=3 SV=1
MKVTISRKAHFNAAHRLYRKDWTFEKNDAIFGKCNNPNFHGHNYDLTVSVTGEIDPETGYVMDVKFLSDIIKEDVENQFDHKNLNLDVPDFKDLNPTAENIVVVIWNKIRKRIKPEFELEVVLYETPRNFVTYKGE

SEQ ID NO: 20519 - protein, 136 aa, unidentified
  source 1..136: note = Flavobacterium nitrogenifigens
  REGION 1..136: note = tr|A0A521EFX3|A0A521EFX3_9FLAO 6-carboxy-5,6,7,8-tetrahydropterin synthase; OS = Flavobacterium nitrogenifigens OX=1617283; GN = SAMN06265220_104195 PE=3 SV=1
MRVTISRKAHFNAAHRLYRKDWSFEKNDAVFGKCNNPNFHGHNYGLTVSVTGKIDPETGFVLDVKVLADIIREEVEIPFDHKNLNLDVPEFVDLNPTAENIAVVIWNKIRQRIHADFDLEVVLNETERNFVTYKGE

SEQ ID NO: 20520 - protein, 150 aa, unidentified
  source 1..150: note = Flavobacterium nitrogenifigens
  REGION 1..150: note = tr|A0A521D464|A0A521D464_9FLAO 6-pyruvoyltetrahydropterin/6-carboxytetrahydropterin synthase OS=Flavobacterium nitrogenifigens OX=1617283; GN = SAMN06265220_1021026 PE= 4 SV=1
MSNIRITKQFSFETGHALYGYDGKCKNVHGHSYKLSVTVIGSPITDRSNVKFGMVIDFSDLKKIVKEEIVDQFDHATVFNQTTPHIELANELKNRGHHVILVDYQPTSENMVVDFAERIKSRLPEGIILFSLKLQETESSFAEWYASDNI

SEQ ID NO: 20521 - protein, 149 aa, unidentified
  source 1..149: note = Flavobacterium noncentrifugens
  REGION 1..149: note = tr|A0A1G8S8U3|A0A1G8S8U3_9FLAO 6-carboxy-5,6,7,8-tetrahydropterin synthase; OS = Flavobacterium noncentrifugens OX=1128970; GN = SAMN04487935_0456 PE=3 SV=1
MSNIRITKQFSFETGHALYGYDGKCKNVHGHSYKLSVTVIGTPITDRNNVKFGMVIDFSDLKKIVKEEIVDLFDHATVFNETTPHIELANELKNRGHHVILVDYQPTSENMVTDFAEKIKNRLPDSIKLHSLKLQETETSFAEWYACDN

SEQ ID NO: 20522 - protein, 136 aa, unidentified
  source 1..136: note = Flavobacterium noncentrifugens
  REGION 1..136: note = tr|A0A1G8VC48|A0A1G8VC48_9FLAO 6-carboxy-5,6,7,8-tetrahydropterin synthase; OS = Flavobacterium noncentrifugens OX=1128970; GN = SAMN04487935_1278 PE=3 SV=1
MKVTVSRKAHFNAAHRLHRKDWSFEKNDAVFGKCNNANFHGHNYELTVSVTGEIDPETGYVMDIKELADLILEEVEKPFDHKNLNLDVPEFADLNPTAENIVVVIWNKIRSKINPDFDLEIVLYETPRNFVTYSGK

SEQ ID NO: 20523 - protein, 154 aa, Flavobacterium omnivorum
  REGION 1..154: note = tr|A0A1G7VSJ0|A0A1G7VSJ0_9FLAO 6-pyruvoyltetrahydropterin/6-carboxytetrahydropterin synthase OS=Flavobacterium omnivorum OX=178355; GN = SAMN04488062_101146 PE=4 SV=1
MSNIRITKQFSFETGHALYGYDGKCKNVHGHSYKLSVTVIGSPITDRSNVKYGMVIDFTDLKKIVKEEIVDQFDHATVFNATTPHIELANELMTRGHHVILVDYQPTSENMVVDFSQRIINRLPQGITLFSLKLQETESSFAEWFACDNVKSIL

SEQ ID NO: 20524 - protein, 136 aa, Flavobacterium omnivorum
  REGION 1..136: note = tr|A0A1G8BU00|A0A1G8BU00_9FLAO 6-carboxy-5,6,7,8-tetrahydropterin synthase; OS = Flavobacterium omnivorum OX=178355; GN = SAMN04488062_106153 PE=3 SV=1
MKVTISRKAHFNAAHRLHRKDWSFEQNDAIFGKCNNPNFHGHNYELIVSVTGEIDPETGYVMDVKFLSDIIKEDVENQFDHKNLNLDVAEFQDLNPTAENIVVVIWNKIRKRIKSEFELEVVLYETPRNFVTYKGE

SEQ ID NO: 20525 - protein, 150 aa, Flavobacterium oncorhynchi
  REGION 1..150: note = tr|A0A226I1U0|A0A226I1U0_9FLAO 6-carboxytetrahydropterin synthase QueD OS=Flavobacterium oncorhynchi OX=728056 GN=B0A75_11060 PE=4 SV=1
MSNIRITKQFSFETGHALYGYDGKCKNVHGHSYKLSVTVIGSPITDRSNVKFGMVIDFSDLKKIVKEEIVDQFDHATVFNQTTPHIELANELKNRGHHVILVDYQPTSENMVVDFADRIIARLPKGISLFSLKLQETESSFAEWYASDNI

SEQ ID NO: 20526 - protein, 136 aa, Flavobacterium oncorhynchi
  REGION 1..136: note = tr|A0A226HT09|A0A226HT09_9FLAO 6-carboxy-5,6,7,8-tetrahydropterin synthase; OS = Flavobacterium oncorhynchi OX=728056 GN=B0A75_15750; PE = 3 SV=1
MRVTISRKAHFNAAHRLHRKDWTLEKNTAVFGKCNNPNFHGHNYGLTVSVTGKIDPETGFVLDVKVLADIILEEVEVPFDHKNLNLDVPEFRDLNPTAENIAVVIWNKIRKRIQPDFDLEIVLYETDRNFVTYKGE

SEQ ID NO: 20527 - protein, 136 aa, unidentified
  source 1..136: note = Flavobacterium pallidum
  REGION 1..136: note = tr|A0A2S1SH53|A0A2S1SH53_9FLAO 6-carboxy-5,6,7,8-tetrahydropterin synthase; OS = Flavobacterium pallidum OX=2172098 GN=HYN49_07185 PE=3; SV = 1
MKATISRKAHFNAAHRLYRSDWSDAKNNAVFGKCNNPNFHGHNYELIVSVTGNIDPETGYVMDIKELSTMISEEVEEAFDHKNLNLDVPDFSNLNPTAENISVVIWNKLRRRITREFSLEIVLYETPRNFVTYRGE

SEQ ID NO: 20528 - protein, 151 aa, unidentified
  source 1..151: note = Flavobacterium pallidum
  REGION 1..151: note = tr|A0A2S1SFH1|A0A2S1SFH1_9FLAO 6-carboxytetrahydropterin synthase QueD OS=Flavobacterium pallidum OX=2172098 GN=HYN49_04045 PE=4 SV=1
MAKIRITKQFSFETGHALYGYDGKCKNVHGHSYKLSVTVIGTPIADSTNVKYGMVIDFTDLKYIVKEEVVDQFDHATVFNKNTPHLELANELKERGHHVILVDYQPTSENMVIDFAEKIQKRLPAGISLFSLRLQETDTSFAEWFASDNVI

SEQ ID NO: 20529 - protein, 150 aa, Flavobacterium pectinovorum
  REGION 1..150: note = tr|A0A1M7NZZ5|A0A1M7NZZ5_9FLAO 6-pyruvoyltetrahydropterin/6-carboxytetrahydropterin synthase OS=Flavobacterium pectinovorum OX=29533; GN = SAMN05444387_4074 PE=4 SV=1
MSNIRITKQFNFETGHALYGYDGKCKNVHGHSYKLSVTVIGSPITDRSNVKFGMVIDFSDLKKIVKEEIVDQFDHATVFNETTPHIELANELKNRGHHVILVDYQPTSENMVVDFSKRIISRLPAGISLHSLKLQETESSFAEWYASDNQ

SEQ ID NO: 20530 - protein, 136 aa, Flavobacterium pectinovorum
  REGION 1..136: note = tr|A0A502ERN6|A0A502ERN6_9FLAO 6-carboxy-5,6,7,8-tetrahydropterin synthase; OS = Flavobacterium pectinovorum OX=29533 GN=EAH81_12735; PE = 3 SV=1
MKVTISRKAHFNAAHRLHRKDWTFEKNNAVFGKCNNPNFHGHNYGLTVSVTGKIDPETGFVLDVKVLADIIHEEVEIPFDHKNLNLDVPEFQDLNPTAENIAVVIWNKIRKRIQSDFDLEIVLNETDRNFVTYKGE

SEQ ID NO: 20531 - protein, 150 aa, Flavobacterium phragmitis
  REGION 1..150: note = tr|A0A1I1RY10|A0A1I1RY10_9FLAO 6-pyruvoyltetrahydropterin/6-carboxytetrahydropterin synthase OS=Flavobacterium phragmitis OX=739143; GN = SAMN05216297_107220 PE=4 SV=1
MSNIRITKQFSFETGHALYGYDGKCKNVHGHSYKLSVTVIGSPITDRSNVKFGMVIDFSDLKKIVKEEIVDQFDHATVFNQTTPHIELANELKNRGHHVILVDYQPTSENMVVDFAERIKNRLPAGITLFSLKLQETESSFAEWYASDNL

SEQ ID NO: 20532 - protein, 136 aa, Flavobacterium phragmitis
  REGION 1..136: note = tr|A0A1I1US66|A0A1I1US66_9FLAO 6-carboxy-5,6,7,8-tetrahydropterin synthase; OS = Flavobacterium phragmitis OX=739143; GN = SAMN05216297_11175 PE=3 SV=1
MRVTISRKAHFNAAHRLHRKDWSFEKNDAVFGKCNNPNFHGHNYGLTVSVTGKIDPETGFVLDVKVLADIIREEVEIPFDHKNLNLDVPEFLDLNPTAENIAVVIWNKIRKRIQPDFDLEVVLNETERNFVTYKGE

SEQ ID NO: 20533 - protein, 136 aa, Flavobacterium psychrolimnae; identical to SEQ ID NO: 20505
  REGION 1..136: note = tr|A0A366AZH9|A0A366AZH9_9FLAO 6-carboxy-5,6,7,8-tetrahydropterin synthase; OS = Flavobacterium psychrolimnae OX=249351 GN=DR980_09120; PE = 3 SV=1

SEQ ID NO: 20534 - protein, 154 aa, Flavobacterium psychrolimnae
  REGION 1..154: note = tr|A0A366B2C9|A0A366B2C9_9FLAO 6-carboxytetrahydropterin synthase QueD OS=Flavobacterium psychrolimnae OX=249351 GN=DR980_04925 PE=4 SV=1
MSNIRITKQFSFETGHALYGYDGKCKNVHGHSYKLSVTVIGTPITDRSNVKFGMVIDFTDLKKIVKEEIVDQFDHATVFNGTTPHIELANELMTRGHHVILVDYQPTSENMVVDFSQRIINRLPQGITLFSLKLQETESSFAEWFASDNMKSIL

SEQ ID NO: 20535 - protein, 150 aa, Flavobacterium psychrophilum
  REGION 1..150: note = tr|A0A076P6E5|A0A076P6E5_FLAPS 6-carboxy-5,6,7,8-tetrahydropterin synthase; OS = Flavobacterium psychrophilum OX=96345 GN=queD PE=4 SV=1
MSKIRITKQFSFETGHALYGYDGKCKNVHGHSYKLSVTVIGTPISDRNNVKFGMVIDFSDLKKIVKEDIVDIFDHATVFNQTTPHIELAQELKSRGHEVILVDYQPTSENMVIDFAEKIKRRLPSHVSLHSLRLQETETSFAEWFADDNA

SEQ ID NO: 20536 - protein, 150 aa, Flavobacterium psychrophilum; identical to SEQ ID NO: 20535
  REGION 1..150: note = tr|A6H1T0|A6H1T0_FLAPJ Probable 6-pyruvoyltetrahydrobiopterin synthase OS=Flavobacterium psychrophilum (strain JIP02/86 / ATCC 49511) OX=402612; GN = FP2248 PE=4 SV=1

SEQ ID NO: 20537 - protein, 136 aa, Flavobacterium reichenbachii
  REGION 1..136: note = tr|A0A085ZL56|A0A085ZL56_9FLAO 6-carboxy-5,6,7,8-tetrahydropterin synthase; OS = Flavobacterium reichenbachii OX=362418 GN=IW19_06320; PE = 3 SV=1
MKVTISRKAHFNAAHRLHRKDWTPEKNNAVFGKCNNPNFHGHNYGLTVSVTGKIDPETGFVLDVKVLADIILEEVEIPFDHKNLNLDVPEFHDLNPTAENIAVVIWNKIRKRIQPDFDLEIVLYETDRNFVTYKGE

SEQ ID NO: 20538 - protein, 149 aa, Flavobacterium reichenbachii
  REGION 1..149: note = tr|A0A085ZKC2|A0A085ZKC2_9FLAO 6-carboxy-5,6,7,8-tetrahydropterin synthase; OS = Flavobacterium reichenbachii OX=362418 GN=IW19_04800; PE = 3 SV=1
MSNIRITKQFNFETGHALYGYDGKCKNVHGHSYKLSVTVIGSPITDRSNVKFGMVIDFSDLKKIVKEEIVDQFDHATVFNQTTPHIELANELKNRGHHVILVDYQPTSENMVVDFAERIIGRLPAEISLFSLKLQETESSFAEWYASDN

SEQ ID NO: 20539 - protein, 136 aa, Flavobacterium resistens
  REGION 1..136: note = tr|A0A521EQ88|A0A521EQ88_9FLAO 6-carboxy-5,6,7,8-tetrahydropterin synthase; OS = Flavobacterium resistens OX=443612; GN = SAMN06265349_105236 PE=3 SV=1
MRVTISRKAHFNAAHRLYRKDWTSEKNNAVFGKCNNPNFHGHNYGLTVSVTGKIDPETGFVLDVKVLADIILEEVEIPFDHKNLNLDVPEFQDLNPTAENIAVVIWNKIRKRIQPDFDLEIVLNETDRNFVTYKGE

SEQ ID NO: 20540 - protein, 150 aa, Flavobacterium resistens
  REGION 1..150: note = tr|A0A521EB59|A0A521EB59_9FLAO 6-pyruvoyltetrahydropterin/6-carboxytetrahydropterin synthase OS=Flavobacterium resistens OX=443612; GN = SAMN06265349_104314 PE=4 SV=1
MSNIRITKQFSFETGHALYGYDGKCKNVHGHSYKLSVTVIGSPITDRSNVKFGMVIDFSDLKKIVKEEIVDQFDHATVFNQTTPHIELANELKNRGHHVILVDYQPTSENMVVDFAERIVARLPKGISLFSLKLQETESSFAEWYASDNQ

SEQ ID NO: 20541 - protein, 150 aa, Flavobacterium rivuli
  REGION 1..150: note = tr|A0A0A2M4N4|A0A0A2M4N4_9FLAO 6-pyruvoyl tetrahydropterin synthase OS=Flavobacterium rivuli WB 3.3-2 = DSM 21788 OX=1121895 GN=Q765_05970 PE=4 SV=1
MSNIRITKQFTFETGHALYGYDGKCKNVHGHSYKLSVTVIGKPITDVSNVKYGMVIDFGDLKKIVKEEIVDIFDHATVFNKNTPHVELAKELSDRGHDTILVDYQPTSENMVIDFARKIKAQLPENIKLHSLRLQETDTSFAEWFQSDNE

SEQ ID NO: 20542 - protein, 136 aa, Flavobacterium rivuli
  REGION 1..136: note = tr|A0A0A2LZ27|A0A0A2LZ27_9FLAO 6-carboxy-5,6,7,8-tetrahydropterin synthase; OS = Flavobacterium rivuli WB 3.3-2 = DSM 21788 OX=1121895; GN = Q765_20750 PE=3 SV=1
MKVTVSRSAHFNAAHRLYRKDWTEEQNNAVFGKCNNPNYHGHNYELIVGITGEVDPETGYVIDIKILKDIIADEVETPFDHKNLNLDVPEFADLNPTAENIVVVIWNRMRSRINPAHDIEVTLYETPRNFVTYKGN

SEQ ID NO: 20543 - protein, 149 aa, Flavobacterium saccharophilum
  REGION 1..149: note = tr|A0A1M6Z4M4|A0A1M6Z4M4_9FLAO 6-pyruvoyltetrahydropterin/6-carboxytetrahydropterin synthase OS=Flavobacterium saccharophilum OX=29534; GN = SAMN05444366_0119 PE=4 SV=1
MSNIRITKQFNFETGHALYGYDGKCKNVHGHSYKLSVTVIGSPITDRSNVKYGMVIDFSDLKKIVKEEIVDQFDHATVFNETTPHIELANELKNRGHHVILVDYQPTSENMVVDFAERIIARLPAGITLFSLKLQETESSFAEWYASDN

SEQ ID NO: 20544 - protein, 136 aa, Flavobacterium saccharophilum
  REGION 1..136: note = tr|A0A1M7K4G1|A0A1M7K4G1_9FLAO 6-carboxy-5,6,7,8-tetrahydropterin synthase; OS = Flavobacterium saccharophilum OX=29534; GN = SAMN05444366_3640 PE=3 SV=1
MKVTISRKAHFNAAHRLHRKDWTFEKNNAVFGKCNNPNFHGHNYGLTVSVTGKIDPETGFVLDVKVLADIIHEEVEIPFDHKNLNLDVPEFQDLNPTAENIAVVIWNKIRKKIHADFDLEVVLNETDRNFVTYKGE

SEQ ID NO: 20545 - protein, 149 aa, Flavobacterium saliperosum
  REGION 1..149: note = tr|A0A1G4VA45|A0A1G4VA45_9FLAO 6-carboxy-5,6,7,8-tetrahydropterin synthase; OS = Flavobacterium saliperosum OX=329186; GN = SAMN02927925_00693 PE=3 SV=1
MSNIRITKQFTFETGHALYGYDGKCKNVHGHSYKLSVTVIGKPITDTSNVKFGMVIDFGDLKKIVKEEIVDVFDHATVFNQNTPHIELANELKNRGHHVILVNYQPTSENMVIDFAEKIKNRLPHNIQLHSLKLQETESSFAEWYQSDN

SEQ ID NO: 20546 - protein, 136 aa, Flavobacterium saliperosum
  REGION 1..136: note = tr|A0A1G4VPT6|A0A1G4VPT6_9FLAO 6-carboxy-5,6,7,8-tetrahydropterin synthase; OS = Flavobacterium saliperosum OX=329186; GN = SAMN02927925_01499 PE=3 SV=1
MRVTVSRKAHFNAAHRLYRKDWSVEQNETVFGKCNNPNFHGHNYELIVSVTGKINPETGYVMDIKDLADIIYEEVETQFDHKNLNLDVPEFQDLNPTAENIVVVIWNKIRKRIVAGNDLEVVLYETPRNFVTYKGE

SEQ ID NO: 20547 - protein, 149 aa, unidentified
  source 1..149: note = Flavobacterium sediminis
  REGION 1..149: note = tr|A0A2U8QTC6|A0A2U8QTC6_9FLAO 6-carboxy-5,6,7,8-tetrahydropterin synthase; OS = Flavobacterium sediminis OX=2201181 GN=DI487_05755 PE=3; SV = 1
MSKIRITKQFTFETGHALYGYDGKCKNVHGHSYKLSVTVIGKPIQDTSNVKYGMVIDFGDLKKIVKEDIVDIFDHATVFNQNTPHIELANELKKRGHHVILVDYQPTSENMVIDFAEKIKRRLPEDIKLFSLRLQETETSFAEWFASDN

SEQ ID NO: 20548 - protein, 136 aa, unidentified
  source 1..136: note = Flavobacterium sediminis
  REGION 1..136: note = tr|A0A2U8QT15|A0A2U8QT15_9FLAO 6-pyruvoyl tetrahydrobiopterin synthase OS=Flavobacterium sediminis; OX = 2201181 GN=DI487_03285 PE=4 SV=1
MRATVSRKAHFNAAHRLYRKDWSMEKNESVFGKCNNPNFHGHNYELVVSVTGQIDVETGFVMDIKILADLIKEHIEEAFDHKNLNMDVEEFKDLNPTAENIAVVIWNKLRSLISTDKELEVTLYETPRNFVTYKGE

SEQ ID NO: 20549 - protein, 136 aa, Flavobacterium segetis
  REGION 1..136: note = tr|A0A1M5GRC3|A0A1M5GRC3_9FLAO 6-carboxy-5,6,7,8-tetrahydropterin synthase; OS = Flavobacterium segetis OX=271157 GN=SAMN05444396_104108; PE = 3 SV=1
MKVTISRKAHFNAAHRLYRKDWTFEQNDAIFGKCNNPNFHGHNYDLTVSVTGEIDPETGYVMDVKFLSDIIKEDVENQFDHKNLNLDVPDFKDLNPTAENIVVVIWNKIRKRIKPEFDLEVVLYETPRNFVTYKGE

SEQ ID NO: 20550 - protein, 150 aa, Flavobacterium segetis
  REGION 1..150: note = tr|A0A1M5FWK9|A0A1M5FWK9_9FLAO 6-pyruvoyltetrahydropterin/6-carboxytetrahydropterin synthase OS=Flavobacterium segetis OX=271157; GN = SAMN05444396_10399 PE=4 SV=1
MSNIRITKQFSFETGHALYGYDGKCKNVHGHSYKLSVTVIGTPITDRSNVKFGMVIDFTDLKNIVKEEVVDQFDHATVFNGTTPHIELANELINRGHHVILVDYQPTSENMVVDFSTRISRRLPEGITLFSLKLQETESSFAEWFASDNS

SEQ ID NO: 20551 - protein, 136 aa, unidentified
  source 1..136: note = Flavobacterium seoulense
  REGION 1..136: note = tr|A0A066WTW1|A0A066WTW1_9FLAO 6-carboxy-5,6,7,8-tetrahydropterin synthase; OS = Flavobacterium seoulense OX=1492738 GN=FEM21_09170 PE=3; SV = 1
MRVTISRKAHFNAAHRLYRKDWTFEQNDKVFGKCNNPNFHGHNYELIVSVTGAIDPETGYVMDAKILADIIKEEVEDAFDHKNLNLDVPEFENLNPTAENIVVVIWNKIRKRIDAQFDLEVVLYETPRNFVTYKGE

SEQ ID NO: 20552 - protein, 150 aa, unidentified
  source 1..150: note = Flavobacterium seoulense
  REGION 1..150: note = tr|A0A066WVY2|A0A066WVY2_9FLAO 6-pyruvoyl tetrahydropterin synthase OS=Flavobacterium seoulense; OX = 1492738 GN=FEM21_17100 PE=4 SV=1
MSNIRITKQFSFETGHALYGYDGKCKNVHGHSYKLSVTVIGKPITNRNDVKFGMVIDFSDLKKIVKEEIVDQFDHATVFNETTPHVELAQELKNRGHHVILVNYQPTSENMVVDFAERIISRLPAGITLFSLKLQETESSFAEWFASDNL

SEQ ID NO: 20553 - protein, 154 aa, Flavobacterium sinopsychrotolerans
  REGION 1..154: note = tr|A0A1H8J2C6|A0A1H8J2C6_9FLAO 6-pyruvoyltetrahydropterin/6-carboxytetrahydropterin synthase OS=Flavobacterium sinopsychrotolerans OX=604089; GN = SAMN04487942_0832 PE= 4 SV=1
MSNIRITKQFSFETGHALYGYDGKCKNVHGHSYKLSVTVIGTPITDRSNVKFGMVIDFTDLKKIVKEEIVDQFDHATVFNGTTPHIELANELMTRGHHVILVDYQPTSENMVVDFSQRIISRLPEGITLFSLKLQETESSFAEWFASDNMKSIL

SEQ ID NO: 20554 - protein, 136 aa, Flavobacterium sinopsychrotolerans
  REGION 1..136: note = tr|A0A1H8NYB4|A0A1H8NYB4_9FLAO 6-carboxy-5,6,7,8-tetrahydropterin synthase; OS = Flavobacterium sinopsychrotolerans OX=604089; GN = SAMN04487942_2519 PE=3 SV=1
MKVTISRKAHFNAAHRLYRKDWTFEQNDAIFGKCNNPNFHGHNYELTVSVTGQIDPETGYVMDVKFLSDIIKEDVEDQFDHKNLNLDVPEFQDLNPTAENIVVVIWNKIRKRIKPEFELEVVLYETPRNFVTYKGE

SEQ ID NO: 20555 - protein, 136 aa, Flavobacterium sp.
  REGION 1..136: note = tr|A0A2N0HEY6|A0A2N0HEY6_9FLAO 6-carboxy-5,6,7,8-tetrahydropterin synthase; OS = Flavobacterium sp. 5 OX=2035199 GN=CLU82_2704 PE=3 SV=1
MRVTISRKAHFNAAHRLYRKDWSFEQNDAVFGKCNNPNFHGHNYELIVSVTGEIDKETGYVLDVKFLTDIIKEEVEDKFDHKNLNLDVPEFQDLNPTAENIVVVIWNKIRRKVKPELDLEVVLYETPRNFVTYKGE

SEQ ID NO: 20556 - protein, 151 aa, Flavobacterium sp.
  REGION 1..151: note = tr|A0A0J1BRD3|A0A0J1BRD3_9FLAO 6-pyruvoyl tetrahydropterin synthase OS=Flavobacterium sp. ABG; OX = 1423322 GN=AB674_19345 PE=4 SV=1
MSNIRITKQFSFETGHALYGYDGKCKNVHGHSYKLSVTVIGSPITDRSNVKYGMVIDFSDLKKIVKEEIVDQFDHATVFNETTPHVELANELKNRGHHVILVDYQPTSENMVVDFAERIIARLPAEISLFSLKLQETESSFAEWYASDNLK

SEQ ID NO: 20557 - protein, 137 aa, unidentified
  source 1..137: note = Flavobacterium spartansii
  REGION 1..137: note = tr|A0A1S1J508|A0A1S1J508_9FLAO 6-carboxy-5,6,7,8-tetrahydropterin synthase; OS = Flavobacterium spartansii OX=1278819 GN=BHE19_12730; PE = 3 SV=1
MKVTISRKAHFNAAHRLYRKDWTFEKNDAVFGKCNNPNFHGHNYGLTVSVTGKIDPETGFVLDVKVLADIIREEVEIPFDHKNLNLDVPEFQDLNPTAEHIAVVIWNKIKKRIQPDFDLEIVLNETDRNFVTYKGEE

SEQ ID NO: 20558 - protein, 149 aa, unidentified
  source 1..149: note = Flavobacterium spartansii
  REGION 1..149: note = tr|A0A1S1JF26|A0A1S1JF26_9FLAO 6-carboxy-5,6,7,8-tetrahydropterin synthase; OS = Flavobacterium spartansii OX=1278819 GN=BHE19_04890; PE = 3 SV=1
MSNIRITKQFSFETGHALYGYDGKCKNVHGHSYKLSVTVIGSPITDRSNVKFGMVIDFSDLKKIVKEEIVDQFDHATVFNQTTPHIELANELKNRGHHVILVDYQPTSENMVVDFADRIIARLPKEISLFSLKLQETESSFAEWYASDN

SEQ ID NO: 20559 - protein, 150 aa, Flavobacterium subsaxonicum
  REGION 1..150: note = tr|A0A0A2MIM9|A0A0A2MIM9_9FLAO 6-pyruvoyl tetrahydropterin synthase OS=Flavobacterium subsaxonicum WB 4.1-42 = DSM 21790 OX=1121898 GN=Q766_18840 PE=4 SV=1
MSKIRITKQFTFETGHALYGYDGKCKNVHGHSYKLSVTVIGSPITDSGNVKFGMVIDFGDLKKIVKEEIVDLFDHATVFNQNTPHIELAAELKARDHHVILVDYQPTSENMVIDFAKKIKDRLPANINLHSLRLQETETSFAEWFQSDNL

SEQ ID NO: 20560 - protein, 136 aa, Flavobacterium subsaxonicum
  REGION 1..136: note = tr|A0A0A2MPJ2|A0A0A2MPJ2_9FLAO 6-carboxy-5,6,7,8-tetrahydropterin synthase; OS = Flavobacterium subsaxonicum WB 4.1-42 = DSM 21790; OX = 1121898 GN=Q766_08890 PE=3 SV=1
MRVTVSRSAHFNAAHRLYRKDWTEERNNAVFGKCNNANFHGHNYELIASVTGNIDPETGYVIDIKILKDIIADEVETPFDHKNLNLDVPEFANLNPTAENIAVVIWNRMRPRLDPKLTLEITLYETPRNFVTYKGE

SEQ ID NO: 20561 - protein, 150 aa, Flavobacterium succinicans
  REGION 1..150: note = tr|A0A199XQM9|A0A199XQM9_9FLAO 6-pyruvoyl tetrahydropterin synthase OS=Flavobacterium succinicans; OX = 29536 GN=FLB_19100 PE=4 SV=1
MSNIRITKKFSFETGHALYGYDGKCKNVHGHSYKLSVTVIGSPITDRSNVKLGMVIDFTDLKKIVKEEVVDQFDHATVFNQTTPHVELAKELKDRGHHVILVDYQPTSENMIVDFAERIKSRLPEGINLFSLKLQETESSFAEWFASDNV

SEQ ID NO: 20562 - protein, 136 aa, Flavobacterium succinicans
  REGION 1..136: note = tr|A0A1I4SJY5|A0A1I4SJY5_9FLAO 6-carboxy-5,6,7,8-tetrahydropterin synthase; OS = Flavobacterium succinicans OX=29536; GN = SAMN05444143_101860 PE=3 SV=1
MRVTISRKAHFNAAHRLYRKDWSFEQNDAVFGKCNNPNFHGHNYELIVSVTGEIDQETGYVMDVKFLTDIIKSEVEDQMDHKNLNLDVPEFENLNPTAENIVVVIWNKLRAKVKSTLDLEVVLYETPRNFVTYKGE

SEQ ID NO: 20563 - protein, 152 aa, Flavobacterium suncheonense
  REGION 1..152: note = tr|A0A0A2MDK1|A0A0A2MDK1_9FLAO 6-pyruvoyl tetrahydropterin synthase OS=Flavobacterium suncheonense GH29-5 = DSM 17707 OX=1121899 GN=Q764_05510 PE=4 SV=1
MSNIRITKQFTFETGHALYGYDGKCKNVHGHSYKLSVTVIGKPITDTSNVKFGMVIDFGDLKKIVKEEIVDIFDHATVFNQNTPHLELASELKNRGHHVILVDYQPTSENMVIDFADKIKNRLPQNIQLHSLKLQETETSFAEWYQSDNQQS

SEQ ID NO: 20564 - protein, 136 aa, Flavobacterium suncheonense
  REGION 1..136: note = tr|A0A0A2MAZ3|A0A0A2MAZ3_9FLAO 6-carboxy-5,6,7,8-tetrahydropterin synthase; OS = Flavobacterium suncheonense GH29-5 = DSM 17707; OX = 1121899 GN=Q764_08695 PE=3 SV=1
MRVTVSRKAHFNAAHRLYRKDWSDEQNQRVFGKCNNPNFHGHNYELIVSVTGEINPETGYVMDIKDLADIIYEEVETRFDHKNLNLDVPEFEHLNPTAENIVVVIWNKIRKRIDQTHDLEVVLYETPRNFVTYKGL

SEQ ID NO: 20565 - protein, 150 aa, Flavobacterium swingsii
  REGION 1..150: note = tr|A0A1I0YDK3|A0A1I0YDK3_9FLAO 6-pyruvoyltetrahydropterin/6-carboxytetrahydropterin synthase OS=Flavobacterium swingsii OX=498292; GN = SAMN05660845_1692 PE=4 SV=1
MSKIRITKQFSFETGHALYGYDGKCKNVHGHSYKLSVTVIGTPISDRNNVKFGMVIDFSDLKKIVREDIVDVFDHATVFNETTPHIELAQELKSRGHEVILVDYQPTSENMVIDFAEKIKRRLPESIKLHSLRLQETETSFAEWFAEDNA

SEQ ID NO: 20566 - protein, 136 aa, Flavobacterium swingsii
  REGION 1..136: note = tr|A0A1I0UXK0|A0A1I0UXK0_9FLAO 6-carboxy-5,6,7,8-tetrahydropterin synthase; OS = Flavobacterium swingsii OX=498292 GN=SAMN05660845_0017; PE = 3 SV=1
MKVTISRKAHFNAAHRLYRKDWTFEKNDAVFGKCNNPNFHGHNYDLTVSVTGEIDPETGYVMDVKLLSEIIKEEIEDKFDHKNLNLDVSEFEDLNPTAENIVVVIWNKIRKKINPEMDLEVILYETPRNFVTYKGE

SEQ ID NO: 20567 - protein, 151 aa, Flavobacterium terrae
  REGION 1..151: note = tr|A0A1M6BEK0|A0A1M6BEK0_9FLAO 6-pyruvoyltetrahydropterin/6-carboxytetrahydropterin synthase OS=Flavobacterium terrae OX=415425; GN = SAMN05444363_0709 PE=4 SV=1
MSRIRITKQFNFETGHALFGYDGKCKNVHGHSYKLSVTVIGTPITDRNNVKYGMVIDFSDLKKIVKEDIVDIFDHATVFNATTPHIELANELKERGHHVILVDYQPTSENMVIDFAAKIKKRLPEFVQLHSLRLQETETSFAEWYAEDNTK

SEQ ID NO: 20568 - protein, 135 aa, Flavobacterium terrae
  REGION 1..135: note = tr|A0A1M6DAX5|A0A1M6DAX5_9FLAO 6-carboxy-5,6,7,8-tetrahydropterin synthase; OS = Flavobacterium terrae OX=415425 GN=SAMN05444363_1343; PE = 3 SV=1
MRVTVNRKAHFNAAHRLYRKDWSDEKNQLVFGKCNNPNFHGHNYELIVSVTGNIDPETGYVIDIKILADIIFEEVESQFDHKNLNLDVPDFENLNPTAENIVVVIWNKIKARLKVDQDLEVTLYETPRNFVTYKG

SEQ ID NO: 20569 - protein, 136 aa, Flavobacterium terrigena
  REGION 1..136: note = tr|A0A1H6Y862|A0A1H6Y862_9FLAO 6-carboxy-5,6,7,8-tetrahydropterin synthase; OS = Flavobacterium terrigena OX=402734 GN=SAMN05660918_0052; PE = 3 SV=1
MRAKISRKAHFNAAHRLYRKDWSMEKNDAIFGKCNNPNYHGHNYELIVSVTGEISPETGFIMDVKILADLVKLHIEDAFDHKNLNLDVPEFENLNPTAENIAVVIWQKLRNQIEIKYDLEVVLYETPRNYVTYSGN

SEQ ID NO: 20570 - protein, 150 aa, Flavobacterium terrigena
  REGION 1..150: note = tr|A0A1H6SXD7|A0A1H6SXD7_9FLAO 6-pyruvoyltetrahydropterin/6-carboxytetrahydropterin synthase OS=Flavobacterium terrigena OX=402734; GN = SAMN05660918_1550 PE=4 SV=1
MSKIRITKQFNFETGHALYGYDGKCKNVHGHSYKLSVTVIGEPITDSNNVKFGMVIDFSDLKKIVKEDIVDVFDHATVFNQNTPHVELAKELQNRGHHVILVDYQPTSENMVVDFANKIMARLPKDILLHSLRLQETESSFAEWFASDNL

SEQ ID NO: 20571 - protein, 145 aa, unidentified
  source 1..145: note = [Flavobacterium] thermophilum
  REGION 1..145: note = tr|A0A377FYB0|A0A377FYB0_9BACL 6-carboxy-5,6,7,8-tetrahydropterin synthase; OS = [Flavobacterium] thermophilum OX=1414643 GN=queD PE=3; SV = 1
MMHQLYPQVMHPYRYELNKDMHIAAAHFIPHEAAGSCANVHGHTYIVNVTVAGDELDESGFLVNFQTLKQLVHRKLDHTLLNDHSDWFDGHDPNRFPTSEVVARTIYETIQRYLDTLPHKPTCLQVFVRETPTSYVVYRPKAGER

SEQ ID NO: 20572 - protein, 154 aa, Flavobacterium tiangeerense
  REGION 1..154: note = tr|A0A562KVS7|A0A562KVS7_9FLAO 6-pyruvoyltetrahydropterin/6-carboxytetrahydropterin synthase OS=Flavobacterium tiangeerense OX=459471; GN = IQ05_03064 PE=4 SV=1
MSNIRITKQFSFETGHALYGYDGKCKNVHGHSYKLSVTVIGTPITDRSNVKFGMVIDFTDLKKIVKEEIVDQFDHATVFNGTTPHIDLANELIARGHHVILVDYQPTSENMVIDFAQRISNRLPEGIALFSLKLQETESSFAEWYASDNVKSIL

SEQ ID NO: 20573 - protein, 150 aa, unidentified
  source 1..150: note = Flavobacterium tibetense
  REGION 1..150: note = tr|A0A365NZ17|A0A365NZ17_9FLAO 6-carboxytetrahydropterin synthase QueD OS=Flavobacterium tibetense OX=2233533 GN=DPN68_11825 PE=4 SV=1
MSNIRITKQFSFETGHALYGYDGKCKNVHGHSYKLSVTVIGKPITDTSNVKYGMVIDFGDLKKIVKEEVVDVFDHATVFNQNTPHIELAHELQNRGHHVILVDYQPTSENMVIDFAAKISNRLPQNITLHSLKLQETETSFAEWYASDNI

SEQ ID NO: 20574 - protein, 136 aa, unidentified
  source 1..136: note = Flavobacterium tibetense
  REGION 1..136: note = tr|A0A365P3Q9|A0A365P3Q9_9FLAO 6-carboxytetrahydropterin synthase OS=Flavobacterium tibetense OX=2233533 GN=DPN68_03150 PE=4 SV=1
MKVTVSRKAHFNAAHRLYRKDWSMEKNQEVFGKCNNPNFHGHNYELIVSVTGEVDKETGYVIDTKILSDLIKEHIEEAFDHKNLNVDVSEFQDLIPTAEHIAYVIWQKLRVLIASDKDLEVTLYETPRNFVTYKGE

SEQ ID NO: 20575 - protein, 150 aa, unidentified
  source 1..150: note = Flavobacterium ummariense
  REGION 1..150: note = tr|A0A1I5E798|A0A1I5E798_9FLAO 6-pyruvoyltetrahydropterin/6-carboxytetrahydropterin synthase OS=Flavobacterium ummariense OX=913024; GN = SAMN05421741_11913 PE=4 SV=1
MSFIRITKQFTFETGHALYGYDGKCRNVHGHSYKLSVTVIGQPITDKNHVKYGMVIDFTDLKAIVKEEVVDQFDHATVFNQNTPHVELAKELEQRGHHVILVDYQPTSENLVIDYAERIKSRLPQNIKLFSLRLQETESSYAEWFASDNL

SEQ ID NO: 20576 - protein, 136 aa, unidentified
  source 1..136: note = Flavobacterium ummariense
  REGION 1..136: note = tr|A0A1I5A148|A0A1I5A148_9FLAO 6-carboxy-5,6,7,8-tetrahydropterin synthase; OS = Flavobacterium ummariense OX=913024; GN = SAMN05421741_10759 PE=3 SV=1
MRVTVCRKAHFNAAHRLYRKDWSDEKNQKIFGKCNNPNFHGHNYELIVDVTGTVNPETGYVIDIKDLSDIIYEEVEVPFDHKNLNLDVPEFQDLNPTAEHIAYVIWHKLRKRLPLKLDLEITLYETPRNFVKYCGL

SEQ ID NO: 20577 - protein, 150 aa, unidentified
  source 1..150: note = Flavobacterium urocaniciphilum
  REGION 1..150: note = tr|A0A1H9DGR1|A0A1H9DGR1_9FLAO 6-pyruvoyltetrahydropterin/6-carboxytetrahydropterin synthase OS=Flavobacterium urocaniciphilum OX=1299341; GN = SAMN05444005_1073 PE=4 S V=1
MSKIRITKQFNFETGHALYGYDGKCKNVHGHSYKLSVTVIGEPISDTNNVKYGMVIDFSDLKKIVKEDIVDVFDHATVFNKNTPHIELAKELKDRGHHVILVDYQPTSENMVIDFAEKIMARLPKDIQLHSLRLQETETSFAEWFASDNL

SEQ ID NO: 20578 - protein, 136 aa, unidentified
  source 1..136: note = Flavobacterium urocaniciphilum
  REGION 1..136: note = tr|A0A1H9E6V9|A0A1H9E6V9_9FLAO 6-carboxy-5,6,7,8-tetrahydropterin synthase; OS = Flavobacterium urocaniciphilum OX=1299341; GN = SAMN05444005_11026 PE=3 SV=1
MRATISRKAHFNAAHRLYRKDWSDEQNDLVFGKCNNPNFHGHNYELIVNITGEISPETGFVMDVKILADLIKLHIEDEFDHKNLNLDVPEFKDLNPTAENIAVVIWRKLRNQIEIKYDLEVVLYETPRNYVTYSGN

SEQ ID NO: 20579 - protein, 136 aa, Flavobacterium urumqiense
  REGION 1..136: note = tr|A0A1H6AFA8|A0A1H6AFA8_9FLAO 6-carboxy-5,6,7,8-tetrahydropterin synthase; OS = Flavobacterium urumqiense OX=935224; GN = SAMN04488130_11520 PE=3 SV=1
MRVTISRKAHFNAAHRLYRKDWTFEQNDAIFGKCNNPNYHGHNYELIVSVTGEIDPETGFVMDVKFLSEIIKEEVENQFDHKNLNIDVPEFENLNPTAENIVVVIWNKIRKKIEPQFDLEVILYETPRNFVTYKGE

SEQ ID NO: 20580 - protein, 154 aa, Flavobacterium urumqiense
  REGION 1..154: note = tr|A0A1H5UP43|A0A1H5UP43_9FLAO 6-pyruvoyltetrahydropterin/6-carboxytetrahydropterin synthase OS=Flavobacterium urumqiense OX=935224; GN = SAMN04488130_102353 PE=4 SV=1
MSNIRITKQFSFETGHALYGYDGKCKNVHGHSYKLSVTVIGTPITDRNNVKFGMVIDFTDLKKIVKEEIVDQFDHATVFNETTPHIELANELISRGHHVILVNYQPTSENMVVDFSQRIIGRLPEGIKLFSLKLQETDSSFAEWYASDNFKSIL

SEQ ID NO: 20581 - protein, 150 aa, Flavobacterium weaverense
  REGION 1..150: note = tr|A0A3L9ZX00|A0A3L9ZX00_9FLAO 6-pyruvoyltetrahydropterin/6-carboxytetrahydropterin synthase OS=Flavobacterium weaverense OX=271156; GN = BC961_1230 PE=4 SV=1
MSNIRITKQFSFETGHALYGYDGKCKNVHGHSYKLSVTVIGSPITDRSNVKFGMVIDFTDLKKIVKEEIVDQFDHATVFNGTTPHVELANELISRGHHVILVDYQPTSENMVVDFSKRIIDRLPEGIRLFSLKLQETDSSFAEWFASDNS

SEQ ID NO: 20582 - protein, 139 aa, Flavobacterium weaverense
  REGION 1..139: note = tr|A0A3L9ZYU6|A0A3L9ZYU6_9FLAO 6-carboxy-5,6,7,8-tetrahydropterin synthase; OS = Flavobacterium weaverense OX=271156 GN=BC961_0430 PE=3; SV = 1
MKVTISRKAHFNAAHRLHRKDWTFEQNDAIFGKCNNPNFHGHNYELIVSVTGPIDPDTGYVMDVKFLTDIIKEDVENQFDHKNLNLDVPEFKDLNPTAENIVVVIWDKIRKRIKPEFELEVVLYETPRNFVTYKGEQWN

SEQ ID NO: 20583 - protein, 136 aa, Flavobacterium xanthum
  REGION 1..136: note = tr|A0A1M7HMV4|A0A1M7HMV4_9FLAO 6-carboxy-5,6,7,8-tetrahydropterin synthase; OS = Flavobacterium xanthum OX=69322 GN=SAMN05443669_102929; PE = 3 SV=1
MKVTISRKAHFNAAHRLHRKDWSFEQNDAIFGKCNNPNFHGHNYELIVSVTGEIDPETGYVMDVKFLSDIIKEDVENQFDHKNLNLDVPEFQDLNPTAENIVVVIWNKIRKRIKSEFELEVVLYETPRNFVTYKGE

SEQ ID NO: 20584 - protein, 154 aa, Flavobacterium xanthum
  REGION 1..154: note = tr|A0A1M7KV30|A0A1M7KV30_9FLAO 6-pyruvoyltetrahydropterin/6-carboxytetrahydropterin synthase OS=Flavobacterium xanthum OX=69322; GN = SAMN05443669_10585 PE=4 SV=1
MSNIRITKQFSFETGHALYGYDGKCKNVHGHSYKLSVTVIGSPITDRSNVKYGMVIDFTDLKKIVKEEIVDQFDHATVFNGTTPHIELANELINRGHHVILVDYQPTSENMVVDFSHRIISRLPEGITLFSLKLQETESSFAEWFASDNMKSIL

SEQ ID NO: 20585 - protein, 136 aa, Flavobacterium xinjiangense
  REGION 1..136: note = tr|A0A1M7MZK8|A0A1M7MZK8_9FLAO 6-carboxy-5,6,7,8-tetrahydropterin synthase; OS = Flavobacterium xinjiangense OX=178356; GN = SAMN05216269_109132 PE=3 SV=1
MKVTISRKAHFNAAHRLYRKDWTFEQNDAVFGKCNNPNYHGHNYELIVGVTGEIDTETGFVMDVKFLSEIIKEEVEDQFDHKNLNLDVPEFENLNPTAENIVVVIWNKIRKKIELQFDLEVILYETPRNFVTYKGE

SEQ ID NO: 20586 - protein, 154 aa, Flavobacterium xinjiangense
  REGION 1..154: note = tr|A0A1M7LMA5|A0A1M7LMA5_9FLAO 6-pyruvoyltetrahydropterin/6-carboxytetrahydropterin synthase OS=Flavobacterium xinjiangense OX=178356; GN = SAMN05216269_10752 PE=4 SV=1
MSNIRITKQFSFETGHALYGYDGKCKNVHGHSYKLSVTVIGTPITDRNNVKFGMVIDFTDLKKIVKEEIVDQFDHATVFNETTPHIELAKELISRGHHVILVDYQPTSENMVVDFSKRIIGRLPEGITLFSLKLQETESSFAEWYASDNFKSIL

SEQ ID NO: 20587 - protein, 154 aa, Flavobacterium xueshanense
  REGION 1..154: note = tr|A0A1I2HGZ1|A0A1I2HGZ1_9FLAO 6-pyruvoyltetrahydropterin/6-carboxytetrahydropterin synthase OS=Flavobacterium xueshanense OX=935223; GN = SAMN04488131_11434 PE=4 SV=1
MSNIRITKQFSFETGHALYGYDGKCKNVHGHSYKLSVTVIGTPITDRSNVKFGMVIDFTDLKKIVKEEIVDQFDHATVFNGTTPHIELAEELISRGHHVILVEYQPTSENMVVDFSQRIISRLPEGISLFSLKLQETDSSFAEWFASDNMKSIM

SEQ ID NO: 20588 - protein, 136 aa, Flavobacterium xueshanense
  REGION 1..136: note = tr|A0A1I2GIQ8|A0A1I2GIQ8_9FLAO 6-carboxy-5,6,7,8-tetrahydropterin synthase; OS = Flavobacterium xueshanense OX=935223; GN = SAMN04488131_11068 PE=3 SV=1
MKVTISRKAHFNAAHRLHRKDWTFEQNDAVFGKCNNPNFHGHNYDLTVSVTGEIDPETGYVMDVKFLSDIIKEEVENQFDHKNLNLDVPEFEHLNPTAENIVVVIWNKIRKRIKAEFELEVVLYETPRNFVTYKGE

SEQ ID NO: 20589 - protein, 188 aa, Flavonifractor sp.
  REGION 1..188: note = tr|A0A1Y3SDC8|A0A1Y3SDC8_9FIRM Rubredoxin; OS = Flavonifractor sp. An82 OX=1965660 GN=B5G34_16495 PE=4; SV = 1
MRSITTLDLQYAHRFYGFKGEAQYLHGHTGVLTIEVEDTIEPGVNMVFPCNEIQKTAWSVLKNFDHALILREDDPLLPAVLKVYEEQGIRNGAPQNQMKGPAFQTELATAYPECRLVVTKETLTVEGMIKIVYDLLKDKLNIAKITFTSGVNAASAEFETHNQIDRCPLCGIALNENGVCPKCGYKKK

SEQ ID NO: 20590 - protein, 139 aa, Flectobacillus sp.
  REGION 1..139: note = tr|A0A267TE81|A0A267TE81_9BACT 6-carboxytetrahydropterin synthase QueD OS=Flectobacillus sp. BAB-3569 OX=1509483 GN=BWI92_10295 PE=4 SV=1
MVYVVRKEHFNAAHRLYNPNWTEEKNREVFGPCANVNWHGHNFELIVTVKGIPDPDTGFVIDMKVMSQIIKDEIIERVDHKNLNLDVDFMQGKMASCEIFAMEIWKILAPKLNEQIPHGQLHCIELIETPKNSVKYYGE

SEQ ID NO: 20591 - protein, 139 aa, Flectobacillus sp.
  REGION 1..139: note = tr|A0A267T6A8|A0A267T6A8_9BACT 6-carboxy-5,6,7,8-tetrahydropterin synthase; OS = Flectobacillus sp. BAB-3569 OX=1509483 GN=BWI92_19745; PE = 3 SV=1
MSTKRVAVFRKEHFNAAHRLHNPNWTDEKNERVYGKCNNPTFHGHNYELIVQVIGELDPETGYVIDMKVLSDIIKVEILDRFDHRNLNLDTEEFKDLNPSAENIAIVIYDILRNKLNPNLDIKIRLYETERNFVEYPVG

SEQ ID NO: 20592 - protein, 139 aa, Flexibacter flexilis
  REGION 1..139: note = tr|A0A1I1L2T2|A0A1I1L2T2_9BACT 6-pyruvoyltetrahydropterin/6-carboxytetrahydropterin synthase OS=Flexibacter flexilis DSM 6793 OX=927664; GN = SAMN05421780_107196 PE=4 S V=1
MVYVCRKEHFNAAHKLYNPNWSEEKNREMFGPCANHNWHGHNFVLTVYVKGVPHPETGFVIDLKVLSKLINELVIEKLDHKNLNMDVDFMIGKMASCEILVMEIWKILAPAISAAAPNAQLHKLVLDETPRNFVEYYGE

SEQ ID NO: 20593 - protein, 136 aa, Flexibacter flexilis
  REGION 1..136: note = tr|A0A1I1NK86|A0A1I1NK86_9BACT 6-carboxy-5,6,7,8-tetrahydropterin synthase OS=Flexibacter flexilis DSM 6793 OX=927664 GN=SAMN05421780_1164 PE=3 SV=1
MKVAVFRKEHFNAAHRLHNPAWSDEQNKAVFGRCNNPHYHGHNYEVVVKVVGEIDPQTGYVIDTKILSDLVKELVVSKFDHRNLNLDTEEFKSLNPTAENIAVVIWQKLRERLDAKLELKVILYETERNYVEYPAN

SEQ ID NO: 20594 - protein, 157 aa, unidentified
  source 1..157: note = [Flexibacter] sp.
  REGION 1..157: note = tr|A0A1V2AU93|A0A1V2AU93_9BACT Uncharacterized protein OS=[Flexibacter] sp. ATCC 35208 OX=1936242; GN = BW716_34665 PE=4 SV=1
MSIVICCSFAKIRERSVLQITKIFNFETAHALYGYAGKCRNLHGHSYKLHVTVSSKTPEEGYLGGTGILMDFKDLKKLVNEKVVDKFDHRLILSKAYLAANPNLGELENLEIWDIEPSAENIILYIKQELQGGFPEDVELVKLVLYETSDSYAEWIK

SEQ ID NO: 20595 - protein, 136 aa, unidentified
  source 1..136: note = [Flexibacter] sp.
  REGION 1..136: note = tr|A0A1V2B1V2|A0A1V2B1V2_9BACT 6-pyruvoyl tetrahydrobiopterin synthase OS=[Flexibacter] sp. ATCC 35208 OX=1936242 GN=BW716_21050 PE=4 SV=1
MIYLTRVENFNAAHKLSNPAWSKEKNKEVFGKCANENWHGHNYELHVTVKGNPDPETGFVFNAKTLGNLIEEYVVEKVDHRNLNMDVDFMAGKFTSAENLAIGIWEQLAPHLPESVQLHCIKLYETPRIYVEYYGG

SEQ ID NO: 20596 - protein, 141 aa, Flexibacter sp.
  REGION 1..141: note = tr|A0A2M7ND10|A0A2M7ND10_9BACT 6-carboxytetrahydropterin synthase QueD OS=Flexibacter sp. CG_4_10_14_3_um_filter_32_15 OX=1975530 GN=COZ18_16825; PE = 4 SV=1
MVYLCRKEHFCASHRLFNPAWSDERNEEEFGICSNQYFHGHNFELIVKVKGKINSDTGCVLDLKKLGKLIREEIIDKVDHKNLNIEVEFLKNKIPSCEIVIMEFWKILAPKIIDLSEKNAVLHSLTLFETEKNYVEYFGEE

SEQ ID NO: 20597 - protein, 119 aa, Flexistipes sinusarabici
  REGION 1..119: note = tr|F8E702|F8E702_FLESM 6-carboxy-5,6,7,8-tetrahydropterin synthase OS=Flexistipes sinusarabici (strain DSM 4947 / MAS 10) OX=717231; GN = Flexsi_1210 PE=3 SV=1
MYKVKVTDNFSSAHNLREYEGNCEKLHGHNWQIEVSLKGEELDELGMLVDFRELKKEVKNILNTLDHTYLNDHEYFSRVNPTSENIAHFIYKKLKSRFKDRMDSVTVWESNNSSAEYYE

SEQ ID NO: 20598 - protein, 119 aa, Flexistipes sinusarabici
  REGION 1..119: note = tr|A0A5D0MXT7|A0A5D0MXT7_FLESI 6-carboxy-5,6,7,8-tetrahydropterin synthase OS=Flexistipes sinusarabici OX=2352 GN=queD PE=3 SV=1
MYKVKITDSFSSAHNLREYEGNCERLHGHNWQIEVSLKGEQLDELGMLVDFRELKKEVKKILSTLDHTYLNDHKYFSRVNPTSENIAHFIYKKLKPKFSDKMDKVTVWESNNSAAEYYE

SEQ ID NO: 20599 - protein, 127 aa, Fluoribacter bozemanae
  REGION 1..127: note = tr|A0A0W0RQZ1|A0A0W0RQZ1_FLUBO 6-pyruvoyl tetrahydropterin synthase OS=Fluoribacter bozemanae OX=447; GN = Lboz_2073 PE=4 SV=1
MHHLMLRKNFIAQHFLIGKDFGAENLRHSHHYSFELEIENTKLDPFNFLIDIVEVRAHIDQLISYFQDKILNELPEFKNQNPSLELFSKILWQKFNNHIELPVDSQITVRLWEDDIAQASYRETKCV

SEQ ID NO: 20600 - protein, 168 aa, Fluoribacter bozemanae
  REGION 1..168: note = tr|A0A0W0RZE5|A0A0W0RZE5_FLUBO 6-pyruvoyl tetrahydropterin synthase OS=Fluoribacter bozemanae OX=447; GN = Lboz_0605 PE=4 SV=1
MNRKKYLTTVELQKESMKFSAGHTTIFSATEREPLHGHMYGVYLALTTWVEENGMTFDYRYYKERIHKLCRYLNQTFLMPQFSPFLEYAEDEEYYYFTFNHKKIPFLKEDVTLLPVTNITVEELSRWFVHELIKDKAELDRHRIDTVLVKVFSAPGQSASHQWQRANE

SEQ ID NO: 20601 - protein, 126 aa, Fluoribacter dumoffii
  REGION 1..126: note = tr|A0A377G888|A0A377G888_9GAMM Queuosine biosynthesis protein QueD OS=Fluoribacter dumoffii OX=463; GN = NCTC11370_00616 PE=4 SV=1
MHCLMLRKNFIAQHFLIGKDFGAENSRHSHHYSFELEIENTQLDQFNFLIDIVEVKNHIELMISYFNDKTLNELPEFENQNPSLELFSKILWQKFNHFKLPANSQITVRLWEDDIAQASYREKICA

SEQ ID NO: 20602 - protein, 168 aa, Fluoribacter dumoffii
  REGION 1..168: note = tr|A0A377G5Z9|A0A377G5Z9_9GAMM Queuosine biosynthesis protein QueD OS=Fluoribacter dumoffii OX=463; GN = NCTC11370_00114 PE=4 SV=1
MTIKKYLTTVELQKESMKFSAGHTTIFSATEREPLHGHMYGVYLALTTWVEENGMTFDYRYYKERIHKLCRFLNQTFLMPQFSPFLEFAEDEEYYYFTFNHKKIPFLKEDVTLLPVSNITVEELSRWFVNELIKDKAELDRHRIETVVVKVFSAPGQSASHQWQRVHE

SEQ ID NO: 20603 - protein, 168 aa, Fluoribacter gormanii
  REGION 1..168: note = tr|A0A377GFI3|A0A377GFI3_9GAMM Queuosine biosynthesis protein QueD OS=Fluoribacter gormanii OX=464; GN = NCTC11401_00124 PE=4 SV=1
MNIKRYLTTVELQKESMKFSAGHTTIFSATEREPLHGHMYGVYLALTTWVEENGMTFDYRYYKERIHKLCRYLNQTFLMPQFSPFLQYAEDEEYYYFTFNQKKIPFLKEDVTLLPVTNITVEELSRWFVQELIKDKAELDRHRIEHVVVKVFSAPGQSANHQWHRAHE

SEQ ID NO: 20604 - protein, 135 aa, unidentified
  source 1..135: note = Fluviibacterium aquatile
  REGION 1..135: note = tr|A0A4R6AVL1|A0A4R6AVL1_9RHOB 6-carboxytetrahydropterin synthase OS=Fluviibacterium aquatile OX=2552766 GN=E2L05_11050 PE=4 SV=1
MFALEVRDHIMIAHSLPGEAFGPAQGMHGATFVIDVAFFRETLTENDIVVDIGLAAEALGRVTATVNYKNLDELDLFGGKRSTTEVLCKYVFDAMAAEIAAGRLGEDAREITKLKVTLNESHVARAWLEGPVAQG

SEQ ID NO: 20605 - protein, 198 aa, unidentified
  source 1..198: note = Fluviicoccus keumensis
  REGION 1..198: note = tr|A0A4Q7Z4R7|A0A4Q7Z4R7_9GAMM 6-pyruvoyltetrahydropterin/6-carboxytetrahydropterin synthase OS=Fluviicoccus keumensis OX=1435465; GN = EV700_2126 PE=4 SV=1
MLIRKLFRFENAHIVRNCSSDRCSRSLHGHSYQVEFLLEAHALDNGQMVYDFGLMKGAVRTLTDSFDHAVAFWDKDNADYITACKTFSARWISLPVSPSAEQFSRLMFVLADAVLKQTEMKNGEADVRLYSVIVHETQTGYAQCFREDIDNPRMGLIRLEDIIFSDQVRAEWPDPEMYEKLKRGERFINPEVVPQVRL

SEQ ID NO: 20606 - protein, 139 aa, Fluviicola sp.
  REGION 1..139: note = tr|A0A316KIK2|A0A316KIK2_9FLAO 6-carboxy-5,6,7,8-tetrahydropterin synthase OS=Fluviicola sp. XM-24bin1 OX=2133950 GN=DCO96_10960 PE=3 SV=1
MAGETIRICRRETFNAAHRLYRKEWSDEKNYEVFGKCSHPNYHGHNYVIEVWLEGPIDPVTGYLMDLKELKTIIQREVCDRFDHRNFNLDCEEFKDRIPTAENIAVVCWQLIQPQLPDNLRLEVHIQETEKNKVSYSGG

SEQ ID NO: 20607 - protein, 143 aa, Fluviicola sp.
  REGION 1..143: note = tr|A0A556MNU4|A0A556MNU4_9FLAO 6-carboxytetrahydropterin synthase OS=Fluviicola sp. MAH-3; OX = 2597671 GN=FO442_14280 PE=4 SV=1
METVYITRREHFNAAHKLWREEWSDEKNEEVFGKCSNKNWHGHNFELFVTVKGAPNPETGFVINLKDLSVIIKELVIEQLDHKNLNLDVPFLKGKLASTENLAIEIWKIINDPIQQAGGQLCKIKLVETENNYVEYFGGKEPY

SEQ ID NO: 20608 - protein, 134 aa, Fluviicola taffensis
  REGION 1..134: note = tr|F2IK39|F2IK39_FLUTR 6-carboxy-5,6,7,8-tetrahydropterin synthase OS=Fluviicola taffensis (strain DSM 16823 / NCIMB 13979 / RW262); OX = 755732 GN=Fluta_0937 PE=3 SV=1
MKIFRVEQFNAAHRLFNPNWDDETNNRIFGKCNNPNFHGHNYKLEVELDGPINPETGYVMDMKKLSEIIKLEILERFDHRNLNLDCPEFKNLIPSAENIALVCWNILRQHLPSELKLKVRLWETPKNGVEYDGN

SEQ ID NO: 20609 - protein, 190 aa, Fluviicola taffensis
  REGION 1..190: note = tr|F2I9N5|F2I9N5_FLUTR Uncharacterized protein; OS = Fluviicola taffensis (strain DSM 16823 / NCIMB 13979 / RW262) OX=755732 GN=Fluta_1033 PE=4 SV=1
MPYFSVYFQLENGLISSSQNLHFFNKLPVLKRTFSAKISNFASNILRLETVYITRREHFNAAHKLWREEWSDEKNEEVFGKCSNKNWHGHNFELFVTVKGEPNPETGFVINLKDLSVIIKELVIEEVDHKNLNLDVPFLKGKLASTENLAIEIWKIIDAPIQEAGGQLCKIKLVETENNYVEYFGGKEPF

SEQ ID NO: 20610 - protein, 129 aa, Fodinibius salinus
  REGION 1..129: note = tr|A0A5D3YN77|A0A5D3YN77_9BACT 6-carboxy-5,6,7,8-tetrahydropterin synthase OS=Fodinibius salinus OX=860790 GN=LX73_0671 PE=3 SV=1
MPKWILNTKFKFDAAHLIEGYEGKCGRMHGHSYKVHVEAKSNTLHPSKYLDTDDMVCDFRELKWASKGSEKGGLDHAVLNDELPVNPTAERIAEFIYKETNRRIPDDVSLKITVWETESCWVEYTEDDV

SEQ ID NO: 20611 - protein, 150 aa, Fodinibius salinus
  REGION 1..150: note = tr|A0A5D3YNX2|A0A5D3YNX2_9BACT 6-pyruvoyltetrahydropterin/6-carboxytetrahydropterin synthase OS=Fodinibius salinus OX=860790 GN=LX73_0883 PE=4; SV = 1
MVFVTRKAHFNAAHRLHNPDKSDQWNKEKFGKCNHENWHGHNYIIKVTVAGIPDSESGYVIDLSELKDIIQLHIIEKCDHKNLNLDVDFLDGIMPSTENLVKAFFEQIEIPIREATDENGFLYEVELEETERNSAKYCPYLLDKEVPVKS

SEQ ID NO: 20612 - protein, 164 aa, Fontibacillus panacisegetis
  REGION 1..164: note = tr|A0A1G7Q231|A0A1G7Q231_9BACL 6-pyruvoyltetrahydropterin/6-carboxytetrahydropterin synthase OS=Fontibacillus panacisegetis OX=670482; GN = SAMN04488542_12069 PE=4 SV=1
MNTMPGEFTIVDSLQKFGADINLKQLKYHNRRVLVSKEFTFDAAHHLHAYEGKCKNLHGHTYKVVFGISGIPNEIGIAIDFGTIKTIWKKEIEGFLDHRYLNETLPPMNTTAENMVVWLYEKLEAALQSPQHLSALTGARTEFVRLYETPTSYAEARREWMSGD

SEQ ID NO: 20613 - protein, 163 aa, Fontibacillus panacisegetis
  REGION 1..163: note = tr|A0A1G7GVE7|A0A1G7GVE7_9BACL 6-pyruvoyltetrahydropterin/6-carboxytetrahydropterin synthase OS=Fontibacillus panacisegetis OX=670482; GN = SAMN04488542_103217 PE=4 SV= 1
MNKMPGQFVIVDALQKFKEDITQEQLKYHQRRVLVSKEFTFDAAHHLHAYEGKCKNLHGHTYKVVFGVSGYTNEIGMTIDFGMIKTIWREQIEPYLDHRYLNETLPLMNTTAENMVVWLYEQMETALSTDKYSSKDVDARTEFVRLFETPTSYAEARREWMAD

SEQ ID NO: 20614 - protein, 165 aa, unidentified
  source 1..165: note = Fontibacillus phaseoli
  REGION 1..165: note = tr|A0A369BFM5|A0A369BFM5_9BACL 6-pyruvoyltetrahydropterin/6-carboxytetrahydropterin synthase OS=Fontibacillus phaseoli OX=1416533; GN = DFP94_10372 PE=4 SV=1
MMNREPGVFRIVERLHVFGEDISENQLRYHRRRVLVSKQFTFDAAHHLHAYDGKCKNLHGHTYEVVFGISGKPDERGIAIDFGTVKQIWKDEIEGYLDHRYLNETLPPMNTTAENMVVWLYEKMEAALSSGRYLSSLPDARTEFVRLYETPTSFAEARREWMQDE

SEQ ID NO: 20615 - protein, 125 aa, unidentified
  source 1..125: note = Fonticella tunisiensis
  REGION 1..125: note = tr|A0A4R7KAF9|A0A4R7KAF9_9CLOT 6-carboxy-5,6,7,8-tetrahydropterin synthase OS=Fonticella tunisiensis OX=1096341 GN=EDD71_11830 PE=3 SV=1
MILIKEFEFDAAHNLVKYHGKCERLHGHTYKLVVKLEGTPDSEGMVFDFVELKRIVKEKVVDKFDHAYINDIISQPTAENIAVYVWNELVEVLKRSNCRLYEVEVWETKTSGVIYRGEAHERLAE

SEQ ID NO: 20616 - protein, 155 aa, unidentified
  source 1..155: note = Fonticella tunisiensis
  REGION 1..155: note = tr|A0A4R7KVE3|A0A4R7KVE3_9CLOT PreQ(0) biosynthesis protein QueD OS=Fonticella tunisiensis OX=1096341; GN = EDD71_10116 PE=4 SV=1
MVNVSITKEFTWDMAHMLACHEGLCKNIHGHTYKMQVEVTRKSKDLITSPGNSEEGMVIDFNHLKNIVKDKIIDPLDHAFMYWCQSPDSLEHEIAELLRKHGRKVVTVTYKPTAEEMARNFLEILSHEFDKHDILIRSVKVWETPTSFATAVREE

SEQ ID NO: 20617 - protein, 281 aa, unidentified
  source 1..281: note = Fontimonas thermophila
  REGION 1..281: note = tr|A0A1I2IC98|A0A1I2IC98_9GAMM 6-pyruvoyl tetrahydropterin synthase OS=Fontimonas thermophila; OX = 1076937 GN=SAMN04488120_103215 PE=4 SV=1
MTCLFVEQLTVIDCAYLDAARGLVGESWIVDVELEGHLDAESMLLDFAELKRRCKQVIDRSVDHRLLVPAAAPELQLTEDGEDLHLVFRSDIGVIEHLSPRVAVTLVDTAEIDAQTVSAHLHPRLRAVLPDNVGTLRVLLRHERIDGAYYHYVHGLKKHRGACQRIAHGHRSKIEVCVDGVRDPSLERAVAHRWLDIYLGTREDIVARGNGRIRFAYRAAEGHYQLALPETHVDLLDGDSTVERIAEHLARRLAYERPGQTVAVRAYEGIMKGASAQARIG

SEQ ID NO: 20618 - protein, 144 aa, unidentified
  source 1..144: note = Fontimonas thermophila
  REGION 1..144: note = tr|A0A1I2HBZ6|A0A1I2HBZ6_9GAMM 6-pyruvoyltetrahydropterin/6-carboxytetrahydropterin synthase OS=Fontimonas thermophila OX=1076937; GN = SAMN04488120_101293 PE=4 SV=1
MTSEARPIVYLTRRETFCAGHRLWSDALSADENRRLFGPCAYEHGHGHNYVLEVTLRGPVDPKTGVVVNLTEVRDAIRTLVLDDVDHRFLNHDSVLCRGINPSVENLAVLFWDVLHARFGDLLYEVRLHETEKNWAVYRGERRS

SEQ ID NO: 20619 - protein, 197 aa, Formivibrio citricus
  REGION 1..197: note = tr|A0A1I5CEZ4|A0A1I5CEZ4_9NEIS 6-pyruvoyltetrahydropterin/6-carboxytetrahydropterin synthase OS=Formivibrio citricus OX=83765; GN = SAMN05660284_02397 PE=4 SV=1
MLIRKLFRFESAHIVRNCSSLRCSTSIHGHSYKVEVLLEAHALDHGQMVYDFGLMKGNIRDVIDAFDHAICFWDKDDPEYIRLCKQFSARWISMPVSPSAEQFARLFFVIIEAILRQTIMGNGEGVVRLHSVIAHETETGYAQAFPEDAHNERMGPIRLEEIEFSEQCRKEWRDPQMYEKLQAGEPFINSAPPLQVK

SEQ ID NO: 20620 - protein, 150 aa, Formosa agariphila
  REGION 1..150: note = tr|T2KH93|T2KH93_FORAG 6-pyruvoyl tetrahydrobiopterin synthase OS=Formosa agariphila (strain DSM 15362 / KCTC 12365 / LMG 23005 / KMM 3901) OX=1347342; GN = BN863_560 P E=4 SV=1
MSNIRITKQFTFETGHALYGYDGKCKNVHGHSYKLSVTVIGKPITDNTNVKYGMVIDFGDLKKIVKTEIVDVFDHATVFNKNTPHVELAKELSDRGHNVLLVDYQPTSEMMVIDFASKIKTYLPSHIALHSLRLQETDSSFAEWYASDNL

SEQ ID NO: 20621 - protein, 136 aa, Formosa agariphila
  REGION 1..136: note = tr|T2KP09|T2KP09_FORAG 6-carboxy-5,6,7,8-tetrahydropterin synthase OS=Formosa agariphila (strain DSM 15362 / KCTC 12365 / LMG 23005 / KMM 3901) OX=1347342 GN=BN863_2 4790 PE=3 SV=1
MIAKVSRQGYFNAAHRLYRKDWTDEKNQLIFGRCNNPNYHGHNYEIIVSVTGEIDQETGFVIDLKILKQLIKDEVEEAFDHKNLNLDVPEFKDLNPTAENIAVVIYNKLKPKLNDYLDLEITLYETPRNFVSYSGK

SEQ ID NO: 20622 - protein, 136 aa, Formosa algae
  REGION 1..136: note = tr|A0A2K2Z704|A0A2K2Z704_9FLAO 6-carboxy-5,6,7,8-tetrahydropterin synthase OS=Formosa algae OX=225843 GN=BKP44_13020 PE=3 SV=1
MIAKVSRQGYFNAAHRLYRKDWSDEKNQDIFGRCNNANYHGHNYDVIVSVSGEIDQETGFVIDLKILKQLIKDEVEEAFDHKNLNLDVPDFKDLNPTAENIAVVIYNKLKPRLASHLDLEITLYETPRNFVSYCGN

SEQ ID NO: 20623 - protein, 150 aa, Formosa algae
  REGION 1..150: note = tr|A0A2K2Z6J2|A0A2K2Z6J2_9FLAO 6-carboxytetrahydropterin synthase QueD OS=Formosa algae; OX = 225843 GN=BKP44_14010 PE=4 SV=1
MSNIRITKQFTFETGHALYGYDGKCKNVHGHSYKLSVTVIGKPITDNTNVKYGMVIDFGDLKHIVKREIVDVFDHATVFNKNTPHVELARELEKRDHNVLLVDYQPTSEMMVIDFAQKIKQYLPTHIALHSLKLQETDSSFAEWYASDNS

SEQ ID NO: 20624 - protein, 110 aa, Formosa sp.
  REGION 1..110: note = tr|A0A2D4WYL4|A0A2D4WYL4_9FLAO 6-pyruvoyl tetrahydrobiopterin synthase (Fragment) OS=Formosa sp.; OX = 2018467 GN=CMP78_06465 PE=4 SV=1
MKVTVSRRAHFNAAHRLYRHNWSDEKNEAIFGKCNNPHFHGHNYELIVSVTGEVDPETGYVVDVKILKDFIKSEVEDTLDHKNLNLEVPEFKETNPTAENIVIFIYNKLK

SEQ ID NO: 20625 - protein, 136 aa, Formosa sp.
  REGION 1..136: note = tr|A0A5D0G742|A0A5D0G742_9FLAO 6-carboxy-5,6,7,8-tetrahydropterin synthase OS=Formosa sp. 1494 OX=2592046 GN=FVF61_08270 PE=3 SV=1
MEVTVSRKAHFNAAHRLYRKDWSNEKNEAVFGKCNNPNYHGHNYELIVSVTGKIDKETGYVIDMKILKDIIKEEVEDAFDHKNLNEDVAIFKNLNPTAENIVVVIYNKLKPKLKSDLKLEVTLFETPRNYVSYSGN

SEQ ID NO: 20626 - protein, 136 aa, Formosa spongicola
  REGION 1..136: note = tr|A0A316DKS9|A0A316DKS9_9FLAO 6-carboxy-5,6,7,8-tetrahydropterin synthase OS=Formosa spongicola OX=570520 GN=LX78_02062 PE=3 SV=1
MKVTVSRKAHFNAAHRLYRKDWSNEKNDVVFGKCNNPNYHGHNYELIVSVTGQIDKETGYVIDMKVLKELIKEEVEDVLDHKNLNEDVEAFKNLNPTAENIVVVIYNILKPKLNSSLELEVTLFETPRNFVSYSGK

SEQ ID NO: 20627 - protein, 152 aa, Formosa spongicola
  REGION 1..152: note = tr|A0A316DTA0|A0A316DTA0_9FLAO 6-pyruvoyltetrahydropterin/6-carboxytetrahydropterin synthase OS=Formosa spongicola OX=570520 GN=LX78_00119; PE = 4 SV=1
MSKIRITKQFSFETGHALYGYDGKCKNVHGHSYKLSVTVIGTPISNTDNVKFGMVIDFGDLKKIVKNEIVDVFDHATVFNKNTPHVELAKELEDRGHNVLLVDYQPTSEMMVIDFANKIKTQLPSHIALHSLKLQETDTSFAEWYASDNNSL

SEQ ID NO: 20628 - protein, 188 aa, unidentified
  source 1..188: note = Fournierella massiliensis
  REGION 1..188: note = tr|A0A4R1R8F8|A0A4R1R8F8_9FIRM 6-pyruvoyltetrahydropterin/6-carboxytetrahydropterin synthase OS=Fournierella massiliensis OX=1650663; GN = EDD77_10196 PE=4 SV=1
MRSITTLDLQYAHRFYGFKGEAQYLHGHTGVLTIEVEDTVEPGVNMVFPCNEIQKTAWEVLKNFDHALILRQDDPLLPAVLKVYEEQGIRDGAPQNQMKGPAFQTELATAYPECRLVVTKETLTVEGMIKIVYDLLKDKLNIAKITFTSGVNAASAEFETHNNIDRCPLCGIALNENGVCPKCGYKKH

SEQ ID NO: 20629 - protein, 178 aa, unidentified
  source 1..178: note = Francisella adeliensis
  REGION 1..178: note = tr|A0A2Z4XXB9|A0A2Z4XXB9_9GAMM Uncharacterized protein OS=Francisella adeliensis OX=2007306; GN = CDH04_00820 PE=4 SV=1
MWQISKSFDFCYGHRVWAQELNSEFSENKKCSCRHLHGHNGTATINLVSESLDKQGMVTDFGNLSWFKTWLKNHIDHKFILDINDPLFMSLTHSKELQNQSFEGLQIAQAIVQDGSLDKHLQEYLNSFVVVNFIPTSENLAKWLCQIISHKMKQLNIKVHSVELYETPKSKSIYYNNQ

SEQ ID NO: 20630 - protein, 143 aa, Francisella sp.
  REGION 1..143: note = tr|A0A2W6RTM8|A0A2W6RTM8_9GAMM 6-carboxy-5,6,7,8-tetrahydropterin synthase OS=Francisella sp. OX=2047875 GN=DI619_05595 PE=3 SV=1
MTETFKVTREFRFEAAHLLDHHDGKCKNLHGHGYVLQVELMAPLHISGPKEGMVWDFADLKSLVWEKILESFDHSFIYNTHSERESKIANLLISLDSKVTPLPFRTTAEALAKYIFDILTQAGAPISAVRLWESAYSFCEYRR

SEQ ID NO: 20631 - protein, 120 aa, unidentified
  source 1..120: note = Franconibacter pulveris
  REGION 1..120: note = tr|A0A0J8VLT7|A0A0J8VLT7_9ENTR 6-carboxy-5,6,7,8-tetrahydropterin synthase; OS = Franconibacter pulveris OX=435910 GN=ACH50_09785 PE=3; SV = 1
MPTTLFKDFMFEAAHRLPHVPEGHKCGRLHGHSFMVRLEVTGEVDPHTGWIIDFAELKAAFKPVYDQLDHYYLNDIPGLENPTSEVLAKWIWDQMKPKMPLLSAVMIKETCTAGCVYRGE

SEQ ID NO: 20632 - protein, 130 aa, Frankia alni
  REGION 1..130: note = tr|Q0RM63|Q0RM63_FRAAA 6-carboxy-5,6,7,8-tetrahydropterin synthase OS=Frankia alni (strain ACN14a) OX=326424 GN=ptp PE=3 SV=1
MTMPAFEISKTFEFSASHRLSGLPADHKCARLHGHNYTVRVQLRGETLDPVGFLLDYGELSPVRDWIDAALDHQHLNACLDFNPTAELLAQHLAGTVRQLVPIPDGVRVAVGVSETPRTWAFYREAEAAQ

SEQ ID NO: 20633 - protein, 124 aa, unidentified
  source 1..124: note = Frankia casuarinae
  REGION 1..124: note = tr|Q2J7K6|Q2J7K6_FRACC 6-carboxy-5,6,7,8-tetrahydropterin synthase OS=Frankia casuarinae (strain DSM 45818 / CECT 9043 / CcI3) OX=106370; GN = Francci3_3381 PE=3 SV=1
MEIFREFTFEAAHRLPEVPEGHKCARLHGHSFRIAIQVVGPVDPRAGWVMDFADLRAAFAPLHDQLDHRYLNEVPGLDNPTSENLARWIWDRLAGELPLSAVTVRETCTSGCIYRGDEPDRTPA

SEQ ID NO: 20634 - protein, 144 aa, unidentified
  source 1..144: note = Frankia casuarinae
  REGION 1..144: note = tr|Q2JC61|Q2JC61_FRACC 6-carboxy-5,6,7,8-tetrahydropterin synthase OS=Frankia casuarinae (strain DSM 45818 / CECT 9043 / CcI3) OX=106370; GN = Francci3_1755 PE=3 SV=1
MGSCANWFAALAVGLAWKGQPVFAIRKEFGFSASHVLDHLPADHPCSRMHGHNYTVVLELKAQESGLNEAGFVRDYRDLGEFKAWTDDTLDHRHLNDVIIDLNPSAEQLARWIFTTWREKLPELVAVSVSETPKTWAEFRPRVD

SEQ ID NO: 20635 - protein, 156 aa, unidentified
  source 1..156: note = Frankia irregularis
  REGION 1..156: note = tr|A0A0S4QZW8|A0A0S4QZW8_9ACTN 6-pyruvoyltetrahydropterin/6-carboxytetrahydropterin synthase OS=Frankia irregularis OX=795642; GN = Ga0074812_15220 PE=4 SV=1
MASQIQVGGDRFVFSAAHAALHDGHLEPLHGHSYVPTVLLSGEVDTAGIVVDFGIVEKALGAVVARLHCRTLLAENAPGVDVAVSGAEVNMCCGPDRYRFPRSAVVLLPIVNTTTEALASWILSEVVGLVGHRPGLIAGVELAETSGLRATVRQEP

SEQ ID NO: 20636 - protein, 136 aa, Frankia sp.
  REGION 1..136: note = tr|A0A0Q0XM95|A0A0Q0XM95_9ACTN 6-carboxy-5,6,7,8-tetrahydropterin synthase OS=Frankia sp. ACN1ag OX=102891 GN=UK82_12785 PE=3 SV=1
MTFSSVPMPPGTYTISKTFDFEGGHRLPGLPSEHKCSRQHGHSYEVEVILTAPRLEEPGFVTDFGALAPFKEFLAADLDHHNLHEILPFEPTSELLAQFLAGWFIQNVEPTIPGRLVAVGVRETRRSWARFEVEGQ

SEQ ID NO: 20637 - protein, 127 aa, Frankia sp.
  REGION 1..127: note = tr|A0A062X7U7|A0A062X7U7_9ACTN 6-carboxy-5,6,7,8-tetrahydropterin synthase OS=Frankia sp. BMG5.23 OX=683305 GN=BMG523Draft_00742 PE=3 SV=1
MEYRIGKRFSFDAAHHLEGLASGHKCSRVHGHTYTVEVVLTADRLSGPGFVTDFGDLAPFSDFLDKHFDHRDLNEVLDVPPTSELVATHLAHWFIDNLEPLIPGRLVSMRVAETPGSWAEYTPPGRH

SEQ ID NO: 20638 - protein, 132 aa, unidentified
  source 1..132: note = Frankineae bacterium
  REGION 1..132: note = tr|A0A1G8QE27|A0A1G8QE27_9ACTN 6-pyruvoyl-tetrahydropterin synthase OS=Frankineae bacterium MT45 OX=1882833 GN=SAMN05444157_1367 PE=4 SV=1
MFSVTVRDHLMIAHSFQGEVFGPAQRLHGATYVVDATFRRPELDDDGIVVDIGQATQQLHKVLADLTYRNLDEVPEFAGVNTSTEFLARVIADRLAARVHAGSLGAGAGGLTGLTVTLHESHVAWAGYERSL

SEQ ID NO: 20639 - protein, 127 aa, Frateuria aurantia
  REGION 1..127: note = tr|H8L1G3|H8L1G3_FRAAD 6-carboxy-5,6,7,8-tetrahydropterin synthase OS=Frateuria aurantia (strain ATCC 33424 / DSM 6220 / NBRC 3245 / NCIMB 13370) OX=767434 GN=Fraau_ 0194 PE=3 SV=1
MHIFKIFTIEAAHHLPKVPAGHKCSRLHGHSFRIELHVAGPIGEDTGWVMDFGDLKQAFAPIYDQLDHHYLNDIEGLDNPTSEILARWIYHKTLPRVPGLDQVVVHETCTSGASYRRKDYLAEQVGA

SEQ ID NO: 20640 - protein, 120 aa, Frateuria sp.
  REGION 1..120: note = tr|A0A0Q9Q793|A0A0Q9Q793_9GAMM 6-carboxy-5,6,7,8-tetrahydropterin synthase OS=Frateuria sp. Soil773 OX=1736407 GN=ASG87_17695 PE=3 SV=1
MHIFKVFQIEAAHRLPNVPAGHKCARLHGHSFRIEIHVAGEPSPELGWVMDFADVKAAFAPLYDQLDHHYLNDIAGLENPTSETLARWIFRRLEPALPGLDKVVVHETCTSGASCSRDSF

SEQ ID NO: 20641 - protein, 120 aa, Frateuria terrea
  REGION 1..120: note = tr|A0A1H6SS38|A0A1H6SS38_9GAMM 6-carboxy-5,6,7,8-tetrahydropterin synthase OS=Frateuria terrea OX=529704 GN=SAMN04487997_1383 PE=3 SV=1
MHIHKVFQIEAAHRLPNVPAGHKCARLHGHSFRVEVHVEGEPDPALGWVMDFADIKTAFAPLFEQLDHHYLNDIEGLDNPTSEMLARWIFRRLEPRLPGLDRVVVHETCTSAASCSRTSF

SEQ ID NO: 20642 - protein, 140 aa, unidentified
  source 1..140: note = Frederiksenia canicola
  REGION 1..140: note = tr|A0A3N4W997|A0A3N4W997_9PAST 6-carboxy-5,6,7,8-tetrahydropterin synthase; OS = Frederiksenia canicola OX=123824 GN=EDC49_1451 PE=3 SV=1
MFKIAKEFSFDMAHMLDGHDGKCQNLHGHTYTLQVEIGGELRTSGAKSGMVMDYSDLKAIVKTHILDKMDHAFIYDSTSERECQVANLLNSLNSKTFAIPTRTTAEQMAKYIFDTLCDVGLPVSLIRLWETPTSYCEYSR

SEQ ID NO: 20643 - protein, 128 aa, unidentified
  source 1..128: note = Fremyella diplosiphon
  REGION 1..128: note = tr|A0A1Z4ME89|A0A1Z4ME89_MICDP 6-carboxy-5,6,7,8-tetrahydropterin synthase OS=Fremyella diplosiphon NIES-3275 OX=1973485 GN=NIES3275_38400 PE=3; SV = 1
MPEWKLVTEFTFDSAHYIKDYDGPCGRMHGHTYKVRMEAKSSQLHSSEFCPHPVMVADFRTLRWAKQDVTKGGLDHCVLNEVLPPEYETTAEMIAKYIYDRTKQQLPPNVELKVRVSETANSWVEYQE

SEQ ID NO: 20644 - protein, 290 aa, unidentified
  source 1..290: note = Fremyella diplosiphon
  REGION 1..290: note = tr|A0A1Z4MFH6|A0A1Z4MFH6_MICDP Putative 6-pyruvoyl tetrahydropterin synthase OS=Fremyella diplosiphon NIES-3275 OX=1973485 GN=NIES3275_42090 PE=4 SV=1
MQCIVNRRAQFSASHRYWLPELSEAENTQQFGACSRFPGHGHNYVLFISLIGELDEYGMVLNLSDVKQVIKREVTSQLDFSYLNDVWPDFQQTLPTTENIARVIWQRLAPHLPLVRVQLFEHPELWADYMGNSMEAYLTISTHFSAAHRLAHPNLSNEENAEIYGKCARTHGHGHNYHLEVTVKGEIDQRTGMIVDLGALNQVIEDYVVEPFDHTFLNKDIPYFGEVVPTAENIALYISNLLRSPVQKLGAKLHKVKLIESPNNSCEIYCTDAESTSVSANANQPMLARV

SEQ ID NO: 20645 - protein, 133 aa, Frigoribacterium sp.
  REGION 1..133: note = tr|A0A1R4G2Y5|A0A1R4G2Y5_9MICO PTPS-like type 4; OS = Frigoribacterium sp. JB110 OX=1434829 GN=CZ774_11335; PE = 4 SV=1
MTFTVTVRDHMMIAHSLSGDVFGPAQNLHGATYVVDASFRASELSADGVVVDIGRAASALHEITSSLTNRNLDDDPRFAGTNTTTEHLCRVVADALAERAGDGALGAEGRLLTTITVTLHESHIAWASFERQL

SEQ ID NO: 20646 - protein, 139 aa, unidentified
  source 1..139: note = Frischella perrara
  REGION 1..139: note = tr|A0A0A7RXU0|A0A0A7RXU0_FRIPE 6-carboxy-5,6,7,8-tetrahydropterin synthase OS=Frischella perrara OX=1267021 GN=queD PE=3 SV=1
MYKIAKEFQFDACHMLDGHNGKCHNLHGHTYRLIIEISANLIEQGSSADMVMDFADIKQTVKQHVIDKLDHAFLYNQHNNNESQIADLLQKMQRKTFAFPCRTTAEGMSKFIFNVLKQYLPISSVTLWETPTSYCQYSE

SEQ ID NO: 20647 - protein, 133 aa, Frondihabitans australicus
  REGION 1..133: note = tr|A0A495IHL0|A0A495IHL0_9MICO 6-pyruvoyl-tetrahydropterin synthase OS=Frondihabitans australicus OX=386892 GN=C8E83_2387 PE=4 SV=1
MSFTVTVRDHMMIAHSFTGEAFGPAQRLHGATFVVDASFGAADLDADGVVVDIGWASAALAGVVGVLSYRNLDDEPLFTGVNTTTEVLCRHVADRLADALDEVGDSRVETVAVTLHESHVAWASYSRARRVAR

SEQ ID NO: 20648 - protein, 167 aa, unidentified
  source 1..167: note = Fuerstia marisgermanicae
  REGION 1..167: note = tr|A0A1P8WFF1|A0A1P8WFF1_9PLAN Queuosine biosynthesis protein QueD OS=Fuerstia marisgermanicae; OX = 1891926 GN=Fuma_02388 PE=4 SV=1
MTETFEACVTKDSLVFSAAHFITFNGNICERLHGHNWRLDVSIAGHLDENHYVFDFIAMRDACQSIVNELDHKVLLPDRHDSITVQTSDDGREVTARFEERRWVFPVEDCAILPLENTTAELIARLIGQQLMTALDLASVRNVTSLKVSVEENFGQWATVTLPVGAV

SEQ ID NO: 20649 - protein, 169 aa, unidentified
  source 1..169: note = Fuerstia marisgermanicae
  REGION 1..169: note = tr|A0A1P8WID6|A0A1P8WID6_9PLAN Queuosine biosynthesis protein QueD OS=Fuerstia marisgermanicae; OX = 1891926 GN=Fuma_03437 PE=4 SV=1
MIIRKEYKFYAAHRNETLQDKCSNIHGHRYGLRIHFEVEREGDISTLFGDFDDKIEPYLKSNFDHGMLINCNDPLYQTLLDHTKRTGEHFRLKVFDGPTSVENLAWIMFSEITEMGFRLDRLEVQETDTSTLIYTREDWVRDNRHFAKSSGETSNDEKETSETPSNKTV

SEQ ID NO: 20650 - protein, 132 aa, unidentified
  source 1..132: note = Fulvimarina manganoxydans
  REGION 1..132: note = tr|A0A1W2CRP9|A0A1W2CRP9_9RHIZ 6-pyruvoyl-tetrahydropterin synthase OS=Fulvimarina manganoxydans OX=937218 GN=SAMN06297251_11180 PE=4 SV=1
MFAVEVRDHIMIAHSLPREVFGPAQKMHGATFVVDAAFFTEDVDENGLGVDIGLATEVLSNTLKPLNYQNLDEMDVFAGKVTTTEVLAKHIFDALKAGVAGGDLGPGGARIKRIRVSLHESHVARAWYEAEL

SEQ ID NO: 20651 - protein, 132 aa, Fulvimarina pelagi
  REGION 1..132: note = tr|Q0G7E1|Q0G7E1_9RHIZ Uncharacterized protein; OS = Fulvimarina pelagi HTCC2506 OX=314231 GN=FP2506_06276; PE = 4 SV=1
MFAVEVTDHIMIAHSLPRPVFGPAQGMHGATFTVDAAFFTEDLDDDGLAVDIGAASEILSGVLKPLNYQNLDEITEFNGKVTTTEFLARHIFSKIAKEIAAGRMGEAGGRVMKLRVRLHESQVARAWYEAAL

SEQ ID NO: 20652 - protein, 132 aa, Fulvimarina sp.
  REGION 1..132: note = tr|A0A371X298|A0A371X298_9RHIZ 6-carboxytetrahydropterin synthase OS=Fulvimarina sp. 85; OX = 2293836 GN=DYI37_09850 PE=4 SV=1
MFAVEVTDHIMIAHSLPRPVFGPAQGMHGATLTVDAAFFTEDLDEDGLAVDIGAATDILKEVLRPLNYQNLDEISEFSGKVTTTEFLARHIHRKIAEAIAGGRMGEAGGRVAKLRVRLHESQVARAWYEASL

SEQ ID NO: 20653 - protein, 132 aa, Fulvimarina sp.
  REGION 1..132: note = tr|A0A2E1HKA0|A0A2E1HKA0_9RHIZ Uncharacterized protein OS=Fulvimarina sp. OX=1969479 GN=CMP81_23590 PE=4; SV = 1
MFAVEVRDHMMIAHSLPRPVFGAAQGMHGATFVVDAAFFTEDLDADGLAVDIGLASTLLKAVLEPLNYQNLDAIEGFRGKVTTTEFLAKHLFDRLAEEIAAGALGEGGARIRRLKVSLEESHVARAWYEGAL

SEQ ID NO: 20654 - protein, 120 aa, Fulvimonas soli
  REGION 1..120: note = tr|A0A316IYQ6|A0A316IYQ6_9GAMM 6-carboxy-5,6,7,8-tetrahydropterin synthase OS=Fulvimonas soli OX=155197 GN=C7456_102118 PE=3 SV=1
MHIFKVFQIEAAHRLPNVPAGHKCARLHGHSFRIEVHVEGEPDPALGWVMDFADVKAAFAPLFERLDHHYLNDVEGLENPTSENLARWIFSRLEPALPGLDKVVVHETCTAGASCSRASL

SEQ ID NO: 20655 - protein, 138 aa, unidentified
  source 1..138: note = Fulvivirga imtechensis
  REGION 1..138: note = tr|L8JMK1|L8JMK1_9BACT 6-pyruvoyl tetrahydrobiopterin synthase OS=Fulvivirga imtechensis AK7; OX = 1237149 GN=C900_00200 PE=4 SV=1
MVFLSRQEHFNAAHKLYNPNWSEEKNVEVFGPCANANWHGHNFEMIVTVKGDPDPDTGFVVDLKKLSVLIRKEIIEKVDHKNLNVDVPFMKGKMASTENLVIEFWKILEKKLPEITSSAKLHCIKLYETPRNFVEYYG

SEQ ID NO: 20656 - protein, 150 aa, unidentified
  source 1..150: note = Fulvivirga imtechensis
  REGION 1..150: note = tr|L8JJQ6|L8JJQ6_9BACT 6-pyruvoyl tetrahydrobiopterin synthase OS=Fulvivirga imtechensis AK7; OX = 1237149 GN=C900_00317 PE=4 SV=1
MSAKGVFFAKNINLILKVAVYRKEHFNAAHRLYNSEWDDDKNTQVFGKCSNPHFHGHNYELFVKITGEVDPETGYVYDMKKLSDLIKAHVIKKFDHKNLNLDTEYFKELNPTAENIAIVIYNILRGKLDGSLDLKIRLYETERNFVEYPA

SEQ ID NO: 20657 - protein, 135 aa, Fulvivirga sp.
  REGION 1..135: note = tr|A0A553FU98|A0A553FU98_9BACT 6-carboxytetrahydropterin synthase OS=Fulvivirga sp. M361; OX = 2594266 GN=FNH22_07250 PE=4 SV=1
MRVSVFRKEHFNAAHRLHNSEWTAEKNHIVFGKCNNPNYHGHNYELIVKVIGEVDPNTGYVYDMKKLSDLIKVQVLDRFDHKNLNLDTEEFKELNPTAENIAIVIYDLLRAKIDKALDLKITLYETERNFVEYPV

SEQ ID NO: 20658 - protein, 152 aa, Fulvivirga sp.
  REGION 1..152: note = tr|A0A553FS05|A0A553FS05_9BACT 6-carboxytetrahydropterin synthase OS=Fulvivirga sp. M361; OX = 2594266 GN=FNH22_08235 PE=4 SV=1
MYSHHKVRVTKEFSFEMAHALEGYDGKCRNIHGHSYHLSVTIIGTPINNLNNPKNGMVMDFGDLKGIVERVVIEPLDHSLVLFEESEFKKGIKNCSGQLVVFKPYNPTCENLIIDFARQIRFALPGGAQLHSLKLRETQTGYAEWHASDNGT

SEQ ID NO: 20659 - protein, 142 aa, Fusibacter sp.
  REGION 1..142: note = tr|A0A1B6BAH6|A0A1B6BAH6_9FIRM Queuosine biosynthesis QueD OS=Fusibacter sp. 3D3 OX=1048380; GN = F3D3_1302 PE=4 SV=1
MYFLKCEHSFDSAHFLKDYQGKCANIHGHRWRVVAEIYSEKLVEEGILRGMIVDFGDLKRDLKIEVDYFDHALIIEKGSMKAKTLACLIEDDFRVIEVMFRPTAESFSAHFYDQMTRRGYSVKSIEVYETPTNCASFEGVTL

SEQ ID NO: 20660 - protein, 143 aa, Fusibacter sp.
  REGION 1..143: note = tr|A0A4Q1ZZ22|A0A4Q1ZZ22_9FIRM 6-carboxy-5,6,7,8-tetrahydropterin synthase OS=Fusibacter sp. A1 OX=2283630 GN=queD PE=3 SV=1
MFTITAQSHFDSAHFLSGYEGKCSNLHGHRWVVEATVLAEQLHDSGQLKGMVVDFGDIKKALKDLVDFYDHSMIYEEGTLKAKTIEALSDEGFRIIKIDFRPTAECFAKHFHDALKAQGFNLSGVTVFETPTNRATYSEVSHV

SEQ ID NO: 20661 - protein, 139 aa, unidentified
  source 1..139: note = Fusobacteriia bacterium
  REGION 1..139: note = tr|A0A1W9W0T3|A0A1W9W0T3_9BACT 6-carboxy-5,6,7,8-tetrahydropterin synthase; OS = Fusobacteriia bacterium 4572_74 OX=1972457; GN = B6227_02500 PE=3 SV=1
MYILKGEHSFDSAHFLADYQGKCSNIHGHRWRVIAEIYGEELKQEGQLRGMVTDFGDIKKDIKKIVDDHDHALIIEKGTTREITLQCLKEDNFNIIEVDFRPTAEEFSRYFYEILEGKGYSVKRVTVYETPTNSATYEK

SEQ ID NO: 20662 - protein, 139 aa, unidentified
  source 1..139: note = Fusobacteriia bacterium
  REGION 1..139: note = tr|A0A1W9TMX7|A0A1W9TMX7_9BACT 6-carboxy-5,6,7,8-tetrahydropterin synthase; OS = Fusobacteriia bacterium 4572_132 OX=1971640; GN = B6I28_02035 PE=3 SV=1
MYSLKTESHFDSAHFLANYDGKCGNIHGHRWKIEIEVVAEELKNEGQEIGMVVDFGILKRDLKEIADDYDHTLIIEKGTMRKETLNCLIEDSFKIIELDFRPTAENFAKSFFDIMAKKGYNVKQVTVYETPVNCATYSK

SEQ ID NO: 20663 - protein, 159 aa, Fusobacterium equinum
  REGION 1..159: note = tr|A0A133N8B7|A0A133N8B7_9FUSO Queuosine biosynthesis protein QueD OS=Fusobacterium equinum; OX = 134605 GN=HMPREF3206_01726 PE=4 SV=1
MRDRLVVYPYFFIKEKFMYTLSSEASFDSAHFLKDYIGKCRNIHGHRWKVKIEIYAENLQSDGGFRGMVLDFGDIKKELKEITNYFDHAFILEKNSLKPSLFNALVEEGFRLIEVDFRPTAENFSKFFYEHFEKKGFPVLQATVYETPNNCASYSKGVR

SEQ ID NO: 20664 - protein, 142 aa, Fusobacterium gonidiaformans
  REGION 1..142: note = tr|E5BED4|E5BED4_9FUSO 6-carboxy-5,6,7,8-tetrahydropterin synthase; OS = Fusobacterium gonidiaformans 3-1-5R OX=469605 GN=queD; PE = 3 SV=1
MYTLSSEASFDSAHFLKDYIGKCRNIHGHRWKVKIEIYAENLQSDGGFRGMVLDFGDIKKELKEITNYFDHAFILEKNSLKPSLFNALVEEGFRLIEVDFRPTAENFSKFFYEHFEKKGFPVLQATVYETPNNCASYSKGVR

SEQ ID NO: 20665 - protein, 146 aa, unidentified
  source 1..146: note = Fusobacterium hwasookii
  REGION 1..146: note = tr|A0A0S2ZCX6|A0A0S2ZCX6_9FUSO 6-carboxy-5,6,7,8-tetrahydropterin synthase; OS = Fusobacterium hwasookii ChDC F300 OX=1307444; GN = RN97_00820 PE=3 SV=1
MEIINKEFKFDTAHILPNHYGQCKNLHGHTYKLIVSCAGEHKKDLSSECMIIDFSKLKKIVQENIIDKFDHAFILGAGDQEVEKDIKAVLMKHNLKFIDLGYRSTAENISKYIFNKLKPILKSENIELIKITLYETETSYIEYTEL

SEQ ID NO: 20666 - protein, 188 aa, Fusobacterium mortiferum
  REGION 1..188: note = tr|C3WF96|C3WF96_FUSMR Uncharacterized protein; OS = Fusobacterium mortiferum ATCC 9817 OX=469616; GN = FMAG_02114 PE=4 SV=1
MRSITSFDLQYAHRFYKFRGEAQYLHGHTGVLTIEVEDSINEGVNMVFPCNEIQKTAWEVLKNFDHSLILREDDPLLPAILKVYEETGIKDGTPQNVMKGPAFKTDLATAYPDARLVVTKETLTVEGMIKIVYDLLKDKLNIAKITFTSGVNAASAEFTTKNNIDRCPLCGISLDENGVCPKCGYKKR

SEQ ID NO: 20667 - protein, 142 aa, Fusobacterium mortiferum
  REGION 1..142: note = tr|C3WEG3|C3WEG3_FUSMR 6-carboxy-5,6,7,8-tetrahydropterin synthase; OS = Fusobacterium mortiferum ATCC 9817 OX=469616 GN=queD; PE = 3 SV=1
MYTLISEASFDSAHFLSGYNGKCKNIHGHRWTIKMEIYGEKLQSEGHLRGMILDFGDIKSMLKELADYFDHSLIIERDSMRNATLNYLKEDGFKIVEIDFRPTAENFSRYIFDYFKERKIPVKKVIVYETPNNCATYSEEIK

SEQ ID NO: 20668 - protein, 142 aa, Fusobacterium necrogenes
  REGION 1..142: note = tr|A0A377GX98|A0A377GX98_9FUSO 6-carboxy-5,6,7,8-tetrahydropterin synthase; OS = Fusobacterium necrogenes OX=858 GN=queD PE=3 SV=1
MYTLISEASFDSAHFLSGYNGKCKNIHGHRWTIKMEICGEKLENEGHLRGMLLDFGDIKSMLKELADYFDHSLIIEKDSMRNATLNYLKEDGFRIIEIDFRPTAENFSKYIFDYFKERKIPVKKVIVYETPNNCATYSEGIK

SEQ ID NO: 20669 - protein, 187 aa, Fusobacterium necrogenes
  REGION 1..187: note = tr|A0A377GUX0|A0A377GUX0_9FUSO Queuosine biosynthesis protein QueD OS=Fusobacterium necrogenes; OX = 858 GN=NCTC10723_00199 PE=4 SV=1
MRSITSFDLQYAHRFYKFKGEAQYLHGHTGVLTIEVEDSVNEGVNMVFPCNEIKKTAWEVLQNFDHSLILREDDPLLPAILKVYEETGIKDGAPQNTMKGPAFKTELATAYPDARLVVTKETLTVEGMIKIVYDLLKDKLNIAKITFTSGVNAASAEFTTKNNIERCPLCGISLDEHGACPKCGYKK

SEQ ID NO: 20670 - protein, 147 aa, Fusobacterium necrophorum
  REGION 1..147: note = tr|J6GS39|J6GS39_9FUSO 6-carboxy-5,6,7,8-tetrahydropterin synthase; OS = Fusobacterium necrophorum subsp. funduliforme Fnf 1007; OX = 1161424 GN=queD PE=3 SV=1
MYTLHTEASFDSAHFLKDYQGKCRNIHGHRWKVRIEISGESLQKEGSCRGMILDFSEIKTELREITEYFDHALIIEKNSLKKSLLNALQEEQFRIIEVEFRPTAEHFAKFFYEHFQKKGFPISQALVYETPNNCASYSKDVISYAEV

SEQ ID NO: 20671 - protein, 147 aa, Fusobacterium necrophorum; identical to SEQ ID NO: 20670
  REGION 1..147: note = tr|A0A162IL84|A0A162IL84_9FUSO 6-carboxy-5,6,7,8-tetrahydropterin synthase; OS = Fusobacterium necrophorum subsp. funduliforme OX=143387; GN = queD PE=3 SV=1

SEQ ID NO: 20672 - protein, 146 aa, Fusobacterium nucleatum
  REGION 1..146: note = tr|A0A2B7YGF8|A0A2B7YGF8_FUSNP 6-carboxy-5,6,7,8-tetrahydropterin synthase; OS = Fusobacterium nucleatum subsp. polymorphum OX=76857; GN = RN96_10600 PE=3 SV=1
MEIINKEFKFDTAHILPNHYEQCKNLHGHTYKLIVSCIGEHKTDSSSECMIIDFSKLKKIVEENIINMFDHAFILGAGNEEVEKDIKIVLMKHNLKFVDLGCRSTAENISKYIFNKLKPILKSENIELIKITLYETETSYIEYTEL

SEQ ID NO: 20673 - protein, 155 aa, Fusobacterium periodonticum
  REGION 1..155: note = tr|A0A2D3LVN8|A0A2D3LVN8_9FUSO 6-carboxytetrahydropterin synthase QueD OS=Fusobacterium periodonticum OX=860 GN=CTM64_00420 PE=4 SV=1
MNFEILGEKMEIINKEFKFDTAHILPNHYGQCKNLHGHTYKLIVSCTGEHKKDSSSECMIIDFSKLKKIVEENIIKRFDHAFILGAGNEEVEKDIKIVLMKHNLKFVDLGCRSTAENISKYIFNKLKPILKSENIELIKITLYETETSYIEYTEL

SEQ ID NO: 20674 - protein, 120 aa, Fusobacterium sp.
  REGION 1..120: note = tr|R7J9V0|R7J9V0_9FUSO 6-carboxy-5,6,7,8-tetrahydropterin synthase; OS = Fusobacterium sp. CAG:439 OX=1262899 GN=BN657_02201; PE = 3 SV=1
MFEIKTQAFFAAAHHLLNYEGECENQHGHNWMVEVFVKGDTLDKSNILIDYKVLKKELNAVLNLLDHKDLNALPEFNGESPSSEMISMFIYNKLKERVVQLSKVTVWETQTSCCSYFEEA

SEQ ID NO: 20675 - protein, 187 aa, Fusobacterium sp.; identical to SEQ ID NO: 18813
  REGION 1..187: note = tr|R7LVM4|R7LVM4_9FUSO Uncharacterized protein; OS = Fusobacterium sp. CAG:815 OX=1262901 GN=BN791_00612; PE = 4 SV=1

SEQ ID NO: 20676 - protein, 158 aa, Fusobacterium ulcerans
  REGION 1..158: note = tr|H1PS55|H1PS55_9FUSO Uncharacterized protein; OS = Fusobacterium ulcerans 12-1B OX=457404; GN = HMPREF0402_01248 PE=4 SV=1
MRSITKLNIQYAHRFLGYEGEAEYLHGHSGFLTIEVEGDVDKRTGFVYPCNGIKSIAWDYLKNFDHALIMQENDPLLPKILEVYEKQGIKEGTKTNTNMGLPIENELAKAYPECRLVVVKKVATCENLIEVFYSLLKDKLNIKKMVFASGDNCASTEF

SEQ ID NO: 20677 - protein, 150 aa, Gaetbulibacter sp.
  REGION 1..150: note = tr|A0A2G5GFS8|A0A2G5GFS8_9FLAO 6-carboxytetrahydropterin synthase QueD OS=Gaetbulibacter sp. 4G1 OX=1891971 GN=BFR04_05015 PE=4 SV=1
MSNIRITKQFSFETGHALYGYDGKCKNVHGHSYKLSVTVFGKPITDNNHVKFGMVIDFSDLKKIVKEEIVNVFDHATVFNKNTPHVELAKELENRGHNVLLVNYQPTSEMMVIDFAQKIKNRLPNHIALHSLKLQETDTSFAEWYASDNI

SEQ ID NO: 20678 - protein, 136 aa, Gaetbulibacter sp.
  REGION 1..136: note = tr|A0A2G5KSK2|A0A2G5KSK2_9FLAO 6-carboxy-5,6,7,8-tetrahydropterin synthase; OS = Gaetbulibacter sp. 5U11 OX=1889780 GN=BFP78_11585 PE=3; SV = 1
MKVTVSRKAHFNAAHRLYRKDWSMEKNDEVFGKCNNPNYHGHNYELIASVTGEIDQETGFVIDVKVLKDIIKTEVEDAFDHKNLNLDVTEFKDLNPTAENIAVVVYNKIKAKLKPSLDLVVTLYETPRNFVSYSGK

SEQ ID NO: 20679 - protein, 150 aa, unidentified
  source 1..150: note = Galbibacter marinus
  REGION 1..150: note = tr|K2PVZ9|K2PVZ9_9FLAO 6-pyruvoyl tetrahydrobiopterin synthase OS=Galbibacter marinus; OX = 555500 GN=I215_01510 PE=4 SV=1
MSTIRITKQFSFETGHALYGYDGKCRNVHGHSYKLSVTVIGSPITDPNNVKLGMVIDFGDLKKIVKEEIVDQFDHATVFNQNTPHKELAEELSNRGHHVILVDYQPTSENMVVDFAIKIQKRLPSHIKLFSLRLQETESSYAEWYASDNS

SEQ ID NO: 20680 - protein, 134 aa, unidentified
  source 1..134: note = Galbibacter marinus
  REGION 1..134: note = tr|K2Q4S1|K2Q4S1_9FLAO 6-carboxy-5,6,7,8-tetrahydropterin synthase OS=Galbibacter marinus OX=555500 GN=I215_06162 PE=3 SV=1
MKLKVSRKAHFNAAHRLYKKQWDDTKNLEVFGKCSNPNFHGHNYELIVSVTGEVDEETGFVIDLKILKQLVRREIEEHLDHKNLNIEVEEFKNLNPTVENIAVVIYNRLKPHLQDFELEIVLYETPRNFVTYKG

SEQ ID NO: 20681 - protein, 120 aa, Gallaecimonas pentaromativorans
  REGION 1..120: note = tr|A0A3N1PPD1|A0A3N1PPD1_9GAMM 6-carboxy-5,6,7,8-tetrahydropterin synthase; OS = Gallaecimonas pentaromativorans OX=584787; GN = EDC28_102429 PE=3 SV=1
MKQTLYKDFSFDSAHRLPHVPAGHKCGNLHGHTFGVRVEVTGEVDPYTGWVMDFADLKAVVKPLIDQLDHCYLNEIEGLENPTSEVLAKWIWDQLAPKLPLLSAIWVRETCTSGCLYNGN

SEQ ID NO: 20682 - protein, 120 aa, unidentified
  source 1..120: note = Gallaecimonas xiamenensis
  REGION 1..120: note = tr|K2JDR1|K2JDR1_9GAMM 6-carboxy-5,6,7,8-tetrahydropterin synthase; OS = Gallaecimonas xiamenensis 3-C-1 OX=745411 GN=B3C1_16561; PE = 3 SV=1
MKQTLYKDFSFDSAHRLPHVPAGHKCGNLHGHTFGVRVEVTGEVDPYTGWVMDFADMKAVVKPLIDQLDHCYLNDIAGLENPTSEVLAKWIWDQLAPKLPLLSAVWVRETCTSGCLYQGD

SEQ ID NO: 20683 - protein, 142 aa, Gallibacterium anatis
  REGION 1..142: note = tr|A0A0A2YMH4|A0A0A2YMH4_9PAST 6-carboxy-5,6,7,8-tetrahydropterin synthase; OS = Gallibacterium anatis OX=750 GN=JP29_05595 PE=3 SV=1
MLKVAKEFSFDMAHLLDGHDGKCQNLHGHTYKLQVIVSGETEDNGAKKGMVIDFADLKRAVNELIISPMDHAFIYDQSSERETKIAQLLQQLNSKTFALPVRSTAENLAQFIFQRLQENVGFHLHSIRLWETPTSFAEYGEE

SEQ ID NO: 20684 - protein, 141 aa, Gallibacterium anatis
  REGION 1..141: note = tr|F4HCV9|F4HCV9_GALAU 6-carboxy-5,6,7,8-tetrahydropterin synthase; OS = Gallibacterium anatis (strain UMN179) OX=1005058; GN = UMN179_00541 PE=3 SV=1
MKVAKEFSFDMAHLLDGHDGKCQNLHGHTYKLQVIVSGETEDNGAKKGMVIDFADLKRAVNELIISPMDHAFIYDQSSERETKIAQLLQQLNSKTFALPMRSTAENLAQFIFQRLQENVGFHLHSVRLWETPTSFAEYGEA

SEQ ID NO: 20685 - protein, 142 aa, unidentified
  source 1..142: note = Gallibacterium genomosp.
  REGION 1..142: note = tr|A0A1A7PJ76|A0A1A7PJ76_9PAST 6-carboxy-5,6,7,8-tetrahydropterin synthase; OS = Gallibacterium genomosp. 1 OX=155515 GN=QV04_10410 PE=3; SV = 1
MLKVAKEFSFDMAHLLDGHDGKCQNLHGHTYKLQVIVSGETENNGAKKGMVIDFADLKRAVNELIISPMDHAFIYDQSSERETKIAQLLQQLNSKTFALPVRSTAENLAQFIFQRLQENVGFHLHSIRLWETPTSFAEYGEA

SEQ ID NO: 20686 - protein, 119 aa, unidentified
  source 1..119: note = Gallibacterium genomosp.
  REGION 1..119: note = tr|A0A0A2XGI7|A0A0A2XGI7_9PAST 6-carboxy-5,6,7,8-tetrahydropterin synthase; OS = Gallibacterium genomosp. 2 OX=155517 GN=P375_10965 PE=3; SV = 1
MLKVAKEFSFDMAHLLDGHDGKCKNLHGHTYKLQVIVSGETENSGAKKGMVIDFADLKKVVNDLIISPMDHAFIYDQSSEREIKIAQFIFQRLKENVGFHLHSVRLWETPTSFAEYGEE

SEQ ID NO: 20687 - protein, 142 aa, Gallibacterium salpingitidis
  REGION 1..142: note = tr|A0A1A7P0I3|A0A1A7P0I3_9PAST 6-carboxy-5,6,7,8-tetrahydropterin synthase; OS = Gallibacterium salpingitidis OX=505341 GN=QS62_01660; PE = 3 SV=1
MYKVAKEFSFDMAHLLDGHDGKCQNLHGHTYKLQVIVTGDTYQEGAKKGMVIDFTDLKQAVNEIILQPMDHAFIYDQTSERECKIAALLTELNSKTFALPYRTTAENLARFMFARLTQYTALKITCIRLWETPTSFAEYEAD

SEQ ID NO: 20688 - protein, 147 aa, unidentified
  source 1..147: note = Gallionella capsiferriformans
  REGION 1..147: note = tr|D9SH39|D9SH39_GALCS Uncharacterized protein; OS = Gallionella capsiferriformans (strain ES-2) OX=395494; GN = Galf_1826 PE=4 SV=1
MLITRRLEFDAGHRIPNHNSQCRHLHGHRYAIEITLSGEIIKTEGQSEQGMVMDFSDVKRIAQEKLVNVWDHAFLVYRGDKQVCDFLATMPDHKTVVFDVVPTAENLAQTAFELLDPAYQDSYGNHLKLERIRLFETPNNWADCVRS

SEQ ID NO: 20689 - protein, 147 aa, Gallionella sp.
  REGION 1..147: note = tr|A0A522X8I7|A0A522X8I7_9PROT 6-carboxy-5,6,7,8-tetrahydropterin synthase OS=Gallionella sp. OX=2052161 GN=queD PE=3 SV=1
MLITRRLEFDAGHRIPNHNSQCKHLHGHRYAIEITLSGEVITAEGQSGQGMVMDFSDVKRIANEKLVDAWDHAFLAYRGDKAVCDFLAALPGHKTVILDVVPTAENLAQTAFNILDPAYRDTYGNSLRLERVRLYETPNNWADCTRG

SEQ ID NO: 20690 - protein, 147 aa, Gallionella sp.
  REGION 1..147: note = tr|A0A3D2H3D5|A0A3D2H3D5_9PROT 6-carboxy-5,6,7,8-tetrahydropterin synthase OS=Gallionella sp. OX=2052161 GN=queD PE=3 SV=1
MLITRRLEFDAGHRIPNHNSQCRHLHGHRYAIEITLSGEIIKTEGQSEQGMVMDFSDVKRIAQEKLVNVWDHAFLVFRSDKQVCDFLATMPDHKTVVFDVVPTAENLAQAAFELLDPAYQDSYGNHLKLERIRLFETPNNWADCVRG

SEQ ID NO: 20691 - protein, 146 aa, unidentified
  source 1..146: note = Gallionellaceae bacterium
  REGION 1..146: note = tr|A0A1J4TER7|A0A1J4TER7_9PROT 6-carboxy-5,6,7,8-tetrahydropterin synthase; OS = Gallionellaceae bacterium CG1_02_60_325 OX=1805162; GN = AUJ80_03705 PE=3 SV=1
MQITRRLEFDAGHRIPNHTSQCKHLHGHRYAIEITLAGDVITAEGVSEQGMVMDFSDVKRIARERVVDAWDHAFLVWRKDKVVLDFLQALPDHKTVILEAVPTAENLARIAFDLLHEAYRDTFGNHLRLVRVRLFETPNNWADCTL

SEQ ID NO: 20692 - protein, 146 aa, unidentified; identical to SEQ ID NO: 20691
  source 1..146: note = Gallionellaceae bacterium
  REGION 1..146: note = tr|A0A2H0NJK7|A0A2H0NJK7_9PROT 6-carboxy-5,6,7,8-tetrahydropterin synthase; OS = Gallionellaceae bacterium CG11_big_fil_rev_8_21_14_0_20_60_62 OX=1974012 GN=queD; PE = 3 S V=1

SEQ ID NO: 20693 - protein, 148 aa, unidentified
  source 1..148: note = Gallionellales bacterium
  REGION 1..148: note = tr|A0A1G0DX73|A0A1G0DX73_9PROT 6-carboxy-5,6,7,8-tetrahydropterin synthase; OS = Gallionellales bacterium RIFCSPLOWO2_02_58_13; OX = 1798252 GN=A2Z65_07195 PE=3 SV=1
MLITRRLEFDAGHRIPSHNSQCRHLHGHRYAIEITLSGDIIATEGLPEQGMVMDFSDVKRIAREKLVDAWDHAFLVYRGDRAVCDFLAGLPEHKTVILDAVPTAENLAQIAFNILSPAYRDTYGNHLRLEKIRLYETPNNWADCVRNG

SEQ ID NO: 20694 - protein, 150 aa, unidentified
  source 1..150: note = Gallionellales bacterium
  REGION 1..150: note = tr|A0A1G0CY81|A0A1G0CY81_9PROT 6-carboxytetrahydropterin synthase QueD OS=Gallionellales bacterium GWE2_58_10 OX=1798248 GN=A2X75_02005 PE=4 SV=1
MLITRRLEFDAGHRIPNHASQCKHLHGHRYAIEITLSGDIITTEGQSEQGMVMDFSDVKRIAKEKLVDAWDHAFLVYRGDTAVCDFLASLAEHKTVVLDAVPTAENLAQIAFNILNVAYRDVYGNNLRLERVRLYETPNNWADCMRVANS

SEQ ID NO: 20695 - protein, 117 aa, unidentified
  source 1..117: note = Unknown
  REGION 1..117: note = tr|B8KHC1|B8KHC1_9GAMM 6-carboxy-5,6,7,8-tetrahydropterin synthase OS=gamma proteobacterium NOR5-3 OX=566466 GN=queD PE=3 SV=1
MEIFKDFHFEAAHRLPKVPAGHKCERLHGHSFQLRVYVAGEPGEATGWIMDFGDIKAACKPVIAQLDHYYLNDIEGLENPTSENLCRWIWERLLPALPTLSGVEIRETCTSGCVYRG

SEQ ID NO: 20696 - protein, 139 aa, unidentified
  source 1..139: note = Unknown
  REGION 1..139: note = tr|A0A2T6N1H3|A0A2T6N1H3_9GAMM 6-pyruvoyl tetrahydrobiopterin synthase OS=gamma proteobacterium symbiont of Ctena orbiculata OX=1968598 GN=DBO99_11355; PE = 4 SV=1
MYAVTKEIHFCYGHRLLNHQGKCRHLHGHNAKAVIRLETEQLDPLGMVCDFSAIGDYVKRWVDETLDHNMLLHSDDPVLPLLRQAGESVYVMENNPTAENIARLIFEYVEAGGFPVVEVSIFETESALASYRPKPPATP

SEQ ID NO: 20697 - protein, 117 aa, unidentified
  source 1..117: note = Gammaproteobacteria bacterium
  REGION 1..117: note = tr|W2UH75|W2UH75_9GAMM 6-carboxy-5,6,7,8-tetrahydropterin synthase; OS = Gammaproteobacteria bacterium MOLA455 OX=1411685; GN = queD PE=3 SV=1
MQIYKEFSIEAAHRLPNVPEGHKCSRLHGHSFLVTVAVEGPVGEQSGWIMDFGDIKAAFAPIYDQLDHHYLNDIEGLENPTSENLAIWIWQHLKPTLPLLSCITIKETCTSGCIYRG

SEQ ID NO: 20698 - protein, 164 aa, unidentified
  source 1..164: note = Gammaproteobacteria bacterium
  REGION 1..164: note = tr|A0A1G0IAE9|A0A1G0IAE9_9GAMM Uncharacterized protein OS=Gammaproteobacteria bacterium RIFCSPHIGHO2_12_FULL_43_28 OX=1798287 GN=A3F14_02710 PE=4; SV = 1
MVRVANLEIHKEELAFSAGHFTIFSATEREQLHGHNYYVSADFLLSIGPNGLAFDYRHYKKKLITLCDKLDRHFLLPSKSPYMPITEEGDYWVAHYNHKKLFFLKEDVILLPLTNITIEELAHWFLQNMLVNEEEMRAHAIYNLAIKVYNGPGQSARAAWEVRT

SEQ ID NO: 20699 - protein, 132 aa, unidentified
  source 1..132: note = Gandjariella thermophila
  REGION 1..132: note = tr|A0A4D4J7A7|A0A4D4J7A7_9PSEU Uncharacterized protein OS=Gandjariella thermophila OX=1931992 GN=ptpS; PE = 4 SV=1
MFSVTVRDHVMVAHSFRGEVFGPAQRLHGATFVVDATFRRPELDGDNIVVDIGLATQQLGEVLAELNYRNLDDEPAFAGVNTSTEFLARVIADRLAERVRAGSLGAGARGLTGITVTLHESHVARASYDLTL

SEQ ID NO: 20700 - protein, 118 aa, Gardnerella vaginalis
  REGION 1..118: note = tr|A0A2N6QVJ5|A0A2N6QVJ5_GARVA Uncharacterized protein OS=Gardnerella vaginalis OX=2702 GN=CJ225_08245; PE = 4 SV=1
MENETYRLTFFLNATHMVVIDGKSSSIHPHTFEINCFIKSKKIIAFEIMEDNINQILNQLNNQYLNGLEAFQNIIPTLENLTRLLYRAMSANLKSVSCRLVKLEVSESPVRTFMIEAK

SEQ ID NO: 20701 - protein, 130 aa, unidentified
  source 1..130: note = Geitlerinema sp.
  REGION 1..130: note = tr|K9S709|K9S709_9CYAN 6-carboxy-5,6,7,8-tetrahydropterin synthase; OS = Geitlerinema sp. PCC 7407 OX=1173025 GN=GEI7407_1448; PE = 3 SV=1
MPKWKLVTEFTFDSAHQIRDYDGPCGRLHGHTYRVRIEATSHQLHASQYCPHPVMVADFRTLRWAKRDVTKGGLDHGVLNEVMPPEYETTAEMIAQYIYDRTKKDLPEGIKLKVAVSETPNTWAEYEDDD

SEQ ID NO: 20702 - protein, 290 aa, unidentified
  source 1..290: note = Geitlerinema sp.
  REGION 1..290: note = tr|K9S9P4|K9S9P4_9CYAN Uncharacterized protein; OS = Geitlerinema sp. PCC 7407 OX=1173025 GN=GEI7407_2458; PE = 4 SV=1
MKCTINRRAEFSASHRYWLPELTDAENAQRFGLCARAPGHGHNYVLYVSMAGDLDEYGMVLNLSDVKHVIKQEVTQQLNFSFLNEAWPEFTQTLPTTENIARVVWQRLAPHLPLVRIQLYEHPELWADYLGNDMEAFLTISTHFSAAHRLARPDLSYEENCEIYGKCARPNGHGHNYHLEVTVKGQIDPRTGMIADLVELQKAIDEFVVEPFDHTFLNKDIAYFEQVVPTAENIAVHIRDLLVEPIRATGAELYKVKLVESPNNSCEVYTNLVAEGRVTAQAETPVLVQV

SEQ ID NO: 20703 - protein, 136 aa, Gelidibacter algens
  REGION 1..136: note = tr|A0A1A7R7Y6|A0A1A7R7Y6_9FLAO 6-carboxy-5,6,7,8-tetrahydropterin synthase; OS = Gelidibacter algens OX=49280 GN=A9996_01920 PE=3 SV=1
MIVTVSRKAHFNAAHRLFRKDWSDEKNEKVFGKCNNPNYHGHNYDLVVSVTGHIDQETGFVMDVKVLKDIIKEEVEDAFDHKNLNIEVDEFKDLNPTAENIAVVIYNKIKPKLKQSLALEITLYETPRNFVTYSGA

SEQ ID NO: 20704 - protein, 149 aa, Gelidibacter algens
  REGION 1..149: note = tr|A0A1A7R357|A0A1A7R357_9FLAO 6-carboxy-5,6,7,8-tetrahydropterin synthase; OS = Gelidibacter algens OX=49280 GN=A9996_03830 PE=3 SV=1
MSKIRITKQFSFETGHALYGYDGKCKNVHGHSYKLSVTVIGTPINDSSNVKFGMVIDFSDLKKIVKSEIVDVFDHATVFNKNTPHVELAKELKDRDHNVLLVNYQPTSEMMVIDFAEKIKKYLPETIQLHSLKLQETDTSFAEWYASDN

SEQ ID NO: 20705 - protein, 149 aa, Gelidibacter gilvus
  REGION 1..149: note = tr|A0A4Q0XK14|A0A4Q0XK14_9FLAO 6-carboxy-5,6,7,8-tetrahydropterin synthase; OS = Gelidibacter gilvus OX=59602 GN=ESZ48_01085 PE=3 SV=1
MSRIRITKQFSFETGHALYGYDGKCKNVHGHSYKLSVTVIGKPINDASNAKFGMVIDFSDLKTIVKDEIVDVFDHATVFNKNTPHVELAKELKDRGHSVLLVDYQPTSEMMVIDFAEKIKKHLPETIQLHSLKLQETDTSFAEWYASDN

SEQ ID NO: 20706 - protein, 136 aa, Gelidibacter gilvus
  REGION 1..136: note = tr|A0A4V1LN20|A0A4V1LN20_9FLAO 6-carboxy-5,6,7,8-tetrahydropterin synthase; OS = Gelidibacter gilvus OX=59602 GN=ESZ48_07290 PE=3 SV=1
MIVTVSRKAHFNAAHRLFRKDWSDEKNAEVFGKCSNPNYHGHNYELTVSVTGGIDHETGFVMDLKVLKDIIKEEIEDYLDHKNLNIEVEEFKTLNPTAENIAVVIYDKIKPRLKSTLDLTITLYETPRNFVTYSGT

SEQ ID NO: 20707 - protein, 149 aa, Gelidibacter salicanalis
  REGION 1..149: note = tr|A0A5C7AHT0|A0A5C7AHT0_9FLAO 6-carboxytetrahydropterin synthase OS=Gelidibacter salicanalis OX=291193 GN=ES711_07225 PE=4 SV=1
MSKIRITKQFSFETGHALYGYDGKCKNVHGHSYKLSVTVIGTPISDPTNVKYGMVIDFSDLKKIVKTEIVDVFDHATVFNKNTPHVELAKELSDRDHNVLLVDYQPTSEMMVIDFAEKIKKHLPETIQLSALRLQETDSSFAEWFASDN

SEQ ID NO: 20708 - protein, 136 aa, Gelidibacter salicanalis
  REGION 1..136: note = tr|A0A5C7AUJ1|A0A5C7AUJ1_9FLAO 6-carboxy-5,6,7,8-tetrahydropterin synthase; OS = Gelidibacter salicanalis OX=291193 GN=ES711_05765 PE=3; SV = 1
MRVTVSRKAHFNAAHRLYRKDWSAEQNEAIFGKCSNPNFHGHNYDLTVSVTGEIDQETGFVMDMKVLKDIIKDDIEEAFDHKNLNVEVEEFKTLNPTAENIAVVIYNKIKPKLQPDLQLSITLYETPRNFVTYSGS

SEQ ID NO: 20709 - protein, 136 aa, unidentified
  source 1..136: note = Gelidibacter sediminis
  REGION 1..136: note = tr|A0A4R7Q5C0|A0A4R7Q5C0_9FLAO 6-carboxy-5,6,7,8-tetrahydropterin synthase; OS = Gelidibacter sediminis OX=1608710 GN=BXY82_0131 PE=3; SV = 1
MMVTVSRKAHFNAAHRLFKKEWSDAQNESVFGKCSNPNYHGHNYDLIVSVTGEIDQETGFVIDMKVLKDIIKEEIEEAFDHKNLNVEVEEFKNLNPTAENIAVVIYNKLKPKLKSGLKLTITLYETQRNFVTYSGS

SEQ ID NO: 20710 - protein, 149 aa, unidentified
  source 1..149: note = Gelidibacter sediminis
  REGION 1..149: note = tr|A0A4R7Q961|A0A4R7Q961_9FLAO 6-carboxy-5,6,7,8-tetrahydropterin synthase; OS = Gelidibacter sediminis OX=1608710 GN=BXY82_0813 PE=3; SV = 1
MSKIRITKQFSFETGHALYGYDGKCKNVHGHSYKLSVTVIGTPISDTSNVKYGMVIDFSDLKKIVKTEIVDVFDHATVFNKNTPHVELAKELEARDHNVLLVDYQPTSEMMVIDFAQKIKKHLPENIQLYALRLQETDTSFAEWYASDN

SEQ ID NO: 20711 - protein, 290 aa, unidentified
  source 1..290: note = Geminocystis sp.
  REGION 1..290: note = tr|A0A0D6AQX3|A0A0D6AQX3_9CHRO 6-pyruvoyl tetrahydrobiopterin synthase OS=Geminocystis sp. NIES-3709; OX = 1617448 GN=GM3709_1850 PE=4 SV=1
MECIVNRRAKFSASHRYWLPELSDEENQARFGANSRFPGHGHNYLLYVSIIGELDKYGMVQNLSEVKKVIKQEVTSQLDYSYLNDTWVEFQETLPTTENIAKVIWERLSPHLPLVDIQLYEHSQLWVNYKGNNMEATLTVQTHFSAAHRLALPELSFEENSEIYGKCARPNGHGHNYHLEVSVTGEMDPRTGMIIDLVALQKVIDDYIVEPFDHTFLNKDIPYFAEVVPTAENIAVYIAQLLQEPISKLGAELDKVKLIESPNNSCEIFCRKLSLTNEKKSESTLQPALV

SEQ ID NO: 20712 - protein, 290 aa, unidentified
  source 1..290: note = Geminocystis sp.
  REGION 1..290: note = tr|A0A0D6AAL4|A0A0D6AAL4_9CHRO 6-pyruvoyl tetrahydrobiopterin synthase OS=Geminocystis sp. NIES-3708; OX = 1615909 GN=GM3708_267 PE=4 SV=1
MECVVNRRAKFSASHRYWLPELSESENQTKFGANSRFPGHGHNYVLYVSIIGELDKYGMVQNLSNVKKVIKQEVTSQLDYSYLNDTWAEFEVTLPTTENIAKVIWERLSPHLPLVDIQLYEHSQLWVNYQGNNMEATLTIQTHFSAAHRLALPELSFEENTEIYGKCARPNGHGHNYHLEVSVTGEMDARTGMIIDLVALQKVVDDYVVEPFDHTFLNKDIPYFAEIVPTAENIAVYIAQLLQEPISKLGAQLDKVKLIESPNNSCEIFCRKSILKGEKIGEFNLQPLLT

SEQ ID NO: 20713 - protein, 164 aa, Gemmata obscuriglobus
  REGION 1..164: note = tr|A0A2Z3GZE3|A0A2Z3GZE3_9BACT 6-carboxytetrahydropterin synthase OS=Gemmata obscuriglobus OX=114 GN=C1280_06340 PE=4 SV=1
MPTERFKVRVTKDHLVFCCGHFISYRGHQCERLHGHNYRCAVEVEGPLLPDDFYVFDFIALKKRTKEITDELDHHMLLATNNPVISVAPTPQCVQVRYEDREWLFPRGDCILLPIENTTAELIARYIAGRLWESLKTNENFTPEVLRVEVEEAPGQSATVEWRA

SEQ ID NO: 20714 - protein, 157 aa, Gemmata obscuriglobus
  REGION 1..157: note = tr|A0A2Z3H7G7|A0A2Z3H7G7_9BACT 6-carboxytetrahydropterin synthase OS=Gemmata obscuriglobus OX=114 GN=C1280_29880 PE=4 SV=1
MFRVTKEIHFCYGHRLLNYAGKCRNLHGHNGKAVVTVETESLDALGMVVDFTEIKRVIGKWIDDTLDHRMLLHQDDPIIPELERQGEPFIALDVNPTAETIARLIFDRAVAQGLPVTEVILWETENSFATYRPTPGVPSRPVAMREVVGGTPPAAPE

SEQ ID NO: 20715 - protein, 163 aa, Gemmata sp.
  REGION 1..163: note = tr|A0A142XE24|A0A142XE24_9BACT 6-pyruvoyl tetrahydropterin synthase OS=Gemmata sp. SH-PL17; OX = 1630693 GN=VT84_09765 PE=4 SV=1
MPSERFKVRVTKDHLTFCCGHFISYRGHQCERLHGHNYRTAVEVEGVLQEDYYVFDFIALKKRTKEITDELDHHMLLATRNPVIAVDDTPRCVRVKYEDREWQFPRGDCILLPIENTTAELLARYIAGRLWESLRTNENFTPEVLRVEVEEAPGQSATVEWRA

SEQ ID NO: 20716 - protein, 158 aa, Gemmata sp.
  REGION 1..158: note = tr|A0A142XSG6|A0A142XSG6_9BACT 6-carboxy-5,6,7,8-tetrahydropterin synthase OS=Gemmata sp. SH-PL17 OX=1630693 GN=queD PE=4 SV=1
MFRVTKEIHFCYGHRLLNYAGKCRNLHGHNGKAVVTVETETLDALGMVVDFSEIKRVIGKWIDDTLDHRMLLHRDDPIIAELLRQGEPFVELDANPTAETIARLIFDRAVEHGLPVTEVTLWETENSFATYRPTPGVPTKSVAMREVAGNPAPVPTRA

SEQ ID NO: 20717 - protein, 133 aa, unidentified
  source 1..133: note = Gemmataceae bacterium
  REGION 1..133: note = tr|A0A5C1AC71|A0A5C1AC71_9BACT 6-carboxytetrahydropterin synthase OS=Gemmataceae bacterium PX52 OX=2598579 GN=PX52LOC_03125 PE=4 SV=1
MFRVTKEIWFCYGHRLLNYNGKCAHLHGHNGKAVITLEAAALDPLGMVVDFTQVKQLVGRWIDDHLDHKMLLHKDDPVIPDLRRLGEQFVTLDVNPTAENIAKLIYDHAVQQRLPVVEVTLWETETSFATYRG

SEQ ID NO: 20718 - protein, 163 aa, unidentified
  source 1..163: note = Gemmataceae bacterium
  REGION 1..163: note = tr|A0A4V0I8Y4|A0A4V0I8Y4_9BACT Uncharacterized protein OS=Gemmataceae bacterium OX=2052164; GN = GCJUQL4_62630 PE=4 SV=1
MPTERFKVHVTKDHLVFCCGHFISYHGHKCERLHGHNYRCAVEIEGPLQEDHYVFDFVALKARTKAITDELDHHMLLATKNPVIKVDESATKVDVTYRDRAWLFPREDCVLLPIENTTAELIARYIAGRLVESLKTHENFVPEVLRVEVEEAPGQSATVEVRV

SEQ ID NO: 20719 - protein, 117 aa, unidentified
  source 1..117: note = Gemmatimonadaceae bacterium
  REGION 1..117: note = tr|A0A1V4R9T5|A0A1V4R9T5_9BACT 6-carboxy-5,6,7,8-tetrahydropterin synthase; OS = Gemmatimonadaceae bacterium 4484_173 OX=1956166; GN = B1H09_07960 PE=3 SV=1
MEIYREFKFDAAHSLPHLPDGHKCGNIHGHTFAVIVYVSGPVGEKTGWVMDYGEIKSVCEPVIDQLDHSYLNDIPGLENPTSETIAVWLWSRIKTDIPQLSMVEVKETAATGCRYTG

SEQ ID NO: 20720 - protein, 149 aa, unidentified
  source 1..149: note = Gemmatimonadaceae bacterium
  REGION 1..149: note = tr|A0A2E8HBQ5|A0A2E8HBQ5_9BACT 6-carboxy-5,6,7,8-tetrahydropterin synthase; OS = Gemmatimonadaceae bacterium OX=2026741 GN=CME04_23275; PE = 4 SV=1
MSARPTQITAVRRLHFCAGHRVVGHEGKCANLHGHNYVAFVHVRSRGGDLDDVGRVIDFGVIKQKVGGWIDEHWDHGFIFWSQDPDLAALYDDQLAAMKYFRAEWNPTAENMASHLLAVATELLAGDLVVEKVEMWETENCYADAQPQD

SEQ ID NO: 20721 - protein, 163 aa, unidentified
  source 1..163: note = Gemmatimonadales bacterium
  REGION 1..163: note = tr|A0A524HP17|A0A524HP17_9BACT 6-carboxytetrahydropterin synthase OS=Gemmatimonadales bacterium OX=2448054 GN=E4H38_01645 PE=4 SV=1
MGSSMNGTERSSGGSDSASRSDGNPMPISLTRIVTFRAWHHYRVARWSEAQNRERFGVLVESHPHDYRCEVTVRGPLAETTGMVIDLGELDGIVREEILQPLDGQQLNQAVPEVAAGITQPTCEVLAAHVYARLARRLPSGIVLERVRIAEDATLHADCTGIP

SEQ ID NO: 20722 - protein, 142 aa, unidentified
  source 1..142: note = Gemmatimonadales bacterium
  REGION 1..142: note = tr|A0A524GZ98|A0A524GZ98_9BACT 6-carboxytetrahydropterin synthase (Fragment); OS = Gemmatimonadales bacterium OX=2448054 GN=E4H41_10105; PE = 4 SV=1
MRSYRVSVAKDYLSFSSAHFITFRGHKCESLHGHNYRLAVVVEGAVDAECLFVLDFAVLKQLIKPMVEAVDHKVILPTENEKIGLREEHDAVIVDYFGKGRFVFPKSDVALVPVKNTTVEMLAEYFATQVRDALLAEGHAHL

SEQ ID NO: 20723 - protein, 167 aa, unidentified
  source 1..167: note = Gemmatimonadetes bacterium
  REGION 1..167: note = tr|A0A1Q7AAT5|A0A1Q7AAT5_9BACT Uncharacterized protein OS=Gemmatimonadetes bacterium 13_2_20CM_2_69_23; OX = 1805204 GN=AUI13_04905 PE=4 SV=1
MADGKQFRVAVTKDNHVFASAHFITFPGHRCETLHGHNYRTQVAVEGGLDPEAHYVVDFSELKQLMKRLTDEIDHKVLLPLQNPKIQIREDGDSVAVAVNGRPRYVFPKADCALLPIPNTTVEMLAQYLAGRVSRELTPSPGVKLRAIEIEVEENFGQSATYRESLE

SEQ ID NO: 20724 - protein, 167 aa, unidentified
  source 1..167: note = Gemmatimonadetes bacterium
  REGION 1..167: note = tr|A0A2V7L7Z0|A0A2V7L7Z0_9BACT 6-pyruvoyl tetrahydrobiopterin synthase OS=Gemmatimonadetes bacterium; OX = 2026742 GN=DMD33_10775 PE=4 SV=1
MAAHKEFKVTVTKDNHVFAAAHFITFPGHRCERLHGHNYRTHVVVEGGLDPEAFYVLDFSMLKQLMKRLTDEIDHKVLLPLENPKIQVREEGETVSVAVAGRPRYVFPRIDCALLPVPNTTVEMLAQYLAGRVHRELAGSGGVALRAVEVEVEENFGQSATYRESFE

SEQ ID NO: 20725 - protein, 137 aa, Gemmatimonas aurantiaca
  REGION 1..137: note = tr|C1A6G1|C1A6G1_GEMAT 6-carboxy-5,6,7,8-tetrahydropterin synthase; OS = Gemmatimonas aurantiaca (strain T-27 / DSM 14586 / JCM 11422 / NBRC 100505) OX=379066 GN=GAU_07 79 PE=3 SV=1
MPIVTVTRRLRFNAAHRVHNPALSDADNTRLFGKCNNPNWHGHNYTLDVSVRGPVAEDTGYVIDLGALRAIVEREVLSQTDHRNFNIDVPYMQGINPTTENIVVAMWQVLGPAIAPATLQRLRLWETENNYVDYSGE

SEQ ID NO: 20726 - protein, 151 aa, Gemmatimonas aurantiaca
  REGION 1..151: note = tr|C1AB96|C1AB96_GEMAT 6-pyruvoyl tetrahydropterin synthase family protein OS=Gemmatimonas aurantiaca (strain T-27 / DSM 14586 / JCM 11422 / NBRC 100505) OX=379066 G; N = GAU_2460 PE=4 SV=1
MSFPFLRGPMPRTSLTRRVLFAAAHRYRRPDWSDQENADVFGACAHPNYHGHTYLCDVTVAGPVDEETGFVVDLGFLDRVLQREVRERFDHRNINLDVPEFAEGRLIPTGENLARFICERVQAALAHTTARVVRVHLAEDTTLSSTYEVDA

SEQ ID NO: 20727 - protein, 119 aa, unidentified
  source 1..119: note = Gemmatimonas phototrophica
  REGION 1..119: note = tr|A0A143BPH4|A0A143BPH4_9BACT 6-carboxy-5,6,7,8-tetrahydropterin synthase; OS = Gemmatimonas phototrophica OX=1379270 GN=GEMMAAP_19360; PE = 3 SV=1
MELYKEFTIEAAHRLPHVPPGHKCARLHGHSFRLEIRVRGPLDPTLGWVMDFADIKAAFKPLYDQLDHHYLNDIPGLENPTSEVLAVWIWERLHPVLPLLSAVVVRETCTSGCEYRGAR

SEQ ID NO: 20728 - protein, 142 aa, unidentified
  source 1..142: note = Gemmatimonas phototrophica
  REGION 1..142: note = tr|A0A143BLI7|A0A143BLI7_9BACT Uncharacterized protein OS=Gemmatimonas phototrophica OX=1379270; GN = GEMMAAP_12420 PE=4 SV=1
MPRTSLTRRVMFAAAHRYRRPDWSDQENADIFGACAHPHYHGHSYVCDVTVAGPVDEETGFVVDLGFLDNVLQREVRERFDHRNISLDVPEFADGKMIPTGENLARFICDRVQAALSHTSARVIKVHLAEDAMLSCSYEVDA

SEQ ID NO: 20729 - protein, 140 aa, Gemmatimonas sp.
  REGION 1..140: note = tr|A0A1Q7VF54|A0A1Q7VF54_9BACT Uncharacterized protein OS=Gemmatimonas sp. 13_1_20CM_3_60_15 OX=1805208; GN = AUG20_00205 PE=4 SV=1
MASASLTRRVSFSAAHRYSRPEWNDAQNMATFGACAWPNFHGHSYVCDVTVSGPIDDTTGFLVDLGVLDRILKEQVKDRFDHRNINLDVPDFGDGKMVPTGENLARFIFERVDKALPKPAKVTRVTVGEDDTLSATYSRD

SEQ ID NO: 20730 - protein, 132 aa, Gemmatimonas sp.
  REGION 1..132: note = tr|A0A0S7YND8|A0A0S7YND8_9BACT 6-pyruvoyl tetrahydropterin synthase OS=Gemmatimonas sp. SG8_23; OX = 1703356 GN=AMS19_13320 PE=4 SV=1
MYSLNVRDHFMIAHSFQGEIFGPAQRLHGATYVVDATFRRPELDTDGLVVDIGLASVQLREILEAMNYRNLDDMSDFAGQNTTTEFLAHEIWKRLVEAIEAGRLGEGARGVTSIRVKLNESHVAWGSFEGPV

SEQ ID NO: 20731 - protein, 144 aa, unidentified
  source 1..144: note = Gemmatirosa kalamazoonesis
  REGION 1..144: note = tr|W0RLX9|W0RLX9_9BACT Uncharacterized protein; OS = Gemmatirosa kalamazoonesis OX=861299 GN=J421_3925 PE=4; SV = 1
MARFSLTRRVSFAAAHRYRRPDWSDEKNAAVFGACARPNYHGHSYACDVTVSGPLDEATGFVADLGLLDRVLHEEVHARFDHANINLDVPEFADGRQIPSGENLARYVCERVQRRLDQALGTGTLRVTRVTVAEDRTLSATYEP

SEQ ID NO: 20732 - protein, 119 aa, unidentified
  source 1..119: note = Gemmatirosa kalamazoonesis
  REGION 1..119: note = tr|W0RDE3|W0RDE3_9BACT 6-carboxy-5,6,7,8-tetrahydropterin synthase OS=Gemmatirosa kalamazoonesis OX=861299 GN=J421_1597 PE=3 SV=1
MEIWKEFTFEAAHRLPNVPPGHKCARLHGHSFRVEVHVAGAVREPEGWVMDFGDLKTAWQPLDEALDHRYLNEIAGLENPTSEVLARWIWDRLLPWLPGLSAIVVRETCTTGCVYRGER

SEQ ID NO: 20733 - protein, 188 aa, Gemmiger sp.
  REGION 1..188: note = tr|A0A1Y3S4R2|A0A1Y3S4R2_9FIRM Rubredoxin; OS = Gemmiger sp. An87 OX=1965662 GN=B5G38_01360 PE=4 SV=1
MRSITKLDLQYAHRFYGFKGEAQYLHGHTGVLTIEVEDTVEPGVNMVFPCNEIQKTAWEVLKNFDHALILREDDPLLPAVLKVYEEQGIRGGAPQNQMKGPAFKTELATAYPECRLVVTKETLTVEGMIKIVYDLLKDKLNIAKITFTSGVNAASAEFETHNNIDRCPLCGIALNENGVCPKCGYKKP

SEQ ID NO: 20734 - protein, 188 aa, Gemmiger sp.
  REGION 1..188: note = tr|A0A1Y4TM79|A0A1Y4TM79_9FIRM Rubredoxin; OS = Gemmiger sp. An120 OX=1965549 GN=B5E65_02665 PE=4 SV=1
MRSITTLDLQYAHRFYGFKGEAQYLHGHTGVLTIEVEDTVEPGVNMVFPCNEIQKTAWSVLKNFDHALILRQDDPLLPAILKVYEEQGIRNGAPQNQMKGPAFETELAKAYPECRLVVTKETMTVEGMIKIVYDLLKDKLNIAKITFTSGVNAASAEFDTHNQIDRCPLCGIALNENGVCPKCGYKKG

SEQ ID NO: 20735 - protein, 123 aa, Geoalkalibacter ferrihydriticus
  REGION 1..123: note = tr|A0A1G9QZ82|A0A1G9QZ82_9DELT 6-carboxy-5,6,7,8-tetrahydropterin synthase; OS = Geoalkalibacter ferrihydriticus OX=392333; GN = SAMN05660860_01962 PE=3 SV=1
MYHLTIQTHFAAAHNLIHYQGDCENLHGHNWKVEVTVGAHELDKAGLAIDFKILKRETNLILDLLDHKYLNEIKPFDEISPSSENISRFIFEKLTESLNNGNVIVERITVWESDNACASYTAD

SEQ ID NO: 20736 - protein, 123 aa, Geoalkalibacter ferrihydriticus; identical to SEQ ID NO: 20735
  REGION 1..123: note = tr|A0A0C2EFL6|A0A0C2EFL6_9DELT 6-carboxy-5,6,7,8-tetrahydropterin synthase; OS = Geoalkalibacter ferrihydriticus DSM 17813 OX=1121915; GN = GFER_01325 PE=3 SV=1

SEQ ID NO: 20737 - protein, 123 aa, Geoalkalibacter subterraneus
  REGION 1..123: note = tr|A0A0B5FHL9|A0A0B5FHL9_9DELT 6-carboxy-5,6,7,8-tetrahydropterin synthase; OS = Geoalkalibacter subterraneus OX=483547 GN=GSUB_10270; PE = 3 SV=1
MFLLKIQSHFAAAHNLIHYQGDCENLHGHNWKVEVEVGAHELDKSGLAVDFKVLKRETNRVLDLLDHKYLNEVKPFDELSPSSENISRFVFEQLTESLNDGNVFVKRVTVWESDNACASYVAD

SEQ ID NO: 20738 - protein, 144 aa, Geobacillus galactosidasius
  REGION 1..144: note = tr|A0A226QSC6|A0A226QSC6_9BACI 6-carboxy-5,6,7,8-tetrahydropterin synthase OS=Geobacillus galactosidasius OX=883812 GN=B9L23_05200 PE=3 SV=1
MIHQLYPQVFHNYRYELNKDMHIAAAHFIPHEKAGKCANMHGHIYTVNITVAGDELDDAGFLVNFQELKKLIHGKLDHSLMNEHQDWFNDQNSNDFPTSEVIARKIYETVQAYLDTMPNKPKCLQVFVRETPTSYVVYRPKAGK

SEQ ID NO: 20739 - protein, 145 aa, Geobacillus kaustophilus; identical to SEQ ID NO: 17819
  REGION 1..145: note = tr|A0A4D7Q9G7|A0A4D7Q9G7_GEOKU 6-carboxy-5,6,7,8-tetrahydropterin synthase OS=Geobacillus kaustophilus NBRC 102445 OX=1220595 GN=queD PE=3 SV=1

SEQ ID NO: 20740 - protein, 134 aa, Geobacillus kaustophilus
  REGION 1..134: note = tr|Q5KZY1|Q5KZY1_GEOKA 6-pyruvoyltetrahydropterin synthase(PTP synthase) OS=Geobacillus kaustophilus (strain HTA426) OX=235909 GN=GK1470 PE=4 SV=1
MTRRYYFSSAHRLHSDQLTNEENQRLFGKCNNRYGHGHNYCLEVTVIGKPDPITGMVVNLAELDEIVNREVLVKFDHKHLNLDTDEFKQINPTAENIVIVIWELLAPHLSSLYKIGLWETQKNYFEYFGPHKEK

SEQ ID NO: 20741 - protein, 145 aa, Geobacillus lituanicus
  REGION 1..145: note = tr|A0A223DZ34|A0A223DZ34_9BACI 6-carboxy-5,6,7,8-tetrahydropterin synthase OS=Geobacillus lituanicus OX=169283 GN=GLN3_15180 PE=3 SV=1
MMHQLYPQVWHDYRYELNKDMHIAAAHFIPHEAAGSCANVHGHTYIVNVTVAGDELDESGFLVNFQTLKQLVHRKLDHTLLNDHSDWFDGHDPNRFPTSEVVARTIYETIQRYLDTLPHKPKCLQVFVRETPTSYVVYRPKAGDR

SEQ ID NO: 20742 - protein, 144 aa, unidentified
  source 1..144: note = Geobacillus proteiniphilus
  REGION 1..144: note = tr|A0A1Q5T7M3|A0A1Q5T7M3_9BACI 6-carboxy-5,6,7,8-tetrahydropterin synthase OS=Geobacillus proteiniphilus OX=860353 GN=BRO54_0416 PE=3 SV=1
MHQLYPQVMHNYRYELNKDMHIAAAHFIPHEAAGSCANVHGHTYIVNVTVAGDELDESGFLVNFQTLKQLVHRKLDHTLLNDHSDWFDGHDPNRFPTSEVVARTIYETIQRYLDTLPHKPKCLQVFVRETPTSYVVYRPKAGER

SEQ ID NO: 20743 - protein, 51 aa, unidentified
  source 1..51: note = Geobacillus proteiniphilus
  REGION 1..51: note = tr|A0A1Q5T3S7|A0A1Q5T3S7_9BACI 6-pyruvoyl tetrahydrobiopterin synthase OS=Geobacillus proteiniphilus; OX = 860353 GN=BRO54_1360 PE=4 SV=1
MECGKNKAVFGLCSNPNGHGHDYRLDVTVKGPVNLLAGITVNMKVDSGETF

SEQ ID NO: 20744 - protein, 145 aa, Geobacillus sp.
  REGION 1..145: note = tr|L7ZWG9|L7ZWG9_9BACI 6-carboxy-5,6,7,8-tetrahydropterin synthase OS=Geobacillus sp. GHH01 OX=1233873 GN=queD PE=3 SV=1
MMHQLYPQVMHPYRYELNKDMHIAAAHFIPHEAAGSCANVHGHTYIVNVTIAGDELDESGFLVNFQTIKQLVHGKLDHTLLNDHSDWFDGHDPNRFPTTEVVARTIYETIQRYLDTLPHKPTCLQVFVRETPTSYVVYRPKAGER

SEQ ID NO: 20745 - protein, 145 aa, Geobacillus sp.
  REGION 1..145: note = tr|A0A1V9B1G8|A0A1V9B1G8_9BACI 6-carboxy-5,6,7,8-tetrahydropterin synthase OS=Geobacillus sp. 44B OX=1963023 GN=BSK33_07930 PE=3 SV=1
MIHQLYPQVFHNYRYELNKDMHIAAAHFIPHEKAGKCANMHGHIYTVNITVAGDELDDAGFLVNFQELKKLIHGKLDHSLMNEHQDWFNDKNSNDFPTSEVIARKIYETVQAYLDTLPNKPTCLQVFVRETPTSYVVYRPKAGER

SEQ ID NO: 20746 - protein, 145 aa, Geobacillus stearothermophilus
  REGION 1..145: note = tr|A0A0K9I152|A0A0K9I152_GEOSE 6-carboxy-5,6,7,8-tetrahydropterin synthase OS=Geobacillus stearothermophilus OX=1422 GN=queD PE=3 SV=1
MMHQLYPQVWHDYRYELNKDMHIAAAHFIPHEAAGSCANVHGHTYIVNVTVAGDELDESGFLVNFQTLKQLVHRKLDHTLLNDHSDWFDGHDPNRFPTSEVVARTIYETIQRYLDTLPHKPKCLQVFVRETSTSYVVYRPKAGDR

SEQ ID NO: 20747 - protein, 145 aa, Geobacillus stearothermophilus
  REGION 1..145: note = tr|A0A0K2HBE7|A0A0K2HBE7_GEOSE 6-carboxy-5,6,7,8-tetrahydropterin synthase OS=Geobacillus stearothermophilus 10 OX=272567 GN=GT50_14590 PE=3 SV=1
MMHQLYPQVAHHYRYELNKDMHIAAAHFIPHEAAGSCANVHGHTYIVNVTIAGDELDESGFLVNFQTLKQLVHRKLDHTLLNDHSDWFDGHDPNRFPTSEVVARTIYETIQRYLDTLPHKPKCLQVFVRETPTSYVVYRPKAGER

SEQ ID NO: 20748 - protein, 145 aa, Geobacillus subterraneus
  REGION 1..145: note = tr|A0A143MJM4|A0A143MJM4_9BACI 6-carboxy-5,6,7,8-tetrahydropterin synthase OS=Geobacillus subterraneus OX=129338 GN=GS3922_11485 PE=3 SV=1
MMHQLYPQVAHHYRYELNKDMQIAAAHFIPHEAAGRCANVHGHTYIVNVTVAGDELDESGFLVNFQTLKKLVHGKLDHTLLNDHTDWFDRYDPNRFPTTEVVARTIYEIVQGYLDALPHKPKCLQVFVRESPTSYVVYRPKAGER

SEQ ID NO: 20749 - protein, 145 aa, Geobacillus thermocatenulatus
  REGION 1..145: note = tr|A0A226Q2K5|A0A226Q2K5_9BACI 6-carboxy-5,6,7,8-tetrahydropterin synthase OS=Geobacillus thermocatenulatus OX=33938 GN=GT3921_14540 PE=3 SV=1
MMHQLYPQVMHPYRYELNKDMHIAAAHFIPHEAAGSCANVHGHTYIVNVTIAGDELDESGFLVNFQTIKQLVHGKLDHTLLNDHADCFDENDPNRFPTTEVVARTIYETIQRYLDTLPHKPTCLQVFVRETPTSYVVYRPKAGER

SEQ ID NO: 20750 - protein, 145 aa, Geobacillus thermodenitrificans
  REGION 1..145: note = tr|A0A1W6VPP9|A0A1W6VPP9_GEOTD 6-carboxy-5,6,7,8-tetrahydropterin synthase OS=Geobacillus thermodenitrificans OX=33940 GN=queD PE=3 SV=1
MIYQLYPQVAHPYRYELNKDMHIAAAHFIPHEAAGSCANVHGHTYVVNVTVAGDELDESGFLVNFQMLKKLIHGKLDHTLLNDHTDWFDRHDPNRFPTTEVVARTIYETIQRYLDTLPHKPKCLQVFVRETPTSYVIYRPKVGER

SEQ ID NO: 20751 - protein, 145 aa, Geobacillus thermodenitrificans; identical to SEQ ID NO: 20750
  REGION 1..145: note = tr|A4ILN8|A4ILN8_GEOTN 6-carboxy-5,6,7,8-tetrahydropterin synthase OS=Geobacillus thermodenitrificans (strain NG80-2) OX=420246 GN=GTNG_0864; PE = 3 SV=1

SEQ ID NO: 20752 - protein, 145 aa, Geobacillus thermoleovorans; identical to SEQ ID NO: 17819
  REGION 1..145: note = tr|G8MYS9|G8MYS9_GEOTH 6-carboxy-5,6,7,8-tetrahydropterin synthase OS=Geobacillus thermoleovorans CCB_US3_UF5 OX=1111068; GN = GTCCBUS3UF5_11600 PE=3 SV=1

SEQ ID NO: 20753 - protein, 144 aa, Geobacillus thermoleovorans
  REGION 1..144: note = tr|A0A098L4I7|A0A098L4I7_GEOTH 6-carboxy-5,6,7,8-tetrahydropterin synthase OS=Geobacillus thermoleovorans B23 OX=1406857 GN=B23_2928 PE=3 SV=1
MHQLYPQVAHHYRYELNKDMHIAAAHFIPHEAAGSCANVHGHTYIVNVTVAGDELDESGFLVNFQTLKQLVHRKLDHTLLNDHSDWFDGHDPNRFPTSEVVARTIYETIQRYLDTLPHKPKCLQVFVRETPTSYVVYRPKAGER

SEQ ID NO: 20754 - protein, 145 aa, unidentified; identical to SEQ ID NO: 20744
  source 1..145: note = Geobacillus zalihae
  REGION 1..145: note = tr|A0A1V9C3F1|A0A1V9C3F1_9BACI 6-carboxy-5,6,7,8-tetrahydropterin synthase OS=Geobacillus zalihae OX=213419 GN=B1694_06905 PE=3 SV=1

SEQ ID NO: 20755 - protein, 123 aa, Geobacter argillaceus
  REGION 1..123: note = tr|A0A562VP01|A0A562VP01_9DELT 6-carboxy-5,6,7,8-tetrahydropterin synthase OS=Geobacter argillaceus OX=345631 GN=JN12_01425 PE=3 SV=1
MFRLKILTSFAAAHCLINYQGDCENLHGHNWRVEVTVRAGGLDEAGLGIDFKILKAETNQLLKTLDHKYLNELPPFSGLSPSSENISRFLFRELSSKLNTDNIKVETITVWESDFACASYSEE

SEQ ID NO: 20756 - protein, 122 aa, Geobacter bemidjiensis
  REGION 1..122: note = tr|B5EI72|B5EI72_GEOBB 6-carboxy-5,6,7,8-tetrahydropterin synthase OS=Geobacter bemidjiensis (strain Bem / ATCC BAA-1014 / DSM 16622); OX = 404380 GN=queD PE=3 SV=1
MFRLTIHTAFAAAHNLINYQGDCENLHGHNWKVEVSVTTNELDKAGLGIDFKILKRETNTLLKTLDHKYLNELPPFLEVSPSSENIARYLYHELTKILGSDKVKVEMVTVWESDFAAASYYE

SEQ ID NO: 20757 - protein, 122 aa, Geobacter daltonii
  REGION 1..122: note = tr|B9M259|B9M259_GEODF 6-carboxy-5,6,7,8-tetrahydropterin synthase OS=Geobacter daltonii (strain DSM 22248 / JCM 15807 / FRC-32) OX=316067; GN = queD PE=3 SV=1
MYKLRIETSFAAAHCLIHYQGDCENLHGHNWKVEVTVTARELDKSGLGIDFKVLKSETNALLKTLDHKYLNELPPFIESSPSSENIARYLFQELAKKFNSDNIGLTEVTVWESDFASASYYE

SEQ ID NO: 20758 - protein, 122 aa, Geobacter lovleyi
  REGION 1..122: note = tr|B3E1R1|B3E1R1_GEOLS 6-carboxy-5,6,7,8-tetrahydropterin synthase OS=Geobacter lovleyi (strain ATCC BAA-1151 / DSM 17278 / SZ) OX=398767; GN = Glov_1845 PE=3 SV=1
MYRLTIKTGFAAAHNLINYQGDCENLHGHNWKVEVTVTASELDQAGLAIDFKLLKRETNALLDELDHKYVNQHHFFLDLSPSSENISRYLFQELSKRLNDGNVKVERIGVWESDNACAEYYE

SEQ ID NO: 20759 - protein, 122 aa, Geobacter metallireducens
  REGION 1..122: note = tr|Q39V36|Q39V36_GEOMG 6-carboxy-5,6,7,8-tetrahydropterin synthase OS=Geobacter metallireducens (strain GS-15 / ATCC 53774 / DSM 7210); OX = 269799 GN=queD PE=3 SV=1
MYKLAIHTSFAAAHCLINYQGDCENLHGHNWKVEVTVTARELDKAGLGIDFKILKQETNAILRTLDHKYLNELTPFREISPSSENISRFLYEELSKRLNDGNVKVESITVWESDNAAATYYE

SEQ ID NO: 20760 - protein, 122 aa, Geobacter pelophilus
  REGION 1..122: note = tr|A0A1W7QNR2|A0A1W7QNR2_9DELT 6-carboxy-5,6,7,8-tetrahydropterin synthase OS=Geobacter pelophilus OX=60036 GN=GPEL0_01f0582 PE=3 SV=1
MFRLTIHTAFAAAHNLINYQGDCENLHGHNWKVEVSVTTNELDKAGLGIDFKILKRETNALLKTLDHKYLNELPPFSEVSPSSENIARYLYHELTKIFGSDKVKVEMVTVWESDFAAASYYE

SEQ ID NO: 20761 - protein, 122 aa, Geobacter pickeringii
  REGION 1..122: note = tr|A0A0B5BH40|A0A0B5BH40_9DELT 6-carboxy-5,6,7,8-tetrahydropterin synthase OS=Geobacter pickeringii OX=345632 GN=GPICK_08165 PE=3 SV=1
MYRLKIVTSFAAAHCLINYQGDCENLHGHNWKVEVEVTASELDKAGLGIDFKVLKQETNSLLRTLDHKYLNELDPFREISPSSENISRYLYAELSRRLNDGNVTVASITVWESDNAAATYYE

SEQ ID NO: 20762 - protein, 122 aa, unidentified
  source 1..122: note = Geobacter soli
  REGION 1..122: note = tr|A0A0C1QVN7|A0A0C1QVN7_9DELT 6-carboxy-5,6,7,8-tetrahydropterin synthase OS=Geobacter soli OX=1510391 GN=SE37_06125 PE=3 SV=1
MYRLTIHTSFAAAHCLINYQGDCENLHGHNWRVEVSVTARELDKAGLGIDFKVLKQETNGLLRTLDHKYLNELEPFKEISPSSENISCYLYHELSRRLNDGNVTVESITVWESDNAAATYYE

SEQ ID NO: 20763 - protein, 122 aa, Geobacter sp.
  REGION 1..122: note = tr|A0A212PFE1|A0A212PFE1_9DELT 6-carboxy-5,6,7,8-tetrahydropterin synthase OS=Geobacter sp. DSM 9736 OX=1277350 GN=SAMN06269301_1057 PE=3 SV=1
MFLLKIHTYFAAAHCLTHYQGDCENLHGHNWKVEVAVTARELDQAGLGIDFKILKSETNQLLKTLDHKYLNELPPFADLSPSSENIARYLYRELSEKLNTQNVNVHMVTVWESDYANASYYE

SEQ ID NO: 20764 - protein, 122 aa, Geobacter sp.
  REGION 1..122: note = tr|A0A3N9VPS9|A0A3N9VPS9_9DELT 6-carboxytetrahydropterin synthase QueD OS=Geobacter sp.; OX = 46610 GN=queD PE=4 SV=1
MYQLTISSDFASAHNLMHYQGDCENLHGHNWKVDVSVTAKDLDKSGLGIDFKKLKAETKTLLKTLDHKYLNELEPFKDVSPSSENIARYIYQELSRTLNNDNVTVESITVWESDHACAKYYE

SEQ ID NO: 20765 - protein, 122 aa, Geobacter sulfurreducens
  REGION 1..122: note = tr|Q74CF4|Q74CF4_GEOSL 6-carboxy-5,6,7,8-tetrahydropterin synthase OS=Geobacter sulfurreducens (strain ATCC 51573 / DSM 12127 / PCA); OX = 243231 GN=queD PE=3 SV=1
MYRLTIHTSFAAAHCLINYQGDCENLHGHNWRVEVSVTARELDKAGLGIDFKVLKQETNGLLRTLDHKYLNELEPFKEISPSSENISRYLYHELSRRLNDGNVTVESITVWESDNAAATYYE

SEQ ID NO: 20766 - protein, 122 aa, Geobacter sulfurreducens; identical to SEQ ID NO: 20765
  REGION 1..122: note = tr|A0A0D5NB03|A0A0D5NB03_GEOSN 6-carboxy-5,6,7,8-tetrahydropterin synthase OS=Geobacter sulfurreducens OX=35554 GN=RW64_17815 PE=3 SV=1

SEQ ID NO: 20767 - protein, 122 aa, Geobacter thiogenes
  REGION 1..122: note = tr|A0A1T4QNE5|A0A1T4QNE5_9DELT 6-carboxy-5,6,7,8-tetrahydropterin synthase OS=Geobacter thiogenes OX=115783 GN=SAMN02745119_02475 PE=3 SV=1
MYRLTIKTGFAAAHNLINYQGDCENLHGHNWKVEVTVTARELDQAGLAIDFKVLKRETNALLDELDHKYVNQHHFFQDISPSSENISRYLFHELSKRLNDNNIKVERIGVWESDNACAEYYE

SEQ ID NO: 20768 - protein, 122 aa, Geobacter uraniireducens
  REGION 1..122: note = tr|A5G3E1|A5G3E1_GEOUR 6-carboxy-5,6,7,8-tetrahydropterin synthase OS=Geobacter uraniireducens (strain Rf4) OX=351605 GN=Gura_2121 PE=3; SV = 1
MYKLKVETSFAAAHCLIHYQGDCENLHGHNWKVEVTVTAMELDKAGLGIDFKILKGETNTLLKTLDHKYLNELPPFIESSPSSENIARYLYRELANKFNNGNVKLDMVTVWESDFASASYYE

SEQ ID NO: 20769 - protein, 122 aa, unidentified
  source 1..122: note = Geobacteraceae bacterium
  REGION 1..122: note = tr|A0A1G0ME61|A0A1G0ME61_9DELT 6-carboxy-5,6,7,8-tetrahydropterin synthase; OS = Geobacteraceae bacterium GWC2_55_20 OX=1798317; GN = A2X82_11910 PE=3 SV=1
MYMLTIKTSFAAAHNLINYQGDCENLHGHNWKVEVSVTARELDKSGLGIDFKVLKRDAGAIINELDHKYLNENPAFRDLSPSSEHIAKYLYDRISERMNNDNIKVDSITVWESDNASARYYE

SEQ ID NO: 20770 - protein, 132 aa, unidentified
  source 1..132: note = Geobacteraceae bacterium
  REGION 1..132: note = tr|A0A3N5QNJ7|A0A3N5QNJ7_9DELT 6-carboxytetrahydropterin synthase OS=Geobacteraceae bacterium OX=2282154 GN=EHM38_09975 PE=4 SV=1
MYTLGVRRDFIARHFLIGGDWGPENSPNSHHYVLELRLEGRELDQHGYLVDIVDVEKHLDEIVDYYKEQMLNDKPEFAGLNPSIEHFARILATSLSERIKAANISTVKVVLWENELAWAAYKVERQRSNVEA

SEQ ID NO: 20771 - protein, 122 aa, unidentified
  source 1..122: note = Geodermatophilus aquaeductus
  REGION 1..122: note = tr|A0A521EY11|A0A521EY11_9ACTN 6-carboxy-5,6,7,8-tetrahydropterin synthase; OS = Geodermatophilus aquaeductus OX=1564161; GN = SAMN06273567_106134 PE=3 SV=1
MTELWRTFSFDAAHYLPKVPAGHKCGNMHGHTYTVEIRLRGEVDPVAGWVRDFGDIKEAFRPLEAELDHKVLNDVPGLDNPTSELLAQWLWERLIDVLPDLYSVSVSETANSGVVYRGAPSV

SEQ ID NO: 20772 - protein, 129 aa, Geodermatophilus ruber
  REGION 1..129: note = tr|A0A1I4IMW6|A0A1I4IMW6_9ACTN 6-pyruvoyl-tetrahydropterin synthase OS=Geodermatophilus ruber OX=504800 GN=SAMN04488085_11355 PE=4 SV=1
MYETGTARQVRAFHVMPGLPPPEGERHAHDYRLDVVVRRDDLDERGMVVDLDLLDGALGEAAARVDGADLDRVLPDVAAVTVEVFARWVHGQLATALGRLPGVTLAVRVWESPTAFGGYTAVLDGASSS

SEQ ID NO: 20773 - protein, 132 aa, unidentified
  source 1..132: note = Geodermatophilus sabuli
  REGION 1..132: note = tr|A0A285EKR9|A0A285EKR9_9ACTN 6-pyruvoyl-tetrahydropterin synthase OS=Geodermatophilus sabuli OX=1564158 GN=SAMN06893097_111182 PE=4 SV=1
MFNVTVRDHMMIAHSFTGAVFGPAQQLHGATYVVDATFRRAELDDDGVVVDIGAAAGLLHEVLGALTYRNLDDDPDLAGTNTTTEVLARVIADRLALRIRDGALGPGGDRLEALAVTLHESHIAWASYDLPL

SEQ ID NO: 20774 - protein, 132 aa, Geodermatophilus sp.
  REGION 1..132: note = tr|A0A372IZY7|A0A372IZY7_9ACTN 6-carboxytetrahydropterin synthase OS=Geodermatophilus sp. LHW52908 OX=2303986 GN=D0Z06_19120 PE=4 SV=1
MFSVTVRDHMMVAHSLRGEVFGPAQRLHGATFVVDATFRRRELDDDGVVVDIGAATELLRAVLGELTYRNLDDEPALAGTNTTTEVLARVVSDRLVAGLRAGALGPGADGLDGLAVTLHESHVAWAGYDRTL

SEQ ID NO: 20775 - protein, 149 aa, Geofilum rubicundum
  REGION 1..149: note = tr|A0A0E9M2C4|A0A0E9M2C4_9BACT Queuosine biosynthesis QueD, PTPS-I OS=Geofilum rubicundum JCM 15548; OX = 1236989 GN=JCM15548_13629 PE=4 SV=1
MAKIRLTKEFRFEMAHALYNYDGLCKNIHGHSYILQVTVIGEPVPEDESPKLGMVMDFGDLKAIVNREIVNDLDHSVVVSHKVSADLLKQMGQMTERYFIMDYQPTCENMLIDFAARLQNALPERVALFSLKLHETANSFAEWYASDNI

SEQ ID NO: 20776 - protein, 121 aa, Geomicrobium sp.
  REGION 1..121: note = tr|A0A061N381|A0A061N381_9BACL 6-carboxy-5,6,7,8-tetrahydropterin synthase; OS = Geomicrobium sp. JCM 19055 OX=1460649 GN=JCM19055_1424; PE = 3 SV=1
MHFAAAHFIDDERAGVCKEMHGHTYFVNITVAGDDLDDTGFLINFKSLKKQVHGRFDHTLLNTHPEFPEGIPTTEVVAKVIWELVDELLSQEKHRPYCLQVIVRETPTSYAIYRPKRGEHR

SEQ ID NO: 20777 - protein, 141 aa, Geomicrobium sp.
  REGION 1..141: note = tr|A0A061PFA0|A0A061PFA0_9BACL 6-carboxy-5,6,7,8-tetrahydropterin synthase; OS = Geomicrobium sp. JCM 19039 OX=1460636 GN=JCM19039_3181; PE = 3 SV=1
MLQQFYPQVQHDYRYELNKDMHFAAAHFIDDPSAGICQEMHGHTYFVNVTVAGDELDSTGFLINFKELKKQVHGRFDHSLLNKHPEFKAGIPTTEVVASVIWDQVDELLSKEAHRPFCLQVIVRETPTSYAIYRPKQEEHR

SEQ ID NO: 20778 - protein, 122 aa, unidentified
  source 1..122: note = Geomonas terrae
  REGION 1..122: note = tr|A0A4S1CCS5|A0A4S1CCS5_9DELT 6-carboxy-5,6,7,8-tetrahydropterin synthase OS=Geomonas terrae OX=2562681 GN=queD PE=3 SV=1
MFRLTIHTAFAAAHNLINYQGDCENLHGHNWKVEVSITTDELDKAGLGIDFKILKKETNNLLKTLDHKYLNELAPFSEISPSSENIARYLYHELTKIFGSDKVKVEMVTVWESDFAAASYYE

SEQ ID NO: 20779 - protein, 126 aa, Georgenia muralis
  REGION 1..126: note = tr|A0A3N5A187|A0A3N5A187_9MICO 6-pyruvoyltetrahydropterin/6-carboxytetrahydropterin synthase OS=Georgenia muralis OX=154117 GN=EDD32_1580 PE=4; SV = 1
MYRLTVRDHMMVAHSLPHPAFGPAQQLHGATFVVELTITRRDLDDAGIVIDIGEATTLLREALADLDYTNLDDHPDLAGTLTTTETLARVVAERVAARLAPGVYAGLDVVLREHPDAWAGYAMDLG

SEQ ID NO: 20780 - protein, 128 aa, unidentified
  source 1..128: note = Georgenia satyanarayanai
  REGION 1..128: note = tr|A0A2Y9A780|A0A2Y9A780_9MICO 6-pyruvoyltetrahydropterin/6-carboxytetrahydropterin synthase OS=Georgenia satyanarayanai OX=860221; GN = SAMN05216184_10469 PE=4 SV=1
MFSVTVRDHMMVAHSLPDPFFGPAQGLHGVTYVVELTFYRPELDEHGVVIDIGAATERLAEVTGELRYRNLDDLEVFAGTVTTTEVVARHVAHRVVEGLDTAPFTAVEVTLHEHPDAWATYRLDLTSP

SEQ ID NO: 20781 - protein, 125 aa, Georgenia soli
  REGION 1..125: note = tr|A0A2A9EM46|A0A2A9EM46_9MICO 6-pyruvoyltetrahydropterin/6-carboxytetrahydropterin synthase OS=Georgenia soli OX=638953 GN=ATJ97_1790 PE=4; SV = 1
MFALTVRDRMMIAHSLPHPAFGPAQALHGATYVVELTIRRAELGEEGIVIDIGEATTLLKDALADLDYTNLDEHPELAGTLTTTEALAKLVADRVADRLPAGLYAGLDVTLREHPDAWATYTREL

SEQ ID NO: 20782 - protein, 125 aa, Georgenia sp.
  REGION 1..125: note = tr|A0A5B8BZ28|A0A5B8BZ28_9MICO 6-carboxytetrahydropterin synthase OS=Georgenia sp. Z443; OX = 2589797 GN=FE374_01795 PE=4 SV=1
MYRLTVRDHMMVAHSLPHPAFGPAQQLHGATFVVELTFLRAELGEEAIVIDIGEATTLLREALADLDYSNLDDHPDLAGVLTTTETLARVVADRVAARLPGGRYAGLEVTLREHPDAWATYSLDL

SEQ ID NO: 20783 - protein, 128 aa, Georgenia sp.
  REGION 1..128: note = tr|A0A5B8APL2|A0A5B8APL2_9MICO 6-carboxytetrahydropterin synthase OS=Georgenia sp. Z294; OX = 2585135 GN=FE251_03710 PE=4 SV=1
MFSVTVRDHMMVAHSLPDPFFGPAQGLHGVTYVVELTFFRPELDEHGVVIDIGAATQRLGEVTGALRYRNLDDLEEFAGVVTTTEVVARHVAHRVVEGLDTTPFTAVEVRLHEHPDAWATYRLELPGR

SEQ ID NO: 20784 - protein, 122 aa, unidentified
  source 1..122: note = Georhizobium profundi
  REGION 1..122: note = tr|A0A3Q8XRL3|A0A3Q8XRL3_9RHIZ 6-carboxytetrahydropterin synthase OS=Georhizobium profundi OX=2341112 GN=D5400_04755 PE=4 SV=1
MIAHSLPDPFFGPAQGMHGATFTVDVQFVADRLTDKNVVVDIGKAMEALSATLKPLNYQNLDEIPAFKGQITTTEFLARHIFDELAETARSGGLGEGSENIKQIRVYLHESHFARAGYNGTL

SEQ ID NO: 20785 - protein, 123 aa, Geothermobacter ehrlichii
  REGION 1..123: note = tr|A0A5D3WPM8|A0A5D3WPM8_9DELT 6-carboxy-5,6,7,8-tetrahydropterin synthase; OS = Geothermobacter ehrlichii OX=213224 GN=EDC39_101470; PE = 3 SV=1
MYRLTIQTHFAAAHNLINYQGDCENLHGHNWKVEVQVRAHQLDAAGLGIDFKVLKKEANRLLDELDHKYLNDLEPFKDISPSSEHICRFLFERLSARLNSDNVQVDEVRVWESDNACASYRLD

SEQ ID NO: 20786 - protein, 123 aa, Geothermobacter sp.
  REGION 1..123: note = tr|A0A1X0YER2|A0A1X0YER2_9DELT 6-carboxy-5,6,7,8-tetrahydropterin synthase; OS = Geothermobacter sp. EPR-M OX=1969733 GN=B5V00_01775; PE = 3 SV=1
MYRLTIQTQFAAAHNLVNYQGDCENLHGHNWKVEVRVAARELDKSGLGIDFKVLKRQTNAVLDGLDHKYLNKLEPFLDLSPSSENIARYLFEQLGEVLNTDNVTVEQVNVWESDNACASYSLD

SEQ ID NO: 20787 - protein, 123 aa, Geothermobacter sp.
  REGION 1..123: note = tr|A0A2K2H732|A0A2K2H732_9DELT 6-carboxy-5,6,7,8-tetrahydropterin synthase; OS = Geothermobacter sp. HR-1 OX=654845 GN=queD PE=3 SV=1
MYRLTIQTQFAAAHNLVNYQGDCENLHGHNWKVEVRVAARELDKSGLGIDFKVLKHRTNAVLDSLDHKYLNKLEPFLDLSPSSENIARYLFEQLGELLNTDNVTVEQVNVWESDNACASYSLD

SEQ ID NO: 20788 - protein, 119 aa, Geovibrio thiophilus
  REGION 1..119: note = tr|A0A3R5UXQ2|A0A3R5UXQ2_9BACT 6-carboxy-5,6,7,8-tetrahydropterin synthase OS=Geovibrio thiophilus OX=139438 GN=queD PE=3 SV=1
MYRVRVIKSFASAHNLREYEGDCENLHGHNWKVEAYLASDKLDKIGMLVDFKVLKKHLNEILDGLDHKYINELEYFKTVNPTSENMCRYIYDRLKENFGSMVERVVVWESDNAAAEYWE

SEQ ID NO: 20789 - protein, 119 aa, Gibbsiella quercinecans
  REGION 1..119: note = tr|A0A250AZK9|A0A250AZK9_9ENTR 6-carboxy-5,6,7,8-tetrahydropterin synthase OS=Gibbsiella quercinecans OX=929813 GN=AWC35_08345 PE=3 SV=1
MATTLFKDFTFEAAHLLPHVPEGHKCGRLHGHSFMVRLEVTGEVDPHTGWVIDFAELKAAFKPVWEQLDHHYLNEVEGLENPTSEVLAAWIWRQMKPRLPLLSAVMVKETCTAGCIYKG

SEQ ID NO: 20790 - protein, 120 aa, Giesbergeria anulus
  REGION 1..120: note = tr|A0A1H9IVR4|A0A1H9IVR4_9BURK 6-carboxy-5,6,7,8-tetrahydropterin synthase; OS = Giesbergeria anulus OX=180197 GN=SAMN02982919_01228; PE = 3 SV=1
MQLTVSQRFFFDAAHTLQREIEAEGSRRIHGHTYHAEVFISGPRNPVSGMVIDLGHVRQRLVALREQLDHHLLDEVPNLGPATLENLCLFIANALADMQPPPSRVRVWRDAVGDSCTLDL

SEQ ID NO: 20791 - protein, 140 aa, unidentified
  source 1..140: note = Gilliamella apicola
  REGION 1..140: note = tr|A0A1B9JQ10|A0A1B9JQ10_9GAMM 6-carboxy-5,6,7,8-tetrahydropterin synthase OS=Gilliamella apicola OX=1196095 GN=A9G10_10940 PE=3 SV=1
MFKIAKEFQFDACHMLDGHNKKCHNLHGHTYRLVVEISGELINKGSSEDMVMDYADLKSIVKKHIIDPLDHAYLYHQNNVNECRIATLLQEMDRKTFAFPCRTTAEGMSQYIFDCLSNYLPISKIKLWETPSSYCEYQRS

SEQ ID NO: 20792 - protein, 140 aa, unidentified
  source 1..140: note = Gilliamella apicola
  REGION 1..140: note = tr|A0A066T624|A0A066T624_9GAMM 6-carboxy-5,6,7,8-tetrahydropterin synthase OS=Gilliamella apicola OX=1196095 GN=A9G37_10175 PE=3 SV=1
MFKIAKEFQFDACHMLDGHNKKCHNLHGHTYRLLVEISGELIDNGSSQDMVMDYADLKLIVKQHIVDPLDHAYLYYQHNPNECRIASLLQEMDRKIFAFPCRTTAEGMSKFIFDCLSQYLPVSMIKVWETPTSYCEYHRS

SEQ ID NO: 20793 - protein, 142 aa, unidentified
  source 1..142: note = Gilliamella apis
  REGION 1..142: note = tr|A0A242NWE7|A0A242NWE7_9GAMM 6-carboxy-5,6,7,8-tetrahydropterin synthase OS=Gilliamella apis OX=1970738 GN=B6D06_03345 PE=3 SV=1
MFKIAKEFQFDACHMLDGHNGKCHNLHGHTYRLLVEISNELITSGSSADMVMDYADIKSVVKQQIIDQLDHAYLYNQNNANESQIAELLQQMQRKIFAFPCRTTAEGMSKFIFDRLSQFLPVSMIKLWETPTSYCEYHRSEK

SEQ ID NO: 20794 - protein, 142 aa, unidentified
  source 1..142: note = Gilliamella apis
  REGION 1..142: note = tr|A0A242P7V2|A0A242P7V2_9GAMM 6-carboxy-5,6,7,8-tetrahydropterin synthase OS=Gilliamella apis OX=1970738 GN=B6C98_03170 PE=3 SV=1
MFKIAKEFQFDACHMLDGHNGKCHNLHGHTYRLLVEISNQLITSGSSADMVMDYADIKSIVKQQIIDQLDHAYLYNQNNANESQIAELLQQMQRKIFAFPCRTTAEGMSKFIFDRLSQFLPVSMIKLWETPTSYCEYHRSEK

SEQ ID NO: 20795 - protein, 140 aa, unidentified
  source 1..140: note = Gilliamella bombicola
  REGION 1..140: note = tr|A0A1C4D2J9|A0A1C4D2J9_9GAMM 6-carboxy-5,6,7,8-tetrahydropterin synthase OS=Gilliamella bombicola OX=1798182 GN=GA0061081_1139 PE=3 SV=1
MFKIAKEFQFDACHMLDGHNKKCHNLHGHTYRLLVEISGDLINNGSSQDMVMDYADLKMVVKQHIIDPLDHAYLYNQNNPNERRIATLLQEMERKIFAFPCRTTAEAMSKFIFDCLSQYLPVSMIKLWETPTSYCEYHRS

SEQ ID NO: 20796 - protein, 140 aa, unidentified
  source 1..140: note = Gilliamella intestini
  REGION 1..140: note = tr|A0A1C4CZ87|A0A1C4CZ87_9GAMM 6-carboxy-5,6,7,8-tetrahydropterin synthase OS=Gilliamella intestini OX=1798183 GN=GA0061080_10543 PE=3 SV=1
MFKIAKEFQFDACHMLDGHNKKCHNLHGHTYRLLVEVSGDLIDSGSSQDMVMDYADLKQIVKQHIVDRLDHAYLYNQNNPNECRIASLLQEMDRKIFAFPCRTTAEGMSQFIFDHLSQYLPVSMIKLWETPTSYCEYRRS

SEQ ID NO: 20797 - protein, 142 aa, unidentified
  source 1..142: note = Gilliamella sp.
  REGION 1..142: note = tr|A0A242PB41|A0A242PB41_9GAMM 6-carboxy-5,6,7,8-tetrahydropterin synthase OS=Gilliamella sp. N-G2 OX=1970471 GN=B6C99_10480 PE=3 SV=1
MFKIAKEFQFDACHMLDGHNGKCHNLHGHTYRLLVEISNELITSGSSADMVMDYADIKSVVKQQIIDQLDHAYLYNQNNANESQIAELLQQMQRKIFAFPCRTTAEGMSKFIFDHLSQFLPVSMIKLWETPTSYCEYHRSEK

SEQ ID NO: 20798 - protein, 142 aa, unidentified
  source 1..142: note = Gilliamella sp.
  REGION 1..142: note = tr|A0A242P014|A0A242P014_9GAMM 6-carboxy-5,6,7,8-tetrahydropterin synthase OS=Gilliamella sp. A7 OX=1970465 GN=B6D18_07675 PE=3 SV=1
MFKIAKEFQFDACHMLDGHNGKCHNLHGHTYRLLVEISNELITNGSSADMVMDYAEIKSIVKQQIIDQLDHAYLYNQNNANESQIAELLQKMQRKIFAFPCRTTAEGMSKFIFDHLSQFLPVSMIKLWETPTSYCEYHRSEK

SEQ ID NO: 20799 - protein, 136 aa, Gillisia hiemivivida
  REGION 1..136: note = tr|A0A5C6ZRZ5|A0A5C6ZRZ5_9FLAO 6-carboxy-5,6,7,8-tetrahydropterin synthase OS=Gillisia hiemivivida OX=291190 GN=ES724_15725 PE=3 SV=1
MKVTVHRKAHFNAAHRLYRKDWDDQKNQNIFGKCSNPNFHGHNYELTVSVKGDIDPETGFVVDLKILKDLISSEIEEYLDHKNLNVEVEEFKTLNPTAENIAVVIWGKLRPRLKETLELSVTLYETPRNFVTYNGE

SEQ ID NO: 20800 - protein, 150 aa, Gillisia hiemivivida
  REGION 1..150: note = tr|A0A5C6ZSY9|A0A5C6ZSY9_9FLAO 6-carboxytetrahydropterin synthase OS=Gillisia hiemivivida; OX = 291190 GN=ES724_09720 PE=4 SV=1
MSKIRITKQFSFETGHALYGYDGKCKNVHGHSYKLSVTVIGTPITDTNNVKYGMVIDFTDLKKIVKSEIVDKFDHATVFNKNTPHIELARELESRDHNVILVEYQPTSENMVIDFADKIKRQLPSQIKLFSLKLQETDTSFAEWYASDNF

SEQ ID NO: 20801 - protein, 153 aa, Gillisia limnaea
  REGION 1..153: note = tr|H2BTP4|H2BTP4_9FLAO Uncharacterized protein; OS = Gillisia limnaea DSM 15749 OX=865937 GN=Gilli_2026 PE=4; SV = 1
MSTIRITKQFSFETGHALYGYDGKCKNVHGHSYKLSVTVIGNPITDKTNVKYGMVIDFGDLKKIVKSEIVDRFDHATVFNKNTPHIELAKELEKRDHNVILVEYQPTSENMVVDFSEKIKSRLPNHIKLHSLKLQETESSFAEWYASDQEPQE

SEQ ID NO: 20802 - protein, 135 aa, Gillisia limnaea
  REGION 1..135: note = tr|H2BU54|H2BU54_9FLAO 6-carboxy-5,6,7,8-tetrahydropterin synthase OS=Gillisia limnaea DSM 15749 OX=865937 GN=Gilli_0964 PE=3 SV=1
MKVTVHRKAHFNAAHRLYRKDWDDAKNLAVFGKCSNPNFHGHNYELTVSVTGTIDPETGFVIDMKVLKDLIYSEVETAFDHKNLNVEVADFQDLNPTAENIAVVIWNKLKPKLKNDLELSVTLYETPRNFVTFNG

SEQ ID NO: 20803 - protein, 150 aa, Gillisia mitskevichiae
  REGION 1..150: note = tr|A0A495PYA6|A0A495PYA6_9FLAO 6-pyruvoyltetrahydropterin/6-carboxytetrahydropterin synthase OS=Gillisia mitskevichiae OX=270921 GN=BC962_0283; PE = 4 SV=1
MNKIRITKQFSFETGHALYGYDGKCKNVHGHSYKLSVTVIGTPITDTNNVKYGMVIDFSDLKKIVKSEIVDKFDHATVFNKNTPHIELAKELENRDHSVILVEYQPTSENMVLDFADKIKSQLPSQIELFSLKLQETDTSFAEWYASDNS

SEQ ID NO: 20804 - protein, 136 aa, Gillisia mitskevichiae
  REGION 1..136: note = tr|A0A495PVQ6|A0A495PVQ6_9FLAO 6-carboxy-5,6,7,8-tetrahydropterin synthase OS=Gillisia mitskevichiae OX=270921 GN=BC962_2115 PE=3 SV=1
MKVTVHRKAHFNAAHRLYRKDWDAQKNQDIFGKCSNPNFHGHNYELIVSVKGDIDQETGFVVDMKVLKELIASEIEEYLDHKNLNIEVEEFKQLNPTAENIAVVIWNKLRLKIKENLELSVTLYETPRNFVTYKGE

SEQ ID NO: 20805 - protein, 150 aa, Gillisia sp.
  REGION 1..150: note = tr|A0A559PL54|A0A559PL54_9FLAO 6-pyruvoyltetrahydropterin/6-carboxytetrahydropterin synthase OS=Gillisia sp. Hel_I_86 OX=1249981 GN=JM83_1305; PE = 4 SV=1
MNKIRITKQFSFETGHALYGYDGKCKNVHGHSYKLSVTVIGSPITDTSNVKYGMVIDFTDLKKIVKSEIVDKFDHATVFNKNTPHIQLAKELESRDHNVILVGYQPTSENMVLDFADKIKNRLPPQIKLFSLKLQETGTSFAEWFASDNS

SEQ ID NO: 20806 - protein, 150 aa, Gillisia sp.
  REGION 1..150: note = tr|A0A1H1MRT1|A0A1H1MRT1_9FLAO 6-pyruvoyltetrahydropterin/6-carboxytetrahydropterin synthase OS=Gillisia sp. Hel1_33_143 OX=1336796; GN = SAMN04487764_0937 PE=4 SV=1
MSKIRITKQFSFETGHALYGYDGKCKNVHGHSYKLSVTVIGTPILDTNNVKYGMVIDFGDLKKIVKSEIVDKFDHATVFNKNTPHVELAKELENRDHNVILVDYQPTSENMVIDFAEKIKKNLPGHIQLHSLKLQETDSSFAEWYASDNS

SEQ ID NO: 20807 - protein, 148 aa, Gilvibacter sp.
  REGION 1..148: note = tr|A0A1Y0MW61|A0A1Y0MW61_9FLAO 6-pyruvoyl tetrahydrobiopterin synthase OS=Gilvibacter sp. SZ-19; OX = 754429 GN=BTO09_13925 PE=4 SV=1
MLGSSALLERPTALKTAIVRREHFNAAHRLHNPNWSEAKNQAVFGKCNNPHYHGHNYELEVKVIGYCDPETGYVMDAKVLSDLIKEQILERFDHKNLNLEVAEFSNLNPTAENIARVIYELLKVQLPLDTELKITLYETPRNYVEYPY

SEQ ID NO: 20808 - protein, 149 aa, Gilvibacter sp.
  REGION 1..149: note = tr|A0A1Y0MPV6|A0A1Y0MPV6_9FLAO 6-carboxy-5,6,7,8-tetrahydropterin synthase OS=Gilvibacter sp. SZ-19 OX=754429 GN=BTO09_05955 PE=3 SV=1
MSNIRITKQFSFETGHALWGYDGKCRNVHGHSYNLYVTVIGQPITDPSHVKHGMVIDFGDLKKIVKEEIVEVFDHATVFNKNTPHVELAKELQDRGHNVLLVDYQPTSEMMVIDFAEKIAKRLPDGIKLHSLKLQETATSFAEWFASEN

SEQ ID NO: 20809 - protein, 166 aa, unidentified
  source 1..166: note = Gimesia maris
  REGION 1..166: note = tr|A0A3D3RE92|A0A3D3RE92_9PLAN 6-carboxytetrahydropterin synthase OS=Gimesia maris OX=122; GN = DIT97_26720 PE=4 SV=1
MGMTIMRRIKFNAGHRLFRHEGKCQFFHGHNYVADFYVTGPDTDAVGRIIDFAHLKSLLKGWIDENWDHGFLLNIEDENGLNAIRMVEPTKYFVLPYNPTAENMARYLLDEVCPNLLNDLGVQAVKVVIWETEESCAEATIDQKDKSEHSLLDAFQTDSFPTGLHW

SEQ ID NO: 20810 - protein, 166 aa, unidentified; identical to SEQ ID NO: 20809
  source 1..166: note = Gimesia maris
  REGION 1..166: note = tr|A6C2V8|A6C2V8_9PLAN 6-pyruvoyl tetrahydrobiopterin synthase OS=Gimesia maris DSM 8797; OX = 344747 GN=PM8797T_09614 PE=4 SV=1

SEQ ID NO: 20811 - protein, 168 aa, unidentified
  source 1..168: note = Gimesia sp.
  REGION 1..168: note = tr|A0A5A8BBS4|A0A5A8BBS4_9PLAN 6-carboxytetrahydropterin synthase OS=Gimesia sp. JC646; OX = 2605989 GN=FYZ48_14195 PE=4 SV=1
MKDSVPRYKVRVTKDHLVFSAAHFITFNGNICERLHGHNWRVAAELTGPLDENGYVFDFIALRDQLQKTVDALDHRVLLPTQHDKIKVREDQNEVEATFEERRWVFPREDCILLPIANTTAELIAHWIGQQLMTVIGSDAASQIELVQIEVEENFGQWAICELPVTRN

SEQ ID NO: 20812 - protein, 118 aa, unidentified
  source 1..118: note = Gimesia sp.
  REGION 1..118: note = tr|A0A2E7KDD7|A0A2E7KDD7_9PLAN 6-carboxy-5,6,7,8-tetrahydropterin synthase OS=Gimesia sp.; OX = 2024833 GN=queD PE=3 SV=1
MDLYKEFRFEAAHRLPNVPENHKCARLHGHSFRVQLHLSGKVDDKYGWVVDFADIKAAFKPVHERLDHYYLNEIEGLDNPTSENIAIWIWRQLKPNLAQLSKVVVSETCDCGCSYSGE

SEQ ID NO: 20813 - protein, 296 aa, Glaciecola nitratireducens
  REGION 1..296: note = tr|G4QLJ1|G4QLJ1_GLANF Uncharacterized protein; OS = Glaciecola nitratireducens (strain JCM 12485 / KCTC 12276 / FR1064) OX=1085623 GN=GNIT_1988 PE=4 SV=1
MKLFVNDLTVMDFSYLCPTRGMVGESWIVDILLNGGLNEESMVQDFGKVKKELKHVIDEYVDHKLVVPAENQCTTITHDDSNERVQVDFSYQHDGAENAQSMHLYCPPEAYAFVYSDEVNMSSVTEYLKEVIKIHLPENVHSVELFLREEVIPTDFYHYTHGLKKHDGNCQRIAHGHRSKVLVFEDGKESETWQNYWAKRWADIYIGTHEDLVTSSELSFQHDNINDEKYYCFKYEASQGEFEMAIEKQACEIIETDSTVECLAQFMFDELKTMTDVKLEVRAFEGVGKGAIVADE

SEQ ID NO: 20814 - protein, 275 aa, Glaciecola pallidula
  REGION 1..275: note = tr|K6ZCU4|K6ZCU4_9ALTE Uncharacterized protein; OS = Glaciecola pallidula DSM 14239 = ACAM 615 OX=1121922; GN = GPAL_1299 PE=4 SV=1
MVGESWIVDILLNGGLNEESMVQDFGKVKKELKHVIDDYVDHKLVVPAEHACTTITHDDSNERVQVDFSYHHEGSENAQSLHLYCPPEAYAFVYADEVNMSSVKEYLKEVIKTHLPENVHSVELFLREEAIPTDFYHYTHGLKKHDGNCQRIAHGHRSKVLVFENGKESQKWQNYWAKRWADIYIGTKEDLVSPSQLSFQHDNINADSFYCFKYESSQGEFEMAIEKQACEIIQTDSTVECLAQFMFDELKTMSDMTLEVRAFEGVGKGAIVADE

SEQ ID NO: 20815 - protein, 295 aa, Glaciecola punicea
  REGION 1..295: note = tr|H5TA51|H5TA51_9ALTE Isocitrate dehydrogenase (NADP(+  )) OS=Glaciecola punicea ACAM 611 OX=1121923; GN = GPUN_1047 PE=4 SV=1
MKLFVNDLTVMDFSYLCPQRGMVGESWIVDVILDGGLNDESMVQDFGIVKKQLKKVIDEYVDHKLVVPADHQNTRIYSPASDDRVQVDFVFADGLPIQLFCPPEAYAFVYKLEGEPSLITKKSLTAYLKDVITTHLPENVHDIDITLREEVINTPFYHYTHGLKKHDGNCQRIAHGHRSKILISQNGISSEKWQRYWADRWSDIYIGSTEDTVDAQALSFSLLNDAPVYCFKYEASQGLFEMAIASQVCELIDYDSTVECLAQYILEQTQKETDDPLTVMAFEGVGKGAMISANI

SEQ ID NO: 20816 - protein, 123 aa, Glaciecola sp.
  REGION 1..123: note = tr|A0A2Z6UBH0|A0A2Z6UBH0_GLASK Uncharacterized protein OS=Glaciecola sp. (strain KUL10) OX=2161813; GN = KUL10_27810 PE=4 SV=1
MFSVKIRESIMIAHSLPDPFFGPAQNMHGATYVVDVSFQSKTVNAQNVVIDIGEAKTITKEVLSCLNYKNLDELDIFKGHLTTTEFLAKYIHDEIKAKAEFTGSLLVCLGETHDAWASYQGDS

SEQ ID NO: 20817 - protein, 290 aa, Glaciecola sp.
  REGION 1..290: note = tr|A0A2Z6U9J9|A0A2Z6U9J9_GLASK Uncharacterized protein OS=Glaciecola sp. (strain KUL10) OX=2161813; GN = KUL10_00200 PE=4 SV=1
MKLFVNDLTVMDFSYLCPQRGMVGESWIVDIILDGGLNEESMVQDFGIVKKELKRVIDDYVDHKLVVPAEYHGTKVVHQEEQERVSVDFEFANDQHIHLYCPPEAYAFVYSEQVDKQSVNAYLKEVIAIHLPENVQSVEITLRDEEIPTPFYHYTHGLKKHEGNCQRIAHGHRSKVLIYENGEESLALQQAWAERWADIYIGTREDLVSVKALSHSLGLSDDDYFAFKYESSQGVFEMAIPKSVCEIIETDSTVECLAQYIYDEIKTENSNLIEVRAFEGVGKGAIVRDE

SEQ ID NO: 20818 - protein, 149 aa, Glaciimonas sp.
  REGION 1..149: note = tr|A0A2T6F0D3|A0A2T6F0D3_9BURK 6-carboxytetrahydropterin synthase QueD OS=Glaciimonas sp. PCH181 OX=2133943 GN=queD PE=4 SV=1
MLTITRKLEFDAGHRIPDHKSQCRNLHGHRYTLEITLVGAIIEVEGSSDNGMIMDFSDIKTLAKQHLVDVWDHAFIVYEKDTAVREFLATLPDHKTVVIDRIPTVENLARAAYDILKAAYKDHYGTGLHLQKLVLHETPNCWAEISEDR

SEQ ID NO: 20819 - protein, 140 aa, unidentified
  source 1..140: note = Glaesserella parasuis
  REGION 1..140: note = tr|U4SF19|U4SF19_HAEPR 6-carboxy-5,6,7,8-tetrahydropterin synthase; OS = Glaesserella parasuis D74 OX=1275971 GN=A2U20_01740; PE = 3 SV=1
MFKIAKEFSFDMAHMLDGHDGKCKNLHGHTYTLQVEIAGELHTDGAKSGMVMDYSDLKAVVKQHILDKMDHAFIYDSTSEKECKVATLLQSLDSKTFGIPARTTAEQMAKYIFDTLTTEGLPVSLIRLWETPTSYCEYCQ

SEQ ID NO: 20820 - protein, 140 aa, unidentified
  source 1..140: note = Glaesserella parasuis
  REGION 1..140: note = tr|A0A0E1RLU2|A0A0E1RLU2_HAEPR 6-carboxy-5,6,7,8-tetrahydropterin synthase; OS = Glaesserella parasuis 29755 OX=456298 GN=pts PE=3 SV=1
MFKIAKEFSFDMAHMLDGHDGKCKNLHGHTYTLQVEIAGELHTDGAKSGMVMDYSDLKVAVKQHILDKMDHAFIYDSTSEKECKVATLLQSLDSKTFGIPARTTAEQMAKYIFDTLTTEGLPVSLIRLWETPTSYCEYCR

SEQ ID NO: 20821 - protein, 142 aa, unidentified
  source 1..142: note = Glaesserella sp.
  REGION 1..142: note = tr|A0A328BXQ6|A0A328BXQ6_9PAST 6-carboxy-5,6,7,8-tetrahydropterin synthase; OS = Glaesserella sp. HHC-2018 OX=2094024 GN=queD PE=3 SV=1
MFKIAKEFSFDMAHMLDGHDGKCKNLHGHTYTLQVEISGELHADGAKSGMVMDYSDLKAVVKKHILDNMDHAFIYDLTSEKECKVADLLNSLDSKTFGIPARTTAEQMAKYMFDTLKAEGLPVSLIRLWETPTSYCEYSPSV

SEQ ID NO: 20822 - protein, 276 aa, unidentified
  source 1..276: note = Gloeobacter kilaueensis
  REGION 1..276: note = tr|U5QH04|U5QH04_9CYAN Uncharacterized protein; OS = Gloeobacter kilaueensis JS1 OX=1183438 GN=queD PE=4 SV=1
MTSCLIVRRSRFSAAHRYWLEELSAEENRRRFGAAANIHGHNYTILVSMNGPVDRFGMVLNLSEVKQIIRREVSGQLDSQLLNETWEEFVRTLPTTEHMARVIFERLRPHLPVVRVQLFESEDLWAEYQGEAMQAYLTIADHFAAAHRLALDELSLEENTEIYGLCARTHGHGHNYHVEITVKGEVDERTGMLVDLVALQRLLKDKVLLPFDHTFLNKDVPYFAQVVPTAENIALHIRDLLEEPVRALGARLHKVRLIESPNNSVEVYTESFAPIA

SEQ ID NO: 20823 - protein, 276 aa, unidentified
  source 1..276: note = Gloeobacter violaceus
  REGION 1..276: note = tr|Q7NFE7|Q7NFE7_GLOVI Glr3579 protein; OS = Gloeobacter violaceus (strain ATCC 29082 / PCC 7421); OX = 251221 GN=glr3579 PE=4 SV=1
MGCLIVRRARFSAAHRYWLSELSEAENRSRFGPTTRIHGHNYVLFVSMLGPVDEYGMVLNLSDVKHVIKREVTAQLDTNLLNEAWPELAETLPTTEHLARVIFHRLVPHLPVVRVQLFESDDLWAEYQGEGMQAYLTISDHFAAAHRLALDSLSLEENTEIYGLCARPNGHGHNYHVEITVKGEVDGRTGMLVDLAALQQILKDKVLLPFDHTFLNKDVPYFAGVVPTAENIALHIRDLLEEPVRALGARLHKVRLIESPNNSVEVHTESYAPLVG

SEQ ID NO: 20824 - protein, 289 aa, Gloeocapsa sp.
  REGION 1..289: note = tr|K9XHX9|K9XHX9_9CHRO Uncharacterized protein; OS = Gloeocapsa sp. PCC 7428 OX=1173026 GN=Glo7428_3783 PE=4; SV = 1
MQCIVNRRAQFSASHRYWLPELSEAENTQRFGLCARTPGHGHNYVLYVSLAGELDEYGMVQNLSEVKQVIKREVTSQLDFSHLNDVWTEFQQTLPTTENIARVIWQRLAPYLPLVRIQLFEHPELWAEYQGNGMEAYLTLSTHFSAAHRLARPDLSYEENSEIYGKCARPNGHGHNYHLEVTVKGDIDPRTGMLVDLGALQQIVDDLVVEPLDHTFLNKDIAYFAEIVPTAENIAVYISNVLRSPIQELGATLHKVKLIESPNNSCEIYCDQTVQEISDQRSEVRELVH

SEQ ID NO: 20825 - protein, 139 aa, Gloeocapsa sp.
  REGION 1..139: note = tr|L8LQX2|L8LQX2_9CHRO 6-carboxy-5,6,7,8-tetrahydropterin synthase OS=Gloeocapsa sp. PCC 73106 OX=102232 GN=GLO73106DRAFT_00031020 PE=3 SV=1
MQTDSVWLIYKEFRFEAAHRLPHHQGKCRRLHGHSWLGKIYVKSNHLMTTGPEQGMVLDFGKIKQYLKPLLEDYLDHHYLNETTGLENPTSEAIAQWIFTQLKAKGLPGLHAVEIRETCTSGAYYQPLEENQIKSENVI

SEQ ID NO: 20826 - protein, 288 aa, unidentified
  source 1..288: note = Gloeomargarita lithophora
  REGION 1..288: note = tr|A0A1J0AHD3|A0A1J0AHD3_9CYAN Putative 6-pyruvoyl tetrahydropterin synthase OS=Gloeomargarita lithophora Alchichica-D10 OX=1188229 GN=ptpS PE=4 SV=1
MRCIINRRAQFSASHCYSIPQWSEAENFRCFGKGSQFPGHGHNYILYVAMVGEIDECGMVLNLSEVKHVIRREVTEPLDNSFLNRAWPEFSQTLPTTEFIAYAIWHRLVPHLPLAQIQLYEHPQLWAEYQGDAMNAYLTVGTHFSAAHRLARVDFSETENYTTYGKCARPHGHGHNYHLEVTVRGKIDPVTGMLVDLVALQGVIDREVVEPLDHTFLNKDIPYFGDVVPTAEHIALYIVQLLQEPVRRLGAALHKVKLVESPNNSCEIYADDVRTVTPVPSLAVAASR

SEQ ID NO: 20827 - protein, 129 aa, unidentified
  source 1..129: note = Gloeothece citriformis
  REGION 1..129: note = tr|B7K7H2|B7K7H2_GLOC7 6-carboxy-5,6,7,8-tetrahydropterin synthase OS=Gloeothece citriformis (strain PCC 7424) OX=65393 GN=PCC7424_1293; PE = 3 SV=1
MEEWIIYKEFRFEAAHILPHHGGKCRRLHGHSWVGRVYVKGNELIAEGSQQGMIIDYGEIKHYIQPLLDHYLDHYFLNETTGLENPTSEAIAKWIFEKLEAAGLPGLYAVEIRETCTSGCTYKKLIIDN

SEQ ID NO: 20828 - protein, 287 aa, unidentified
  source 1..287: note = Gloeothece citriformis
  REGION 1..287: note = tr|B7K9H7|B7K9H7_GLOC7 Uncharacterized protein; OS = Gloeothece citriformis (strain PCC 7424) OX=65393; GN = PCC7424_1504 PE=4 SV=1
MDCIINRRAQFSASHRYWLPELDEVENQRRFGACSRFPGHGHNYVLYVSLYGELDQYGMVENLSYVKKVIKEEITTQLDYGYLNEVWPEFKQTLPTTENLARVIWQRLAPHLPLVNIQLFEHPELWADYQGNDMEASLTVKTHFSAAHRLALPDLSLEENTEIYGKCARVHGHGHNYHLEVSVTGEIDPRTGMLVDLGALEKIIDDYVVEPFDHSFLNKDIPYFAQVVPTAENIALYIAQLLQQPVRELGAELDKVKLIESPNNSCEIHCRQKVNSQLKLKQEPALV

SEQ ID NO: 20829 - protein, 129 aa, unidentified
  source 1..129: note = Gloeothece verrucosa
  REGION 1..129: note = tr|E0UBN0|E0UBN0_GLOV7 6-carboxy-5,6,7,8-tetrahydropterin synthase OS=Gloeothece verrucosa (strain PCC 7822) OX=497965 GN=Cyan7822_1992; PE = 3 SV=1
MEEWIIYKEFRFEAAHTLPHHDGKCRRLHGHSWVGRVYVKGYELMAEGPKQGMIIDYADVKQYMKPILDNYLDHYYLNETTGLENPTSEAIAKWVYEKLEAAGLPGLYAVEIRETCTSGCTYKKSSYML

SEQ ID NO: 20830 - protein, 288 aa, unidentified
  source 1..288: note = Gloeothece verrucosa
  REGION 1..288: note = tr|E0U810|E0U810_GLOV7 Uncharacterized protein; OS = Gloeothece verrucosa (strain PCC 7822) OX=497965; GN = Cyan7822_4179 PE=4 SV=1
MYCIINRRAQFSASHRYWLPELTEAENQKLFGLCSRFPGHGHNYVLYVSLYGELDHYGMVENLSYVKRVIKDEITSQLDYAYLNEVWPEFEQTLPTTENIARVIWQRLAPHLPLVNIQLFEHPELWADYQGNLMEATLTVKTHFSAAHRLALPELSLEENSEIYGKCARIHGHGHNYHLEVSVTGEIDPRTGMLVDLGALQKIIDEYVVEPFDHSFLNKDIPYFAQVVPTAENIAFYIAQLLQQPILELGAELDKVKLIESPNNSCEIYCRTRLHSPLPIKQEVALVS

SEQ ID NO: 20831 - protein, 175 aa, Gluconacetobacter diazotrophicus
  REGION 1..175: note = tr|B5ZM19|B5ZM19_GLUDA Uncharacterized protein; OS = Gluconacetobacter diazotrophicus (strain ATCC 49037 / DSM 5601 / PAl5) OX=272568 GN=Gdia_3393 PE=4 SV=1
MLDLVFTRRFSMGHRLIHGASESCALPHGHNEFVTVRLRPTAPRPLDGAGNMVVSFQRAKGRWHRFVDERLDHALQLAEDDPLLAWFRANEPERARRIVVTPGDPTTELTACLMMAKLNALLDADGGVLRCAGITLQETPTNTVEFEGEPLDVLPTPRPAAQCWWRRADDSIADI

SEQ ID NO: 20832 - protein, 181 aa, Gluconacetobacter diazotrophicus
  REGION 1..181: note = tr|A9HRF7|A9HRF7_GLUDA Uncharacterized protein; OS = Gluconacetobacter diazotrophicus (strain ATCC 49037 / DSM 5601 / PAl5) OX=272568 GN=GDI2956 PE=4 SV=1
MSRTAPMLDLVFTRRFSMGHRLIHDASESCALPHGHNEFVTVRLRPTAPRPLDGAGNMVVSFQRAKGRWHRFVDERLDHALQLAEDDPLLAWFRANEPERARRIVVTPGDPTTELTACLMMAKLNALLDADGGVLRCAGITLQETPTNTVEFEGEPLDVLPTPRPAAQCWWRRADDSIADI

SEQ ID NO: 20833 - protein, 175 aa, Gluconacetobacter entanii
  REGION 1..175: note = tr|A0A318Q4L8|A0A318Q4L8_9PROT 6-pyruvoyl tetrahydropterin synthase OS=Gluconacetobacter entanii; OX = 108528 GN=CFR72_04255 PE=4 SV=1
MLELVFTRRFCMAHRLLSGESERCALPHGHNEYVRVTLRPTNPARLDGTQNMVVPFHRAKGTWHGFVDNSLDHAFQLGEGDPLLSWFRTHEPERAGRIVVTPGDPTTELMACLMMAKLNAFLHADGDVLTCAEIVLEETPTNTVRYAGDPLLMLPTPRPPQECWWRRADMSISDN

SEQ ID NO: 20834 - protein, 175 aa, Gluconacetobacter liquefaciens
  REGION 1..175: note = tr|A0A370G7U7|A0A370G7U7_GLULI 6-pyruvoyltetrahydropterin/6-carboxytetrahydropterin synthase OS=Gluconacetobacter liquefaciens OX=89584; GN = C7453_10440 PE=4 SV=1
MLDLVFTRRFSMGHRLIHGASESCALPHGHNEFVTVRLRPTAPRALDGAGNMVVSFQRAKSRWHRFVDERLDHALQLAEDDPLLAWFRAHEPERARRIIVTPGDPTTELMACLMMAKLNALLDADGALLRCAEITLQETPTNTVRYEGDPLDMLPAPRPPAQCWWLRADDSIADV

SEQ ID NO: 20835 - protein, 178 aa, Gluconacetobacter sp.
  REGION 1..178: note = tr|F3SDH5|F3SDH5_9PROT Tetrahydropterin synthase; OS = Gluconacetobacter sp. SXCC-1 OX=1004836 GN=SXCC_04186; PE = 4 SV=1
MFELVFTRRFSMAHRLLAGGSERCALPHGHNEYVRVSLRATAPTALDGHANMVLPFQRAKGIWHQFIDNHVDHALQLAQDDPLLGWFAQHEPQRAQRILVTPGDPTTELLACLLMAKLNAFLAADGGILSCASIEIDETPTNTIRYGGDPLAVLPQPRPAAQCWWRRADMTIADTGLS

SEQ ID NO: 20836 - protein, 175 aa, Gluconobacter albidus
  REGION 1..175: note = tr|A0A1U9KVY0|A0A1U9KVY0_9PROT 6-pyruvoyl tetrahydropterin synthase OS=Gluconobacter albidus; OX = 318683 GN=A0U94_01875 PE=4 SV=1
MTAELVFTRRFCMGHRLITGASERCAIPHGHNEYVRVKLRPAKQTRLDGHANMILPFAEAKTRWHHFVDNSLDHALQLSETDPLLAWFRANEPDRASRIVVTPGDPTTELMAALMLAKLTAILADQGDILRVHEIELEETPTNTVRLGGNPQRYLPAVSRPPEQCWWNKADASIS

SEQ ID NO: 20837 - protein, 175 aa, Gluconobacter albidus
  REGION 1..175: note = tr|A0A149TGZ0|A0A149TGZ0_9PROT 6-pyruvoyl tetrahydropterin synthase OS=Gluconobacter albidus; OX = 318683 GN=AD945_11115 PE=4 SV=1
MTAELVFTRRFCMGHRLITGASERCAIPHGHNEYVRVKLRPAKQTRLDGHANMILPFAEAKTRWHHFVDNSLDHALQLSETDPLLAWFRANEPDRASRIVVTPGDPTTELMAALMLAKLTAILADQGDILRVHEIELEETPTNTVRLGGNPQHYLPAVSRPPEQCWWNKADASIS

SEQ ID NO: 20838 - protein, 177 aa, Gluconobacter cerinus
  REGION 1..177: note = tr|A0A1B6VLK2|A0A1B6VLK2_9PROT 6-pyruvoyl tetrahydropterin synthase OS=Gluconobacter cerinus; OX = 38307 GN=A0123_00803 PE=4 SV=1
MTAELVFTRRFCMGHRLITGTSEKCAVPHGHNEYVKVTLRPVDEKRLDGHQNMILPFAEAKTRWHDFVDNSLDHALQLSEQDPLLAWFRDHEPERARRIVVTPGDPTTEVMTALLLAKLTAILADQGGKLRVHEIELEETPTNTVKLSGDPSFYLPQVERAAHACWWNRADMSISDL

SEQ ID NO: 20839 - protein, 177 aa, Gluconobacter frateurii
  REGION 1..177: note = tr|A0A0S6TFK6|A0A0S6TFK6_9PROT Uncharacterized protein OS=Gluconobacter frateurii NBRC 103465 OX=1307834; GN = GFGA_1d0274 PE=4 SV=1
MTAELVFTRRFCMGHRLITGGSEKCAIPHGHNEYVKVTLRPVEETRLDGHQNMILPFADAKTRWHDFVDNSLDHALQLSEHDPLLSWFRDHEPERARRIVVTPGDPTTEVMAALLLAKLTAILADQACNLRVHLLELEETPTNTVRLSGNPVSYLPQVSRAPQECWWNRADMSVSDF

SEQ ID NO: 20840 - protein, 177 aa, Gluconobacter frateurii
  REGION 1..177: note = tr|A0A0K8N4K5|A0A0K8N4K5_9PROT Uncharacterized protein OS=Gluconobacter frateurii NBRC 101659 OX=1104996; GN = GLF_2106 PE=4 SV=1
MTAELVFTRRFCMGHRLITGSSEKCAIPHGHNEYVKVTLRPVEETRLDGHQNMILPFADAKTRWHDFVDNSLDHALQLSEQDPLLAWFRDHEPERARRIVVTPGDPTTEVMAALLLAKLTAILADQGSILCVHALELEETPTNTVRLTGDPAFYLPKVSRAPRECWWNRADKSISDF

SEQ ID NO: 20841 - protein, 177 aa, Gluconobacter japonicus
  REGION 1..177: note = tr|A0A149TM48|A0A149TM48_GLUJA 6-pyruvoyl tetrahydropterin synthase OS=Gluconobacter japonicus; OX = 376620 GN=AD936_10355 PE=4 SV=1
MTAELVFTRRFCMGHRLITGSSEKCAIPHGHNEYVKVTLRPVEATRLDGHQNMILPFADAKTRWHDFVDNSLDHALQLSEHDPLLAWFRDHEPERARKIVVTPGDPTTEVMAALLLAKLTAILADQGAALRVHALELEETPTNTVRLTGDPAFYLPKVSRSPQKCWWNRADKSISDF

SEQ ID NO: 20842 - protein, 177 aa, Gluconobacter japonicus
  REGION 1..177: note = tr|A0A177G1C3|A0A177G1C3_GLUJA 6-pyruvoyl tetrahydropterin synthase OS=Gluconobacter japonicus; OX = 376620 GN=A0J51_01840 PE=4 SV=1
MTAELVFTRRFCMGHRLITGSSEKCAIPHGHNEYVKVTLRPVEETRLDGHQNMILPFAEAKTRWHDFVDNSLDHALQLSEHDPLLAWFRDHEPERARRIVVTPGDPTTEVMAALLLAKLTAILEDQGCALRVHSLELEETPTNTVRLTGDPAFYLPQVSRAPQECWWNRADMSISDV

SEQ ID NO: 20843 - protein, 175 aa, Gluconobacter kanchanaburiensis
  REGION 1..175: note = tr|A0A511BAG3|A0A511BAG3_9PROT Uncharacterized protein OS=Gluconobacter kanchanaburiensis NBRC 103587; OX = 1307948 GN=GKA01_19580 PE=4 SV=1
MTAELVFTRRFCMGHRLITGSSERCAIPHGHNEYVRVTLRPAKQTRLDGHANMILPFAEAKTRWHHFVDNSLDHALQLSETDPLLAWFRANEPERASRIVVTPGDPTTELMAALMLAKLTAILADQGDILRVHEIELEETPTNTVRLGGNPQHYLPAVSQPPEQCWWNRPDDSIS

SEQ ID NO: 20844 - protein, 178 aa, unidentified
  source 1..178: note = Gluconobacter morbifer
  REGION 1..178: note = tr|G6XFJ5|G6XFJ5_9PROT 6-pyruvoyl-tetrahydropterin synthase OS=Gluconobacter morbifer G707 OX=1088869; GN = GMO_02600 PE=4 SV=1
MTAELIFTRRFCMGHRLITGSSERCAIPHGHNEYVRVTLRPAKQARLDGHVNMILPFAEAKARWHGFVDEALDHSLQLSETDPLLAWFRQNEPQRAERIVVTPGDPTTELMAALMLAKLTAFLADQGDILRVHEIELEETPTNTVRLGGNPQHYLPVVNRPAKDCWWNRPDQSISDLP

SEQ ID NO: 20845 - protein, 177 aa, Gluconobacter oxydans
  REGION 1..177: note = tr|K7T6M3|K7T6M3_GLUOY Uncharacterized protein; OS = Gluconobacter oxydans H24 OX=1224746 GN=B932_0498 PE=4; SV = 1
MTAELVFTRRFCMGHRLITGSSEKCAIPHGHNEYVRVTLRPVEETRLDGHQNMILTFAEAKTRWHDFVDNSLDHALQLSEHDPLLAWFRAHEPERARRIVVTPGDPTTEVMAALLLAKLTAILADQGSSLRVHALELEETPTNTVRLTGDPAFYLPQVNRAPQECWWNRADMSISDV

SEQ ID NO: 20846 - protein, 175 aa, Gluconobacter oxydans
  REGION 1..175: note = tr|Q5FQR3|Q5FQR3_GLUOX Uncharacterized protein; OS = Gluconobacter oxydans (strain 621H) OX=290633; GN = GOX1541 PE=4 SV=1
MTAELVFTRRFCMGHRLITGASERCAIPHGHNEYVRVTLRPAKQTRLDGHANMILPFAEAKTRWHHFVDNSLDHALQLSETDPLLAWFRTNEPERAQRIVVTPGDPTTELMAALMLAKLTAILADQGDILRVHEIELEETPTNTVRLGGNPQHYLPTVSRPPEQCWWNRPDASIA

SEQ ID NO: 20847 - protein, 175 aa, Gluconobacter roseus
  REGION 1..175: note = tr|A0A4Y3M3K3|A0A4Y3M3K3_9PROT Uncharacterized protein OS=Gluconobacter roseus NBRC 3990 OX=1307950; GN = GRO01_02420 PE=4 SV=1
MTAELVFTRRFCMGHRLITGASERCAIPHGHNEYVRVTLRPAKQARLDGHANMILPFAEAKTRWHHFVDNSLDHALQLSETDPLLAWFRENEPERASRIVVTPGDPTTELMAALMLAKLTAILADQGDILRVHEIELEETPTNTVRLGGNPQHYLPAVSRPPEQCWWNRPDASIS

SEQ ID NO: 20848 - protein, 177 aa, Gluconobacter sp.
  REGION 1..177: note = tr|A0A252BMT3|A0A252BMT3_9PROT 6-pyruvoyl tetrahydropterin synthase OS=Gluconobacter sp. DsW_058; OX = 1511210 GN=HK24_04010 PE=4 SV=1
MTAELVFTRRFCMGHRLITGTSEKCAVPHGHNEYVKVTLRPVDEKRLDGHQNMILPFTEAKTRWHDFIDNSLDHALQLSEQDPLLAWFRDHEPERARRIVVTPGDPTTEVMIALLLAKLTAILADQGGKLRVHEIELEETPTNTVKLSGDPSFYLPQVERAAQACWWNRADMSISDL

SEQ ID NO: 20849 - protein, 175 aa, Gluconobacter sphaericus
  REGION 1..175: note = tr|A0A4Y3Q8W2|A0A4Y3Q8W2_9PROT Uncharacterized protein OS=Gluconobacter sphaericus NBRC 12467 OX=1307951; GN = GSP01_00250 PE=4 SV=1
MTAELVFTRRFCMGHRLITGASERCAIPHGHNEYVRVTLRPAKQARLDGHANMILPFAEAKTRWHHFVDNSLDHALQLSETDPLLAWFRENEPERAQRIVVTPGDPTTELMAALMLAKLTAILADQGDILRVHEIELEETPTNTVRLGGNPQHYLPTISRQPEQCWWNRPDASIA

SEQ ID NO: 20850 - protein, 177 aa, Gluconobacter thailandicus
  REGION 1..177: note = tr|A0A5C0A637|A0A5C0A637_GLUTH 6-carboxytetrahydropterin synthase OS=Gluconobacter thailandicus OX=257438 GN=FXF46_08080 PE=4 SV=1
MTAELVFTRRFCMGHRLITGSSEKCAIPHGHNEYVKVTLRPVEETRLDGHQNMILPFAEAKTRWHDFVDNSLDHALQLSEHDPLLAWFRAHEPERARRIVVTPGDPTTEVMAALLLAKLTAILADQGSSLRVHALELEETPTNTVRLTGDPAFYLPQVSRAPQECWWNRADMSISDV

SEQ ID NO: 20851 - protein, 177 aa, Gluconobacter thailandicus
  REGION 1..177: note = tr|A0A149SM18|A0A149SM18_GLUTH 6-pyruvoyl tetrahydropterin synthase OS=Gluconobacter thailandicus; OX = 257438 GN=AD940_15415 PE=4 SV=1
MTAELVFTRRFCMGHRLITGSSEKCAIPHGHNEYVMVTLRPVEETRLDGHQNMILPFAEAKTRWHDFVDNSLDHALQLSEHDPLLAWFRAHEPERARRIVVTPGDPTTEVMAALLLAKLTAILADQGSSLRVHALELEETPTNTVRLTGDPAFYLPQVSRAPQECWWNRADMSISDV

SEQ ID NO: 20852 - protein, 126 aa, Gluconobacter wancherniae
  REGION 1..126: note = tr|A0A511B149|A0A511B149_9PROT Uncharacterized protein OS=Gluconobacter wancherniae NBRC 103581 OX=656744; GN = GWA01_19080 PE=4 SV=1
MIVPFADAKSRWHDFVDTSLDHALQLSEHDPLLTWFRTNEPERASRIVVTPGDPTTEMLAALLMAKLGAILLNQGDALRVHAIELQETPTNTVRLNGNPQDYLPLQHRPAEQCWWNRADNSISDPF

SEQ ID NO: 20853 - protein, 115 aa, unidentified
  source 1..115: note = Glycocaulis alkaliphilus
  REGION 1..115: note = tr|A0A3T0E6Y0|A0A3T0E6Y0_9RHOB Queuosine biosynthesis protein QueD OS=Glycocaulis alkaliphilus; OX = 1434191 GN=X907_0429 PE=4 SV=1
MMLISAQVNIEAAHFTPIGDEDDTRRQIHGHSYLVRAWVQAEPGVEDLDRLREDLFSAALPLDHALLNEVEGLAGPSMEAIADFVAQRLAPLWPGLRKVSVARPTLGYEVVRELA

SEQ ID NO: 20854 - protein, 124 aa, unidentified
  source 1..124: note = Glycocaulis sp.
  REGION 1..124: note = tr|A0A550KLG1|A0A550KLG1_9RHOB 6-carboxy-5,6,7,8-tetrahydropterin synthase OS=Glycocaulis sp. ZYF765 OX=2518983 GN=FKB34_04290 PE=3 SV=1
MSDLRLEISKDFTFDAAHHFSHKGADHPFSRLHGHSFTGTVTLSGDPAADSGMVRDFWEIDAEIAKIRDQLDHRLLNEVEGLEHPSLEAIARWVFDRLDPVLPGLVAVEIRRPSCGERAVIRRG

SEQ ID NO: 20855 - protein, 120 aa, Glycomyces sp.
  REGION 1..120: note = tr|A0A426UU85|A0A426UU85_9ACTN 6-carboxy-5,6,7,8-tetrahydropterin synthase OS=Glycomyces sp. YIM 121974 OX=2493553 GN=EIW28_19105 PE=3 SV=1
MLTITKEFHFSASHVLEGLPKWHPCARMHGHNYVVVLELSAPDDKLVPPGFVRDYRDLDGFKQWMDKTLDHRHLNEVVEVQPTSELLARWIFDRWIGEFPELTAVRVHETPKTTAEYRPG

SEQ ID NO: 20856 - protein, 123 aa, Gordonia paraffinivorans
  REGION 1..123: note = tr|M3V7F1|M3V7F1_9ACTN 6-carboxy-5,6,7,8-tetrahydropterin synthase OS=Gordonia paraffinivorans NBRC 108238 OX=1223543 GN=GP2_055_00010; PE = 3 SV=1
MTHQMEIFRDFTFESAHRLPNVPEGHKCARLHGHSYRVTVTVGGPVDPHHGWVMDFGDLKKAVQPLVETLDHRVLNEIEGLTNPTSENLAVWFWDRLSDVVENLKCIQIQETATSGCRYFGPN

SEQ ID NO: 20857 - protein, 122 aa, Gordonia polyisoprenivorans
  REGION 1..122: note = tr|H0RJ63|H0RJ63_9ACTN 6-carboxy-5,6,7,8-tetrahydropterin synthase OS=Gordonia polyisoprenivorans NBRC 16320 = JCM 10675 OX=1077976; GN = GOPIP_077_00400 PE=3 SV=1
MEIFREFEFEAAHYLPHVPHGHKCRNLHGHSYHVRIDVRGPIDPEHGWVLDYADIDHAFAGLHRQLDHHCLNDIEGLDNPTSEMLAIWIWDRLPADLPRTCVTVWESKRGGCVYRGHATEGA

SEQ ID NO: 20858 - protein, 122 aa, Gordonia sp.; identical to SEQ ID NO: 20857
  REGION 1..122: note = tr|A0A1V4Q485|A0A1V4Q485_9ACTN 6-carboxy-5,6,7,8-tetrahydropterin synthase OS=Gordonia sp. i37 OX=1961707 GN=B1964_19760 PE=3 SV=1

SEQ ID NO: 20859 - protein, 129 aa, Gordonia sp.
  REGION 1..129: note = tr|A0A2W6R5R3|A0A2W6R5R3_9ACTN 6-pyruvoyl tetrahydrobiopterin synthase OS=Gordonia sp. OX=84139; GN = DI630_29770 PE=4 SV=1
MFGLTVRDHIMIAHSLPDPFFGPAQGLHGATLVVEATWRSPSLNDHAVVMDIGEASRHLSEVLDPLRYANLDEHPAFAGTLSTTEAVARHIANELAARLEADRGIASIGIVVREHPDAWVTFEIDLSGR

SEQ ID NO: 20860 - protein, 140 aa, Gordonibacter pamelaeae
  REGION 1..140: note = tr|D6EB09|D6EB09_9ACTN 6-carboxy-5,6,7,8-tetrahydropterin synthase; OS = Gordonibacter pamelaeae 7-10-1-b OX=657308 GN=GPA_29860; PE = 3 SV=1
MYGLKTEASFDSAHFLTDYYGKCENLHGHRWRAVVHLAVDDLQAEGTMKGMVLDFGVFKRAVRELAEALDHTFLVEEGSLAPATLAALEAEGFSLFIVPFRTTAENLARYFGDCLVEQGLPVSQVEMYETPNNCAVYRPQ

SEQ ID NO: 20861 - protein, 140 aa, Gordonibacter pamelaeae; identical to SEQ ID NO: 20860
  REGION 1..140: note = tr|A0A369M774|A0A369M774_9ACTN 6-carboxy-5,6,7,8-tetrahydropterin synthase; OS = Gordonibacter pamelaeae OX=471189 GN=C1877_03545 PE=3; SV = 1

SEQ ID NO: 20862 - protein, 129 aa, Gordonibacter sp.
  REGION 1..129: note = tr|A0A369LUC6|A0A369LUC6_9ACTN 6-carboxy-5,6,7,8-tetrahydropterin synthase; OS = Gordonibacter sp. 28C OX=2078569 GN=queD PE=3 SV=1
MHLHVGGGHYELTVKDHFDAAHALPGYDGPCQYLHGHTWDVEITIAGQHLDEVGMLYDFKDIKRALHGVLENFDHRCLNDVPPFDEINPTAEHLARVVFYELEKTFPAHISLKEVAVWESPIAKVTYRP

SEQ ID NO: 20863 - protein, 140 aa, Gordonibacter sp.
  REGION 1..140: note = tr|A0A1Y4GV34|A0A1Y4GV34_9ACTN 6-carboxy-5,6,7,8-tetrahydropterin synthase; OS = Gordonibacter sp. An232A OX=1965593 GN=B5F41_00090 PE=3; SV = 1
MYGLKTEASFDSAHFLTDYYGKCENLHGHRWRAVVRLAVDDLQTEGTMKGMVLDFGVFKRAVRELAEALDHTFLVEEGSLAPATLAALEAEGFSLTVLPFRTTAENLARYFCDRLVEQGLPVSQVEMYETPNNCAVYRPQ

SEQ ID NO: 20864 - protein, 142 aa, unidentified
  source 1..142: note = Gordonibacter urolithinfaciens
  REGION 1..142: note = tr|A0A423UHK7|A0A423UHK7_9ACTN 6-carboxy-5,6,7,8-tetrahydropterin synthase; OS = Gordonibacter urolithinfaciens OX=1335613; GN = DMP12_12355 PE=3 SV=1
MYGLKTEASFDSAHFLTDYYGKCENLHGHRWRAVVHLAVDDLQTEGTMKGMVLDFGVFKRAVRELADALDHTFLVEEGSLAPATLAALEAEGFSLFIVPFRTTAENLARYFCDCLAEQGLPVSQVEMYETPNNCVVYRPLQR

SEQ ID NO: 20865 - protein, 129 aa, unidentified
  source 1..129: note = Gordonibacter urolithinfaciens
  REGION 1..129: note = tr|A0A1Y4FXU3|A0A1Y4FXU3_9ACTN 6-carboxy-5,6,7,8-tetrahydropterin synthase; OS = Gordonibacter urolithinfaciens OX=1335613 GN=queD PE=3; SV = 1
MHLHVGGGHYELTVKDHFDAAHALPGYDGPCQYLHGHTWEVEATIAGQHLDEVGMLYDFKDVKRDLHGVLENFDHRCLNDVPPFDEINPTAEHLARVVFYELEKTFPAHISLVEVAVWESPAAKVVYRP

SEQ ID NO: 20866 - protein, 139 aa, unidentified
  source 1..139: note = Gottschalkia acidurici
  REGION 1..139: note = tr|K0B0P2|K0B0P2_GOTA9 6-carboxy-5,6,7,8-tetrahydropterin synthase; OS = Gottschalkia acidurici (strain ATCC 7906 / DSM 604 / BCRC 14475 / CIP 104303 / NCIMB 10678 / 9a ) OX=1128398; GN = queD PE=3 SV=1
MYILKAQNTFDSAHFLSNYNGKCRNIHGHTWTVHAEVGSETLKESGEFKGMVTDFGDLKKDLKEMLDYFDHALIIEENSLRKETLENIVQDGFKVITIDFRSTAENFSKYFYDKLEEKGYNVRKITVFETPTNSATYER

SEQ ID NO: 20867 - protein, 155 aa, Gracilibacillus boraciitolerans
  REGION 1..155: note = tr|W4VQ87|W4VQ87_9BACI Queuosine biosynthesis QueD; OS = Gracilibacillus boraciitolerans JCM 21714 OX=1298598; GN = JCM21714_4201 PE=4 SV=1
MFGFQIVEELQKFNKDIHKGELQYHQKRVLVSKEFDFDAAHHLHCYDGKCKNLHGHTYKAVFGISGFVDEIGMVIDFGDIKKIWKEQIEIHLDHRYLNETLPKMNTTAENMVVWIFEKMEAALQGHNNQCRVEFVRLYETPTSYAEVRREWMVDE

SEQ ID NO: 20868 - protein, 161 aa, Gracilibacillus dipsosauri
  REGION 1..161: note = tr|A0A317L200|A0A317L200_9BACI 6-carboxytetrahydropterin synthase QueD OS=Gracilibacillus dipsosauri OX=178340 GN=queD PE=4 SV=1
MSEHQEFRVVEGLQKYERDISYHELKYHHKRVLVSKEFTFDASHHLHAYEGKCKNLHGHTYKVIFGISGFVNDIGIVIDFGDIKKIWKNEIEIHLDHRYLNETLPKMNTTAENMVVWLYEKMEESIKCKEYALSEVRVEFVRLYETPTSYAEVKREWMEHE

SEQ ID NO: 20869 - protein, 155 aa, Gracilibacillus halophilus
  REGION 1..155: note = tr|N4WT39|N4WT39_9BACI 6-pyruvoyl tetrahydrobiopterin synthase OS=Gracilibacillus halophilus YIM-C55.5 OX=1308866 GN=J416_11432 PE=4 SV=1
MYDFRIVDQLQKIDQDIQRNELKYHQKRVMVSKEFTFDASHHLHCYEGKCKNLHGHTYTAIFGISGYVNDIGLVIDFSEMKQIWKEQIEIYLDHRYLNETLPKMNTSAENMVVWLFEKMEAALADKPNDCRVEFVKLYETPTSYAEARREWMIDE

SEQ ID NO: 20870 - protein, 273 aa, Gracilibacillus halophilus
  REGION 1..273: note = tr|N4WN38|N4WN38_9BACI Putative 6-pyruvoyl tetrahydropterin synthase OS=Gracilibacillus halophilus YIM-C55.5 OX=1308866 GN=J416_06008 PE=4 SV=1
MLYLSRRIDFSAMHHYRIDAWTEEQNRRIFGLCSNPNGHGHDYQLEVMVRGQLNPDYGVVVNTTDIKASVGEYVREELDGKYLNKEHPYFMKHVPTTEQLVTFLWQGIEPKLTNCELYRLRLHENPYIVAEKGDEHMVRLTRKYHFSAAHRLHSEQLSEQENQYFFGKCNNPYGHGHNYYLEVTVCGEPDPITGMITDLAELDATVDQVILEKMDHKHLNLDVAEFRDVNPTSEVVAKVIYDMLSPYISNLDKVGLWETEKNYFEYAGEEVDV

SEQ ID NO: 20871 - protein, 155 aa, Gracilibacillus kekensis
  REGION 1..155: note = tr|A0A1M7IFD6|A0A1M7IFD6_9BACI 6-pyruvoyltetrahydropterin/6-carboxytetrahydropterin synthase OS=Gracilibacillus kekensis OX=1027249; GN = SAMN05216179_0034 PE=4 SV=1
MFGFQIVEELQKINKDIQKDELQYHQKRVLVSKEFTFDAAHHLHCYEGKCKNLHGHTYKVVFGISGYVDDIGIVIDFGDIKKIWKEQIEIHLDHRYLNETLPKMNTTAENMVVWIFEKMEAALLNDTYQCRVEFVRLFETPTSYAEARREWMLNE

SEQ ID NO: 20872 - protein, 155 aa, Gracilibacillus orientalis
  REGION 1..155: note = tr|A0A1I4GYJ3|A0A1I4GYJ3_9BACI 6-pyruvoyltetrahydropterin/6-carboxytetrahydropterin synthase OS=Gracilibacillus orientalis OX=334253; GN = SAMN04487943_101108 PE=4 SV=1
MYGFQIVENLQKIDQDIKRHQLKYHQKRVMVSKEFTFDAAHHLHCYEGKCKNLHGHTYKVVFGISGLVDEIGIVIDFGDIKQIWKEEIEIHLDHRYLNETLPKMNTTAENMVVWIFEKMEEALHDLLNQCRVEFVRLFETPTSYAEARREWMISE

SEQ ID NO: 20873 - protein, 156 aa, Gracilibacillus ureilyticus
  REGION 1..156: note = tr|A0A1H9P6V7|A0A1H9P6V7_9BACI 6-pyruvoyltetrahydropterin/6-carboxytetrahydropterin synthase OS=Gracilibacillus ureilyticus OX=531814; GN = SAMN04487944_104124 PE=4 SV= 1
MIYDFQIVDKLQKFGEDINKDELQYHQKRVLISKEFSFDAAHHLHCYEGKCKNLHGHTYKVIFGISGFVNEIGIVIDFSEIKKLWKEQIEIYLDHRYLNETLPKMNTSAENMVVWIYEKMEESLKEYPNQCKVEFVRLFETPTSYAEARREWMLSE

SEQ ID NO: 20874 - protein, 345 aa, Gracilibacillus ureilyticus
  REGION 1..345: note = tr|A0A1H9M4R8|A0A1H9M4R8_9BACI 6-pyruvoyltetrahydropterin/6-carboxytetrahydropterin synthase OS=Gracilibacillus ureilyticus OX=531814; GN = SAMN04487944_101557 PE=4 SV= 1
MPKIAISLVDFTYIIDNWDRIIIKYSQLYPVHIIVHSESAKFFGGFIFILSYLKLTNPNLLKKTHGEVATLLYISRRIDFSAMHRYRVDSWTEEKNRQVFGPCSNRNGHGHDYKLEVMVKGKLNNHTGMVVNTGDIKLAVGNLIDKELDGKFLNEEHPYFKQNIPTAENIVAYLWEAISQVLENCSLNRLKLYENHYLFSEKEEGDMVTFTRRYHFSSAHRLHSDQLSDKENERIFGKCNNPYGHGHNYYLDVAVKGIPDNITGMVINMADLDEIVEKIVLEEFDHKHLNLDTAVFKGLNPTSEVMAKVVYDMLKPYIPKLYRIGVWETEKNYFEYINEEETVHG

SEQ ID NO: 20875 - protein, 129 aa, unidentified
  source 1..129: note = Gracilimonas mengyeensis
  REGION 1..129: note = tr|A0A521ARL7|A0A521ARL7_9BACT 6-carboxy-5,6,7,8-tetrahydropterin synthase; OS = Gracilimonas mengyeensis OX=1302730; GN = SAMN06265219_101335 PE=3 SV=1
MPTWTLHTEFKFDAAHFIDGYDGKCGRMHGHSYKVKMTAKSHKLNPSKYLKSDDMVCDFKELKWAAKDSKKGGFDHGVLNELMPDNTTAERIAEYIHKETKNRIPEGIDLTVTVWETDNSWVEYTDQDV

SEQ ID NO: 20876 - protein, 143 aa, unidentified
  source 1..143: note = Gracilimonas mengyeensis
  REGION 1..143: note = tr|A0A521FD86|A0A521FD86_9BACT 6-carboxy-5,6,7,8-tetrahydropterin synthase; OS = Gracilimonas mengyeensis OX=1302730; GN = SAMN06265219_11749 PE=3 SV=1
MIFVTRKSHFNAAHRLHNPDKSDEWNQETFGKCNYPNWHGHNYVIEVTVAGEPDPETGYVIDLGDLKAIIKEKVLDPCDHRNLNLDVPFLKGILPTTENLVRAFFQQLRPDVEEACKNGGKLYKVKLFETERNIAEYCPYRGV

SEQ ID NO: 20877 - protein, 143 aa, Gracilimonas sp.
  REGION 1..143: note = tr|A0A316TU30|A0A316TU30_9BACT 6-pyruvoyl tetrahydrobiopterin synthase OS=Gracilimonas sp. 8A47; OX = 2079485 GN=DDZ15_06075 PE=4 SV=1
MIYVTRKAHFNASHRLHNPEKSDQWNRETFGKCNNPNWHGHNYVIEVTVQGLPDPETGYVIDLGDLKSIIKHKILDPCDHKNLNLEVDFLEGIIPTTENLVKVFFQRLNEQVSSAAYGESKLYSVKLFETERNVAEYCPFRRD

SEQ ID NO: 20878 - protein, 129 aa, Gracilimonas sp.
  REGION 1..129: note = tr|A0A316U1X5|A0A316U1X5_9BACT 6-carboxy-5,6,7,8-tetrahydropterin synthase; OS = Gracilimonas sp. 8A47 OX=2079485 GN=DDZ15_07240 PE=3; SV = 1
MATWTLHTEFKFDAAHFIEGYDGKCGRMHGHTYKVHIAAKSHKLNPSKYLKSPDMVCDFKELKWAAADGKKGGFDHAVLNETIPVATTAERIAEYIHKETKKRIPADIDLRVTVWETESSWVEYTDQDV

SEQ ID NO: 20879 - protein, 136 aa, unidentified
  source 1..136: note = Gramella flava
  REGION 1..136: note = tr|A0A1L7I6G2|A0A1L7I6G2_9FLAO 6-carboxy-5,6,7,8-tetrahydropterin synthase OS=Gramella flava JLT2011 OX=1229726 GN=GRFL_2457 PE=3 SV=1
MRITVHRKAHFNAAHRLFRKDWDDSRNFEVFGKCSNPHYHGHNYELIVSVTGEPDPETGFVMDLKILKDLIFEEIEEAFDHKNLNLEVPEFQDLIPTAENIAVVIWNKLRKKIMQEHDLKVTLYETPRNFVTYKGD

SEQ ID NO: 20880 - protein, 150 aa, unidentified
  source 1..150: note = Gramella flava
  REGION 1..150: note = tr|A0A1L7I3L8|A0A1L7I3L8_9FLAO Queuosine biosynthesis QueD, PTPS-I OS=Gramella flava JLT2011; OX = 1229726 GN=GRFL_1473 PE=4 SV=1
MNKIRITKQFNFETGHALYGYDGKCRNVHGHSYKLNVTVIGTPITDSENVKFGMVIDFGDLKKIVKSEIVDKFDHATVFNKNTPHVELAEELKSRGHHVILTNYQPTSENMVIDFAEKIQKHLPSHIRLHSLKLQETESSFAEWYASDNE

SEQ ID NO: 20881 - protein, 136 aa, unidentified
  source 1..136: note = Gramella forsetii
  REGION 1..136: note = tr|A0M3Y1|A0M3Y1_GRAFK 6-carboxy-5,6,7,8-tetrahydropterin synthase OS=Gramella forsetii (strain KT0803) OX=411154 GN=GFO_2362 PE=3 SV=1
MRITVHRKAHFNAAHRLYRKDWDDERNFGVFGKCSNPHYHGHNYELIVSVTGEPDPETGFVMDLKILKELIYLEVEEAFDHKNLNVEVPEFEDLIPTAEHIAVVIWNKLRTRIQEDHDLKVTLYETPRNFVSYKGE

SEQ ID NO: 20882 - protein, 150 aa, unidentified
  source 1..150: note = Gramella forsetii
  REGION 1..150: note = tr|A0M6Q9|A0M6Q9_GRAFK 6-pyruvoyl tetrahydropterin synthase OS=Gramella forsetii (strain KT0803) OX=411154; GN = GFO_3363 PE=4 SV=1
MSKIRITKQFSFETGHALYGYDGKCRNVHGHSYKLSVTVIGTPITDSEHVKFGMVIDFGDLKKIVKSEIVDQFDHATVFNKNTPHVELANELKDRGHDVILVEYQPTSENMVIDFAEKIKKHLPTHINLHSLKLQETETSFAEWYASDNT

SEQ ID NO: 20883 - protein, 136 aa, Gramella gaetbulicola
  REGION 1..136: note = tr|A0A2T6AEP3|A0A2T6AEP3_9FLAO 6-carboxy-5,6,7,8-tetrahydropterin synthase OS=Gramella gaetbulicola OX=703340 GN=C8P64_2712 PE=3 SV=1
MRVTVHRKAHFNAAHRLFRKDWDDERNLEVFGKCSNPNYHGHNYELIVSVTGEPDPETGFVMDLKILKDLINSEVEEPFDHKNLNIEVPEFKELNPTAENIAVVIWNKLRKKINKSHELEVTLYETPRNFVTYKGD

SEQ ID NO: 20884 - protein, 150 aa, Gramella gaetbulicola
  REGION 1..150: note = tr|A0A2T6AMG4|A0A2T6AMG4_9FLAO 6-pyruvoyltetrahydropterin/6-carboxytetrahydropterin synthase OS=Gramella gaetbulicola OX=703340 GN=C8P64_0954; PE = 4 SV=1
MSNIRITKQFSFETGHALYGYDGKCRNVHGHSYKLSVTVIGKPITDSDNVKFGMVIDFGDLKKIVKSEIVDQFDHATVFNKNTPHIELAEELKSRGHHVILVEYQPTSENMVIDFAKKIKKHLPSHIQLHSLKLQETETSFAEWYASDNN

SEQ ID NO: 20885 - protein, 137 aa, unidentified
  source 1..137: note = Gramella jeungdoensis
  REGION 1..137: note = tr|A0A4Y8AUC9|A0A4Y8AUC9_9FLAO 6-carboxytetrahydropterin synthase OS=Gramella jeungdoensis OX=708091 GN=E2488_08125 PE=4 SV=1
MNFKTAIVRREHFNSAHRLHNPMWPDEKNFAVFGKCNNPNYHGHNYELEVKIIGIVNEDTGYIIDTKYLSDLIKEHVLHKFDHKNLNLDVEDFKNLNPTAENIAIVIYNILRPLIEENYELKIKLYETRRNFVEYPY

SEQ ID NO: 20886 - protein, 136 aa, unidentified
  source 1..136: note = Gramella jeungdoensis
  REGION 1..136: note = tr|A0A4Y8AYM6|A0A4Y8AYM6_9FLAO 6-carboxy-5,6,7,8-tetrahydropterin synthase OS=Gramella jeungdoensis OX=708091 GN=E2488_03790 PE=3 SV=1
MKVTVNRKAHFNAAHRLYNADWTDARNAIVFGKCANPNYHGHNYELIVAVKGDIHPETGFVMDMKVLKQLIETEIEAQFDHKNLNEEVPEFKTLNPTAENISVVIWNKLRNRIDKNLELSVTLYETPRNFVTYSGD

SEQ ID NO: 20887 - protein, 136 aa, unidentified
  source 1..136: note = Gramella salexigens
  REGION 1..136: note = tr|A0A1L3J4J9|A0A1L3J4J9_9FLAO 6-carboxy-5,6,7,8-tetrahydropterin synthase OS=Gramella salexigens OX=1913577 GN=LPB144_06295 PE=3 SV=1
MRVTVHRKAHFNAAHRLFRKDWNDDKNLRVFGKCSNPNYHGHNYELIVSVTGEPDPETGFVMDLKLLKDLIQSKVEEPFDHKNLNLEVPEFKELNPTAENIAVVIWNKLRSEIKNEHDLEVTLYETPRNFVSYKGE

SEQ ID NO: 20888 - protein, 150 aa, unidentified
  source 1..150: note = Gramella salexigens
  REGION 1..150: note = tr|A0A1L3J6J3|A0A1L3J6J3_9FLAO 6-carboxytetrahydropterin synthase QueD OS=Gramella salexigens OX=1913577 GN=LPB144_10180 PE=4 SV=1
MSKIRITKQFSFETGHALYGYDGKCRNVHGHSYKLSVTVIGTPITDTQNVKFGMVIDFGDLKKIVKSEIVDKFDHATVFNKNTPHVELAEELKSRGHDVILVDYQPTSENMVIDFAQKIKKNLPDHIQLHSLKLQETESSFAEWYASDNN

SEQ ID NO: 20889 - protein, 136 aa, Gramella sp.
  REGION 1..136: note = tr|A0A1H1PVA0|A0A1H1PVA0_9FLAO 6-carboxy-5,6,7,8-tetrahydropterin synthase OS=Gramella sp. MAR_2010_102 OX=1250231 GN=SAMN04488552_2267 PE=3 SV=1
MRITVHRKAHFNAAHRLYRKDWDDDRNFEVFGKCSNPHYHGHNYELIVSVTGEPNLETGFVMDLKILKELIYDEVEEAFDHKNLNVEVPEFKELIPTAENIAVVIWNKLRTKIQEDHDLEVTLYETPRNFVSYKGE

SEQ ID NO: 20890 - protein, 149 aa, Gramella sp.
  REGION 1..149: note = tr|A0A2R3Z3C6|A0A2R3Z3C6_9FLAO 6-carboxy-5,6,7,8-tetrahydropterin synthase OS=Gramella sp. SH35 OX=2126553 GN=C7S20_05270 PE=3 SV=1
MSKIRITKQFSFETGHALYGYDGKCRNVHGHSYKLSVTVIGEPITDIENVKFGMVIDFGDLKKIVKSEIVDKFDHATVFNRNTPHLELARELKDRGHDVILVDYQPTSENMVIDFAKKINKHLPSHIKLHSLKLQETDTSFAEWYAIDN

SEQ ID NO: 20891 - protein, 130 aa, Granulibacter bethesdensis
  REGION 1..130: note = tr|Q0BPQ0|Q0BPQ0_GRABC 6-carboxy-5,6,7,8-tetrahydropterin synthase; OS = Granulibacter bethesdensis (strain ATCC BAA-1260 / CGDNIH1) OX=391165 GN=GbCGDNIH1_2304 PE=3 SV =1
MTIVSSSMPRVLEIGKQFTFEAAHTLHREIETDSSLRIHGHSYRVEVVLRGGVDPDSGMLMDLGLLQRKMNAVRDALDHRLLDEVPGLAPATMENIALFIWRHLAPDLPALAEVSVFRDTLGERCTCRGA

SEQ ID NO: 20892 - protein, 130 aa, Granulibacter bethesdensis
  REGION 1..130: note = tr|A0A1L3RLX6|A0A1L3RLX6_9PROT 6-carboxy-5,6,7,8-tetrahydropterin synthase; OS = Granulibacter bethesdensis OX=364410 GN=GbCGDNIH6_2304; PE = 3 SV=1
MTIVSSSTPRVLEIGKQFTFEAAHTLHREIETDSSLRIHGHSYRVEVVLRGGVDPDSGMLMDLGLLQRKMDAVRDALDHRLLDEVPGLAPATMENIALFIWRHLAPDLPALAEVSVFRDTLGERCTCRGA

SEQ ID NO: 20893 - protein, 137 aa, unidentified
  source 1..137: note = Granulicella mallensis
  REGION 1..137: note = tr|G8NYE0|G8NYE0_GRAMM Uncharacterized protein; OS = Granulicella mallensis (strain ATCC BAA-1857 / DSM 23137 / MP5ACTX8) OX=682795 GN=AciX8_3618 PE=4 SV=1
MILLTRKADFSAAHFYWNDSWTEAENFRVFGKCANRQGHGHNYTLEVTVEGEVDPVSGFVVDLKQLKDILEQEVVSVYDHRHLNHEVPEFKTAVPTTENIAIAIWRRLDGKVPNAKLHRVRVYEMPELFADFYGEGA

SEQ ID NO: 20894 - protein, 145 aa, unidentified
  source 1..145: note = Granulicella mallensis
  REGION 1..145: note = tr|G8NYD9|G8NYD9_GRAMM Uncharacterized protein; OS = Granulicella mallensis (strain ATCC BAA-1857 / DSM 23137 / MP5ACTX8) OX=682795 GN=AciX8_3617 PE=4 SV=1
MNGPIAHLSRRYRFSASHRLHVDAISPEQNREMFGKCNNPFGHGHNYIAQVTFSGPVDVATGMVTNLADLDSFAQRELLEHFDHANLNSLEFFRDRVPSTENVCVELWRMFAEYPYAKLERVRVEETGNNSFDYFGEGAKIQHEE

SEQ ID NO: 20895 - protein, 126 aa, Granulicella pectinivorans
  REGION 1..126: note = tr|A0A1I6MZ95|A0A1I6MZ95_9BACT 6-carboxy-5,6,7,8-tetrahydropterin synthase; OS = Granulicella pectinivorans OX=474950; GN = SAMN05421771_3931 PE=3 SV=1
MFEVTVEAGFSSGHYLRNYRGKCENPHGHNYKVYVTLIGEKLDDTGLLLDFKLLKQVMRPTVEYLDHRMINELEPFVTELNPSAENLAKYFFDQTSTQLHEMTNGRVRVKDCTIYETDTSFARYYA

SEQ ID NO: 20896 - protein, 137 aa, Granulicella pectinivorans
  REGION 1..137: note = tr|A0A1I6M2F1|A0A1I6M2F1_9BACT 6-pyruvoyltetrahydropterin/6-carboxytetrahydropterin synthase OS=Granulicella pectinivorans OX=474950; GN = SAMN05421771_1711 PE=4 SV=1
MILLTRKAEFSSAHFYWVDAWTPEENERVFGKCANRNGHGHNYTLEVTVGGEVDPVTGFVVDLKLLKDILEKEVVSVYDHRHLNYEVPEFASTVPTTENIAIAIWRRLDGKIPHSTLHRVRVYEMPDLFADFYGESK

SEQ ID NO: 20897 - protein, 126 aa, Granulicella rosea
  REGION 1..126: note = tr|A0A239JLJ5|A0A239JLJ5_9BACT 6-carboxy-5,6,7,8-tetrahydropterin synthase; OS = Granulicella rosea OX=474952 GN=SAMN05421770_10420 PE=3; SV = 1
MFEVTVQAGFSSGHYLRNYRGKCENPHGHNYKVFVTLVGEELDATGLLLDFKLLKQVMKPTVEYLDHFMINDLKPFDEEINPSAENLAKYFYQQTAQQMIEMTGGRVRVKDCTLYETDTSFARYYE

SEQ ID NO: 20898 - protein, 133 aa, Granulicella rosea
  REGION 1..133: note = tr|A0A239IX39|A0A239IX39_9BACT 6-pyruvoyltetrahydropterin/6-carboxytetrahydropterin synthase OS=Granulicella rosea OX=474952; GN = SAMN05421770_103326 PE=4 SV=1
MKAHLTRRYHFSASHRLHSDAYTAEENQAVFGKCNNPHGHGHNYVVAVTLAGEIDPATGMVCNLGDLDAFAREHLLARFDHMNLNTLEPFLTLVPTTENLTIEVNRIFQDFPFARLERVVVEETGNNSFVFGG

SEQ ID NO: 20899 - protein, 137 aa, unidentified
  source 1..137: note = Granulicella sibirica
  REGION 1..137: note = tr|A0A4Q0T1B4|A0A4Q0T1B4_9BACT 6-pyruvoyl tetrahydrobiopterin synthase OS=Granulicella sibirica; OX = 2479048 GN=GRAN_4425 PE=4 SV=1
MTFLTRKAEFSSAHFYWVEGWTEEENRRVFGKCANRNGHGHNYTLEVTVAGEVDPVSGFVVDLKELKEILEREVVHVYDHRHLNLEVPEFATKVPTTENIAIAIWRRLEGKIPNSRLHRVRVYEMADLFADFYGEGA

SEQ ID NO: 20900 - protein, 126 aa, unidentified
  source 1..126: note = Granulicella sibirica
  REGION 1..126: note = tr|A0A4Q0SZP6|A0A4Q0SZP6_9BACT 6-carboxy-5,6,7,8-tetrahydropterin synthase; OS = Granulicella sibirica OX=2479048 GN=GRAN_0103 PE=3 SV=1
MFEVTVEAGFSSGHYLRNYRGKCENPHGHNYKVYVTLVGKELDEAGMLLDFKLLKQVMRPTVDYLDHQMINDLEPFVSEINPSAENLAKYFFEKTSTQLHEMTAGRVRVKDCTVYETDTSFARYYE

SEQ ID NO: 20901 - protein, 136 aa, Granulicella sp.
  REGION 1..136: note = tr|A0A3N1JQW4|A0A3N1JQW4_9BACT 6-carboxy-5,6,7,8-tetrahydropterin synthase; OS = Granulicella sp. GAS466 OX=2485170 GN=EDE14_1377 PE=3; SV = 1
MIFLTRKAEFSSAHYYWNDSWSPEENERVFGKCANRNGHGHNYTLEVTVAGDVDPTSGFVVDLKQLKDILEREVVSVYDHRHLNLEVPEFKNAIPTTENIAIAIWRRLDNKIPHARLHRVRIYEIPDLFADYYGEL

SEQ ID NO: 20902 - protein, 142 aa, Granulicella sp.
  REGION 1..142: note = tr|A0A3N1JJX5|A0A3N1JJX5_9BACT 6-pyruvoyltetrahydropterin/6-carboxytetrahydropterin synthase OS=Granulicella sp. GAS466 OX=2485170; GN = EDE14_1376 PE=4 SV=1
MKAHLSRRYHFSASHRLHSEAYDAAQNFAVFGKCNNPHGHGHNYTVQVTLSGHVDPTTGMVCNLAELDAFAQKNLLARFDHTNLNAVDIFQNKVSTTENLSIEIYRIFKNFTGAHLERVHVEETSNNSFDYAGDGTPAAGTI

SEQ ID NO: 20903 - protein, 125 aa, unidentified
  source 1..125: note = Granulicella tundricola
  REGION 1..125: note = tr|E8X155|E8X155_GRATM 6-carboxy-5,6,7,8-tetrahydropterin synthase; OS = Granulicella tundricola (strain ATCC BAA-1859 / DSM 23138 / MP5ACTX9) OX=1198114 GN=AciX9_0853PE=3 SV=1
MFEVTVEAGFSSGHYLRNYRGKCENPHGHNYKVFVTLVGAELDEAGLLLDFKLLKQVMRPVVDYLDHQMINDLKPFDEINPSAENLARYFFDNTATQLDEMTQGRVKVKDCTLYETDTSFARYYE

SEQ ID NO: 20904 - protein, 146 aa, unidentified
  source 1..146: note = Granulicella tundricola
  REGION 1..146: note = tr|E8X3Q1|E8X3Q1_GRATM 6-carboxy-5,6,7,8-tetrahydropterin synthase; OS = Granulicella tundricola (strain ATCC BAA-1859 / DSM 23138 / MP5ACTX9) OX=1198114 GN=AciX9_2291PE=3 SV=1
MILLTRKAEFSAAHFYWNDALSQQENERIFGKCANRNGHGHNYTLEVTVAGEVDPITGFVVDLKKLKDILEQEVVGVYDHRHLNLEIPDFATVIPTTENIAIAIWRRLAGKIPNATLHRVRVYEMPDLFADFYGDFGPEAEAGAGN

SEQ ID NO: 20905 - protein, 134 aa, Granulosicoccus antarcticus
  REGION 1..134: note = tr|A0A2Z2NML7|A0A2Z2NML7_9GAMM Uncharacterized protein OS=Granulosicoccus antarcticus IMCC3135 OX=1192854; GN = IMCC3135_05445 PE=4 SV=1
MYSLNVREHFMIAHSFKGEIFGPAQGMHGATYVVDLEMRRPQLDDDGLVVDIGLASQQLAAVLAELNYKNLDEVPEFAGKNTTTEFLAAVIFQRIADRIKTGDLGAAAKGLSAMKVTLHESHIAWAAFEGELQA

SEQ ID NO: 20906 - protein, 120 aa, unidentified
  source 1..120: note = Grimontella sp.
  REGION 1..120: note = tr|A0A318G5A1|A0A318G5A1_9GAMM 6-carboxy-5,6,7,8-tetrahydropterin synthase OS=Grimontella sp. AG753 OX=2183905 GN=DFO55_13212 PE=3 SV=1
MSTTLFKDFMFEAAHRLPHVPAGHKCGRLHGHSFMVRLEITGEVDPHTGWIMDFAELKAAFKPTYDRLDHYYLNDIPGLENPTSEVLAKWIWDQLKPVVPLLSAVMIKETCTAGCIYRGE

SEQ ID NO: 20907 - protein, 120 aa, unidentified
  source 1..120: note = Grimontia celer
  REGION 1..120: note = tr|A0A128EZ41|A0A128EZ41_9GAMM 6-carboxy-5,6,7,8-tetrahydropterin synthase OS=Grimontia celer OX=1796497 GN=queD PE=3 SV=1
MHTELFKEFMFEAAHRLPNVPEGHKCGRLHGHSFLVRIYVAGEVDPHTGWVIDFSEIKQAFKPIYDRLDHYYLNDIEGLENPTSEVLAKWIWDQLKPELPILSKVMIKETCTAGCIYTGE

SEQ ID NO: 20908 - protein, 120 aa, Grimontia hollisae
  REGION 1..120: note = tr|A0A377HLV7|A0A377HLV7_GRIHO 6-carboxy-5,6,7,8-tetrahydropterin synthase OS=Grimontia hollisae OX=673 GN=queD PE=3 SV=1
MYTELFKEFMFEAAHRLPHVPEGHKCGRLHGHSFLVRLYVAGDVDPHTGWVIDFSEIKKVFQPIYDRLDHHYLNDIEGLENPTSEVLAKWIWDKLKPELPCLSKVMIKETCTAGCIYTGE

SEQ ID NO: 20909 - protein, 120 aa, Grimontia hollisae; identical to SEQ ID NO: 20908
  REGION 1..120: note = tr|D0IB19|D0IB19_GRIHO 6-carboxy-5,6,7,8-tetrahydropterin synthase OS=Grimontia hollisae CIP 101886 OX=675812 GN=VHA_002946 PE=3 SV=1

SEQ ID NO: 20910 - protein, 120 aa, unidentified; identical to SEQ ID NO: 20907
  source 1..120: note = Grimontia indica
  REGION 1..120: note = tr|R1J2Q4|R1J2Q4_9GAMM 6-carboxy-5,6,7,8-tetrahydropterin synthase OS=Grimontia indica OX=1056512 GN=D515_00033 PE=3 SV=1

SEQ ID NO: 20911 - protein, 169 aa, unidentified
  source 1..169: note = Grimontia indica
  REGION 1..169: note = tr|R1II37|R1II37_9GAMM Putative queD like 2; OS = Grimontia indica OX=1056512 GN=D515_04686 PE=4 SV=1
MQIHALDKAQLISDIQLGGNLNHAVCQGRRSDFALMLALLSGDATETTPLNPPYPEKVTEAQLRKAFDLPEPTRLVAEERDYELCGSQADAFHKAGLVSAKLNDCVSPSALHFPAIGTHNLGEDVYHNLSGHQRRQLDSENGKTAALDPVNLYNQLVTAKRFNEMHIQA

SEQ ID NO: 20912 - protein, 120 aa, unidentified
  source 1..120: note = Grimontia marina
  REGION 1..120: note = tr|A0A128FES6|A0A128FES6_9GAMM 6-carboxy-5,6,7,8-tetrahydropterin synthase OS=Grimontia marina OX=646534 GN=queD PE=3 SV=1
MHTELFKEFMFEAAHRLPHVPEGHKCGRLHGHSFLVRIYVAGEVDPHTGWVIDFSEIKSAFKPIYDRLDHYYLNDIDGLENPTSEVLAKWIWEQLKPELPILSKVMIKETCTAGCIYTGE

SEQ ID NO: 20913 - protein, 120 aa, Grimontia sp.; identical to SEQ ID NO: 20907
  REGION 1..120: note = tr|A0A0F5ZVK4|A0A0F5ZVK4_9GAMM 6-carboxy-5,6,7,8-tetrahydropterin synthase OS=Grimontia sp. AD028 OX=1581149 GN=RN22_14825 PE=3 SV=1

SEQ ID NO: 20914 - protein, 169 aa, Grimontia sp.
  REGION 1..169: note = tr|A0A0F5ZRC9|A0A0F5ZRC9_9GAMM Queuosine biosynthesis protein QueD OS=Grimontia sp. AD028; OX = 1581149 GN=RN22_22500 PE=4 SV=1
MQIHALDKAQLISDIQLGGNLNHAVCQGRRSDFALMLALLSGDATETTPLNPPYPEKVTETQLRKAFDLPEPTRLVAEERDYELCGSQADAFHKAGLVSAKLNDCVSPSALHFPAIGTHNLGEDVYHNLSGHQRRQLDSENGKTAALDPVNLYNQLVTAKRFNEMHIQA

SEQ ID NO: 20915 - protein, 133 aa, unidentified
  source 1..133: note = Gryllotalpicola sp.
  REGION 1..133: note = tr|A0A387BJI2|A0A387BJI2_9MICO 6-carboxytetrahydropterin synthase OS=Gryllotalpicola sp. 2DFW10M-5 OX=2419771 GN=D7I44_01380 PE=4 SV=1
MNARFSVTVRDHMMIAHSLKGEAFGPAQALHGATFVVDASFSATELDEDGIVIDIGRATEALHELVGGFSYRNLDDVPELRGVNTTTERLAQLIGDGLAARARAGEFAPARLTGITVTLHESHVAWAAYEVEL

SEQ ID NO: 20916 - protein, 334 aa, Gulbenkiania indica
  REGION 1..334: note = tr|A0A0K6GRZ6|A0A0K6GRZ6_9NEIS 6-pyruvoyl-tetrahydropterin synthase OS=Gulbenkiania indica OX=375574 GN=Ga0061063_0332 PE=4 SV=1
MTLSTLATARFEAARRLPASPDPRSQGLHGHGFRVCASSPQPGLAEALAAAVAPLDYTDLNTRFARPDDRTLAEALLRALPQGSRVALFGAPEHGVELDATEALVSYRTEFEAAHCLPHVPPGHKCGRLHGHGFGIRLVADADRHASADLVAAWAPLFLQLNHRYLNDLPGLDNPTSEVMARWLHAALLPRLPGLRWVEVHETRTAGSLFDGEHFLIWKEQRFESATPLDTEGRYTGHSYLVRLMLAGSLDETMGWLLDFGDVKDRFKPLYRQLDHNPLDTLPGLRSGSTGDVAGWIAGRLAPQLPELARVDLMTSARDGVSLCLAHGRPWPLL

SEQ ID NO: 20917 - protein, 133 aa, unidentified
  source 1..133: note = Guyparkeria sp.
  REGION 1..133: note = tr|A0A426QPS9|A0A426QPS9_9GAMM 6-carboxy-5,6,7,8-tetrahydropterin synthase OS=Guyparkeria sp. SCN-R1 OX=2341113 GN=queD PE=3 SV=1
MSTAYSLPSGGSYTLTTEVEFAAAHRLHGYDGNCARLHGHNWRVVIEVTGQRLDQVGMVVDFKVIRARAREIAKELDHAYLNEVPPFDTVNPTAENLAAYFHQALATTFDTEAYRVSAVTVWENARSAVTFRP

SEQ ID NO: 20918 - protein, 268 aa, unidentified
  source 1..268: note = Gynuella sunshinyii
  REGION 1..268: note = tr|A0A0C5W0S3|A0A0C5W0S3_9GAMM 6-pyruvoyl-tetrahydropterin synthase OS=Gynuella sunshinyii YC6258 OX=1445510 GN=YC6258_04230 PE=4 SV=1
MDFSYLHALRGIVGESWIVDIILEGELNNEGMVFDFGLVKKEIKRAIDEGMDHKFLIPASIAGLQVIEDDEDFRFCFENVTGMKLCYRSPREAVYLLDADRINTETVTPILEKHLKTIVPANVSNVKVKLRAQDIEGAYYHYSHGLKKHQGDCQRICHGHRSPIKVFIDGKRSGEEEFIIAKQWQDIYLVTREDVLHQDASYITLGYEAEQGYFELTLPKASCDFMSGDSTVELIAVHLAEHIKERHPNKKVEVQAYEGYKKGAFANA

SEQ ID NO: 20919 - protein, 162 aa, unidentified
  source 1..162: note = Gynuella sunshinyii
  REGION 1..162: note = tr|A0A0C5VS25|A0A0C5VS25_9GAMM 6-pyruvoyl-tetrahydropterin synthase OS=Gynuella sunshinyii YC6258 OX=1445510 GN=YC6258_01024 PE=4 SV=1
MHGHEGLVHIFLEGENLTKGMVTDFKHLGWLKTFLDDSLDHKFIIDRHDPNFQKIMNTAHPISSTSQSFVTVDDHQLSFQNITIPGSNDIVACRLNTDTLDSPLEQEFYQSFVIVDFVPTSENLSKWIFDIATVRMEKLGIKVSQVDWFETPKSRSTYYRSA

SEQ ID NO: 20920 - protein, 185 aa, unidentified
  source 1..185: note = Haematospirillum jordaniae
  REGION 1..185: note = tr|A0A143DC04|A0A143DC04_9PROT 6-pyruvoyl tetrahydropterin synthase OS=Haematospirillum jordaniae; OX = 1549855 GN=AY555_02215 PE=4 SV=1
MSDGHHFLITRRIGIDAGHRIMRHGSKCRHIHGHRYEVEAICHASSLHQGGEQDSMVLDFGFLKEEMMAIIDASCDHGFIAEMSDTDLLSMFCPAGKEQHEWIAGLQEAIARDGFVVTTDTHLATRLYIIPEAPTAEALARHWYRRLQDRVQIRSEGLAVLERIVVWETPNCRAEYSGQKTGVQR

SEQ ID NO: 20921 - protein, 141 aa, Haemophilus aegyptius
  REGION 1..141: note = tr|A0A3S4XXH2|A0A3S4XXH2_HAEAE 6-carboxy-5,6,7,8-tetrahydropterin synthase OS=Haemophilus aegyptius OX=197575 GN=queD PE=3 SV=1
MFKISKEFSFDMAHLLDGHDGKCQNLHGHTYKLQVEISGDLYKSGAKKAMVIDFSDLKSIVKKVILDPMDHAFIYDQTNERESQIATLLQKLNSKTFGVPFRTTAEEIARFIFNRLKHDEQLSISSIRLWETPTSFCEYQE

SEQ ID NO: 20922 - protein, 140 aa, Haemophilus ducreyi
  REGION 1..140: note = tr|A0A448KIJ2|A0A448KIJ2_HAEDC 6-carboxy-5,6,7,8-tetrahydropterin synthase OS=Haemophilus ducreyi OX=730 GN=queD PE=3 SV=1
MFKIAKEFSFDMAHMLDGHDGKCQNLHGHTYKLQVEVSGELVSNGAKRGMVMDYSDLKNIVKREILDLMDHAYIYDLNNERESQVAKLLLELDSKVYGIPSRTTAEQIAKYMFEKLAQVGLPVSLIRLWETPTSYCEYSK

SEQ ID NO: 20923 - protein, 140 aa, Haemophilus ducreyi
  REGION 1..140: note = tr|Q7VNH7|Q7VNH7_HAEDU 6-carboxy-5,6,7,8-tetrahydropterin synthase OS=Haemophilus ducreyi (strain 35000HP / ATCC 700724) OX=233412; GN = HD_0557 PE=3 SV=1
MFKIAKEFSFDMAHMLDGHDGKCQNLHGHTYKLQVEVSGELVSNGAKRGMVMDYSDLKSIVKREILDLMDHAYIYDLNNERESQVAQLLLELDSKVYGIPSRTTAEQIAKYMFEKLAQVGLPVSLIRLWETPTSYCEYSK

SEQ ID NO: 20924 - protein, 143 aa, unidentified
  source 1..143: note = [Haemophilus] felis
  REGION 1..143: note = tr|A0A1T0BC35|A0A1T0BC35_9PAST 6-carboxy-5,6,7,8-tetrahydropterin synthase; OS = [Haemophilus] felis OX=123822 GN=B0188_00940 PE=3 SV=1
MFKIAKEFSFDMAHMLDGHDGKCQNLHGHTYKLQVEIAGELHQSGAKSGMVMDYSDLKAMVKTHILEPMDHAFIYDTTSERECQVAKLLNELDSKTFGMPARTTAEQMAKFMFDRLTTVGLPVSLIRLWETPTSYCEYCQCNG

SEQ ID NO: 20925 - protein, 141 aa, Haemophilus haemolyticus
  REGION 1..141: note = tr|A0A502JI86|A0A502JI86_HAEHA 6-carboxy-5,6,7,8-tetrahydropterin synthase OS=Haemophilus haemolyticus OX=726 GN=queD PE=3 SV=1
MFKISKEFSFDMAHLLDGHDGKCQNLHGHTYKLQVEISGDLYESGAKKAMVIDFSDLKSIVKKTILDPMDHAFIYNQTSERESQIAALLQELNSKTFGVPFRTTAEEMARFIFNRLKHDEQLAISAIRLWETPTSFCEYQE

SEQ ID NO: 20926 - protein, 141 aa, Haemophilus haemolyticus
  REGION 1..141: note = tr|A0A502KPP6|A0A502KPP6_HAEHA 6-carboxy-5,6,7,8-tetrahydropterin synthase OS=Haemophilus haemolyticus OX=726 GN=queD PE=3 SV=1
MFKISKEFSFDMAHLLDGHDGKCQNLHGHTYKLQVEISGDLYESGAKKAMVIDFSDLKSIVKKTILDPMDHAFIYDQTSERESQIAALLQKLNSKTFGVPFRTTAEEMARFIFNRLKHDEQLAISAVRLWETPTSFCEYQE

SEQ ID NO: 20927 - protein, 141 aa, Haemophilus influenzae; identical to SEQ ID NO: 20921
  REGION 1..141: note = sp|P44123|QUED_HAEIN 6-carboxy-5,6,7,8-tetrahydropterin synthase OS=Haemophilus influenzae (strain ATCC 51907 / DSM 11121 / KW20 / Rd); OX = 71421 GN=queD PE=3 SV=1

SEQ ID NO: 20928 - protein, 141 aa, Haemophilus influenzae
  REGION 1..141: note = tr|A0A2S9RCC6|A0A2S9RCC6_HAEIF 6-carboxy-5,6,7,8-tetrahydropterin synthase OS=Haemophilus influenzae OX=727 GN=queD PE=3 SV=1
MFKISKEFSFDMAHLLDGHDGKCQNLHGHTYKLQVEISGDLYESGAKKAMVIDFSDLKSIVKKVILDPMDHAFIYDQTNERESQIATLLQKLNSKTFGVPFRTTAEEIARFIFNRLKHDEQLSISSIRLWETPASFCEYQE

SEQ ID NO: 20929 - protein, 140 aa, Haemophilus paracuniculus
  REGION 1..140: note = tr|A0A1T0AQV1|A0A1T0AQV1_9PAST 6-carboxy-5,6,7,8-tetrahydropterin synthase OS=Haemophilus paracuniculus OX=734 GN=B0187_08245 PE=3 SV=1
MFKIAKEFSFDMAHMLDGHDGKCQNLHGHTYKLQVEVAGELFADGAKRGMVMDYSDLKAVVKTHILDQMDHAFIYDLHSEKECKVAQLLIDLDSKVYGIPTRTTAEEMAKYMFEKLEKVGLPVSLIRLWETPTSYCEYTK

SEQ ID NO: 20930 - protein, 147 aa, Haemophilus parahaemolyticus
  REGION 1..147: note = tr|A0A369ZII5|A0A369ZII5_HAEPH 6-carboxy-5,6,7,8-tetrahydropterin synthase OS=Haemophilus parahaemolyticus OX=735 GN=queD PE=3 SV=1
MFKIAKEFSFDMAHMLDGHDGKCKNLHGHTYKLQVEVAGELVAEGAKRGMVMDYADLKAAVKTHILDPMDHAFIYDLNSPKESKVANLLIDLDSKVYGIPSRSTAEEMAKYMFDKLRKEGLPVTLIRLWETPTSYCEYSQAPHLQAV

SEQ ID NO: 20931 - protein, 147 aa, Haemophilus parahaemolyticus
  REGION 1..147: note = tr|A0A5C1QQ39|A0A5C1QQ39_HAEPH 6-carboxy-5,6,7,8-tetrahydropterin synthase OS=Haemophilus parahaemolyticus OX=735 GN=queD PE=3 SV=1
MFKIAKEFSFDMAHMLDGHDGKCKNLHGHTYKLQVEVAGELVAEGAKRGMVMDYADLKATVKTHILDPMDHAFIYDLNSPKESKVANLLIDLDSKVYGIPSRSTAEEMAKYMFDKLRKEGLTVTLIRLWETPTSYCEYSQAPHLQAV

SEQ ID NO: 20932 - protein, 141 aa, Haemophilus parainfluenzae
  REGION 1..141: note = tr|A0A1B8T2Q1|A0A1B8T2Q1_HAEPA 6-carboxy-5,6,7,8-tetrahydropterin synthase OS=Haemophilus parainfluenzae OX=729 GN=queD PE=3 SV=1
MFKVSKEFSFDMAHLLDGHDGKCQNLHGHTYKLQVEITGHLITHGAKKSMVMDFSDLKSIVKKSILDPMDHAFIYDQTSKRESKIAILLEELQSKTFGVNFRSTAEEMARFIFHRLKYDEKLPISAIRLWETPTSFCEYQE

SEQ ID NO: 20933 - protein, 151 aa, Haemophilus paraphrohaemolyticus
  REGION 1..151: note = tr|A0A369ZS17|A0A369ZS17_9PAST 6-carboxytetrahydropterin synthase QueD OS=Haemophilus paraphrohaemolyticus OX=736 GN=queD PE=4 SV=1
MFKIAKEFNFDMAHMLDGHDGKCKNLHGHTYKLQVEVAGELVAEGAKRGMVMDYVDLKAIVKTHILDPMDHAFIYDLNSPKESKVANLLIDLDSKVYGIPSRSTAEEMSKYIFDKLREVGLPVTLIRLWETPTSYCEYSQAPHLQAVKNGK

SEQ ID NO: 20934 - protein, 151 aa, Haemophilus paraphrohaemolyticus
  REGION 1..151: note = tr|I2NFS2|I2NFS2_9PAST Queuosine biosynthesis protein QueD OS=Haemophilus paraphrohaemolyticus HK411; OX = 1095743 GN=queD PE=4 SV=1
MFKIAKEFSFDMAHMLDGHDGKCKNLHGHTYKLQVEVAGELVADGAKRGMVMDYADLKAIVKTHILNPMDHAFIYDLNSPKESKVANLLIDLDSKVYGIPSRSTAEEMAKYMFDKLRKVGLPVTLIRLWETPTSYCEYSQAPHLQAVKNGK

SEQ ID NO: 20935 - protein, 140 aa, Haemophilus parasuis
  REGION 1..140: note = tr|A0A143CFU0|A0A143CFU0_HAEPR 6-carboxy-5,6,7,8-tetrahydropterin synthase OS=Haemophilus parasuis OX=738 GN=A4U84_03050 PE=3 SV=1
MFKIAKEFSFDMAHMLDGHDGKCKNLHGHTYTLQVEIAGELHTDGAKSGMVMDYSDLKAVVKQHILDKMDHAFIYDSTSEKECKVATLLQSLDSKTFGIPARTTAEQMAKYIFDTLTTEGLPVSLIRLWETPTSYCEYCR

SEQ ID NO: 20936 - protein, 140 aa, Haemophilus parasuis
  REGION 1..140: note = tr|A0A1T0AAZ2|A0A1T0AAZ2_HAEPR 6-carboxy-5,6,7,8-tetrahydropterin synthase OS=Haemophilus parasuis OX=738 GN=pts PE=3 SV=1
MFKIAKEFSFDMAHMLDGHDGKCKNLHGHTYTLQVEIAGELHTGGAKSGMVMDYSDLKAVVKQHILDKMDHAFIYDSTSEKECKVATLLQSLDSKTFGIPARTTAEQMAKYIFDTLTTEGLPVSLIRLWETPTSYCEYCR

SEQ ID NO: 20937 - protein, 141 aa, Haemophilus pittmaniae
  REGION 1..141: note = tr|F9Q7R5|F9Q7R5_9PAST 6-carboxy-5,6,7,8-tetrahydropterin synthase OS=Haemophilus pittmaniae HK 85 OX=1035188 GN=queD PE=3 SV=1
MFRVSKEFSFDMAHLLDGHDGKCQNLHGHTYKLQVEVAGDLLVDGAKKSMVMDFSDLKVVVKKAILDPMDHAFIYDQTSERESKIAMLLQELQSKTFGVNFRTTAEEMARFIFQRLKYDEKLPISAIRLWETPTSFCEYGE

SEQ ID NO: 20938 - protein, 141 aa, Haemophilus pittmaniae
  REGION 1..141: note = tr|A0A377J196|A0A377J196_9PAST 6-carboxy-5,6,7,8-tetrahydropterin synthase OS=Haemophilus pittmaniae OX=249188 GN=queD PE=3 SV=1
MFRVSKEFSFDMAHLLDGHDGKCQNLHGHTYKLQVEVAGDLLVDGAKKSMVMDFSDLKAVVKKAILDPMDHAFIYDQTSERESKIAMLLQELQSKTFGVNFRTTAEEMARFIFQRLKYDEKLPISAIRLWETPTSFCEYGE

SEQ ID NO: 20939 - protein, 141 aa, Haemophilus sp.; identical to SEQ ID NO: 20932
  REGION 1..141: note = tr|A0A1S1FR33|A0A1S1FR33_9PAST 6-carboxy-5,6,7,8-tetrahydropterin synthase OS=Haemophilus sp. HMSC61B11 OX=1608882 GN=HMPREF3263_00105 PE=3 SV=1

SEQ ID NO: 20940 - protein, 141 aa, Haemophilus sp.
  REGION 1..141: note = tr|A0A1B8QPJ6|A0A1B8QPJ6_9PAST 6-carboxy-5,6,7,8-tetrahydropterin synthase OS=Haemophilus sp. CCUG 66565 OX=1859694 GN=A9501_04910 PE=3 SV=1
MFKISKEFSFDMAHLLDGHDGKCQNLHGHTYKLQVEISGDLYESGAKKAMVIDFSDLKSIVKKTILDPMDHAFIYDQTSERESQIAALLQKLNSKTFGVPFRTTAEEMARFIFNRLKHDEQLAISAIRLWETPTSFCEYQE

SEQ ID NO: 20941 - protein, 144 aa, unidentified
  source 1..144: note = Haemophilus sputorum
  REGION 1..144: note = tr|J4TU03|J4TU03_9PAST 6-carboxy-5,6,7,8-tetrahydropterin synthase OS=Haemophilus sputorum HK 2154 OX=1078483 GN=queD PE=3 SV=1
MFKIAKEFSFDMAHMLDGHDGKCKNLHGHTYKLQVEVSGKLVAEGAKRGMVMDYSDLKTIVKREILDPMDHAYIYDLNSEKESKIARLLIELDSKVYGIPSRSTAEEMTKYMFEKLTQVGLPVSLIRLWETPTSYCEYTADESL

SEQ ID NO: 20942 - protein, 144 aa, unidentified; identical to SEQ ID NO: 20941
  source 1..144: note = Haemophilus sputorum
  REGION 1..144: note = tr|A0A369YMB2|A0A369YMB2_9PAST 6-carboxy-5,6,7,8-tetrahydropterin synthase OS=Haemophilus sputorum OX=1078480 GN=queD PE=3 SV=1

SEQ ID NO: 20943 - protein, 119 aa, Hafnia alvei
  REGION 1..119: note = tr|A0A0K0HL51|A0A0K0HL51_HAFAL 6-carboxy-5,6,7,8-tetrahydropterin synthase OS=Hafnia alvei OX=569 GN=queD PE=3 SV=1
MTTTLFKDFQFEAAHHLPHVPEGHKCGRLHGHSFLVRIEITGEVDAYTGWVMDFAELKAAFKPILDRLDHYYLNDIPGLENPTSEVLAQWIWQQLKPELPLLSAVLVKETCTAGCTYRG

SEQ ID NO: 20944 - protein, 119 aa, Hafnia alvei; identical to SEQ ID NO: 20943
  REGION 1..119: note = tr|A0A097R4Z0|A0A097R4Z0_HAFAL 6-carboxy-5,6,7,8-tetrahydropterin synthase OS=Hafnia alvei FB1 OX=1453496 GN=AT03_16285 PE=3 SV=1

SEQ ID NO: 20945 - protein, 119 aa, Hafnia paralvei; identical to SEQ ID NO: 20943
  REGION 1..119: note = tr|A0A2A2M930|A0A2A2M930_9GAMM 6-carboxy-5,6,7,8-tetrahydropterin synthase OS=Hafnia paralvei OX=546367 GN=queD PE=3 SV=1

SEQ ID NO: 20946 - protein, 254 aa, Hahella chejuensis
  REGION 1..254: note = tr|Q2SK80|Q2SK80_HAHCH 6-pyruvoyl-tetrahydropterin synthase OS=Hahella chejuensis (strain KCTC 2396); OX = 349521 GN=HCH_02115 PE=4 SV=1
MDIELSGDLDEQGMVFDFGDVKKILRQAAEDMIDHKLVVPQDLLDMNVEQKGERIEVSCGFPGDAQFYISCPADAIAALPLTEIDIESVEPLLTKHLQSVVPDNVKKVKIRLREENIQGAYYHYTHGLKKHAGNCQRIAHGHRSKLEIFADGQRSQLTEYQWAKKWKDIYIGSWEDVVQEETINGVEHMRFKYTASQGDFELLMPKKRVYMIDTDSTVEWIAEHIAQTLKKQRPQNWFTVRAYEGVKKGAIAER

SEQ ID NO: 20947 - protein, 254 aa, Hahella sp.
  REGION 1..254: note = tr|A0A3T0VVZ8|A0A3T0VVZ8_9GAMM 6-pyruvoyl tetrahydropterin reductase OS=Hahella sp. KA22 OX=1628392; GN = ENC22_10010 PE=4 SV=1
MDIELSGDLDEQGMVFDFGDVKKILRQAAEDMIDHKLVVPQDLLDMNVEQKGERIEVSCSFPGDAQFHISCPTDAIAALPLTEIDIESVEPLLTKHLQSVVPDNVKKVKIRLREENIQGAYYHYTHGLKKHAGNCQRIAHGHRSKLEIFADGQRSQLTEYQWAKKWKDIYIGSWEDVAQEETINGVEHIRFKYVASQGDFELLMPKKRVYMIDTDSTVEWIAEHIAQTLKKQRPQNWFTVRAYEGVKKGAIAER

SEQ ID NO: 20948 - protein, 283 aa, Hahella sp.
  REGION 1..283: note = tr|A0A261GII7|A0A261GII7_9GAMM 6-pyruvoyl tetrahydropterin reductase OS=Hahella sp. CCB-MM4; OX = 1926491 GN=BTA51_22055 PE=4 SV=1
MNRLFVDHLTVLDFSYLHPTRGIVGESWILDIELAGKLDEQGMVFDFGDVKKVLRDAAEDLIDHKLVIPEEIDGLEVNNDGDRIEVALNLQSNGRIECKCPTSAITLLPTNEITIDEIQPILNKHLQSVVPKNVKSVKVTLREELIQGAYYHYTHGLKKHGGNCQRIAHGHRSKLEIFTDGQRSQLIEYQWAKKWKDIYLGSKADVVKEESYQGTAHVRFGYEAQQGSFELLVPKHSTYLIDTDTTVEWIAEHIAQTLKQQRPQNVFLVRCYEGVKKGAIAER

SEQ ID NO: 20949 - protein, 133 aa, unidentified
  source 1..133: note = Hahellaceae bacterium
  REGION 1..133: note = tr|A0A2D8R7G6|A0A2D8R7G6_9GAMM Uncharacterized protein OS=Hahellaceae bacterium OX=2048971 GN=CME36_01145; PE = 4 SV=1
MYSLTVRDHMMIAHSFKGAVFGLAQKLHGATFVVDLSFETEQLDDDNLVVDIGLASEALKAILQPLNYQNLDELPMFEGQNTTTEFLAKFIFDEMASQMTAGKLGKQATAVKRLTVQLKESHVAWASYSGSLA

SEQ ID NO: 20950 - protein, 368 aa, unidentified
  source 1..368: note = Hahellaceae bacterium
  REGION 1..368: note = tr|A0A2D8RIK1|A0A2D8RIK1_9GAMM 6-pyruvoyl tetrahydropterin synthase OS=Hahellaceae bacterium; OX = 2048971 GN=CME36_19890 PE=4 SV=1
MSASSNEHLLLVAASPFEAARKVEILAENHPSRRLHGHSFLAKARVEVAANGNSMDGTEIESLYQHLRDCVAELDYQYLNDHLPVPTDENLARWISHKISDSLINSIGIQSTRDQGVDLDSQQKAHVWRRFRFEAAHKLPNVPSGHQCGRMHGHGFEVILHCEQNISDQELGIDYDRLDELWQPLYRRLNNACLNEIEGLENPTSEVLSHWLWERVKPLCESLSWVSVYETATAGCHFNGSGYRIWKEQRFESALKLENAPAGDARRNLHGHSYLVRLHLTAPLDRVMGWTVDYGDVKRLFKPAYDQLDHYLISDLPGMEQEGSASIARWIKGQLSGVLPELDRIDIYEKPGCGVVLGWGEESPILPI

SEQ ID NO: 20951 - protein, 121 aa, Haliangium ochraceum
  REGION 1..121: note = tr|D0LW73|D0LW73_HALO1 6-carboxy-5,6,7,8-tetrahydropterin synthase OS=Haliangium ochraceum (strain DSM 14365 / JCM 11303 / SMP-2) OX=502025; GN = Hoch_3503 PE=3 SV=1
MRCQLSRDYRFEAAHQLPKVPPTHKCSRVHGHSYHLTITLSGDIDPEMGWLIDFADIDQVVDPVIERLDHRLLNDIEGLENPTSELLAVWLWRALAPGLPTLVEVMVAETPTSRCVYRGDQ

SEQ ID NO: 20952 - protein, 128 aa, Haliangium ochraceum
  REGION 1..128: note = tr|D0LLG1|D0LLG1_HALO1 6-pyruvoyl tetrahydropterin synthase OS=Haliangium ochraceum (strain DSM 14365 / JCM 11303 / SMP-2) OX=502025 GN=Hoch_0540 PE=4 SV=1
MFSLRIADYLKCAHSFKGEIFGIAQILHIITYEVEAVFIVEELDENNLVVDFGASQQALTAIIGTMNYKNLDELPELNGKNTTTEFLCRYIHEYMSKAVEDLFSGTLRITMRESTVAEVSYEKPVTKS

SEQ ID NO: 20953 - protein, 160 aa, Haliea salexigens
  REGION 1..160: note = tr|A0A3C1KRI6|A0A3C1KRI6_9GAMM 6-pyruvoyl tetrahydropterin synthase OS=Haliea salexigens OX=287487; GN = DCP75_16495 PE=4 SV=1
MERLTTLYIDKESHKFSAAHFTIFSATERERLHGHNYSVSAKIVAPMGDNGFAADYNVYKRRLKSLCDALDEYLLLAGDSPYQRIEDAEDYYRVHFAREEMLFLKADTRVLPLRNATVEEFSRYLLQQLLLASEGDDLREVELCVASGPGQKGCACWHKP

SEQ ID NO: 20954 - protein, 130 aa, Haliea sp.
  REGION 1..130: note = tr|A0A2D4TCQ0|A0A2D4TCQ0_9GAMM 6-carboxy-5,6,7,8-tetrahydropterin synthase OS=Haliea sp.; OX = 1932666 GN=queD PE=3 SV=1
MDIFKEFHFEAAHRLPNVPAGHKCARLHGHSFQVRLVVSGEACEPSGWVMDFGDIKAAFKPVLNRLDHYYLNDIPGLENPTSENIARWIWNQLKPQLPGLSQIEIRETCTSGCIYRGSQDVTKPLQAGNM

SEQ ID NO: 20955 - protein, 118 aa, Haliea sp.
  REGION 1..118: note = tr|A0A2D5FB22|A0A2D5FB22_9GAMM 6-carboxy-5,6,7,8-tetrahydropterin synthase OS=Haliea sp.; OX = 1932666 GN=queD PE=3 SV=1
MEIFKDFHFEAAHRLPNVPEGHKCARLHGHSFQLRVWVSGEVTEPRGWIMDFGDLKAAVKPVIERLDHYYLNEIPGLENPTSENLARWLWAALKPALPELSCIEIRETCTSGCRYRGE

SEQ ID NO: 20956 - protein, 118 aa, unidentified
  source 1..118: note = Halieaceae bacterium
  REGION 1..118: note = tr|A0A2A5WKK7|A0A2A5WKK7_9GAMM 6-carboxy-5,6,7,8-tetrahydropterin synthase OS=Halieaceae bacterium MED-G26 OX=1986253 GN=queD PE=3 SV=1
MELYNDFRFEAAHRLPMVPAGHPCERLHGHSYFVRLTIDGEVNPETGWVMDFDDINMAFAPILAKLDHYYLNEVEGLENPTSENLARWIWVRLKPRLPILTAVEIKETCTVGCIYRGE

SEQ ID NO: 20957 - protein, 130 aa, unidentified
  source 1..130: note = Halieaceae bacterium
  REGION 1..130: note = tr|A0A359ERW5|A0A359ERW5_9GAMM 6-carboxy-5,6,7,8-tetrahydropterin synthase OS=Halieaceae bacterium OX=2026743 GN=queD PE=3 SV=1
MEIFKEFHFEAAHRLPNVPAGHKCARLHGHSFQVRLVVSGEACEPSGWVMDFGDIKAAFKPVLDRLDHYYLNDIPGLENPTSENIARWIWNELKPQLPGLSQIEVRETCTSGCIYRGSQDVTKPLQAGNM

SEQ ID NO: 20958 - protein, 159 aa, unidentified
  source 1..159: note = Halioglobus japonicus
  REGION 1..159: note = tr|A0A2N5YF96|A0A2N5YF96_9GAMM 6-pyruvoyl tetrahydropterin synthase OS=Halioglobus japonicus; OX = 930805 GN=C0029_00210 PE=4 SV=1
MTRTTTLHIDKESHKFSAAHYTIFSATERERLHGHNYSVSARIVAPMGDNGFAADYNVYKRRIASLCEKLDEYMILAADSPYQEIEEQGENYRVRFNGEEMSFLKCDSLLLPLRNATVEEFSHYLLQQLLAECADDGLVELEVWVASGPGQRASALWRQ

SEQ ID NO: 20959 - protein, 118 aa, unidentified
  source 1..118: note = Halioglobus japonicus
  REGION 1..118: note = tr|A0A2N5YDS6|A0A2N5YDS6_9GAMM 6-carboxy-5,6,7,8-tetrahydropterin synthase OS=Halioglobus japonicus OX=930805 GN=queD PE=3 SV=1
MEIYKEFHFEAAHRLPNVPEGHKCARLHGHSFHVRLTVAGPVGDESGWVMDFGDLKAAFKPILDQLDHYYLNDIEGLENPTSENIARWIWDRLSPRLPQLSAVEIRETCTSGCVYRGQ

SEQ ID NO: 20960 - protein, 118 aa, unidentified
  source 1..118: note = Halioglobus lutimaris
  REGION 1..118: note = tr|A0A2N5WYJ4|A0A2N5WYJ4_9GAMM 6-carboxy-5,6,7,8-tetrahydropterin synthase OS=Halioglobus lutimaris OX=1737061 GN=queD PE=3 SV=1
MEIYKEFHFEAAHRLPNVPEGHKCARLHGHSFHVRLCVVGDAKEPSGWVMDFGDIKTAFKPIYDQLDHYYLNEIEGLENPTSENLARWIWARLKPGLPALERVEIRETCTSGCIYRGD

SEQ ID NO: 20961 - protein, 160 aa, unidentified
  source 1..160: note = Halioglobus lutimaris
  REGION 1..160: note = tr|A0A2N5X5P2|A0A2N5X5P2_9GAMM 6-pyruvoyl tetrahydropterin synthase OS=Halioglobus lutimaris; OX = 1737061 GN=C0039_05900 PE=4 SV=1
MTEYTSLYIDKESHKFSAAHFTIFSATERERLHGHNYSVSASFLAPMGDNGFSADYNVYKNRLAQLCDELDEYMLLAADSPYQQVEEDGDFYRVHFNGEQMLFLRSDTLLLPLRNATVEEFAGYLLQKLVALSAGEGLRQIELFVASGPGQKAGAVWRSK

SEQ ID NO: 20962 - protein, 160 aa, unidentified
  source 1..160: note = Halioglobus sp.
  REGION 1..160: note = tr|A0A3L7E0U9|A0A3L7E0U9_9GAMM 6-pyruvoyl tetrahydropterin synthase OS=Halioglobus sp. U0301; OX = 2283635 GN=DWB85_10395 PE=4 SV=1
MTDYTSLHIDKEKHKFSAAHYTIFSARERERLHGHNYSVSARFVAPLGDNGFSADYNVYKNRLAALCEELDEYMLLAAESPHQRIEEEGDYYRVHFNGEEMLFLRADTLVLPIRNATVEEFSRYLLHKLVDQSAGEGLIEIELFVASGPGQKAGSLWRGG

SEQ ID NO: 20963 - protein, 117 aa, unidentified
  source 1..117: note = Halioglobus sp.
  REGION 1..117: note = tr|A0A3L7DXU9|A0A3L7DXU9_9GAMM 6-carboxy-5,6,7,8-tetrahydropterin synthase OS=Halioglobus sp. U0301 OX=2283635 GN=queD PE=3 SV=1
MEIYKEFHFEAAHRLPNVPEGHKCARLHGHSFHVRLSVSGDAPEPSGWVMDFGDIKSAFKPIYDQLDHYYLNDIPGLENPTSENLARWIWTRLQPALPGLTAVEIRETCTSGCVYRG

SEQ ID NO: 20964 - protein, 118 aa, Haliscomenobacter hydrossis
  REGION 1..118: note = tr|F4KYZ7|F4KYZ7_HALH1 6-carboxy-5,6,7,8-tetrahydropterin synthase; OS = Haliscomenobacter hydrossis (strain ATCC 27775 / DSM 1100 / LMG 10767 / O) OX=760192 GN=Halhy_4 852 PE=3 SV=1
MELYKEFSFDAAHFLPNVSPDHKCAHMHGHTYYVRILLEGPLDPVLGWVVDFAEVKSAWKPLEKILDHKMLNDIVGLENPTAEIIAVWIWERMKPKLPLLKSIEVKETPTTGVVYSGK

SEQ ID NO: 20965 - protein, 148 aa, Haloactinopolyspora alba
  REGION 1..148: note = tr|A0A2P8DF17|A0A2P8DF17_9ACTN 6-pyruvoyltetrahydropterin/6-carboxytetrahydropterin synthase OS=Haloactinopolyspora alba OX=648780; GN = CLV30_12840 PE=4 SV=1
MTLHTVTVRHNFETAHRLPPLAGKCQNLHGHSWWADITVAGPIDEVGTVVEFGRLKAELRDWIDTHLDHGAMLGHDDPLVPLLRDMGSKVYVIGWDAYTRDLSWPTVESAALLLARVTTLILDSLDASADVTHVRVRETHVNEAGWSA

SEQ ID NO: 20966 - protein, 177 aa, unidentified
  source 1..177: note = Haloarcobacter mediterraneus
  REGION 1..177: note = tr|A0A4Q1B4Y9|A0A4Q1B4Y9_9PROT 6-pyruvoyl tetrahydrobiopterin synthase OS=Haloarcobacter mediterraneus OX=2023153 GN=CP965_05865 PE=4 SV=1
MTWKISKSFDFCYGHRVWSQTLNSEYSLDPCLKCRHLHGHQGKIVIFLEASELKDGMVTDFKHLNWFKQFLDDVLDHKFIIDINDPLYPTLLPHIKKEDLIFFEQGYYIPNMDKLKDEPLHIKEMYEGYVIVEFVPTSENLSAWFLEIASKKMQKIGIKVASVQFEETPKSKSHVFA

SEQ ID NO: 20967 - protein, 155 aa, Halobacillus aidingensis
  REGION 1..155: note = tr|A0A1H0S7L8|A0A1H0S7L8_HALAD 6-pyruvoyltetrahydropterin/6-carboxytetrahydropterin synthase OS=Halobacillus aidingensis OX=240303; GN = SAMN05421677_11753 PE=4 SV=1
MYGFTIVENLQKMDQDIKHHELKYHQKRVLVSKEFTFDAAHHLHCYEGKCKNLHGHTYKVIFGVSGFVDDIGLIIDFGDIKKIWKEQIEVHLDHRYLNDTLPNMNTTAENMVVWIYEKMEEALKDDPNKCRVEFVKLYETPTSFAEARREWMMDE

SEQ ID NO: 20968 - protein, 155 aa, Halobacillus alkaliphilus
  REGION 1..155: note = tr|A0A1I2TFX0|A0A1I2TFX0_9BACI 6-pyruvoyltetrahydropterin/6-carboxytetrahydropterin synthase OS=Halobacillus alkaliphilus OX=396056; GN = SAMN05216353_16912 PE=4 SV=1
MYGFTIVENLQKIDQDIKRHELKYHKKRVMVSKEFTFDAAHHLHCYEGKCKNLHGHTYRVVFGISGYVDDIGIVIDFGDIKNIWKEQIEIHLDHRYLNDTLPHMNTTAENMVVWIYEKMAAALIERSEGHRMEFVKLYETPTSFAEARREWMADE

SEQ ID NO: 20969 - protein, 155 aa, Halobacillus dabanensis
  REGION 1..155: note = tr|A0A1I3XV40|A0A1I3XV40_HALDA 6-pyruvoyltetrahydropterin/6-carboxytetrahydropterin synthase OS=Halobacillus dabanensis OX=240302; GN = SAMN04487936_109153 PE=4 SV=1
MYDFTIVENLQKIDQDIKRHELKYHQKRVLVSKEFTFDAAHHLHCYEGKCKNLHGHTYKVIFGVSGFTDDIGLVIDFGDLKKIWKEKIEVHLDHRYLNDTLPNMNTTAENMVVWIYEKMNEALKGNANDCRVEFVKLYETPTSYAEARREWMNCE

SEQ ID NO: 20970 - protein, 155 aa, Halobacillus faecis
  REGION 1..155: note = tr|A0A511WZ55|A0A511WZ55_9BACI 6-carboxytetrahydropterin synthase QueD OS=Halobacillus faecis OX=360184 GN=ygcM PE=4 SV=1
MYGFTIVESLQKIDQDIKRHELKFHQKRVLVSKEFTFDAAHHLHCYEGKCKNLHGHTYKVIFGISGFTDDIGLVIDFGDIKNIWKKQIEVHLDHRYLNDTLPNMNTTAENMVVWIYEKMEEALKGDSNNCRVEFVKLYETPTSYAEARREWMINE

SEQ ID NO: 20971 - protein, 155 aa, Halobacillus halophilus
  REGION 1..155: note = tr|I0JJQ1|I0JJQ1_HALH3 6-pyruvoyl tetrahydrobiopterin synthase OS=Halobacillus halophilus (strain ATCC 35676 / DSM 2266 / JCM 20832 / NBRC 102448/ NCIMB 2269) OX=866 895 GN=ygcM PE=4 SV=1
MYGFTIVENLQKIDQDIKRHELKYHKKRVMVSKEFTFDAAHHLHCYEGKCKNLHGHTYRVIFGISGYVDDIGIVIDFGDIKDIWKEQIEIHLDHRYLNDTLPNMNTTAENMVVWIYEKMEAALAGQPEGHRVEFVKLYETPTSFAEARREWMENE

SEQ ID NO: 20972 - protein, 155 aa, Halobacillus karajensis
  REGION 1..155: note = tr|A0A024P512|A0A024P512_9BACI 6-carboxy-5,6,7,8-tetrahydropterin synthase; OS = Halobacillus karajensis OX=195088 GN=queD PE=4 SV=1
MYGFTIVENLQKFDEDIKRHELKYHQKRVLVSKEFTFDAAHHLHCYEGKCKNLHGHTYKVIFGISGFVDEIGLVIDFGDIKKIWKEQIEVHLDHRYLNDTLPNMNTTAENMVVWIYEKMEEALQGHSNHCRVEFVKLYETPTSYAEARREWMTVE

SEQ ID NO: 20973 - protein, 155 aa, Halobacillus litoralis
  REGION 1..155: note = tr|A0A410MAW9|A0A410MAW9_9BACI 6-carboxytetrahydropterin synthase QueD OS=Halobacillus litoralis OX=45668 GN=queD PE=4 SV=1
MYGFTIVENLQKIDQDIKRQELKYHQKRVMVSKEFSFDAAHHLHCYEGKCKNLHGHTYKVIFGISGFVDDIGLVIDFGEIKKIWKEQIEIHLDHRYLNDTLPNMNTTAENMVVWIYEKMEESLESDQKDCRVEFVKLYETPTSFAEARREWMTHE

SEQ ID NO: 20974 - protein, 155 aa, Halobacillus mangrovi
  REGION 1..155: note = tr|A0A1W5ZY85|A0A1W5ZY85_9BACI 6-carboxytetrahydropterin synthase QueD OS=Halobacillus mangrovi OX=402384 GN=HM131_16285 PE=4 SV=1
MYGFTIVENLQKIDEDIKRHELKYHKKRVMVSKEFTFDAAHHLHCYEGKCKNLHGHTYRVVFGISGFTDDIGIVMDFGDIKEIWKEQIEVHLDHRYLNDTLPNMNTTAENMVVWIYEKMEKALSTHPQDCRVEFVKLYETPTSYAEARREWMTHE

SEQ ID NO: 20975 - protein, 155 aa, Halobacillus salinus
  REGION 1..155: note = tr|A0A4Z0H3Y7|A0A4Z0H3Y7_9BACI 6-carboxytetrahydropterin synthase QueD OS=Halobacillus salinus OX=192814 GN=queD PE=4 SV=1
MFGFTIVENLQKIDQDIKREELKYHQKRVMVSKEFTFDAAHHLHCYEGKCKNLHGHTYKVIFGISGFVDEIGIVMDFGDIKEIWKEQIEVHLDHRYLNDTLPNMNTTAENMVVWIYEKMEEALKGHPQICRVEFVKLYETPTSFAEVRREWMTNE

SEQ ID NO: 20976 - protein, 155 aa, Halobacillus sp.
  REGION 1..155: note = tr|A0A0B0D9U3|A0A0B0D9U3_9BACI 6-pyruvoyl tetrahydrobiopterin synthase OS=Halobacillus sp. BBL2006; OX = 1543706 GN=LD39_02220 PE=4 SV=1
MYGFTIVENLQKIDQDIKRHELKYHQKRVMVSKEFTFDAAHHLHCYEGKCKNLHGHTYRVVFGISGLTDEIGIVMDFGDIKEIWKEQIEIHLDHRYLNDTLPNMNTTAENMVVWIYEKMEKALNGHPQECRVEFVKLYETPTSYAEARREWMNNE

SEQ ID NO: 20977 - protein, 155 aa, Halobacillus sp.
  REGION 1..155: note = tr|L5NEA1|L5NEA1_9BACI 6-pyruvoyl tetrahydrobiopterin synthase OS=Halobacillus sp. BAB-2008; OX = 1246484 GN=D479_01065 PE=4 SV=1
MFGFTIVENLQKIDEDIKRQDLKYHSKRVMVSKEFTFDAAHHLHCYEGKCKNLHGHTYKVIFGISGFVDDIGLVIDFGDIKQIWKESIEVHLDHRYLNDTLPNMNTTAENMVVWIYNQMEEALLNRGDGSRVEFVKLYETPTSYAEARREWMRDE

SEQ ID NO: 20978 - protein, 155 aa, Halobacillus trueperi
  REGION 1..155: note = tr|A0A3D8VT44|A0A3D8VT44_9BACI 6-carboxytetrahydropterin synthase QueD OS=Halobacillus trueperi OX=156205 GN=queD PE=4 SV=1
MYGFTIVENLQKMNQDIKHHELKYHQKRVLVSKEFTFDAAHHLHCYEGKCKNLHGHTYKVIFGVSGFVDDIGLVIDFGDIKKIWKEQIEVHLDHRYLNDTLPNMNTTAENMVVWIYEKMEEALKDDPNKCRVEFVKLYETPTSFAEARREWMMDE

SEQ ID NO: 20979 - protein, 155 aa, Halobacillus trueperi
  REGION 1..155: note = tr|A0A3E0J6S1|A0A3E0J6S1_9BACI 6-carboxytetrahydropterin synthase QueD OS=Halobacillus trueperi OX=156205 GN=queD PE=4 SV=1
MYGFTIVENLQKMDQDIKQHELKYHQKRVLVSKEFTFDAAHHLHCYEGKCKNLHGHTYKVIFGVSGFVDDIGLVIDFGDIKKIWKEQIEIHLDHRYLNDTLPNMNTTAENMVVWIYEKMEEALKEDPNKCRVEFVKLYETPTSFAEARREWMMDE

SEQ ID NO: 20980 - protein, 145 aa, unidentified
  source 1..145: note = Halobacteriovoraceae bacterium
  REGION 1..145: note = tr|A0A2E2U9F5|A0A2E2U9F5_9PROT 6-pyruvoyl tetrahydropterin synthase OS=Halobacteriovoraceae bacterium OX=2026745 GN=CME65_07140 PE=4 SV=1
MAKFRSTKLLKGYPCTHRQWKANSHCRFVHGYSRSFYFEFESSELTEEMWVMDFGGLKEVKVWLAHMFDHTFLAAEDDPYLDTFKKLDSEGVIQLRTLPNAGMEGTAEYVFTHVSQIINKNTNGRVWITKVEVRENEKNSAMYLP

SEQ ID NO: 20981 - protein, 206 aa, unidentified
  source 1..206: note = Halobacteriovoraceae bacterium
  REGION 1..206: note = tr|A0A2E3W5Z2|A0A2E3W5Z2_9PROT Uncharacterized protein OS=Halobacteriovoraceae bacterium OX=2026745; GN = CME64_17785 PE=4 SV=1
MYLFIYHLKTHGPRLGAKTRFALFSISECSYKLSHLKERLFLDFNYSIKVYKQYFNFAASHFLIFDDGSREPLHGHNYRVMVKGEAPKLEGDMVFDFLDIKPIVREVCDSLDHKLLLPKENQHLKIHDKGKSFKLTTPDESEFVIPKQDVLVLPISNTSAERLAIYICEEITRITQERFNFRFSAFEVEVEETPGQSAVYAHKETL

SEQ ID NO: 20982 - protein, 174 aa, unidentified
  source 1..174: note = Halobacteriovorax marinus
  REGION 1..174: note = tr|A0A1Y5F3N0|A0A1Y5F3N0_9PROT Uncharacterized protein OS=Halobacteriovorax marinus OX=97084; GN = A9Q84_17190 PE=4 SV=1
MQTNYTLKVFKEYFNFACAHFMIFKDGTREPLHGHNYRVSVNGHHNTLDGDMVLDFLDLKPIVRSVCDELDHKLLIQGENPQLEMSKSENQWEFKTPDGSRFSIPASDVLVLPIKNTSVERIAGHLAKVIDLELQKKFNFSFNILEVEVEESKGQSVIFRLIKEDQKEDQKEDI

SEQ ID NO: 20983 - protein, 147 aa, unidentified
  source 1..147: note = Halobacteriovorax marinus
  REGION 1..147: note = tr|E1X654|E1X654_HALMS Uncharacterized protein; OS = Halobacteriovorax marinus (strain ATCC BAA-682 / DSM 15412 / SJ) OX=862908 GN=BMS_2613 PE=4 SV=1
MSDFISTKHFIGFPCTHRQWKADSHCKYVHGYSRSFYFEFKSTELTKEGWVVDFGGLKEIKKWLDYMFDHTFLASSDDPFLETFKQLDKDGVIQLRVLPNAGMEGTAQYVYDEVNPMIKKLTHNRAWISRLEVRENEKNSAILIPKD

SEQ ID NO: 20984 - protein, 161 aa, unidentified
  source 1..161: note = Halobacteriovorax sp.
  REGION 1..161: note = tr|A0A2D5YP91|A0A2D5YP91_9PROT Uncharacterized protein OS=Halobacteriovorax sp. OX=2020862 GN=CME69_07660; PE = 4 SV=1
MKYAIKVYKEYFNFACSHFLIFKDGTREPLHGHNYKVTLKGDALDLEGDMVFDFLDIKPIVREVCDSLDHKLLLPSENLNLRLDTKDDNIEIRPKDGSFFSIPKSDVLVLPLPNTSAERLAIYLANEINDLTKKRFNFSFSSLEIEVEETKGQCAIYKLEN

SEQ ID NO: 20985 - protein, 147 aa, unidentified
  source 1..147: note = Halobacteriovorax sp.
  REGION 1..147: note = tr|A0A2G8HZB4|A0A2G8HZB4_9PROT 6-pyruvoyl tetrahydropterin synthase OS=Halobacteriovorax sp. JY17; OX = 2014617 GN=CES88_07690 PE=4 SV=1
MTEFISTKHFIGFPCTHRQWKADSHCKYVHGYSRSFYFEFKSTELTKEGWVVDFGGLKEVKVWLDDMFDHTFLASSDDPFLDTFKQLDIDGVIQLRVLPNAGMEGTAQYVYDQVNPMIKKLTNNRAWISRLEVRENEKNSAILIPKE

SEQ ID NO: 20986 - protein, 128 aa, unidentified
  source 1..128: note = Halodesulfovibrio marinisediminis
  REGION 1..128: note = tr|A0A1N6DN51|A0A1N6DN51_9DELT 6-carboxy-5,6,7,8-tetrahydropterin synthase; OS = Halodesulfovibrio marinisediminis DSM 17456 OX=1121457; GN = SAMN02745161_0325 PE=3 SV=1
MAKGIWRLTVRSDFAAAHALRNYDGKCENIHGHNFAVEAVVEGDKLSEDVEILLDFKVMKNKLKEVTELIDHKDLNCTPPFDKMNPSSENLARFIYQELGKRIESYGVRVYSVTVSEKAAQSATYLEL

SEQ ID NO: 20987 - protein, 118 aa, unidentified
  source 1..118: note = Halodesulfovibrio marinisediminis
  REGION 1..118: note = tr|A0A1N6I893|A0A1N6I893_9DELT 6-carboxy-5,6,7,8-tetrahydropterin synthase; OS = Halodesulfovibrio marinisediminis DSM 17456 OX=1121457; GN = SAMN02745161_2509 PE=3 SV=1
MEIYVSLSFDAAHRLPNVPEGHKCGNLHGHTFVAEIYVSGAVDEASGWVIDFGDIKTVAKPVIEQLDHHYLNDIAGLDNPTSENIAVWMWNKLKPTLPGLSKIVIKESPTSASIYTGA

SEQ ID NO: 20988 - protein, 128 aa, unidentified
  source 1..128: note = Halodesulfovibrio spirochaetisodalis
  REGION 1..128: note = tr|A0A1B7XQ60|A0A1B7XQ60_9DELT 6-carboxy-5,6,7,8-tetrahydropterin synthase; OS = Halodesulfovibrio spirochaetisodalis OX=1560234; GN = SP90_00795 PE=3 SV=1
MANGIWRLTVRSDFAAAHALRNYDGKCENIHGHNFAVEAVVEGDKLSDDVEILLDFKIMKTTLKEVTELLDHKDLNCTAPFDTMNPSSENLARFIYQELGKRIESYGVRVHSVTVSEKAAQSATYLEL

SEQ ID NO: 20989 - protein, 288 aa, unidentified
  source 1..288: note = Halomicronema excentricum
  REGION 1..288: note = tr|A0A4Q7E895|A0A4Q7E895_9CYAN 6-pyruvoyl tetrahydropterin synthase OS=Halomicronema excentricum str. Lakshadweep OX=2294035 GN=DYY88_07980 PE=4 SV=1
MECVINRRAQFSASHRYWLPELSEAENQAKFGPCSRAPGHGHNYVLYVSMVGELDEYGMVLNLSDVKQVIKREVTSQLDFAYLNDVWPEFQATLPTTEHMARVLWQRLSPHLPITKIQLFEHPELWAEYTGNNMEAYLTISTHFSAAHRLALPTLSFDENVEIYGKCARPNGHGHNYHLEVTVKGEIEPRTGMIADLEELQKAIDDHVVEPFDHTFLNKDIPYFEKVVPTAENIAVHIRDLLREPIAQTGAQLHKVKLIESPNNSAEVYCTADLTPTAESTRPELAAV

SEQ ID NO: 20990 - protein, 289 aa, unidentified
  source 1..289: note = Halomicronema hongdechloris
  REGION 1..289: note = tr|A0A1Z3HFU7|A0A1Z3HFU7_9CYAN 6-carboxy-5,6,7,8-tetrahydropterin synthase; OS = Halomicronema hongdechloris C2206 OX=1641165 GN=queD; PE = 4 SV=1
MTCIIHRRAQFSASHRYWLPELSAADNADQFGLCTKAPGHGHNYVLYVSMAGQLDEYGMVLNLSDVKTVIKREVTSQLDFAYLNDVWPEFQQTLPTTEYMAYVLWHRLVSYLPLVNIRLYEHPELWADYTGDSMEAYLTISTHFSAAHRLALPQLSYEENCAIYGKCARPHGHGHNYHLEVTVCGEIDSRTGMIADLGELQVAIDTHVVEPFDHTFLNKDVPYFAEVVPTAENIAVHIRDRLRQPIQATGARLHKVKLIESPNNSVEVYCSSSASLADQNRVAAPAMAT

SEQ ID NO: 20991 - protein, 132 aa, unidentified
  source 1..132: note = Halomonadaceae bacterium
  REGION 1..132: note = tr|A0A139C7X4|A0A139C7X4_9GAMM Uncharacterized protein OS=Halomonadaceae bacterium T82-2 OX=1783518; GN = AWU55_2436 PE=4 SV=1
MFSLTVRDQMMIAHSFQGEVFGPAQHRHGATYVVDVTFKRPELDEHDLVVDIGLAGDTLKAVLAEFHLTDLDELDAFRGRNTTTEFMAHAVFERMARRIRDGELGEGAKALTHLKVTLHESHIAWAGYEGAL

SEQ ID NO: 20992 - protein, 281 aa, unidentified
  source 1..281: note = Halomonadaceae bacterium
  REGION 1..281: note = tr|A0A139CD24|A0A139CD24_9GAMM Uncharacterized protein OS=Halomonadaceae bacterium T82-2 OX=1783518; GN = AWU55_912 PE=4 SV=1
MTLFVNGLSHLDASLWSPERGLIGVSWHVDVALHGKLGEDGMLFDFGGVKPWIKTVIDDGPDHTLLVPTAAAGVTVSECREGLMVRTTAPYPMEIRAPRQAYTLLPWARIDRERLATHLSEQLTRHAPPRVDGVEVMLRDEIIDAAGAYTYSHGLKHHDGNCQRIAHGHRSRLHIWCAGRRRPDLEHHWGEYLDDRYLLHAEDCEPDSEAGSTAIRYSARQGHFYLRLPAERCEILPTPTTVEHIARWVAEQTARHHAPGQRVRVQAFEGIDKGALAEAGP

SEQ ID NO: 20993 - protein, 132 aa, unidentified
  source 1..132: note = Halomonas aestuarii
  REGION 1..132: note = tr|A0A1J0VI07|A0A1J0VI07_9GAMM Uncharacterized protein OS=Halomonas aestuarii OX=1897729 GN=BOX17_12145; PE = 4 SV=1
MYRLNVRDHFMIAHSFRGEVFGPAQRLHGATYVVDVTFQRRELDDNGLVVDIGLAGEALKRVLAEFNFQNLDEVEEFQGRNTTTEFMARVLFERLATAIQLGHLGEAALGLDSLCVTLHESHVAWASYEGAL

SEQ ID NO: 20994 - protein, 281 aa, unidentified
  source 1..281: note = Halomonas aestuarii
  REGION 1..281: note = tr|A0A1J0VBU3|A0A1J0VBU3_9GAMM 6-pyruvoyl tetrahydropterin synthase-related protein OS=Halomonas aestuarii OX=1897729 GN=BOX17_00090 PE=4 SV=1
MTLFVNRLTHLDVSLWCPTRGLVGASWRVDVELDGELGEDGMLFDFGEVKPWIKSSIDAGVDHTLLVPARARGVTLHDCREGLCLRSDTPYPLELRAPRQALSLLPWPEITPERLADYLSAELMRRPPPRVSDIRLTLSEEAIDGAAYTYSHGLKRHAGNCQRIAHGHRSRLHVWQGGQRMPALEERWADWLADRYLVDEADIVEDDEPDFRDLLTSRYRAEQGQFFLRLPRHRCAVLPTPTTVEHIAAWLAEAITRESGRATRVQAFEGIDKGAIAEARP

SEQ ID NO: 20995 - protein, 284 aa, Halomonas alkaliantarctica
  REGION 1..284: note = tr|A0A4R7Y4F7|A0A4R7Y4F7_9GAMM 6-pyruvoyl tetrahydropterin synthase-like protein OS=Halomonas alkaliantarctica OX=232346 GN=BDK62_12320 PE=4 SV=1
MSLFVNQLTHIDVSIWCSERGLVGCSWQVDALLDGELGEDGMLFDFGEVKPWIKRTLDSGLDHTLLVPTQAPGVIVTECPEGVCIRTTTPYPMEVRGPKEAFSLLPWKTIELDTVAEYLSQQLTEQRPNNVHQVTLTLNDEAIEGAAYGYTHGLKRHLGNCQRIAHGHRSRLHILQQGVRQLKLEQQWAAWLDNRYLLEEADITSRDNDFLICAYRAAQGDFSITLPQSLCAILPGPTTVENIAAWLAKEVATQSGVTTRIQAFEGINKGAIAMSTPSATPSQL

SEQ ID NO: 20996 - protein, 132 aa, Halomonas alkaliantarctica
  REGION 1..132: note = tr|A0A4R7YMZ1|A0A4R7YMZ1_9GAMM 6-pyruvoyl-tetrahydropterin synthase OS=Halomonas alkaliantarctica OX=232346 GN=BDK62_104157 PE=4 SV=1
MFRLCVRDHFMIAHSFNGEIFGPAQRTHGATYVVDVVFQRPELDEDGLVIDIGLASETVKLVLAGYNFCNLDEVPEFAGKNTTTEFMAKVIFDQLAKAIGEGKMGITAKGITHMEIKLHESHVAWASYEGAL

SEQ ID NO: 20997 - protein, 132 aa, Halomonas alkaliphila
  REGION 1..132: note = tr|A0A386WX03|A0A386WX03_9GAMM 6-carboxytetrahydropterin synthase OS=Halomonas alkaliphila OX=272774 GN=CUU95_01315 PE=4 SV=1
MYRLCVRDHFMIAHSFNGEIFGPAQRTHGATYVVDVVFQRPELDQDGLVIDIGLASETVKEVLADYNYRNLDEVSEFSGKNTTTEFMAKVIFDQLAAAIKAGKMGTTAQGLTHMEIKLHESHVAWASYEGAL

SEQ ID NO: 20998 - protein, 279 aa, Halomonas alkaliphila
  REGION 1..279: note = tr|A0A386X4R2|A0A386X4R2_9GAMM 6-pyruvoyl tetrahydropterin synthase-related protein OS=Halomonas alkaliphila OX=272774 GN=CUU95_16075 PE=4 SV=1
MALFVNRLSHIDVSLWCPTKGLVGCSWQVDAQLDGELGEDGMLFDFGEVKPWIKRTLDSGLDHTLLVPINAPGIKVTDCAEGICIRTATPYEMEVRGPAQAFTLLPWDTITVERVTHYLSSQLTKQEQRPANVHSVTLTLSDEPIDGAAYGYTHGLKRHLGNCQRIAHGHRSRLFIWQHQARQPALEQRWAAWLDNRYLLEKADIESQIDEKLTCRYQSAQGTFSITLPQERCCVLPKPTTVENIALWLAKSIAEHSGHKTLVQAFEGIDKGATAEASP

SEQ ID NO: 20999 - protein, 132 aa, Halomonas andesensis
  REGION 1..132: note = tr|A0A433KUR7|A0A433KUR7_9GAMM 6-carboxytetrahydropterin synthase OS=Halomonas andesensis; OX = 447567 GN=ELY33_03280 PE=4 SV=1
MYRLCVRDHFMIAHSFNGEIFGPAQRTHGATYVVDVVFQRPELDQDGLVIDIGLASETVKEVLADYNYRNLDEVSEFTGKNTTTEFMAKVIFDQLAEAIKAGKMGATAQGLTHMEIKLHESHVAWASFEGAL

SEQ ID NO: 21000 - protein, 277 aa, Halomonas andesensis
  REGION 1..277: note = tr|A0A3S0W9U3|A0A3S0W9U3_9GAMM 6-pyruvoyl tetrahydropterin synthase-related protein OS=Halomonas andesensis OX=447567 GN=ELY33_04055 PE=4 SV=1
MALFVNRLSHIDVSLWCPTKGLVGCSWQVDAQLDGELGEDGMLFDFGEVKPWIKRTLDSGLDHTLLVPINAPGIEVTDCNEGICIRTASPFEMEVRGPAQAFTLLPWGAITLECITNYLSAQLTEQRPANVHSVTLTLSDEPIVGAAYGYTHGLKRHLGNCQRIAHGHRSRLFIWQQQARQPALEEHWAAWLDNRYLLEKDDIESQIDGKLTCRYQSAQGAFSITLPQERCCVLPKPTTVENIALWLAKSIAEHSGHKTLVQAFEGIDKGATAEAMP

SEQ ID NO: 21001 - protein, 132 aa, Halomonas anticariensis
  REGION 1..132: note = tr|S2KL65|S2KL65_HALAF Uncharacterized protein; OS = Halomonas anticariensis (strain DSM 16096 / FP35); OX = 1121939 GN=L861_10065 PE=4 SV=1
MFSLTVRDHFMIAHSFNSETFGPAQRCHGATYVVDVTFKRPDLDRDDLVVDIAQANKALHEVLTEFNLHNLDEFEEFKGHNTTTEFMARVVFERLSKAVHKGRLGDTAKGLTAMCVTLHESHVAWASYEGAL

SEQ ID NO: 21002 - protein, 281 aa, Halomonas anticariensis
  REGION 1..281: note = tr|S2KVD0|S2KVD0_HALAF Uncharacterized protein; OS = Halomonas anticariensis (strain DSM 16096 / FP35); OX = 1121939 GN=L861_04340 PE=4 SV=1
MTLFVNALTQLDVSLWCPKRGLIGASWHIDAELDGELGEDGMLFDFGEVKPWIKSRLDAGADHTLLIPTRAPGITVHECNEGLCIRAQSPYPMEVRGPRQAFTLLPWSEITTERLGTHFSHELMRRPPARVSDIRLTLREENIDGEAYSYSHGLKRHTGNCQRIAHGHRSRLHIWKNGQRDAQLEAQWAKWLADRYLVDEEDLVADANDEVYGSLTTRYQAPQGRFFLRLPSERFAVLPSPTTIEHIATWLAAKIAHDIGHRIRVQAFEGINKGAIAEARP

SEQ ID NO: 21003 - protein, 277 aa, Halomonas aquamarina
  REGION 1..277: note = tr|A0A1H8IMX7|A0A1H8IMX7_9GAMM 6-pyruvoyl tetrahydropterin synthase OS=Halomonas aquamarina OX=77097; GN = SAMN04490369_102033 PE=4 SV=1
MALFVNHLTHIDVSLWCPTKGLVGCSWQVDAQLEGELGEDGMLFDFGEVKPWIKRTLDSGLDHTLLVPTQAPGVEVSECDEGLCIRTTTPYVMEVRGPTEAFTLLPWASITLERVTQYLSAQLTEQRPANVERVTLTLSDELINGAAYGYSHGLKRHSGNCQRIAHGHRSRLHIFQEQQRQPQLEQQWGAWLDNRYLLEEADIAEHSESQLTCRYEAAQGSFSITLPSERCSVLPKPTTVENIALWLADQIAKQTGTATHVYAFEGIDKGATAQASP

SEQ ID NO: 21004 - protein, 277 aa, Halomonas arcis
  REGION 1..277: note = tr|A0A1H0FA56|A0A1H0FA56_9GAMM 6-pyruvoyl tetrahydropterin synthase OS=Halomonas arcis OX=416873; GN = SAMN04487951_109173 PE=4 SV=1
MGLFVNQLTHIDASLWCPKTGLKGVSWQVDALLEGELGEDGMLFDFGDVKPWIKRTLDNGLDHTLLLPVDAPGVDVSPCEEGLCVRTTSPYPMEVRGPKEAFTLLTSTTVERASVAKLLSDTLTEQRPANVSRVQLTLSDEAIEGAAYGYSHGLKRHTGNCQRIAHGHRSRLYIWQRDSRQHVLEQQWATWLDNRYLVEAGDITAHDQQTLTCRYQAAQGTFTITLPSERCAVLPTPTTVENIARWLAERIATQSHETTRIQAFEGFNKGAIAQVNV

SEQ ID NO: 21005 - protein, 132 aa, Halomonas arcis
  REGION 1..132: note = tr|A0A1H0HBL2|A0A1H0HBL2_9GAMM 6-pyruvoyl-tetrahydropterin synthase OS=Halomonas arcis; OX = 416873 GN=SAMN04487951_1158 PE=4 SV=1
MYRLCVRDHFMIAHSFKGEIFGPAQRTHGATYVVDVIFQRPELDGDGLVIDIGLASETVKAVLSGYNYQNLDEVSELHGKNTTTEFMAKVIFDQLAAAINAGDMGTTARGLTHMEVKLHESHVAWASFEGAL

SEQ ID NO: 21006 - protein, 416 aa, Halomonas axialensis
  REGION 1..416: note = tr|A0A455VE37|A0A455VE37_9GAMM Uncharacterized protein OS=Halomonas axialensis OX=115555; GN = HAALTHF_35410n PE=4 SV=2
MYLCDTDFNGTDGVNGGRFNTAQALAEHIKALWPQEANNAVPYVVFTGGEPLLQLDTELIATLHSEGFEVAVETNGTVPAPAGIDWLCVSPKGSNPLAITQGDELKLVFPQADAPPEQFSHLAFSHFFFTADGSQCRRSKEYCHRRRGDRSGHHRVLHGQPTVAAVTANAQNRRIRVMALFVNHLTHIDVSLWCPTKGLVGCSWQVDAQLEGELGEDGMLFDFGEVKPWIKRTLDSGLDHTLLVPTQAPGVEVRECDEGLCIRTTTPYVMEVRGPTEAFTLLPWASITLERVTQHLSAQLTEQRPANVERVTLTLSDELINGAAYGYSHGLKRHSGNCQRIAHGHRSRLHIFQEQQRQPQLEQQWGAWLDNRYLLEEADIAEHSESQLTCRYEAAQGSFSITCHLSAVACCQSPRQ

SEQ ID NO: 21007 - protein, 132 aa, Halomonas axialensis
  REGION 1..132: note = tr|A0A455VDV7|A0A455VDV7_9GAMM Uncharacterized protein OS=Halomonas axialensis OX=115555 GN=ptpS PE=4 SV=1
MYRLCVRDHFMIAHSFKGEIFGPAQRTHGATYVVDIIFQRPALDEDGLVIDIGLASETVKEVLAGYNYRNLDEVSEFTGQNTTTEFMAKVIFDQLAEAIRGGRMGETAKGLTRMEIKLHESHVAWASYEGEL

SEQ ID NO: 21008 - protein, 296 aa, unidentified
  source 1..296: note = Halomonas beimenensis
  REGION 1..296: note = tr|A0A291P7Z8|A0A291P7Z8_9GAMM 6-carboxytetrahydropterin synthase OS=Halomonas beimenensis OX=475662 GN=BEI_1995 PE=4 SV=1
MTLFVHRLTHLDISLWCPERGLVGASWLVDAELDGELGEDGMLFDFGEVKPWIKSRLDRGADHTLLVPTEAAGIAVRDCPEGLCVRAETPYPFEVRGPRQAFTLLPWDAVTPSRLAERLATELMRQPPPRVEAIRLALREEAIAGAHYTYSHGLRRHAGNCQRIAHGHRSRLHVWQGGERCPALEADWASRLADRYLVDEADVVEGQDASFLGRLTTRYRAEQGRFALSLPRERCVVMPCPTTVEHIAAWLAGEIAGETGRATRVQAFEGVDKGALAEARPEAGAPERRPETHATP

SEQ ID NO: 21009 - protein, 132 aa, Halomonas boliviensis
  REGION 1..132: note = tr|A0A265DX26|A0A265DX26_9GAMM 6-carboxytetrahydropterin synthase OS=Halomonas boliviensis LC1 OX=1072583 GN=CE457_12875 PE=4 SV=1
MFRLCVRDHFMIAHSFNGEIFGPAQRTHGATYVVDVVFQRPELDEDGLVIDIGLASETVKSVLANYNFSNLDEVPEFAGKNTTTEFMAKVIFDQLAKAIGEGKMGITAKGISHLEVKLHESHVAWASYEGAL

SEQ ID NO: 21010 - protein, 285 aa, Halomonas boliviensis
  REGION 1..285: note = tr|A0A265DVU3|A0A265DVU3_9GAMM 6-pyruvoyl tetrahydropterin synthase-related protein OS=Halomonas boliviensis LC1 OX=1072583 GN=CE457_15480 PE=4 SV=1
MSLFVQQLTHIDVSLWCPQRGLVGCSWQVDAVLDGELGEDGMLFDFGEVKPWIKRTLDSGLDHTLLVPTQAPGVTVTECPEGICIRTTTPYPMEVRGPKEAFSLLPWQAIDSDTVAEHLSQQLTEQRPENVHQVTLTLSDEAIDGAAYGYTHGLKRHLGNCQRIAHGHRSRLHIFQQGVRQPKLEQHWAKWLENRYLLEEADITKRDNDFLTCGYRAAQGDFSITLPQSLCAVLPGPTTVENIAAWLAKEVTTQSGVATRIQAFEGINKGAVAMFSPSAIPSARL

SEQ ID NO: 21011 - protein, 132 aa, Halomonas campaniensis; identical to SEQ ID NO: 20997
  REGION 1..132: note = tr|A0A060B803|A0A060B803_9GAMM 6-pyruvoyl tetrahydropterin synthase OS=Halomonas campaniensis; OX = 213554 GN=FF32_10775 PE=4 SV=1

SEQ ID NO: 21012 - protein, 284 aa, Halomonas campaniensis
  REGION 1..284: note = tr|A0A246S0V2|A0A246S0V2_9GAMM 6-pyruvoyl tetrahydropterin synthase-related protein OS=Halomonas campaniensis OX=213554 GN=JI62_09970 PE=4 SV=1
MSLFVQQLTHIDVSLWCSQRGLVGCSWQVDAVLDGELGEDGMLFDFGEVKPWIKRTLDGGLDHTLLVPTQAPGITVTECPEGLCVRTTTPYPMEVRGPKEAFSLLPWQAIEPDTVAEHLSQQLTEQRPKNVHQVTLTLSDEAIEGAAYGYTHGLKRHLGNCQRIAHGHRSRLHIFQQGVRQPKLEKQWAAWLDNRYLLEEADITSRDNDFLTCGYRAAQGDFSITLPQSLCAVLPGPTTVENIAAWLAKEVATQSGVATRIQAFEGINKGAIAMFTPSATPSRL

SEQ ID NO: 21013 - protein, 281 aa, Halomonas caseinilytica
  REGION 1..281: note = tr|A0A1M6NT56|A0A1M6NT56_9GAMM 6-pyruvoyl tetrahydropterin synthase OS=Halomonas caseinilytica; OX = 438744 GN=SAMN05192556_101507 PE=4 SV=1
MTLFVNRLTHLDASLWCPEHGLIGASWRVDAELDGELGADGMLFDFGEVKPWIKSRLDRGVDHTLLVPTEAPGVNVQECYEGLRVRTETPYALEVRGPRQAFSLLPWPAVTPQRLAEHLDQGLMRQPPERVEAIRLTLSDEPIEGAGYRYSHGLKRHAGNCQRIAHGHRSRLHVWQNGQRCPALEADWAARLDARYLVDEADVDEGMEASWLGRLVTSYRAAQGYFTMSLPRERCVVMPTSTTVEHIAAWLAGEITRETGQATRVQAFEGIDKGAFAEAKP

SEQ ID NO: 21014 - protein, 281 aa, unidentified
  source 1..281: note = Halomonas chromatireducens
  REGION 1..281: note = tr|A0A0X8HDI9|A0A0X8HDI9_9GAMM 6-pyruvoyl tetrahydropterin synthase OS=Halomonas chromatireducens; OX = 507626 GN=LOKO_01590 PE=4 SV=1
MTLFVNRLSHLDVSLWSPQHGLIGASWHVDAELDGELGEDGMLFDFGEVKPWIKSRLDGGVDHTLLIPTKAPGLEIFECSEGLCVRATQPYPMEVRAPRQAFTLLPWPAITTERLAELLAGEVMKRPPPRVTDIRLRLRDEVIDGAAYTYSHGLKRHLGNCQRIAHGHRSRLHIWQRGVRMPGLEAEWAERLGDRYLVDAADIATGPDSVVRGMMTSRYRAEQGRFMIRLPAERCLTLPTPTTVEHIAGWLARRITEETGRATRVQAFEGVDKGAIAEAQP

SEQ ID NO: 21015 - protein, 286 aa, Halomonas cupida
  REGION 1..286: note = tr|A0A1M7AT90|A0A1M7AT90_9GAMM 6-pyruvoyl tetrahydropterin synthase OS=Halomonas cupida OX=44933; GN = SAMN05660971_00636 PE=4 SV=1
MPLFVNQLTHLDVSLWCPERGLVGASWHLDAELFGELGEHGMLFDFGEVKPWIKSRIDGGADHTLLIPAKAPGIDISDCPEGMRIRTRTPYAMEVRGPRQAFTLLPCERIDTDNLAEHLSQSLGRRFPEQVERIVLRLREEIIDGASYSYSHGLKHHGGNCQRIAHGHRSRLEIHQHGERQPHLESHYASWLDNTYLVSAEDILADQARQQTLTTSYRSAQGQFVLTLPRERCRVLATATTVENIAIWLTHEITRATGVATQLYAYEGIDKGASHSATPEELAGDA

SEQ ID NO: 21016 - protein, 132 aa, Halomonas daqiaonensis
  REGION 1..132: note = tr|A0A1H7TE05|A0A1H7TE05_9GAMM 6-pyruvoyl-tetrahydropterin synthase OS=Halomonas daqiaonensis OX=650850 GN=SAMN04488129_1177 PE=4 SV=1
MYRLNVRDHFMIAHSFRGEIFGPAQRMHGATYVVDVTFQRRELDDDGLVVDIGLAGEALKKVLAEFNFQNLDGVEEFQGHNTTTEFMARVVFERLATAIQLCHLGEGAMGLDSLCVTLHESHVAWASYEGEL

SEQ ID NO: 21017 - protein, 285 aa, Halomonas daqingensis
  REGION 1..285: note = tr|A0A1H5RNT8|A0A1H5RNT8_9GAMM 6-pyruvoyl tetrahydropterin synthase OS=Halomonas daqingensis; OX = 419596 GN=SAMN04487953_101104 PE=4 SV=1
MTLFVNRLTQLDSSLWCPQRGLIGVSWFVDAELDGELGEDGMLFDFGHVKPWIKSRLDASADHTLLVPTRAPGVEVSECSEGICVRASLPYAMEVRAPRQAFTLLPWQQVDPERLADHLARELMKRPPPRVSAIRLRLRPEAIEGAAYTYSHGLRHHSGNCQRIAHGHRSRLHIWQRGQRCPALEAHWAERLNDCYLVDKADIVAHPEPELRRSLTSRYRAEQGRFQLRLPLERCFVLDVPTTIEHIAVWLARQIAAETGITTRVQAFEGIDKGAIAEAKPEAKP

SEQ ID NO: 21018 - protein, 285 aa, Halomonas desiderata
  REGION 1..285: note = tr|A0A243T4Q8|A0A243T4Q8_9GAMM 6-pyruvoyl tetrahydropterin synthase-related protein OS=Halomonas desiderata SP1 OX=1191209 GN=BZY95_09260 PE=4 SV=1
MTLFVNRLTQLDSSLWCPQRGLIGVSWFVDAELDGELGEDGMLFDFGHVKPWIKSRLDASADHTLLVPTRAPGVEVSECSEGICVRASLPYAMEVRAPRQAFTLLPWQHVDPERLADHLARELMKRPPPRVSAIRLRLRPEAIEGAAYTYSHGLRHHSGNCQRIAHGHRSRLHIWQRGQRCPALEAHWAERLNDCYLVDKADIVAHPEPELRRSLTSRYRAEQGRFQLRLPLERCFVLDVPTTIEHIAVWLARQIAAETGTTTRVQAFEGIDKGAIAEAKPEAKP

SEQ ID NO: 21019 - protein, 281 aa, Halomonas elongata
  REGION 1..281: note = tr|E1VC56|E1VC56_HALED 6-carboxy-5,6,7,8-tetrahydropterin synthase OS=Halomonas elongata (strain ATCC 33173 / DSM 2581 / NBRC 15536 / NCIMB 2198 / 1H9) OX=768066 GN= queD PE=4 SV=1
MTLFVNRLTHLDASLWCPERGLIGASWRVDAELDGELGDDGMLFDFGEVKPWIKSRLDRGVDHTLLVPTEAPGVSVQECYEGLRVRTETPYALEVRGPRQAFSLLPWPEITAQRLGEYLGQGLMRQPPERVEAIRLTLGDEPIEGAGYSYSHGLKRHAGNCQRIAHGHRSRLHIWQNGQRCPSLEADWASRLDDRYLVDEADVDDGLEASFLGRLVTSYRAEQGHFVLSLPRERCVVMPTSTTVEHIAAWLAKEISRETGRATRVQAFEGIDKGAIAEARP

SEQ ID NO: 21020 - protein, 281 aa, Halomonas elongata
  REGION 1..281: note = tr|A0A1B8P2X6|A0A1B8P2X6_HALEL 6-pyruvoyl tetrahydropterin synthase OS=Halomonas elongata OX=2746; GN = A8U91_00921 PE=4 SV=1
MTLFVNRLTHLDASLWCPERGLIGASWRVDAELDGELGDDGMLFDFGEVKPWIKSRLDRGVDHTLLVPTEAPGVSVQECYEGLRVRTETPYALEVRGPRQAFSLLPWPEITAQRLGEYLGQGLMRQPPERVEAIRLTLGDEHIEGAGYSYSHGLKRHAGNCQRIAHGHRSRLHIWQNGQRCPSLEADWASRLDDRYLVDEADVDDGLEASFLGRLVTSYRAEQGHFVLSLPRERCVVMPTSTTVEHIAAWLAKEISRETGRATRVQAFEGIDKGAFAEARP

SEQ ID NO: 21021 - protein, 281 aa, unidentified
  source 1..281: note = Halomonas endophytica
  REGION 1..281: note = tr|A0A2N7TXN0|A0A2N7TXN0_9GAMM 6-pyruvoyl tetrahydropterin synthase-related protein OS=Halomonas endophytica OX=2033802 GN=C1H69_19320 PE=4 SV=1
MTLFVNRLSHLDVSLWCPQRGLIGASWHVDAELDGELGEDGMLFDFGEVKPWIKSRLDGGADHTLLIPARAPDLEIVECGEGLCVRATRPYAMEIRAPRQAFTLMPWSAITTERLADQMAKELMKRPPPRVSAIRLRLREEAIEGASYTYSHGLKRHVGNCQRIAHGHRSRLHIWQRGVRMPGLEAEWAERLDDRYLIDQQDIATGDDAVAKGMMTTRYRADQGRFLLRLPVDRCIVLPTPTTVEHIASWLARRITEETGRTTRVQAFEGVDKGAIAEAQS

SEQ ID NO: 21022 - protein, 281 aa, Halomonas eurihalina
  REGION 1..281: note = tr|A0A5D9DBX8|A0A5D9DBX8_HALER 6-pyruvoyl tetrahydropterin synthase-related protein OS=Halomonas eurihalina OX=42566 GN=FZZ93_04475 PE=4 SV=1
MTLFVNRLTHLDASLWCPERGLIGASWRVDAELDGEIGDDGMLFDFGEVKPWIKSRLDRGVDHTLLVPTEAPGVSVQECYEGLRVRTETPYALEVRGPRQAFSLLPWREITAQRLGKYLGQSLMRQPPERVEAIRLTLGEEPIEGAGYCYSHGLKRHAGNCQRIAHGHRSRLHIWQNGQRCPSLEADWASRLDDRYLVDEADVDDGLEASFLGRLVTSYRAEQGHFVLSLPRERCVVMPTSTTVEHIAAWLAGEITRETGRATRVQAFEGIDKGAIAEARP

SEQ ID NO: 21023 - protein, 132 aa, Halomonas gudaonensis
  REGION 1..132: note = tr|A0A1G8ZLA8|A0A1G8ZLA8_9GAMM 6-pyruvoyl-tetrahydropterin synthase OS=Halomonas gudaonensis OX=376427 GN=SAMN04487954_11240 PE=4 SV=1
MYSLTVRDHFMIAHSFRGEVFGPAQRTHGATYVVDATFQRRELDADDLVVDIGLAGAALKRVLGAFDLRNLDELDAFHGRNTTTEFLARRVFDDLAKTIADGELGPGAEGLEALRVTLHESHIAWASYEGAL

SEQ ID NO: 21024 - protein, 136 aa, Halomonas halmophila
  REGION 1..136: note = tr|A0A4Y4F333|A0A4Y4F333_9GAMM Uncharacterized protein OS=Halomonas halmophila OX=252 GN=ptpS PE=4 SV=1
MFSLTVRDHMMIAHSFNSEVFGPAQKLHGATYVVDVSFYRPALDDNDLVVDIGLASETLGDVLKAFTLTNLDEHAAFDGRNTTTEFMAQAVFQRMAEAIRAGRLGEGARALSAMKVTLHESHIAWASYEASLEEAA

SEQ ID NO: 21025 - protein, 284 aa, Halomonas halmophila
  REGION 1..284: note = tr|A0A4Y4F268|A0A4Y4F268_9GAMM Uncharacterized protein OS=Halomonas halmophila OX=252 GN=queD PE=4 SV=1
MTLFVNRLTQLDTSMWCPTRGLIGTSWQVDAELDGELGDDGMLFDFGRVKPWIKSSLDQSLDHTLLVPTEAPGVNVQSCPEGLRIRTETPYVMEVRGPRQAFSLLPWPTISLARLAEHLEQMLMRQPPTNVEGVRLTLSDEAIEGAHYTYSHGLRRHDGNCQRITHGHRSRLHIWQNGQRVPSLEADWAQRLADCYLVDEADVAEGLEASFMGRLIASYRADQGRFMINLPRERCVVMPHATTVENIAAWLASQIARESGQRTRVQAFEGIDKGAIAEAGGNEL

SEQ ID NO: 21026 - protein, 281 aa, Halomonas halophila
  REGION 1..281: note = tr|A0A510Z9U4|A0A510Z9U4_9GAMM Uncharacterized protein OS=Halomonas halophila OX=29573 GN=HHA04nite_04170; PE = 4 SV=1
MTLFVNRLTHLDASLWCPERGLIGASWRVDAELDGELGEDGMLFDFGEVKPWIKSRIDQGPDHTLLVPTEAPGISVHECAEGLCVRAESPYPFEVRGPRQAFALLPWPAITAERLAEHLSASLSRQPPARVEAIRLTLTDEAIDGAAYTYSHGLKRHAGNCQRIAHGHRSRLHVWQDGERCPALETEWAERLADRYLVDEADVVEGLDAAFTGRLTTRYTAEQGRFALTLPRERCIPMPTPTTVEHIAAWLAGEIARETGRATRVQAFEGIDKGALAEAEA

SEQ ID NO: 21027 - protein, 132 aa, unidentified
  source 1..132: note = Halomonas heilongjiangensis
  REGION 1..132: note = tr|A0A2N7TGM4|A0A2N7TGM4_9GAMM Uncharacterized protein OS=Halomonas heilongjiangensis OX=1387883; GN = C1H66_19830 PE=4 SV=1
MYRLTVRDHFMIAHSLRGEIFGPAQRPHGATYVVDVCFQRRELDADDLVVDIGLAGETLSAVLAEFNYRNLDELDEFHGRNTTTEFMARVIFERLATAIQLGRLGDSAGGLHAMRVTLHESHVAWASYEGEL

SEQ ID NO: 21028 - protein, 279 aa, unidentified
  source 1..279: note = Halomonas heilongjiangensis
  REGION 1..279: note = tr|A0A2N7TIF7|A0A2N7TIF7_9GAMM 6-pyruvoyl tetrahydropterin synthase-related protein OS=Halomonas heilongjiangensis OX=1387883 GN=C1H66_17250 PE=4 SV=1
MTLFVNRLTQLDVSLWCPRRGLTAASWHVDAELDGELGGDGMLFDFGEVKPWIKSRLDAGPDHTLLVPTRAPGVEVQECLEGLCVRTSLPYPMEIRAPRQALTLLPWSEITTERLGDRLADDLMRRPPDRVDAIRLRLHEEAIDGPAYCYSHGLKRHAGNCQRIAHGHRSRLHVWQHGNRAPELERQWADWLADRYLVSEEDIVDGGESEYRGQLTTRYRSDQGSFLLRLPRERCAVLPTPTTVEQIAAWLATEIARESGHPTRVQAFEGIDKGAIAQA

SEQ ID NO: 21029 - protein, 287 aa, unidentified
  source 1..287: note = Halomonas huangheensis
  REGION 1..287: note = tr|W1NB10|W1NB10_9GAMM Uncharacterized protein; OS = Halomonas huangheensis OX=1178482 GN=BJB45_15655 PE=4; SV = 1
MSLFVNQLTHLDVSLWCPDKGLVGASWHLDAELFGELGEDGMLFDFGEVKPWIKSRIDAGADHTLLVPGKAPGVDISDCPEGMRIRMKTPYPMEVRGPRQAFTILPCTRIDTDNLAEHLTQSLGRRFPERVERIVLRLREEVIDGASYRYSHGLKRHAGNCQRIAHGHRSRLTIFQNGERQPHLESHYAAWLDNSYLVSAEDIVAEGGARDATLSTAYRSAQGQFHLTLPRERCRVLASATTVENIAIWLTREITRATGVATQLHAFEGIDKGACYEIAPEQLAREA

SEQ ID NO: 21030 - protein, 277 aa, Halomonas hydrothermalis
  REGION 1..277: note = tr|A0A291JWZ5|A0A291JWZ5_9GAMM 6-pyruvoyl tetrahydropterin synthase-related protein OS=Halomonas hydrothermalis OX=115561 GN=CLM76_14500 PE=4 SV=1
MALFVHHLTHIDVSLWCPERGLTGCSWQVDAHLDGELGEDGMLFDFGEVKPWIKRTLDNGLDHTLLVPTKAPGVEVSEYPEGLCIRTTTPYPMEVRGPAQAFTLLPWEHISVARVTQLLSEELTRARPRNVTQVTLNLQEERIEGASYGYSHGLKRHLGNCQRIAHGHRSRLHIYQHQQRQPALEAQWSEWLDNRYLLEQADVAEQTNTTLTCRYTAEQGAFSITLPTHRCSVLPAPTTVENIARWLASSIAQQTQQETHVEAFEGINKGATAQAAP

SEQ ID NO: 21031 - protein, 132 aa, Halomonas hydrothermalis
  REGION 1..132: note = tr|A0A291JVA5|A0A291JVA5_9GAMM Uncharacterized protein OS=Halomonas hydrothermalis OX=115561; GN = CLM76_11080 PE=4 SV=1
MYRLCVRDHFMIAHSFKGEIFGPAQRTHGATYVVDVIFQRSALDEDGLVIDIGLASETVKEVLAGYNYRNLDEVSEFTGQNTTTEFMAKVIFDQLAEAIRGGRMGETAKGLTRMEIKLHESHVAWASYEGEL

SEQ ID NO: 21032 - protein, 132 aa, Halomonas ilicicola
  REGION 1..132: note = tr|A0A1M4XZT2|A0A1M4XZT2_9GAMM 6-pyruvoyl-tetrahydropterin synthase OS=Halomonas ilicicola DSM 19980 OX=1121942 GN=SAMN02745148_01533 PE=4; SV = 1
MFSLTVRDHFMIAHSFKGDVFGPAQRQHGATYVVDVTFRRPCLDDDDLVVDIGLASSALSETLAEFNFRNLDEIPEFQGRNTTTEFMAKTVFDRLARAIDEGRLGQAASGLSHLKVTLHESHVAWADFEGAL

SEQ ID NO: 21033 - protein, 280 aa, Halomonas ilicicola
  REGION 1..280: note = tr|A0A1M4Z1N7|A0A1M4Z1N7_9GAMM 6-pyruvoyl-tetrahydropterin synthase OS=Halomonas ilicicola DSM 19980 OX=1121942 GN=SAMN02745148_01827 PE=4; SV = 1
MTLFVNALTQLDVSLWCPRRGLIGASWQVDAQLDGEVGEDGMLFGFDEAKSWITSRLDTSPDHTLLVPTQAPKLTVQECSEGLCMRTTLPYDFEIRAPRQAFTLLPWSEIGIERLARHYSEALTRRPPPRVEAIRLKLREEQIDGAAYTYSHGLKRHPGNCQRIAHGHRSRLHIWCDGERSPLLETQWAQRLDDRYLVAAEDILDGDATSKEALTIGYRSTQGRFQLRLPRARCDVLPIPTSVEHIAAWLAEQVARDRGQGVRVQVFEGIGKGAIAEASP

SEQ ID NO: 21034 - protein, 132 aa, Halomonas korlensis
  REGION 1..132: note = tr|A0A1I7FZV0|A0A1I7FZV0_9GAMM 6-pyruvoyl-tetrahydropterin synthase OS=Halomonas korlensis OX=463301 GN=SAMN04487955_102135 PE=4 SV=1
MYRLTVRDHFMIAHSFVGEIFGPAQRTHGATYVVDVTFQRRELDEDGLVVDIGLASDTVKSVLGEFNFQNLDELEEFQGRNTTTECMARVIFERLATAIQLGRLGEGANGLEALCVTLHESHIAWASYEGAL

SEQ ID NO: 21035 - protein, 281 aa, Halomonas korlensis
  REGION 1..281: note = tr|A0A1I7F3G8|A0A1I7F3G8_9GAMM 6-pyruvoyl-tetrahydropterin synthase OS=Halomonas korlensis OX=463301 GN=SAMN04487955_101211 PE=4 SV=1
MTLFVNRLTQLDVSLWCPRRGLVGASWHVDVELDGELGEDGMLFDFGEVKPWIKMRLDAGADHTLLVPTRAAGVEVHDCREGLCVRASLPYAFEVRAPRQALTLLPWQEITTERLADHMAAELVRRPPPRVSDIRLHLREEAIEGPAYTYSHGLKRHAGNCQRIAHGHRSRLHIWQQGQRAPALEQQWSDWLTDRYLVDRQDIVDCGESGHRGQVASRYLSPQGSFFLSLPRERCAVLPTPTTVEQIAAWLAETITLETGTATRVQAFEGIDKGAIAAARP

SEQ ID NO: 21036 - protein, 277 aa, Halomonas meridiana
  REGION 1..277: note = tr|A0A0D7V3S3|A0A0D7V3S3_9GAMM 6-pyruvoyl tetrahydropterin synthase-related protein OS=Halomonas meridiana OX=29570 GN=VE30_02655 PE=4 SV=1
MALFVNHLTHIDVSLWCPTKGLVGCSWQVDAQLEGELGEDGMLFDFGEVKPWIKRTLDSGLDHTLLVPTQAPGVEVSECDEGLCIRTTTPYVMEVRGPTEAFTLLPWASITLERVTQHLSAQLTEQRPANVERVTLTLSDELINGAAYGYSHGLKRHSGNCQRIAHGHRSRLHIFQEQQRQPQLEQQWGAWLDNRYLLEEADIAEHSESQLTCRYEAAQGSFSITLPSERCSVLPKPTTVENIALWLADQIAKQTGTATHVYAFEGIDKGATAQASP

SEQ ID NO: 21037 - protein, 277 aa, Halomonas meridiana
  REGION 1..277: note = tr|A0A1N6D104|A0A1N6D104_9GAMM 6-pyruvoyl tetrahydropterin synthase OS=Halomonas meridiana OX=29570; GN = SAMN05878438_1537 PE=4 SV=1
MALFVNHLTHIDVSLWCPTKGLVGCSWQVDAQLEGELGEDGMLFDFGEVKPWIKRTLDSGLDHTLLVPTQAPGVEVSECDEGLCIRTATPYVMEVRGPTEAFTLLPWASITLERVTQYLSAQLTEQRPANVERVTLTLSDELINGAAYGYSHGLKRHSGNCQRIAHGHRSRLHIFQEQQRQPQLEQQWGAWLDNRYLLEEADIAEHSESQLTCRYEAAQGSFSITLPSERCSVLPKPTTVENIALWLADQIAKQTGTATHVYAFEGIDKGATAQASP

SEQ ID NO: 21038 - protein, 281 aa, Halomonas muralis
  REGION 1..281: note = tr|A0A1G9FRK5|A0A1G9FRK5_9GAMM 6-pyruvoyl tetrahydropterin synthase OS=Halomonas muralis OX=119000; GN = SAMN05661010_00491 PE=4 SV=1
MTLFVNGLTQLDASLWCPSRGLIGASWQVDAQLDGELGEDGILFDFGEVKPWIKSRIDSEADHTLLVPTKAPGVTVHECSEGLSIRTTLPYAMEVRGPRQAFTLLPWGEVTAERLARHYGKALTRRPPSRVNEIRLNLRDESIAEAAYTYSHGLKHHAGNCQRIAHGHRSRLYIWCQGERAPQLEMQWAQRLTDRYLVDVADIVEGGDADMHGQLTTRYRSSQGLFCLRLPRECCEILPRSTTVEHIAAWLAEQIARDCGLPTRVQAFEGIGKGAIAEVSL

SEQ ID NO: 21039 - protein, 132 aa, Halomonas muralis
  REGION 1..132: note = tr|A0A1G9EM90|A0A1G9EM90_9GAMM 6-pyruvoyl-tetrahydropterin synthase OS=Halomonas muralis; OX = 119000 GN=SAMN05661010_00028 PE=4 SV=1
MFSLTVRDHFMIAHSFKGEIFGPAQRQHGATYVVDVTFKRPELDANDLIVDIGLASKALSDVLADLNFRNLDDAPEFHGRNTTTEFMASVVFERLAAAVRAGGLGEQARGLTALCVTLHESHVAWASYEGAL

SEQ ID NO: 21040 - protein, 132 aa, unidentified
  source 1..132: note = Halomonas nigrificans
  REGION 1..132: note = tr|A0A2A4HL79|A0A2A4HL79_9GAMM Uncharacterized protein OS=Halomonas nigrificans OX=2042704 GN=CPA45_13985; PE = 4 SV=1
MYRLCVRDHFMIAHSFKGEIFGPAQRTHGATYVVDVVFQRPELDQDGLVIDIGLASETVKEVLAGYNFQNLDEVSEFKGRNTTTEFMAKVIFDQLAAAIKAGRMGVTAQGLTHMEIKLHESHVAWASYEGAL

SEQ ID NO: 21041 - protein, 277 aa, unidentified
  source 1..277: note = Halomonas nigrificans
  REGION 1..277: note = tr|A0A2A4HLD8|A0A2A4HLD8_9GAMM 6-pyruvoyl tetrahydropterin synthase-related protein OS=Halomonas nigrificans OX=2042704 GN=CPA45_14640 PE=4 SV=1
MSLFVNHLTHIDVSLWSPEKGLMGCSWQVDALLDGELGEDGMLFDFGEVKPWIKRTLDNGLDHTLLVPISAPGITVSDCDEGLCIRTNTPYPMEVRGPAEAFTLLPWETITIEDVADLLSDTLTKQRPANVHYVKLNLSDEAIEGAAYGYSHGLKRHLGNCQRIAHGHRSRLYIWQSGERQPSLEQQWADWLDNRYLLEEADIAHQDEETLTCHYGAAQGRFTITLPLERCCVLPKPTTVENIAAWLAAQVAEQCEKSTSVQAFEGINKGAMADALT

SEQ ID NO: 21042 - protein, 281 aa, Halomonas nitroreducens
  REGION 1..281: note = tr|A0A3S0R3R2|A0A3S0R3R2_9GAMM 6-pyruvoyl tetrahydropterin synthase-related protein OS=Halomonas nitroreducens OX=447425 GN=EKG36_02535 PE=4 SV=1
MTLFVNRLTHLDVSLWCPEHGLMGASWRVDAELDGELGEDGMLFDFGEVKPWIKSRLDRGADHTLLVPTEAPGVSVRDCPEGLCVRTETPYPLEVRGPRQAFTLLPWHSVTPDRLADRLATELMRQPPERVGEIRLTLLEEAIEGASYTYSHGLRRHAGNCQRIAHGHRSRLHVWQDGERRPDLEAEWAQHLAHRYLVDEADIVEGREASFLGRLSSRYHADQGRFMLTLPRERCVVLPTPTTVEHIAAWLAGEIARDTGRPTRVQAFEGIDKGALAEARP

SEQ ID NO: 21043 - protein, 200 aa, unidentified
  source 1..200: note = Halomonas olivaria
  REGION 1..200: note = tr|A0A3T1DQF6|A0A3T1DQF6_9GAMM Uncharacterized protein OS=Halomonas olivaria OX=390919 GN=HORIV_32690; PE = 4 SV=1
MCVPPPLPDGSARPKEAFSLLPWQAIEPDTVAEHLSQQLTEQRPKNVHQVTLTLSDEAIEGAAYGYTHGLKRHLGNCQRIAHGHRSRLHIFQQGVRQPKLEQQWAAWLDNRYLLEEADIISRDNDFLTCGYRAAQGDFSITLPQSLCAVLPGPTTVENIAAWLAKEVATQNGVTTRIQAFEGINKGAIAMFTPSATPSRL

SEQ ID NO: 21044 - protein, 101 aa, unidentified
  source 1..101: note = Halomonas olivaria
  REGION 1..101: note = tr|A0A3T1DQD3|A0A3T1DQD3_9GAMM Uncharacterized protein OS=Halomonas olivaria OX=390919 GN=HORIV_32700; PE = 4 SV=1
MSLFVQQLTHIDVSLWCSQRGLVGCSWQVDAVLDGELGEDGMLFDFGEVKPWIKRTLDGGLDHTLLVPTQAPGITATECPEGLCVRTTTPTRWKCAAQRGL

SEQ ID NO: 21045 - protein, 281 aa, Halomonas pacifica
  REGION 1..281: note = tr|A0A510X3X4|A0A510X3X4_9GAMM Uncharacterized protein OS=Halomonas pacifica OX=77098 GN=queD PE=4 SV=1
MSLFVDNLTHLDASLWCPRRGLIGISWAVDAELDGELGEDGMLFDFGEVKPWIKSRLDDGADHTLLVPTRAPGVTIQECREGLRLTTRAPYPLELRAPRQAFTLLPWAEVRREALAEHLAGELMRRPPPRVSAIRLTLRDEAIDGAAYTYSHGLRQHAGNCQRIAHGHRSRLHIWRNGHRAPDLEARWAAHLADSYLVDGDDLVSDPDDDPRQLSCAYRAPQGEFRLRLPAERCRVLPSQTTVERIALWLAETIAAAEGGRIRVQAFEGIGKGAFAEAGTP

SEQ ID NO: 21046 - protein, 133 aa, Halomonas pantelleriensis
  REGION 1..133: note = tr|A0A1G9G7Y7|A0A1G9G7Y7_9GAMM 6-pyruvoyl-tetrahydropterin synthase OS=Halomonas pantelleriensis OX=48727 GN=SAMN05192555_10253 PE=4 SV=1
MYRLTVRDHFMIAHSFNGDIFGPAQRTHGATYVVDVTFQRRELDDDDLIVDIGLASETLSTLLAEFNFQNLDDLEEFQGRNTTTEFMARVIFERLAAAIAAGRLGDSGRGLEALTVTLHESHIAWASYEGELQ

SEQ ID NO: 21047 - protein, 278 aa, Halomonas pantelleriensis
  REGION 1..278: note = tr|A0A1G9MDQ3|A0A1G9MDQ3_9GAMM 6-pyruvoyl-tetrahydropterin synthase OS=Halomonas pantelleriensis OX=48727 GN=SAMN05192555_106183 PE=4 SV=1
MTLFVNRLTQLDVSLWCPNRGLIGASWHVDAELDGALGEDGMLFDFGEVKPWIKSRLDAGADHTLLVPSRAPGISVQECREGLSIRTQLPYPMEVRGPRQAFTLLPWQAVSAERLGEHLAKELMRRPPPRVEAIRLALRDEAIDGAAFTYSHGLKRHAGNCQRIAHGHRSRLEIWRQGQRDVGLEARWAAWLADRYLVDAEDVSSDADSDALTCRYRAPQGNFVMRLPRARCAILPCPTTVEHIAAWLAERIARECGERIKVKAFEGIDKGAMAEAGP

SEQ ID NO: 21048 - protein, 281 aa, Halomonas saccharevitans
  REGION 1..281: note = tr|A0A1I6ZPJ8|A0A1I6ZPJ8_9GAMM 6-pyruvoyl tetrahydropterin synthase OS=Halomonas saccharevitans; OX = 416872 GN=SAMN04487956_11259 PE=4 SV=1
MTLFVNRLTQLDASLWCPRRGLVGASWQVDVELDGELGEDGMLFDFGEVKPWIKGAIDGGVDHTLLVPTEAPGVTLHDCREGLCLRSEVPYPLEMRAPRQALSLLPWSEITPERLARHLADELMRRPPPRVGDIRLTLREEAIEGAAYGYSHGLKRHVGNCQRIAHGHRSRLHVWQDGERQPALEARWADWLGERYLVDAADIVEDDESGLDDRLTTRYRAEQGQFFLRLPRRRCAVLPTPTTVEQIAAWLAEAIARESGRATRVQAFEGIDKGAIAEARP

SEQ ID NO: 21049 - protein, 132 aa, Halomonas saccharevitans
  REGION 1..132: note = tr|A0A1I7C6L1|A0A1I7C6L1_9GAMM 6-pyruvoyl-tetrahydropterin synthase OS=Halomonas saccharevitans OX=416872 GN=SAMN04487956_1379 PE=4 SV=1
MYRLNVRDHFMIAHSFRGEVFGPAQRLHGATYVVDVTFQRRELDDDGLVVDIGLAGEALKRVLAEFNFQNLDEVEEFQGRNTTTEFMARVLFERLATAIQLGHLGEAALGLDSLCVTLNESHVAWASYEGAL

SEQ ID NO: 21050 - protein, 132 aa, Halomonas shengliensis
  REGION 1..132: note = tr|A0A1H0DL15|A0A1H0DL15_9GAMM 6-pyruvoyl-tetrahydropterin synthase OS=Halomonas shengliensis OX=419597 GN=SAMN04487957_101457 PE=4 SV=1
MYRLSVRDHFMIAHSFSGELFGPAQRTHGATYVVDVSFARRELDDHDLVVDIGLASEALKAVLGEFNFENLDELSEFQGRNTTTEFMARVIFERLATAIQLGRLGEGATGLEAMTVTLHESHIAWASYEGTL

SEQ ID NO: 21051 - protein, 132 aa, unidentified
  source 1..132: note = Halomonas songnenensis
  REGION 1..132: note = tr|A0A2T0UZU5|A0A2T0UZU5_9GAMM 6-pyruvoyl-tetrahydropterin synthase OS=Halomonas songnenensis OX=1176243 GN=B0H98_10819 PE=4 SV=1
MYRLCVRDHFMIAHSFKGEIFGPAQRTHGATYVVDVIFQRPELDEDGLVIDIGLASETLKEVLSHLNYRNLDDEDEFAGKNTSTEFMAGVIFGRLADAIGEGTMGKTAQGITRMEVKLHESHIAWASYEGDL

SEQ ID NO: 21052 - protein, 277 aa, unidentified
  source 1..277: note = Halomonas songnenensis
  REGION 1..277: note = tr|A0A2T0V195|A0A2T0V195_9GAMM 6-pyruvoyl tetrahydropterin synthase-like protein OS=Halomonas songnenensis OX=1176243 GN=B0H98_10720 PE=4 SV=1
MALFVNQLTHIDVTLWCAERGLVGCSWQVDALLEGALGEDGMLFDFGEVKPWIKRTLDSGLDHTLLVPANAPGISISECEEGLCIRTTTPYAMEVRGPAEAFSLLPWEAITLEQVASHLSGELTDQRPTNVDRVTLTLSDEAIDGAAYGYTHGLKRHQGNCQRIAHGHRSRLAIWQSGQRQPALEARWADWLDNRYLLEQADIQDQDDETLTCRYQAAQGEFLIRLPISRCAVLPGPTTVENIAIWLARSLARDTGQATRVQAFEGINKGAFAESAP

SEQ ID NO: 21053 - protein, 281 aa, Halomonas sp.
  REGION 1..281: note = tr|A0A2N1AT84|A0A2N1AT84_9GAMM 6-pyruvoyl tetrahydropterin synthase-related protein OS=Halomonas sp. MES3-P3E OX=2058321 GN=CXF87_02975 PE=4 SV=1
MALFVQQLTHIDISLWCAKRGLVGCSWQVDAVLEGELGEDGMLFDFGEVKPWIKRTLDSGLDHTLLVPTEASGISVSECPEGLCVRTTTPYPMEVRGPEEAFTLLPWQAITLEMVAEHLSHQLTEQRPENVDRVSLTLSDEPNDGAAYGYSHGLKRHAGNCQRIAHGHRSRLYIWQQEARQTLLEQQWAAWLNNRYLLEEADIAARNSETLTCRYRAAQGDFSITLPPSLCTVLPGPTTVENIAAWLAREVATQSGQVTRIQAFEGINKGAIAMFSPSAAL

SEQ ID NO: 21054 - protein, 275 aa, Halomonas sp.
  REGION 1..275: note = tr|A0A2D9FJQ0|A0A2D9FJQ0_HALSX 6-pyruvoyl tetrahydropterin synthase-related protein OS=Halomonas sp.; OX = 1486246 GN=CME76_01450 PE=4 SV=1
MALFVNHLTHIDVSLWCPTKGLVGCSWQVDAQLEGELGEDGMLFDFGEVKPWIKRTLDNGLDHTLLVPTQAPGVEVSECEEGLCLRTTTPYAMEVRGPKEAFTLLPWESITLQRVTRHLSDQLTEQRPVNVERVTLLLSDEHIDGAAYGYSHGLKRHAGNCQRIAHGHRSRLHIFQEQQRQPQLEQTWSAWLDNRYLLEEADIAELSDTRLTCRYEAAQGRFSITLPAERCSVLPKPTTVENIAQWLADQIAQQTATATTVHAFEGIDKGATAHA

SEQ ID NO: 21055 - protein, 132 aa, Halomonas subterranea
  REGION 1..132: note = tr|A0A1H9WD81|A0A1H9WD81_9GAMM 6-pyruvoyl-tetrahydropterin synthase OS=Halomonas subterranea OX=416874 GN=SAMN04487958_11424 PE=4 SV=1
MYRLCVRDHFMIAHSFKGDVFGPAQRTHGATYVVDVIFQRPELDDDGLVIDIGLAGETLKAVLAGYNYQNLDEVNELQGHNTTTEFMAKVIYDQLAAAINAGEMGKTARGLTHLEVKLHESHVAWASYEGAL

SEQ ID NO: 21056 - protein, 277 aa, Halomonas subterranea
  REGION 1..277: note = tr|A0A1H9VIW6|A0A1H9VIW6_9GAMM 6-pyruvoyl tetrahydropterin synthase OS=Halomonas subterranea; OX = 416874 GN=SAMN04487958_109151 PE=4 SV=1
MSLFVNQLTHIDASLWCPEKGLKGVSWQVDAVLEGELGKDGMLLDFGEVKPWIKHHLDSGLDHTLLVPVEASGVTVSPCEEGLCVRTSTPYAMEVKGPKQAFTLLPVATIERDAVAASLSQTLTEQRPAKVTRVQLSLSDEVIEGAAYGYSHGLKLHKGNCQRIAHGHRSRLHIWQRGTRQHELERQWAAWLDNRYLVEENDIIARDKQALTCRYQADQGTFTLTLPDERCAVLTTPTTVENIAHWLAEQLAAQSLETSTVHAFEGFNKGAIAKASP

SEQ ID NO: 21057 - protein, 239 aa, Halomonas sulfidaeris
  REGION 1..239: note = tr|A0A455UDA2|A0A455UDA2_9GAMM Uncharacterized protein OS=Halomonas sulfidaeris OX=115553 GN=HSBAA_36040; PE = 4 SV=1
MSLFVKQLTHIDVSLWCSQRGLVGCSWLVDAVLDGELGEDGMLFDFGEVKPWIKRTLDSGLDHTLLVPTAASGISVSECPEGLSIRTTTPYPMEVRGPQEAFTLLPWQAITLDKVAEHLSQQLTEQRPKNVHQVTLTLSDEAIEGAAYGYTHGLKRHQGNCQRIAHGHRSRLHIFQQGARQPKLEQQWATWLDNRYLLEEADITSQEKTSLPAAIGPPKAIFPLRYQRRYALCSQAPPQ

SEQ ID NO: 21058 - protein, 285 aa, Halomonas sulfidaeris
  REGION 1..285: note = tr|A0A365TNG9|A0A365TNG9_9GAMM 6-pyruvoyl tetrahydropterin synthase-related protein OS=Halomonas sulfidaeris OX=115553 GN=DQ400_10215 PE=4 SV=1
MSLFVKQLTHIDVSLWCSQRGLVGCSWLVDAVLDGELGEDGMLFDFGEVKPWIKRTLDSGLDHTLLVPTAASGISVSECPEGLSIRTTTPYPMEVRGPQEAFTLLPWQAITLDKVAEHLSQQLTEQRPKNVHQVTLTLSDEAIEGAAYGYTHGLKRHQGNCQRIAHGHRSRLHIFQQGARQPKLEQQWATWLDNRYLLEEADITSQEKDFLTCSYRAAQGDFSITLPATLCAVLPGPTTVENIAAWLAKEVATQSGQATRIQAFEGINKGAIAMFSPSALPSTRL

SEQ ID NO: 21059 - protein, 281 aa, Halomonas taeanensis
  REGION 1..281: note = tr|A0A1G7V693|A0A1G7V693_9GAMM 6-pyruvoyl tetrahydropterin synthase OS=Halomonas taeanensis; OX = 284577 GN=SAMN05216571_11929 PE=4 SV=1
MTLFVNGLTHLDASLWCSTRGLIGVSWQVNAELDGELGEDGMLFDFGQVKPWIKSRLDDSADHTLIVPTEAPGVTVSECSEGLVIRTTTPYAMEVRGPHQAFTLVPWTQITPTALAEHFSEQMLQDPPPRVSAIRLSFEDEVLSGAAYTYSHGLRRHSGNCQRIAHGHRSPLHIWQAGKRAPALEADWAERLADRYLVDASDILDDPEAAAKGELTTRYRAPQGEFFLRLPRERCVTLPTATTIEQIAAWLAKKVAGETGEATRVQAFEGIGKGAIAERMP

SEQ ID NO: 21060 - protein, 279 aa, Halomonas taeanensis
  REGION 1..279: note = tr|A0A328XIU5|A0A328XIU5_9GAMM 6-pyruvoyl-tetrahydropterin synthase OS=Halomonas taeanensis OX=284577 GN=BCL93_11026 PE=4 SV=1
MTLFVNGLTHLDASLWCPTRGLIGVSWQVNAELDGELGEDGMLFDFGHVKPWIKSRLDDGADHTLIVPTEAPGVTVSECPEGLAIRTTTPYAMEVRGPHQAFTLVPWAEITPTGLAERFSEEMLQDPPPRVSAIRLTFEDEALSGAAYTYSHGLRRHAGNCQRIAHGHRSPLHIWQTGERAPALEAEWAGRMADRYLVDAGDIEDEGVAQGELTTRYRAPQGDFLLRLPRERCLILPTATTIEQIAAWLAGEIAAETGQVTRVQAFEGIGKGAIAERTP

SEQ ID NO: 21061 - protein, 283 aa, Halomonas titanicae
  REGION 1..283: note = tr|L9UBT2|L9UBT2_9GAMM 6-pyruvoyl tetrahydropterin synthase-related protein OS=Halomonas titanicae BH1; OX = 1204738 GN=HALTITAN_1225 PE=4 SV=1
MSLFVNQLTHIDVSLWCSERGLVGCSWQVDAVLDGELGEDGILFDFGEVKPWIKRTLDSGLDHTLLVPTQAPGVTVTECPEGVCVRTTTPYPMEVRGPKEAFSLLPWQTIELDTVAEHLSQQLTEERPENVHQVTLTLSDEAVDGAAYGYSHGLKRHLGNCQRIAHGHRSRLHIFQQELRQPTLEQQWAAWLENRYLLEEADITSRDNDFLTCGYRAAQGDFSITLPQSLCAVLPGPTTVENIAAWLAKEVATQSGVTTRIQAFEGINKGAIAVCSPSPSARL

SEQ ID NO: 21062 - protein, 282 aa, Halomonas titanicae
  REGION 1..282: note = tr|A0A558J5K9|A0A558J5K9_9GAMM 6-pyruvoyl tetrahydropterin synthase-related protein OS=Halomonas titanicae OX=664683 GN=FQP89_17500 PE=4 SV=1
MSLFVQQLTHIDVSLWCSQRGLVGCSWQVDAVLDGELGEDGMLFDFGEVKPWIKRTLDSGLDHTLLVPTQAPGVTVTECPEGVCVRTTTPYPMEVRGPKEAFSLLPWQAIDMNTVAEHLSQQLTEQRPENVHQVTLTLSDETINGAAYGYTHGLKRHLGNCQRIAHGHRSRLHIFQQGVRQAELEQQWAAWLDNRYLLEEADITSRDNDFLTCGYRAAQGDFSITLPQSLCAVLPGPTTVENIAAWLAKEVATQSGVTTRIQAFEGINKGAIAAFSPSAIPR

SEQ ID NO: 21063 - protein, 132 aa, unidentified
  source 1..132: note = Halomonas urumqiensis
  REGION 1..132: note = tr|A0A2N7UDA8|A0A2N7UDA8_9GAMM Uncharacterized protein OS=Halomonas urumqiensis OX=1684789 GN=C1H70_16950; PE = 4 SV=1
MYRLNVRDHFMIAHSFRGEIFGPAQRTHGATYVVDVTFQRRELDNDDLVVDIGLASEAVKAVLGEFNFHDLDELEEFHGRNTTTEFMARVIFERLVTAIQLGKLGEAANGLDAMTVTLNESHIAWASYEGTL

SEQ ID NO: 21064 - protein, 132 aa, Halomonas ventosae
  REGION 1..132: note = tr|A0A2T0VPA3|A0A2T0VPA3_9GAMM 6-pyruvoyl-tetrahydropterin synthase OS=Halomonas ventosae; OX = 229007 GN=BCL64_10471 PE=4 SV=1
MYRLNVRDHFMIAHSFRGEVFGPAQRTHGATYVVDVTFQRRELDDDGLVVDIGLAGEALKRVLAEFNFHNLDEVEEFQGRNTTTEFMARVIFERLATAVQLGQLGEAAMGLDSLCVTLHESHVAWASYEGAL

SEQ ID NO: 21065 - protein, 281 aa, Halomonas ventosae
  REGION 1..281: note = tr|A0A2T0VET3|A0A2T0VET3_9GAMM 6-pyruvoyl-tetrahydropterin synthase OS=Halomonas ventosae; OX = 229007 GN=BCL64_11626 PE=4 SV=1
MTLFVNRLTHLDVSLWCPQRGLVGASWQVDVELDGELGEDGMLFDFGEVKPWIKQRLDGELDHTLLVPTRARGVTLHDCREGLCVRSERPYPLEVRAPRQALSLLPWREITPERLADHLATELMRRPPPRVSDIRLRLREEAIEGPAYSYSHGLKQHAGNCQRIAHGHRSRLEVWQQGQRVPALEQHWAEWLADRYLVDEADVVDDDAPGFRDQLSCRYRAEQGHFFIRLPRSRCAVLPTPTTVEHIAAWLAGAIARESGQATRVRAFEGIDKGAIAQARP

SEQ ID NO: 21066 - protein, 279 aa, Halomonas venusta
  REGION 1..279: note = tr|A0A3S8YS76|A0A3S8YS76_9GAMM 6-pyruvoyl tetrahydropterin synthase-related protein OS=Halomonas venusta OX=44935 GN=EI420_08690 PE=4 SV=1
MALFVNRLSHIDVSLWCPTKGLVGCSWQVDAQLDGELGEDGMLFDFGEVKPWIKRTLDSGLDHTLLVPINAPGIKVTDCAEGICIRTATPFEMEVRGPVQAFTLLPWDTITVERVSHYLSSQLTKQEQRPANVHSVTLTLSDEPIDGAGYGYTHGLKRHLGNCQRIAHGHRSRLLIWQHQARQPALEQHWAAWLDNRYLLEQADIESQIDEKLTCRYQSAQGTFSITLPQQRCCVLPKPTTVENIALWLAKRIAEHSGHKTLVQAFEGIDKGATAEASP

SEQ ID NO: 21067 - protein, 132 aa, Halomonas venusta
  REGION 1..132: note = tr|A0A3S8YPR6|A0A3S8YPR6_9GAMM 6-carboxytetrahydropterin synthase OS=Halomonas venusta; OX = 44935 GN=EI420_04790 PE=4 SV=1
MYRLCVRDHFMIAHSFNGEIFGPAQRTHGATYVVDVVFQRPELDQDGLVIDIGLASETVKEVLAEYNYRNLDEVSEFSGKNTTTEFMAKVIFDQLAAAIKAGKMGATAQGLTHMEIKLHESHVAWASYEGAL

SEQ ID NO: 21068 - protein, 286 aa, Halomonas xianhensis
  REGION 1..286: note = tr|A0A4R8G4H0|A0A4R8G4H0_9GAMM 6-pyruvoyl tetrahydropterin synthase-like protein OS=Halomonas xianhensis OX=442341 GN=DFO67_104220 PE=4 SV=1
MTLFVNNLTHLDTSLWCPRRGLIGASWHVDAELDGQLGDDGMLFDFGEVKPWLKTHLDDGPDHTLLVPLESPGLSVQDCREGLCIRAQAPYAMEVRGPRQAFTLLPWSEITPQRLAEHYSNLLSRRPPPRVDAIRLRLHEEAIEGAAFTYSHGLKRHAGNCQRIAHGHRSRLCLWENGSRQPMLEAAWAERLQDRYLVSEEDISDPGLPGPRGQLTVRYQAGQGQFMLRLPRDRCIVMPTPTTIEHIAAWLAARILHETGRELRVQAFEGIGKGAYSGMSPLTHHD

SEQ ID NO: 21069 - protein, 286 aa, Halomonas xianhensis
  REGION 1..286: note = tr|A0A1I3A6N0|A0A1I3A6N0_9GAMM 6-pyruvoyl tetrahydropterin synthase OS=Halomonas xianhensis; OX = 442341 GN=SAMN04487959_104161 PE=4 SV=1
MTLFVNNLTHLDASLWCPRRGLIGASWHVDVELDGQLGDDGMLFDFGEVKPWLKAHLDDGPDHTLLIPLESPGLSVQACREGLCIRAQAPYAMEVRGPRQAFTLLPWREITPQRLAEHYSNLLSRRPPPRVDAIRLRLHEEAIDGAAFTYSHGLKRHVGNCQRIAHGHRSRLCLWENGSRQPLLEAAWAKRLQDRYLVSEEDISDPGLPGPRGQLTVRYQAGQGQFMLRLPRDRCIVMPTPTTIEHIAAWLAARILHETGREVRVQAFEGIGKGAFSGMSPLTRHD

SEQ ID NO: 21070 - protein, 134 aa, unidentified
  source 1..134: note = Halopeptonella vilamensis
  REGION 1..134: note = tr|A0A4Q8CYQ4|A0A4Q8CYQ4_9GAMM 6-pyruvoyl-tetrahydropterin synthase OS=Halopeptonella vilamensis OX=531306 GN=EV698_0308 PE=4 SV=1
MYRVNVRDHFMIAHSFKGETFGPAQALHGATYVTDATFFRDRLDADNVVVDIARATEVLHTILSRYNLTNLDGLPEFEGVNTTTEHLARHIADSLATAIHAGELGETARTLDRIRITLHESHIASAAYERPLQP

SEQ ID NO: 21071 - protein, 331 aa, Halorhodospira halochloris
  REGION 1..331: note = tr|A0A0X8X865|A0A0X8X865_HALHR Queuosine biosynthesis QueD OS=Halorhodospira halochloris OX=1052; GN = HH1059_00780 PE=4 SV=1
MEQGYYTISLPFEAARRDHRGWHGHSFCLRLRSNATAISDHEWLLSEAARVVEPFDYSLLNEQVPDVADPALLSELEQRLRAVGLPLNRLALRSAPDRGAVIDLCDGQRWCWRSFRFEAAHQLPNVPPSHPCHRMHGHGYRVILEAANGEDAEALGQLWQPVAAQLHRSCLNDVLVNPTSERLAEWIWMRLRMYSSGLRRVHVQETEHSGCFFDGFHHTIWKAQRFEAATAHAAARSITGHGYRLRLYLSAPLDPDLGWTLDYADVKAAFAPLRDSLDHHRLDQLHGLAGGDLLSVAKWILNQANAQLPELYRVDVSEDEQRGVIAERDPG

SEQ ID NO: 21072 - protein, 258 aa, Halorhodospira halophila
  REGION 1..258: note = tr|A1WW30|A1WW30_HALHL Uncharacterized protein; OS = Halorhodospira halophila (strain DSM 244 / SL1); OX = 349124 GN=Hhal_1116 PE=4 SV=1
MLDELGRRLEAAGVVPHRLALRSAPDRGVGREGGAWAWRAFRFEAAHRLPYVPEGHPCGRMHGHGYLVVLEAAGGDPEALGEAWAPLGQALDRACLNDFLDNPTSELIAVWLWEQLRPRCPGLIRLHVHETEHSGCTYDGAQHTIWKAQRFEAATCVADADDTRARLHGHGYRLRVHVTAPLDRVLGWTLDYGDVKAAFAPVREALDHQRLDTIAGLESGDVASLAAWAARAARQRLPELLRVDCYERDGVGAIAWPE

SEQ ID NO: 21073 - protein, 280 aa, Halospina denitrificans
  REGION 1..280: note = tr|A0A4R7JQ95|A0A4R7JQ95_9GAMM 6-pyruvoyl tetrahydropterin synthase-like protein OS=Halospina denitrificans OX=332522 GN=DES49_2263 PE=4 SV=1
MNRLFVDNLTVIDFAFLDPERGLVGESWIVDIELAGELNEAGMVFDFGHVKRTIKDEIDALVDHRLLVPRDHRGLSWTETGNLDWVTNGGWRISHAGPEESVIAVPGSHLQRERIETLLVTLLRQKLPANVHDIVVRLRPEVIEGALYHYTHGLRKHEGNCQRIAHGHRSRLEIYRNGARAPDLETYWAERWEDIYIATRDDEVGTFVEAGVEYTHYRYTANQGQFELILPSHRVETMDQDTTVEWIACYLRDETQKLEPDSRIIVKAFEGVNKGAYAGD

SEQ ID NO: 21074 - protein, 279 aa, Halotalea alkalilenta
  REGION 1..279: note = tr|A0A172YET9|A0A172YET9_9GAMM 6-pyruvoyl tetrahydropterin synthase-related protein OS=Halotalea alkalilenta OX=376489 GN=A5892_09775 PE=4 SV=1
MNLFVHSLTALDASYWCAERGLVGASWQVDVELDGELGEDGMLFDFGEVKPWAKRQIDATLDHTLIVPTQMPGLSVSECAEGLCVRTQLPWPMEVRAPRQAFTLLPWSTIEPQRLSRYLGEQLGKRPPPRVGEVRVQLREEPIAPGFGYTYSHGLKHHAGNCQRIAHGHRSRLGIWRDGELDEALIQRWCARLADIYLADRADLVGSEEDESLRFAYESLQGQFRIRLPRERVVLMPFTTTVEQIAHWLAEETALAHGGRIRVQAFEGIGKGATAEAKR

SEQ ID NO: 21075 - protein, 290 aa, unidentified
  source 1..290: note = Halothece sp.
  REGION 1..290: note = tr|K9YEG6|K9YEG6_HALP7 Uncharacterized protein; OS = Halothece sp. (strain PCC 7418) OX=65093; GN = PCC7418_2639 PE=4 SV=1
MKCVINRRAQFSAAHRYWLPELSAAENQAKFGAGSQFPGHGHNYVLYVSLEGEIDQYGMVMNLSEVKPVLREQITDQLNNSYLNEVWSEFSETLPTTENLAKVIWQRLAPYLPVVNIRLFEHPQLWADYQGNNMEASLTVGTHFSAAHRLARPDLSYEENCKIYGKCARPHGHGHNYHLEVTVTGEMDQRTGMIVNLEQLHHILEEVVVEPFDHYFLNEDIPYFAEVVPTAENIALYIAQLLQKPTAELGVMLDKVKLIESPNNSCEINCRSLAGNLSSEMNREPALANY

SEQ ID NO: 21076 - protein, 127 aa, unidentified
  source 1..127: note = Halothece sp.
  REGION 1..127: note = tr|K9YDF0|K9YDF0_HALP7 6-carboxy-5,6,7,8-tetrahydropterin synthase OS=Halothece sp. (strain PCC 7418) OX=65093 GN=PCC7418_2348 PE=3 SV=1
MDEWIIYKEFSFEAAHQLFHHEGKCRRLHGHSWVGRVYLKAQHLITEGSQQGMLMDYGEIKKYIQPLLDEYLDHYYLNESTGLTNPTSEEIAKWIFEKLEAAGLPHLYAVEIQETCTSGCRYTKSHD

SEQ ID NO: 21077 - protein, 126 aa, unidentified
  source 1..126: note = Halothiobacillaceae bacterium
  REGION 1..126: note = tr|A0A539DX79|A0A539DX79_9GAMM 6-carboxy-5,6,7,8-tetrahydropterin synthase; OS = Halothiobacillaceae bacterium OX=2268194 GN=FD130_1816; PE = 3 SV=1
MTASYTLKVLLDFASAHSLRNYPGDCSRLHGHNWKLEAEVTAHALDEVGIGLDFKVIRLAAKEIADRLDHHYLNELEPFKAINPTAENIAAYFYHELGLKLNNARVRVSAVTLWETERACVRYTEH

SEQ ID NO: 21078 - protein, 129 aa, unidentified
  source 1..129: note = Halothiobacillaceae bacterium
  REGION 1..129: note = tr|A0A545SJU2|A0A545SJU2_9GAMM 6-carboxy-5,6,7,8-tetrahydropterin synthase; OS = Halothiobacillaceae bacterium OX=2268194 GN=queD PE=3; SV = 1
MAAQYTLKVHAEFAAAHQLHGYPGNCARMHGHNWKVEVEVTGSRLNDVGMVVDFKAMKRAAREVAEHLDHAYLNDIPPFDRINPTAENIAAWFYQEVAQRLNGEHQQVSAVTLWETDRACVTYRETNDR

SEQ ID NO: 21079 - protein, 152 aa, Halothiobacillus neapolitanus
  REGION 1..152: note = tr|D0L1D2|D0L1D2_HALNC Uncharacterized protein; OS = Halothiobacillus neapolitanus (strain ATCC 23641 / c2); OX = 555778 GN=Hneap_1680 PE=4 SV=1
MNTIAPQADASSALEPILDRLNKQLAASNGQFCLSVTVDFAAAHQLHGYEGNCARLHGHNWKIIVEVTGQKLDDVGMVIDFKAMKKAARAAAKTLDHQFLNQIEPFDRINPTAEHIAVWFFVELGRMLNQPNARVSAITVWENDYSAVTYRA

SEQ ID NO: 21080 - protein, 107 aa, Halothiobacillus sp.
  REGION 1..107: note = tr|A0A258QJL5|A0A258QJL5_9GAMM Uncharacterized protein OS=Halothiobacillus sp. 28-55-5 OX=1970386; GN = B7Y53_05040 PE=4 SV=1
MLGYEGNCARLHGHNWKIMVEVTGQKLDGVGMVVDFKTMKKAAREAAKKLDHQFLNEIAPFDQINPTAEHIAVWFFVELSGVLNQPNARISAITVWENEYSAVTYRA

SEQ ID NO: 21081 - protein, 135 aa, Halothiobacillus sp.
  REGION 1..135: note = tr|A0A191ZGD9|A0A191ZGD9_9GAMM 6-carboxy-5,6,7,8-tetrahydropterin synthase; OS = Halothiobacillus sp. LS2 OX=1860122 GN=A9404_05770 PE=3; SV = 1
MNDSAALPIPANAQFTLTVEVEFAAAHHLRGYEGNCARLHGHNWKVIVEVTGNKLDKVGMVMDFKTMKKAARATAEQLDHYYLNEIPPFDTVNPTAENIAVWFFDELSSTLNRPNARLSGITIWENDRSAVTYRA

SEQ ID NO: 21082 - protein, 283 aa, Halovibrio sp.
  REGION 1..283: note = tr|A0A2A2F922|A0A2A2F922_9GAMM 6-pyruvoyl tetrahydropterin reductase OS=Halovibrio sp. YL5-2; OX = 2032626 GN=CK501_07185 PE=4 SV=1
MNRLFVDNLTVIDFAYLDRHRGLVGESWIVDIELAGELNDAGMVFDFGHVKSTIKAHIDDQVDHRLLIPADYSRLQWLDPQSPGHFRWHLEDGTWIEHRSPAQAVATVPGEAVERQAIATRLSESLQRVLPDNVHEVRINLRLEQIEGAWYHYAHGLKKHDGNCQRIAHGHRSRIQILRNGERAPDLEHYWGERWRDIYLATADDRNDTFDDAGISYHRFSYDSDQGHFEIALPAARTEIMGPDTTVEWIACYLWDETRKLEPESRIEVHAFEGVNKGAIAEG

SEQ ID NO: 21083 - protein, 132 aa, Halovibrio sp.
  REGION 1..132: note = tr|A0A2A2F8E6|A0A2A2F8E6_9GAMM Uncharacterized protein OS=Halovibrio sp. YL5-2 OX=2032626 GN=CK501_05875; PE = 4 SV=1
MYQLTVRQHMMIAHSFSGEAFGPAQALHGATYVVDATFERPRLDDNDLVVDIGLATQVLGEVLGEFNMRNLDDHPDLKGRNTTTEFMAGMVFQRMADAIKAGRLGESAHGISGLAITLSESHIAWASYRGDL

SEQ ID NO: 21084 - protein, 132 aa, unidentified
  source 1..132: note = Halovibrio variabilis
  REGION 1..132: note = tr|A0A511USC3|A0A511USC3_9GAMM Uncharacterized protein OS=Halovibrio variabilis OX=31910 GN=ptpS PE=4 SV=1
MFRLCVRDHFMIAHSFKGEVFGPAQRTHGATYVVDVVFQRPELDDDGLVIDIGLASETLKAVLAGYNYQNLDEVSELQGKNTTTEFMAKVIFDQLAAAINAGEMGTTARGLTHLEVKLHESHVAWASFEGPL

SEQ ID NO: 21085 - protein, 249 aa, unidentified
  source 1..249: note = Halovibrio variabilis
  REGION 1..249: note = tr|A0A511UVQ8|A0A511UVQ8_9GAMM Uncharacterized protein OS=Halovibrio variabilis OX=31910 GN=HVA01_28780; PE = 4 SV=1
MDGELGDDGMLFDFGEVKPWIKRTLDSGLDHTLLVPTEAPGVTVTDCPEGVCVRTTTPYSMEVRGPKEAFSLLPWRTITPDTIATYLSQQLTTQRPDNVHQVTLTLSDEAINGAAYGYTHGLKRHIGNCQRIAHGHRSRLYIWQRDTRQPLLEQQWSDWLDNRYLLEQADIAAQDSDTLTCRYQAAQGDFSITLPLARCAVLPGPTTVENIAAWLAQEVATQSGAATRIQAFEGINKGAIATFSPSVTP

SEQ ID NO: 21086 - protein, 126 aa, unidentified; identical to SEQ ID NO: 18820
  source 1..126: note = Hamiltonella defensa
  REGION 1..126: note = tr|C4K6X8|C4K6X8_HAMD5 6-carboxy-5,6,7,8-tetrahydropterin synthase; OS = Hamiltonella defensa subsp. Acyrthosiphon pisum (strain 5AT) OX=572265 GN=sscR PE=3 SV=1

SEQ ID NO: 21087 - protein, 145 aa, unidentified
  source 1..145: note = Handelsmanbacteria sp.
  REGION 1..145: note = tr|A0A1F6CKU7|A0A1F6CKU7_HANXR Uncharacterized protein OS=Handelsmanbacteria sp. (strain RIFCSPLOWO2_12_FULL_64_10) OX=1817868 GN=A3F84_08545 PE=4; SV = 1
METIRVISDFHAAHRQLGYDGKCRYVHGHTWVGTFVLKAERFPRNCLDMSIDFGRLKDILRHLDHKMMVCEQDEVFLKSGLFEPEGVVLMPGDSPSVENVAHYCVDRVIQVIRSEYPDRGISYDIEVTIRETDHNVFVVERRVTI

SEQ ID NO: 21088 - protein, 123 aa, Hansschlegelia zhihuaiae
  REGION 1..123: note = tr|A0A4Q0MNV6|A0A4Q0MNV6_9RHIZ 6-carboxy-5,6,7,8-tetrahydropterin synthase; OS = Hansschlegelia zhihuaiae OX=405005 GN=EK403_05335 PE=3; SV = 1
MHELSKQFRFEAAHTLNRAIDVEPSRRIHGHSYRAEVTVRGAADPDSGMVVDLGLFSRALAEARDGLDHRFLDEVADLGPATLENLSAWIWRRVESVCPGLHKVTVYRDSEGDACSYFGPRAA

SEQ ID NO: 21089 - protein, 135 aa, Hansschlegelia zhihuaiae
  REGION 1..135: note = tr|A0A4Q0MHR1|A0A4Q0MHR1_9RHIZ 6-carboxytetrahydropterin synthase OS=Hansschlegelia zhihuaiae OX=405005 GN=EK403_13510 PE=4 SV=1
MYAVEVRDRIMIAHSLKGEVFGPAQALHGATFVVDVAFFRAELDPDNIVVDIGRAIEALGEALKPLNYANLDEVEALKSEVTTTEFLCRHVFDAMAAAARDGRLGAHADGVEKIRVTLHESDVARAWFEGAVAGG

SEQ ID NO: 21090 - protein, 136 aa, unidentified
  source 1..136: note = Hanstruepera neustonica
  REGION 1..136: note = tr|A0A2K1E0A8|A0A2K1E0A8_9FLAO 6-carboxy-5,6,7,8-tetrahydropterin synthase; OS = Hanstruepera neustonica OX=1445657 GN=C1T31_04925 PE=3; SV = 1
MRVTVSRKAHFNAAHRLYRKDWSEEKNDAVFGKCNNPNFHGHNYELIVSVTGAIDSETGYVIDMKDLKDIIKSEVEDAFDHKNLNVEVPEFKNLNPTAENIVVVIYNKMKAKLPDDLDLEVTLYETPRNFVSYSGN

SEQ ID NO: 21091 - protein, 152 aa, unidentified
  source 1..152: note = Hanstruepera neustonica
  REGION 1..152: note = tr|A0A2K1E3M2|A0A2K1E3M2_9FLAO 6-carboxytetrahydropterin synthase QueD OS=Hanstruepera neustonica OX=1445657 GN=C1T31_01640 PE=4 SV=1
MGTIRITKQFSFETGHALYGYDGKCKNVHGHSYKLSVTVIGKPIDDTNHVKHGMVIDFGDLKKIVKSEIVDVFDHATVFNKNTPHVELAKELEDRGHNVLLVNYQPTSEMMVIDFAKKIKKHLPEHITLHSLKLQETETSFAEWYASDNTSL

SEQ ID NO: 21092 - protein, 290 aa, Hapalosiphon sp.
  REGION 1..290: note = tr|A0A0M0SIJ0|A0A0M0SIJ0_9CYAN 6-pyruvoyl tetrahydropterin synthase OS=Hapalosiphon sp. MRB220; OX = 1704290 GN=AMR41_22075 PE=4 SV=1
MQCVVNRRAQFSASHRYWLPELSEAENLEKFGACSRFPGHGHNYVLFVSLIGELDKYGMVLNLSDVKHVIKQEVTSQLDFSYLNDVWAEFQQTLPTTENIARVIWQKLAPHLPLVRVQLFENPELWADYMGNGMEAYLSVSTHFSAAHRLAHPDLNDQDNFEIYGKCARPNGHGHNYHLEVTVKGEIDPRTGMIADLGALNQVIEDYVVEPFDHTFLNKDIPYFSEIVPTAENIALYISNLLRSPIQKLGAKLYKVKLIESPNNSCEIYCTGTESNSVSIAETQPVLARI

SEQ ID NO: 21093 - protein, 129 aa, Hapalosiphon sp.
  REGION 1..129: note = tr|A0A0M0SUS1|A0A0M0SUS1_9CYAN 6-carboxy-5,6,7,8-tetrahydropterin synthase; OS = Hapalosiphon sp. MRB220 OX=1704290 GN=AMR41_00350 PE=3; SV = 1
MPKWKLVTEFSFNSAHYIKDYDGPCGRMHGHNYTVRIEATALKLHSSQYCPNPVMVADFRTLRWAKQDVSKGGLDHCILNDVLPPEYETTAEMIAKYIYDETKKLLPADVQLKVAVSETPNSWVEYEDE

SEQ ID NO: 21094 - protein, 129 aa, unidentified
  source 1..129: note = Hapalosiphonaceae cyanobacterium
  REGION 1..129: note = tr|A0A328IGS3|A0A328IGS3_9CYAN 6-carboxy-5,6,7,8-tetrahydropterin synthase; OS = Hapalosiphonaceae cyanobacterium JJU2 OX=2109628; GN = C6Y22_08420 PE=3 SV=1
MPKWKLVTEFSFNSAHYIKDYDGPCGRMHGHNYTVRIEATALKLHSSQYCPHPVMVADFRTLRWAKQDVSKGGLDHCILNEILPPEYETTAEMIAKYIYDKTKKLLPADVQLKVAVSETPNSWVEYEDD

SEQ ID NO: 21095 - protein, 290 aa, unidentified
  source 1..290: note = Hapalosiphonaceae cyanobacterium
  REGION 1..290: note = tr|A0A328IGN9|A0A328IGN9_9CYAN 6-pyruvoyl tetrahydropterin synthase OS=Hapalosiphonaceae cyanobacterium JJU2 OX=2109628 GN=C6Y22_01900 PE=4 SV=1
MQCVVNRRAQFSASHRYWLPELSEAENLEKFGACSRFPGHGHNYVLFVSLIGELDKYGMVLNLSDVKHVIKQEVTSQLDFSYLNDVWAEFQQILPTTENIARVIWQKLAPHLPLVRVQLFENPELWADYMGNGMEAYLSVSTHFSAAHRLAHPDISDQDNFEIYGKCARPNGHGHNYHLEVTVKGEIDSRTGMIVDLGALNQVIEDYVVEPFDHTFLNKDISYFSEVVPTAENIALHISNLLRSPIQKLGAKLYKVKLIESPNNSCEIYCTETESNSVNIAETQPVLARI

SEQ ID NO: 21096 - protein, 130 aa, unidentified
  source 1..130: note = Hartmannibacter diazotrophicus
  REGION 1..130: note = tr|A0A2C9DBA0|A0A2C9DBA0_9RHIZ Queuosine biosynthesis protein QueD OS=Hartmannibacter diazotrophicus OX=1482074 GN=HDIA_4071 PE=4 SV=1
MFAVEVRDHIMIAHSLKRPVFGPAQGLHGATFVVDAAFFAESLDNDGLVVDIGLASEALSATLKPLNYANLDDIPEFAGKVTTTEFLCGHVFEKLREAAKSGALGASTLKKIRVTLHESHVARAWFEGDV

SEQ ID NO: 21097 - protein, 200 aa, Helicobacter acinonychis
  REGION 1..200: note = tr|Q17WX9|Q17WX9_HELAH Uncharacterized protein; OS = Helicobacter acinonychis (strain Sheeba) OX=382638; GN = Hac_1077 PE=4 SV=1
MIIRRLYKFCASHVVRNCSSLKCAQNIHGHNYEVEVFIETNRLDHANMALDFGLMQQEMQTFIDSFDHAHHFWDKESIEFQRFIENHCVRYVKCSFNLSAESYALMFLYYLSRILQKSVFSNHEGELKVSSVRVHETKNGYAESFLKDLENPHFKTLVYQNCVSFSQGIQSLWQDKDFFNKIISDEEKCFFHAKPLHQIP

SEQ ID NO: 21098 - protein, 208 aa, unidentified
  source 1..208: note = Helicobacter ailurogastricus
  REGION 1..208: note = tr|A0A0K2XEB3|A0A0K2XEB3_9HELI 6-carboxytetrahydropteri  n synthase @ Queuosine biosynthesis QueD, PTPS-I OS=Hel  icobacter ailurogastricus OX=1578720 GN=HAL011_04530 PE =4 SV=1
MQIRRSFHFCASHIVRNCTSRRCATSIHGHNYQVEIFLQAHKLDKAGMALDFGIFKNEIASFIDAFDHAHHFWDKEAEGFKNFITSTSARYVKLSFNPSAEHYALMFHLFISAILEATELHNNEAVGVCSVRVHETSYGYAQSETEDLSNPALMGAISLESVVFSPAILKDMPNPKLLEQLLNYHKAKKNSPCAPKKPFASPKPLVQI

SEQ ID NO: 21099 - protein, 208 aa, unidentified
  source 1..208: note = Helicobacter ailurogastricus
  REGION 1..208: note = tr|A0A0K2Y1J5|A0A0K2Y1J5_9HELI Queuosine biosynthesis QueD, PTPS-I OS=Helicobacter ailurogastricus; OX = 1578720 GN=HAL07_03430 PE=4 SV=1
MQIRRSFHFCASHIVRNCTSRRCATSIHGHNYQVEVFLQAHKLDKAGMALDFGIFKNEIASFIDAFDHAHHFWDKEAEGFKNFITSTSARYVKLSFNPSAEHYALMFHLFISAILEATELHNNEAVGVCSVRVHETSYGYAQSETEDLSNPALMGAISLESVVFSPAILKDMPNPKLLEQLLNYHKAKKNSPCAPKKPFASPKPLAQI

SEQ ID NO: 21100 - protein, 203 aa, Helicobacter anseris
  REGION 1..203: note = tr|A0A3D8JA34|A0A3D8JA34_9HELI Uncharacterized protein OS=Helicobacter anseris OX=375926 GN=CQA57_02290; PE = 4 SV=1
MIIRRMFGFCAAHIVRNCSSIRCSRSLHGHNYKVEVFVRSDKLDNAGMILDFGIFKNQIADFIDGFDHAYHVWDREQNEIRDFAIKNSERYVILTHNPSAENYALLLLFFVDKFLQAMEFGNNEGSIVVESVRVHETDHGYAEAFSNDLKNLYFMQKVSLDSILFSEAIKQDWKDPFMLDKLKEFELDKIKKPFVFQTPLQQV

SEQ ID NO: 21101 - protein, 204 aa, Helicobacter bizzozeronii
  REGION 1..204: note = tr|F8KRX1|F8KRX1_HELBC Queuosine biosynthesis QueD, PTPS-I OS=Helicobacter bizzozeronii (strain CIII-1); OX = 1002804 GN=HBZC1_05340 PE=4 SV=1
MQIRRSFGFCASHVVRNCTSKRCATSIHGHNYTLEVFIEAHKFDYAGMLLDFGIFKQEIASFIDAFDHAHHFWDQESPEFQDFITTHSARYAKLSFNPSAEGYALMFHFFLNAILQATTLQNAEAPLSVSSVRVHETNYGYAQSFLEDLHNPDLMAGIGLHSVQFSPAILQDLPNPLLLEQLKNYHANPKSPKPFKSPPPLRQI

SEQ ID NO: 21102 - protein, 99 aa, Helicobacter bizzozeronii
  REGION 1..99: note = tr|H5V9K1|H5V9K1_HELBI Queuosine biosynthesis QueD, PTPS-I OS=Helicobacter bizzozeronii CCUG 35545 OX=1002805; GN = HBZS_103660 PE=4 SV=1
MFHFFLNAILQATTLQNAEAPLSVSSVRVHETNYGYAQSFLEDLHNPDLMAGIGLHSVQFSPAILQDLPNPLLLEQLKNYHANPKSPKPFKSPPPLRQI

SEQ ID NO: 21103 - protein, 200 aa, Helicobacter cetorum
  REGION 1..200: note = tr|I0EN08|I0EN08_HELC0 6-carboxy-5,6,7,8-tetrahydropterin synthase; OS = Helicobacter cetorum (strain ATCC BAA-429 / MIT 00-7128) OX=182217 GN=HCW_05310 PE=4 SV=1
MIIRRLYKFCASHVVRNCSSLKCAQNIHGHNYEVEVFIETNRLDNACMALDFGIMQQEMQIFIDSFDHAHHFWDKESAEFQHFIEKNCVRYVKCSFNLSAESYALMFLYYLSLILQKSTFSNNEGELKVSSVRVHETKNGYAEAFLKDLENPNFKALVHKNCVSFSQGIQSLWQDKDFFNKIISDEEKCFFHAKPLHQIP

SEQ ID NO: 21104 - protein, 200 aa, Helicobacter cetorum
  REGION 1..200: note = tr|I0ETB9|I0ETB9_HELCM 6-carboxy-5,6,7,8-tetrahydropterin synthase; OS = Helicobacter cetorum (strain ATCC BAA-540 / MIT 99-5656) OX=1163745 GN=HCD_05930 PE=4 SV=1
MIIRRLYKFCASHVVRNCSSLKCAQNIHGHNYEVEVFIETNRLDNACMALDFGLMQQEMQIFIDSFDHAHHFWDKESAEFQHFIETHCVRYVKCSFNLSAESYALMFLYYLNLILQKSAFSNNEGELKVSSVRVHETKNGYAESFLKDLENPHFKALVHKNCVSFSQGIQNLWQDKNFFNKIISDENKCFFHAKPPHQIP

SEQ ID NO: 21105 - protein, 208 aa, Helicobacter felis
  REGION 1..208: note = tr|E7A9W8|E7A9W8_HELFC 6-pyruvoyl tetrahydrobiopterin synthase OS=Helicobacter felis (strain ATCC 49179 / NCTC 12436 / CS1) OX=936155 GN=Hfelis_05120; PE = 4 SV=1
MQIRRLFHFCASHIVRNCSSKRCATSIHGHNYQVEVFLEAHQLDKAGMALDFGIFKNEIASFIDCFDHAHHFWNKETQDLQDFITSTCARYVKLSFNPSAEHYALMFHLFLDAILRATELHNGEVVSVCSVRVHETSYGYAQSFSEDLKNPNLMDSISLESVQFSHGIIEEMPNPRLLEQLKTYHNTLECAICPPKKPFSSSPPLAQI

SEQ ID NO: 21106 - protein, 207 aa, Helicobacter heilmannii
  REGION 1..207: note = tr|A0A0K2Y1Y1|A0A0K2Y1Y1_HELHE 6-carboxytetrahydropterin synthase @ Queuosine biosynthesis QueD, PTPS-I OS=Helicobacter heilmannii; OX = 35817 GN=HHE01_01800 PE=4 SV=1
MQIRRLFHFCASHIVRNCTSRRCATSIHGHNYQVEVFLQAHKLDRAGMALDFGIFKNEIASFIDAFDHAHHFWDKETEGFQNFIISTCERHVKLSFNPSAEHYALMFHLFISAILEATELHNGEAIKVCSVRVHETSYGYAQSEAEDLKNPDLMGVISLEGVAFSPAILKDMPNPKLLEQLLNYHQAKENALNAAKPFKSPLPLAQI

SEQ ID NO: 21107 - protein, 205 aa, Helicobacter mustelae
  REGION 1..205: note = tr|D3UHV5|D3UHV5_HELM1 Putative 6-pyruvoyl tetrahydrobiopterin synthase OS=Helicobacter mustelae (strain ATCC 43772 / LMG 18044 / NCTC 12198 / 12198); OX = 679897 GN=HM U08210 PE=4 SV=1
MIIRRSFSFCAAHIVRNCTSLRCSRSLHGHNYKVEIFLKADRLDNAGMILDFGIFKKEIATFIDSFDHAHHFWNREAEEWKEFCKKASKRYVELCLNPSAENYALIFLFFIDKILGAMEFGNNEGALWVDSVRVHETDHGYAQAFAQDLQNPNFLKHLSLDGVCFSPGITEEWQDPQLLQKLKNYYKDPTLPKPFVNPSPEQQIS

SEQ ID NO: 21108 - protein, 200 aa, Helicobacter pylori
  REGION 1..200: note = sp|O25587|QUED_HELPY 6-carboxy-5,6,7,8-tetrahydropterin synthase; OS = Helicobacter pylori (strain ATCC 700392 / 26695); OX = 85962 GN=queD PE=3 SV=1
MVIRRLYQFCASHVVRNCSSLKCAQNIHGHNYEVEVFIETNRLDNANMALDFGLMQQEMQVFIESFDHAHHFWDKESLEFQRFIENHCVRYVKCSFNLSAESYALMFLYYLTKILQKSVFSNDEGELKVSSVRVHETKNGYAESFLKDLENPHFKSLVHDHCVSFSQGIQNLWHDKDFFNKIISDEKQCFFHAKPLHQIP

SEQ ID NO: 21109 - protein, 167 aa, Helicobacter pylori
  REGION 1..167: note = tr|M5YFK7|M5YFK7_HELPX Putative 6-carboxy-5,6,7,8-tetrahydropterin synthase; OS = Helicobacter pylori GAMchJs117Ai OX=1159061; GN = HMPREF1433_00600 PE=4 SV=1
MEVFIETNRLDNANMVLDFGLMQQEMQVFIESFDHAHHFWDKESVEFQRFIETNCVRYVKCSFNLSAESYALMFLYYLTKILQKSVFSNNEGELKVSSVRVHETKNGYAESFLNDLENPNFKSLVHDHCVSFSQGIQSLWHDKDFFHKIISDEEKCFFHAKPLHQIP

SEQ ID NO: 21110 - protein, 204 aa, Helicobacter sp.
  REGION 1..204: note = tr|A0A553V156|A0A553V156_9HELI Uncharacterized protein OS=Helicobacter sp. L8b OX=2593541 GN=FNE76_01785; PE = 4 SV=1
MQIRRSFGFCASHVVRNCTSKRCATSIHGHNYTLEVFIEAHKFDRAGMLLDFGIFKQEIASFIDAFDHAHHFWDQESPEFQDFITTHSARYVRLSFNPSAEGYALMFHFFLNAILQATALQNEEAPLSVSSVRVHETDYGYAQSFLKDLRNPDLMAGIGLHSVQFSPAILQDLPNPLLLEQLQNYHASPKALKPFKSPTPLRQI

SEQ ID NO: 21111 - protein, 205 aa, Helicobacter sp.
  REGION 1..205: note = tr|A0A268TSN3|A0A268TSN3_9HELI Uncharacterized protein OS=Helicobacter sp. 12S02232-10 OX=1476197; GN = BKH41_07330 PE=4 SV=1
MVIRRSFGFCASHIVRNCTSKRCSTSIHGHNYKVEIFVGADSLDSAGMILDFGIFKNQIADFIDGFDHAHHFWDKEEPDFIDFILKNSARYIRLSLNPSAENYALILLFYIDKILGATEFGNSEGAIKVTSVRIHETDHGYAEAFREDLNNPNFMKHISLDSVEFSEQIRLEWRDSDMLEKLKAYDCHSLQKPFKNPLPLHQIKI

SEQ ID NO: 21112 - protein, 211 aa, Helicobacter suis
  REGION 1..211: note = tr|A0A510HEG8|A0A510HEG8_9HELI 6-carboxy-5,6,7,8-tetrahydropterin synthase; OS = Helicobacter suis OX=104628 GN=queD PE=4 SV=1
MQIRRLFSFCASHIVRNCTSRRCATSIHGHNYQVEVFVQAHKLDRAGMALDFGIFKNEIASFIDAFDHAHHFWDQEPLDFQESIKQISKRYVKLSFNPSAENYALMFHFFLDALLQATELHNDEAVCICSVRVHETDYGYAQSFKEDLENPHLMRFISLESVEFSEGILEQMANPHLLDQLKAYHKNMTNPSSKKPFSSPLPLEQICPSHL

SEQ ID NO: 21113 - protein, 216 aa, Helicobacter suis
  REGION 1..216: note = tr|E7G4C8|E7G4C8_9HELI 6-pyruvoyl tetrahydrobiopterin synthase OS=Helicobacter suis HS5; OX = 710394 GN=ptpS PE=4 SV=1
MLQALMQIRRLFSFCASHIVRNCTSRRCATSIHGHNYQVEVFVQAHKLDRAGMALDFGIFKNEIASFIDAFDHAHHFWDQEPLDFQESIKQISKRYVKLSFNPSAENYALMFHFFLDALLQATELHNDEAVCICSVRVHETDYGYAQSFKEDLENPHLMRFISLESVEFSEGILEQMANPHLLDQLKAYHKNMTNPSSKKPFSSPLPLEQICPSHL

SEQ ID NO: 21114 - protein, 193 aa, unidentified
  source 1..193: note = Helicobacteraceae bacterium
  REGION 1..193: note = tr|A0A1J5F1M8|A0A1J5F1M8_9HELI 6-carboxytetrahydropterin synthase QueD; OS = Helicobacteraceae bacterium CG2_30_36_10 OX=1805215; GN = AUK54_07760 PE=4 SV=1
MIIRKLFKFENAHIVRGCSSVKCKQSIHGHSYKVELLFESNFLDNGQMVFDFGLMKQNIKALVESFDHAIALWSGDDKEYMSDMKRHSSRWVELPVSPSAEQFSRVIFVMIDNLLKLTTTVNGEKEVKLHSVIVHETDTGYAQGFKEDAYSQNMGVIELDKIIFSETIVNEWADSELWEKIKKKAIFINPKEV

SEQ ID NO: 21115 - protein, 193 aa, unidentified
  source 1..193: note = Helicobacteraceae bacterium
  REGION 1..193: note = tr|A0A1J4TSS2|A0A1J4TSS2_9HELI 6-carboxytetrahydropterin synthase QueD; OS = Helicobacteraceae bacterium CG1_02_36_14 OX=1805214; GN = AUJ81_08820 PE=4 SV=1
MIIRKLFKFENAHIVRGCSSKKCRESLHGHSYKVELLFESNFLDNGQMVYDFGLMKQNMKALIESFDHSIALWNGDEKEYINAMKKYSLRWVELPVSPSAEQFSRVIFVMIDKLLRLTTTLNGEKEVKLKSVIVHETDTGYAQAFKEDAYSENMGEIGLEKIIFSDEVISEWADCELWKKIKKGVVFVNPKEV

SEQ ID NO: 21116 - protein, 130 aa, Heliobacterium modesticaldum
  REGION 1..130: note = tr|B0TFF5|B0TFF5_HELMI 6-carboxy-5,6,7,8-tetrahydropterin synthase; OS = Heliobacterium modesticaldum (strain ATCC 51547 / Ice1); OX = 498761 GN=HM1_0437 PE=3 SV=1
MYELIVQTHFDAAHYLRDYPGDCARVHGHTWQVEVTLVGRQLDDLGMLIDFKEVKKAVKAICDQLDHRMINEHDYFLQRNPTAENLSCYFFHELAGWLKENHPHVRVGTVRIWESPRASICYRADDDISA

SEQ ID NO: 21117 - protein, 132 aa, Heliophilum fasciatum
  REGION 1..132: note = tr|A0A4R2S7P2|A0A4R2S7P2_9FIRM 6-carboxy-5,6,7,8-tetrahydropterin synthase OS=Heliophilum fasciatum OX=35700 GN=EDD73_105153 PE=3 SV=1
MYELIVQSHFDAAHFLRDYPGKCANVHGHTWQVELAVGGTQLDSLGILVDFYQLKTQLNKVCDSLDHRMINEQEPFLTQNPTAENLSRYFYESLTAWLKTAYPGNVVRYVRVWESPKASVRYIPEGAEGLIP

SEQ ID NO: 21118 - protein, 121 aa, unidentified
  source 1..121: note = Henriciella algicola
  REGION 1..121: note = tr|A0A399R9N8|A0A399R9N8_9RHOB 6-carboxy-5,6,7,8-tetrahydropterin synthase OS=Henriciella algicola OX=1608422 GN=D1222_13460 PE=3 SV=1
MFEISKAVTFEAAHFMGGKPEGHPYRNLHGHSFRLEAAVKGRVKPGEEWVEDFSKLTEALKATAEKLDHSLLNEIDGLSVPTLERICLWAAREIKAELPGLSRITLSRPSLNESCTLELGQ

SEQ ID NO: 21119 - protein, 121 aa, unidentified
  source 1..121: note = Henriciella barbarensis
  REGION 1..121: note = tr|A0A399QXH5|A0A399QXH5_9RHOB 6-carboxy-5,6,7,8-tetrahydropterin synthase OS=Henriciella barbarensis OX=86342 GN=D1224_05030 PE=3 SV=1
MFEISKAVTFEAAHFMGGKPEGHPYRNLHGHSFRLEAAIKGRVKPGEEWVEDFSKLTEALKATAEKLDHSLLNEIDGLSVPTLERICLWAAREIKSELPRLSRITLSRPSLNESCTLDLGQ

SEQ ID NO: 21120 - protein, 122 aa, Henriciella sp.
  REGION 1..122: note = tr|A0A2E6L7C5|A0A2E6L7C5_9RHOB 6-carboxy-5,6,7,8-tetrahydropterin synthase OS=Henriciella sp. OX=1968823 GN=COA64_07030 PE=3 SV=1
MFEISKAVTFEAAHFMGGKPEGHPYRNMHGHSFRLEAAVKGKVKPGEEWVEDFSKLTAALKAAAEKLDHSLLNEIDGLSVPTLERICLWAAREIGAELPGLRRVTLSRPSLNESCTLELSGQ

SEQ ID NO: 21121 - protein, 146 aa, Henriciella sp.
  REGION 1..146: note = tr|A0A399RR89|A0A399RR89_9RHOB 6-carboxy-5,6,7,8-tetrahydropterin synthase OS=Henriciella sp. JN25 OX=2305466 GN=D1223_00720 PE=3 SV=1
MATELTNPQTDRAALNPSGEVFEISKAVTFEAAHFMGGKPEGHPYRNLHGHSFRLEASVRGKVKPGEEWVEDFSKLTAALQDVAQQLDHTLLNEIEGLSVPTLERICLWVAKALRPTLPGLTRVTLSRPSLNETCTLDLAGQSNAQ

SEQ ID NO: 21122 - protein, 148 aa, Herbaspirillum aquaticum
  REGION 1..148: note = tr|A0A225SWZ1|A0A225SWZ1_9BURK 6-carboxy-5,6,7,8-tetrahydropterin synthase; OS = Herbaspirillum aquaticum OX=568783 GN=queD PE=3 SV=1
MLTITRKLEFDAGHRIPDHKSQCRNLHGHRYTLEITLTGAVIDIEGNSDNGMIMDFSDIKALAKEHLVDVWDHAFLVYEKDAPVRDFLASLPGHKTVIIGSIPTVENLAREAFAILKAAYKDRYGTGLHLQKLVLHETPNCWAEITAD

SEQ ID NO: 21123 - protein, 148 aa, Herbaspirillum hiltneri
  REGION 1..148: note = tr|A0A561JTJ0|A0A561JTJ0_9BURK 6-pyruvoyltetrahydropterin/6-carboxytetrahydropterin synthase OS=Herbaspirillum hiltneri OX=341045; GN = FHW60_104116 PE=4 SV=1
MLTITRKLEFDAGHRIPDHKSQCRNLHGHRYTLEITLVGKVIEVEGSSDNGMIMDFSDIKTLAKQHLVDVWDHAFLVYEKDQPVRDFLASLPDHKTVVIDRIPTVENLARTAFDILNAAYKDAYGTGLHLQKLVLHETPNCWAEITAD

SEQ ID NO: 21124 - protein, 148 aa, Herbaspirillum huttiense
  REGION 1..148: note = tr|A0A4R8JAS9|A0A4R8JAS9_9BURK 6-pyruvoyltetrahydropterin/6-carboxytetrahydropterin synthase OS=Herbaspirillum huttiense OX=863372; GN = DFS02_4921 PE=4 SV=1
MLTITRKLEFDAGHRIPDHKSQCRNLHGHRYTLEITLTGAVIDIEGNSDNGMIMDFSDIKALAKEHLVDVWDHAFLVYEKDTPVRDFLASLPGHKTVIIGSIPTVENLAREAFAILKAAYKDRYGTGLHLQKLVLHETPNCWAEITAD

SEQ ID NO: 21125 - protein, 148 aa, Herbaspirillum huttiense; identical to SEQ ID NO: 21122
  REGION 1..148: note = tr|A0A4P7AAM2|A0A4P7AAM2_9BURK 6-carboxy-5,6,7,8-tetrahydropterin synthase; OS = Herbaspirillum huttiense OX=863372 GN=queD PE=3 SV=1

SEQ ID NO: 21126 - protein, 148 aa, unidentified
  source 1..148: note = Herbaspirillum robiniae
  REGION 1..148: note = tr|A0A246WWN9|A0A246WWN9_9BURK 6-carboxytetrahydropterin synthase QueD OS=Herbaspirillum robiniae OX=2014887 GN=queD PE=4 SV=1
MLTITRKLEFDAGHRIPDHKSQCRNLHGHRYTLEITLTGAVIDIEGNSDNGMIMDFSDIKSLAKEHLVDVWDHAFLVYEKDTPVRDFLASLPGHKTVIIDSIPTVENLARAAFNILKAAYKDRYGTGLHLQKIVLHETPNCWAEVTAD

SEQ ID NO: 21127 - protein, 148 aa, Herbaspirillum rubrisubalbicans; identical to SEQ ID NO: 21124
  REGION 1..148: note = tr|A0A328J4H0|A0A328J4H0_9BURK 6-carboxy-5,6,7,8-tetrahydropterin synthase; OS = Herbaspirillum rubrisubalbicans OX=80842 GN=RB24_02500; PE = 4 SV=1

SEQ ID NO: 21128 - protein, 148 aa, Herbaspirillum rubrisubalbicans; identical to SEQ ID NO: 21124
  REGION 1..148: note = tr|A0A0U3LI90|A0A0U3LI90_9BURK 6-pyruvoyl-tetrahydropterin synthase protein; OS = Herbaspirillum rubrisubalbicans M1 OX=1078773; GN = Hrubri_2092 PE=4 SV=1

SEQ ID NO: 21129 - protein, 148 aa, Herbaspirillum seropedicae; identical to SEQ ID NO: 21124
  REGION 1..148: note = tr|D8IU48|D8IU48_HERSS 6-pyruvoyl-tetrahydropterin synthase protein OS=Herbaspirillum seropedicae (strain SmR1) OX=757424 GN=Hsero_2211 PE=4 SV=1

SEQ ID NO: 21130 - protein, 148 aa, Herbaspirillum seropedicae; identical to SEQ ID NO: 21124
  REGION 1..148: note = tr|A0A4R8NTF7|A0A4R8NTF7_HERSE 6-pyruvoyltetrahydropterin/6-carboxytetrahydropterin synthase OS=Herbaspirillum seropedicae OX=964; GN = DFO49_3441 PE=4 SV=1

SEQ ID NO: 21131 - protein, 148 aa, Herbaspirillum sp.
  REGION 1..148: note = tr|J3DHF5|J3DHF5_9BURK Queuosine biosynthesis protein QueD OS=Herbaspirillum sp. CF444 OX=1144319; GN = PMI16_01276 PE=4 SV=1
MLTITRKLEFDAGHRIPDHKSQCRNLHGHRYTLEITLVGKVIDVEGSSDNGMIMDFSDIKTLAKQHLVDVWDHAFLVYEKDKPVRDFLASLPDHKTVVIDRIPTVENLARTAFDILNAAYKDAYGTGLHLQKLVLHETPNCWAEITAD

SEQ ID NO: 21132 - protein, 148 aa, Herbaspirillum sp.
  REGION 1..148: note = tr|A0A418X160|A0A418X160_9BURK 6-carboxytetrahydropterin synthase QueD OS=Herbaspirillum sp. K2R10-39 OX=2320862 GN=queD PE=4 SV=1
MLTITRKLEFDAGHRIPDHKSQCRNLHGHRYTVEITLAGAVIEEEGSSDNGMIMDFSDVKALAKQHLVDVWDHAFLVYKKDSAVREFLESIPGHKTVIIDSIPTVENLARTAFNLLKAAYQDRYGTGLRLQKLVLHETPNCWAEITAD

SEQ ID NO: 21133 - protein, 149 aa, Herminiimonas arsenicoxydans
  REGION 1..149: note = tr|A4G4W5|A4G4W5_HERAR Putative 6-pyruvoyl tetrahydrobiopterin synthase OS=Herminiimonas arsenicoxydans OX=204773 GN=HEAR1380 PE=4 SV=1
MLTITRKLEFDAGHRIPDHKSQCRNLHGHRYTLEITLVGNVIDEEGSSDNGMIMDFSDIKSLAKQHLVDVWDHSFLVYEKDVKVREFLESIPDHKTVVIDRIPTVENLAQTAFNILNAAYKDHYGTGLRLHKLVLHETPNCWAEITAEG

SEQ ID NO: 21134 - protein, 149 aa, Herminiimonas fonticola
  REGION 1..149: note = tr|A0A4R6G6U8|A0A4R6G6U8_9BURK 6-pyruvoyltetrahydropterin/6-carboxytetrahydropterin synthase OS=Herminiimonas fonticola OX=303380; GN = EV677_2299 PE=4 SV=1
MLTITRKLEFDAGHRIPDHKSQCRNLHGHRYTLEITLVGNVIDEEGSSDNGMIMDFSDIKSLAKQHLVDVWDHSFIVYEEDAKVREFLESIPGHKTVIIDRIPTVENLAQTAFNILNAAYKDHYGTGLRLHKLVLHETPNCWAEITAEG

SEQ ID NO: 21135 - protein, 149 aa, Herminiimonas sp.
  REGION 1..149: note = tr|A0A3N7CWH4|A0A3N7CWH4_9BURK 6-carboxytetrahydropterin synthase QueD OS=Herminiimonas sp. KBW02 OX=2153363 GN=queD PE=4 SV=1
MLTITRKLEFDAGHRIPDHKSQCRNLHGHRYTLEITLLGEVIDVEGSSDNGMIMDFSDIKALAKEHLVDVWDHAFLVYEKDAKVREFLESIPGHKTVIIDRIPTVENLAQTAFNILNAAYQDRFGTGLRLHKLVLHETPNCWAEITAEG

SEQ ID NO: 21136 - protein, 273 aa, Herpetosiphon aurantiacus
  REGION 1..273: note = tr|A9B5F7|A9B5F7_HERA2 Uncharacterized protein; OS = Herpetosiphon aurantiacus (strain ATCC 23779 / DSM 785 / 114-95) OX=316274 GN=Haur_0130 PE=4 SV=1
MDVFATRRFNFSASHRYWREEWSLEQNEAVFGKCTNRYGHGHNYELFVTVAGAVDPITGMVMNMVELKRLVTMVLDQFDHKHLNEDTPYFREVIPTTENLVRVLWGLIEPQLPKGVRLAKLRLYENSDLYAEYFGRQQQATFNRRYEFSAAHRLHAQSLTDEANREIYGKCNNPNGHGHNYQLEVTVDGLIDAQTGMVIDLVDMDRRVQSVLDNWDHRHLDYQVAEFAEQPSTAENIVVVLWQRLEALFGSQLKHLRLWETANNVFDYPLSQH

SEQ ID NO: 21137 - protein, 165 aa, Herpetosiphon aurantiacus
  REGION 1..165: note = tr|A9B2M7|A9B2M7_HERA2 6-pyruvoyl tetrahydrobiopterin synthase OS=Herpetosiphon aurantiacus (strain ATCC 23779 / DSM 785 / 114-95) OX=316274; GN = Haur_2840 PE=4 SV=1
MSQRIYRLQVTKDQLGFAAAHFITMRGKCERLHGHNYRVTVEVEGFLCEDQYVVDFGVLKKHAAEIARTLDHRVLLAAENPKIEYSQNEQHLTVRYEDKYYVFPIAEVIMLPIQNTTAELLATYFCAELCERLRQDGVDTLKMVGVWVSEGPGQQAFASREWVQS

SEQ ID NO: 21138 - protein, 133 aa, Herpetosiphon geysericola
  REGION 1..133: note = tr|A0A0P6YJJ8|A0A0P6YJJ8_9CHLR 6-carboxy-5,6,7,8-tetrahydropterin synthase; OS = Herpetosiphon geysericola OX=70996 GN=SE18_16670 PE=3; SV = 1
MHAILTKQFRFEAAHQLPNHRGKCARLHGHSYLLEVSVRGPIQPARGQSDDGMVIDLEQIKEVVNEILIARVDHYNLNDVLSVPSTAENIIHWMWDELEQQAPEFGALLWRMRLWETASGYVEISRAEREAQP

SEQ ID NO: 21139 - protein, 273 aa, Herpetosiphon geysericola
  REGION 1..273: note = tr|A0A0P6XEC5|A0A0P6XEC5_9CHLR 6-pyruvoyl tetrahydropterin synthase OS=Herpetosiphon geysericola; OX = 70996 GN=SE18_22645 PE=4 SV=1
MDVFATRRFNFSASHRYWREEWSQEQNEAVFGKCTNRYGHGHNYELFVTVAGAVDPITGMVMNMVELKRLVTTVLDQFDHKHLNEDTPYFREIIPTTENLVQVLWGQIEPQLPKGVRLAKLRLYENNDLYAEYFGQQQRATFNRRYEFSAAHRLHAQQLSDEANRDLYGKCNNPNGHGHNYQLEVTVDGLIDAQTGMVIDLVDMDRRVQSVLDDWDHRHLDYQVAEFAEQPSTAENIVVVLWQRLEALFGSQLKHLRLWETANNVFDYPLSHN

SEQ ID NO: 21140 - protein, 124 aa, Hippea maritima
  REGION 1..124: note = tr|F2LW99|F2LW99_HIPMA 6-carboxy-5,6,7,8-tetrahydropterin synthase OS=Hippea maritima (strain ATCC 700847 / DSM 10411 / MH2) OX=760142; GN = Hipma_1067 PE=3 SV=1
MFEITITDDFAAAHRLNNYNGACENLHGHNFIVEVSVLCDKLDKAYIAIDFKELKSLTKEIVSKLDHRYLNELEPFKSTNPTSEMIAKYIFEELKKALKDRSCKPSKVSVFESLKAKATYFETQ

SEQ ID NO: 21141 - protein, 132 aa, Hoeflea sp.
  REGION 1..132: note = tr|A0A2E2X8I4|A0A2E2X8I4_9RHIZ Uncharacterized protein OS=Hoeflea sp. OX=1940281 GN=CME90_14400 PE=4 SV=1
MFAIEVRDHVMIAHSLPRPVFGLAQGMHGATFVVDAAFYTRELDEDGLAVDIGLATGVLSEVLKPLNYQNLDELEIFKGKVTTTEFLAKHVFDQIANAIKDGRLGEGGGRICKLRIMLHESHTARGWYEADL

SEQ ID NO: 21142 - protein, 116 aa, unidentified
  source 1..116: note = Holophagaceae bacterium
  REGION 1..116: note = tr|A0A3D6ELA4|A0A3D6ELA4_9BACT Uncharacterized protein OS=Holophagaceae bacterium OX=2052165; GN = DHV93_05385 PE=4 SV=1
MAITLSLRRPFVADHFHDLPGFQEDRHGHNWEVEAAVELASEAGEPAFAQALDTWVEAVDYRLLNDLPALAGRNPTAELLAEQAFLHLKDAALEPRWVRIREKANYWALCHAEMTP

SEQ ID NO: 21143 - protein, 166 aa, unidentified
  source 1..166: note = Hormoscilla sp.
  REGION 1..166: note = tr|A0A533PBI7|A0A533PBI7_9CYAN Uncharacterized protein OS=Hormoscilla sp. GUM202 OX=2480853; GN = EBE86_15630 PE=4 SV=1
MASNSTNKKPVIKYVSTKVFDGFSTCFRQWKASGTHCKYLHGYGVSFKVWFEGELDECNWVWEFGGMKRAKCKIDGMNPKEWMDYMFDHTVIVAEDDPQLDEFYKLESLGLIQLRVVLAVGAEKFAELVFQKLDEFVQAETKGRVRVKRVEFREHAKNTAFVEVMS

SEQ ID NO: 21144 - protein, 166 aa, unidentified
  source 1..166: note = Hormoscilla sp.
  REGION 1..166: note = tr|A0A533NG99|A0A533NG99_9CYAN Uncharacterized protein OS=Hormoscilla sp. GUM007 OX=2480854; GN = EBE85_20230 PE=4 SV=1
MASNSTSKKNVIKYVSTKVFDGFSTCFRQWKASGTHCKYLHGYGVSFKVWFEGELDECNWVWEFGGMKRAKCKIDGMNPKEWMDYMFDHTVIVAEDDPQLDEFYKLESLGLIQLRVVLAVGAEKFAELVFQKLDEFVQAETKGRVRVKRVEFREHAKNTAFVEVMS

SEQ ID NO: 21145 - protein, 132 aa, unidentified
  source 1..132: note = Hoyosella subflava
  REGION 1..132: note = tr|F6EF16|F6EF16_HOYSD Uncharacterized protein; OS = Hoyosella subflava (strain DSM 45089 / JCM 17490 / NBRC 109087 / DQS3-9A1) OX=443218 GN=AS9A_3715 PE=4 SV=1
MFSVTVREHMMIAHSLRGEVFGPAQRLHGATYVVDATFRRTELDPNGIVVDIGAATTALHSVLSDLNYRNLDDDPSLAGTNTTTEVLAKLVADRLVDRIHAGELGESASGLAGIMVTLRESHVAWASYERTP

SEQ ID NO: 21146 - protein, 132 aa, Humibacillus xanthopallidus
  REGION 1..132: note = tr|A0A543HTK9|A0A543HTK9_9MICO 6-pyruvoyl-tetrahydropterin synthase OS=Humibacillus xanthopallidus OX=412689 GN=FBY41_1704 PE=4 SV=1
MFSVTVRDHMMIAHSFTGEVFGPAQRLHGATFVVDVTLRGPELDGDGILVDIGLATDQVRQVVGELSYRNLDDEPAFAGTNTTTEVLARTIAERVAQRVRAGDLGGAARQATGLAVRLHESHVAWATYECDL

SEQ ID NO: 21147 - protein, 132 aa, Humibacillus xanthopallidus
  REGION 1..132: note = tr|A0A543PQ87|A0A543PQ87_9MICO 6-pyruvoyl-tetrahydropterin synthase OS=Humibacillus xanthopallidus OX=412689 GN=FHX52_2948 PE=4 SV=1
MFSVTVRDHMMIAHSFTGEVFGPAQRLHGATFVVDVTFRGPELDSDGILVDIGLATEQVRQVVGELSYRNLDDEPAFAGTNTTTEVLARTISERVAERVRAGDLGGAAGQVTGLAVRLHESHVAWATYECDL

SEQ ID NO: 21148 - protein, 137 aa, unidentified
  source 1..137: note = Humitalea rosea
  REGION 1..137: note = tr|A0A2W7IKS1|A0A2W7IKS1_9PROT 6-pyruvoyl-tetrahydropterin synthase OS=Humitalea rosea; OX = 990373 GN=C8P66_11083 PE=4 SV=1
MFSLTVADHVMIAHSFRGEEFGPAQRVHGATFVVEAEFRAKALDQANLLVDIAAARVELRKILDGFDYTNLDTLPVFAGQNTTTEYLCFHIHAELCAALKQGKLGAGGHKVEALKVLLRESPLAWAAYEAPIDAALA

SEQ ID NO: 21149 - protein, 128 aa, unidentified
  source 1..128: note = Hungateiclostridium clariflavum
  REGION 1..128: note = tr|G8LWS1|G8LWS1_HUNCD 6-carboxy-5,6,7,8-tetrahydropterin synthase; OS = Hungateiclostridium clariflavum (strain DSM 19732 / NBRC 101661 / EBR45) OX=720554 GN=Clocl_327 2 PE=3 SV=1
MKISKVSITKVFTFDSAHSLIDYPGKCKNIHGHTYKLEVTLKGMPDKNGLVIDFHDLNDLVENEILAQIDHKYLNDILDFNPTCEMLGLWIWDQIAKKIKDMECSLEKLVLWETPTSYITIDAKDMKE

SEQ ID NO: 21150 - protein, 127 aa, unidentified
  source 1..127: note = Hungateiclostridium saccincola
  REGION 1..127: note = tr|A0A2K9E768|A0A2K9E768_9FIRM 6-carboxy-5,6,7,8-tetrahydropterin synthase; OS = Hungateiclostridium saccincola OX=1677857 GN=queD PE=3; SV = 1
MKIGKVGISKVFTFDSAHHLNDYQGKCKNIHGHTYKLEVTLKGIPDKKGFVIDFHDLDDIIENQVLSKIDHKYLNELFDFNPTCEMLGLWLWDEILKKISDLDLSLEKLVLWETPTSYITIDKKDME

SEQ ID NO: 21151 - protein, 187 aa, unidentified
  source 1..187: note = Hungateiclostridium sp.
  REGION 1..187: note = tr|A0A4Q0IBT9|A0A4Q0IBT9_9FIRM Rubredoxin; OS = Hungateiclostridium sp. N2K1 OX=2487273 GN=EFD62_01155; PE = 4 SV=1
MRSFTTLDLQYAHRFYGFKGEAQYLHGHTGILTIEVEDDVNMGVNMVFPCNEIKKIAWDVLQNFDHALVLREDDPLLPAILGVYEAQGIKDGAPTNKQKGPAFKTELATAYPECRLVVTKETMTVEGMIKIVYDLLKDKLNIVKLTFTSGVNGATEEYEPKKDIERCPLCGIALNENGVCPKCGYKK

SEQ ID NO: 21152 - protein, 127 aa, unidentified
  source 1..127: note = Hungateiclostridium sp.
  REGION 1..127: note = tr|A0A4Q0I1X6|A0A4Q0I1X6_9FIRM 6-carboxy-5,6,7,8-tetrahydropterin synthase; OS = Hungateiclostridium sp. N2K1 OX=2487273 GN=queD PE=3; SV = 1
MKIGKVAITKVFTFDSAHHLVDYNGKCKNIHGHTYKLEVTLKGIPDKNGLVMDFHDMEDIIEDEVLEKIDHKYLNDVFDFNPTCEMIGLWLWEEIAKRVKDTQCSLERLMLWETPTSYITIDRHDME

SEQ ID NO: 21153 - protein, 128 aa, unidentified
  source 1..128: note = Hungateiclostridium straminisolvens
  REGION 1..128: note = tr|W4VA69|W4VA69_9FIRM 6-carboxy-5,6,7,8-tetrahydropterin synthase; OS = Hungateiclostridium straminisolvens JCM 21531; OX = 1294263 GN=JCM21531_3180 PE=3 SV=1
MMKIGKVAITKVFTFDSAHHLVDYNGKCRNIHGHTYKLEVTLKGTPDKNGLVMDFHDLEDIIEDEVLEKVDHKYLNDVFDFNPTCEMIGLWLWEEIAKRVQNTQCSLEKLVLWETPTSYITIDKHDME

SEQ ID NO: 21154 - protein, 127 aa, unidentified
  source 1..127: note = Hungateiclostridium thermocellum
  REGION 1..127: note = tr|A0A4V3Z863|A0A4V3Z863_HUNTH 6-carboxy-5,6,7,8-tetrahydropterin synthase; OS = Hungateiclostridium thermocellum OX=1515 GN=queD PE=3; SV = 1
MKIGKVSITKLFTFDSAHHLIDYNGKCRNIHGHTYKLEITLKGLPDENGLVMDFHDLEAIIENEVLEKVDHKYLNDVFDFNPTCEMIGLWLWEEISKQVQNTRCTLEKLVLWETPTSYITIDRNDME

SEQ ID NO: 21155 - protein, 127 aa, unidentified; identical to SEQ ID NO: 21154
  source 1..127: note = Hungateiclostridium thermocellum
  REGION 1..127: note = tr|A3DK22|A3DK22_HUNT2 6-carboxy-5,6,7,8-tetrahydropterin synthase; OS = Hungateiclostridium thermocellum (strain ATCC 27405 / DSM 1237 / JCM 9322 / NBRC 103400 / NCIMB10682 / NRRL B-4536 / VPI 7372) OX=203119 GN=Ct

SEQ ID NO: 21156 - protein, 187 aa, unidentified
  source 1..187: note = Hungatella effluvii
  REGION 1..187: note = tr|A0A2V3Y856|A0A2V3Y856_9CLOT 6-pyruvoyltetrahydropterin/6-carboxytetrahydropterin synthase OS=Hungatella effluvii OX=1096246 GN=DFR60_103219; PE = 4 SV=1
MRSITKLDLQYAHRFYGFKGEAQYLHGHTGILTLEVEDTINTGVNMVFPCNEIQKTAWDVLKNFDHATILREDDPLLPALLGVYEAQGIKDGAPTNIMKGPAFKTELATAYPECRLVVTKETMTVEGMIKIVYDLLKDKLNIVKITFTSGVNAASEEFNPQMTKDRCPLCGIALDENGVCPKCGYRK

SEQ ID NO: 21157 - protein, 187 aa, unidentified; identical to SEQ ID NO: 21156
  source 1..187: note = Hungatella hathewayi
  REGION 1..187: note = tr|A0A174MQN1|A0A174MQN1_9CLOT Queuosine biosynthesis protein QueD OS=Hungatella hathewayi; OX = 154046 GN=DXC39_30870 PE=4 SV=1

SEQ ID NO: 21158 - protein, 187 aa, unidentified; identical to SEQ ID NO: 19345
  source 1..187: note = Hungatella hathewayi
  REGION 1..187: note = tr|A0A3E2UA67|A0A3E2UA67_9CLOT Rubredoxin; OS = Hungatella hathewayi OX=154046 GN=DWZ21_26660 PE=4 SV=1

SEQ ID NO: 21159 - protein, 136 aa, unidentified
  source 1..136: note = Hwanghaeella grinnelliae
  REGION 1..136: note = tr|A0A437QX89|A0A437QX89_9PROT 6-carboxytetrahydropterin synthase OS=Hwanghaeella grinnelliae OX=2500179 GN=EOI86_07835 PE=4 SV=1
MFALTVRDHLMIAHSFTGEVFGPAQKLHGATYIVDVEFQCAELDADGLVVDIGLASQALSKVMETYNYKNLDEVPSLSGMNTTTEQMAKVVFDDMAARIAAGDLGPGGPRLSGMKVSLHESHIAWASYEGALGNGA

SEQ ID NO: 21160 - protein, 131 aa, Hwanghaeicola aestuarii
  REGION 1..131: note = tr|A0A2W7NFE9|A0A2W7NFE9_9RHOB 6-pyruvoyl-tetrahydropterin synthase OS=Hwanghaeicola aestuarii OX=568105 GN=LX81_00842 PE=4 SV=1
MFAVEVRDHIMIGHSLPAPVFGPAQGMHGATFTVDAAFFTEGIDEHGLVVDIGLATQALAETLEPLRYKNLDEVPEFAGKFTTTEFLCGHIFETLAAQVRAGNLGDDGRVKKLRIMLHESHLARAWYEAEI

SEQ ID NO: 21161 - protein, 123 aa, Hyalangium minutum
  REGION 1..123: note = tr|A0A085WRD4|A0A085WRD4_9DELT 6-carboxy-5,6,7,8-tetrahydropterin synthase OS=Hyalangium minutum OX=394096 GN=DB31_5289 PE=3 SV=1
MEIFKAFTFEAAHRLPFTPEGHKCRRLHGHSFSVEIHIRGAVDPQVGWIRDFADLKAAFQPLHETLDHHYLNEVPGLENPTSENLARWIWQRLKPSLPELSSVVVRETCTSGCIYAGEDEGRG

SEQ ID NO: 21162 - protein, 169 aa, Hyalangium minutum
  REGION 1..169: note = tr|A0A085WC69|A0A085WC69_9DELT Queuosine biosynthesis QueD, PTPS-I OS=Hyalangium minutum OX=394096; GN = DB31_1398 PE=4 SV=1
MTSRHRIFVSKDVLKFSSAHMTVFPDGSKERLHGHNFQVLLEFELHTTKLVSLLDFGLVKQTLAQVCARWDQRLLLGTRCPAFELVKQDATEVEFKLCGKRYVVPADEVALLPLENVVVETLAEELAFVLVEQLGSLLKRDVVAAMIVTVSESTNQGGSYRWEWEPRPS

SEQ ID NO: 21163 - protein, 136 aa, unidentified
  source 1..136: note = Hydrobacter penzbergensis
  REGION 1..136: note = tr|A0A1H2SUI4|A0A1H2SUI4_9BACT 6-pyruvoyltetrahydropterin/6-carboxytetrahydropterin synthase OS=Hydrobacter penzbergensis OX=1235997; GN = SAMN05444410_10275 PE=4 SV=1
MVYLTRLEHFNAAHKLFNPAWSREKNEAVFGVCANENWHGHNYELFVTIKGHPDPDTGFLYDVKKLSVIIKEHVIDKLDHKNLNMDVDFMAGQLCSTENLAIGIWKQLEPHLPEQVKLHCIKLYETSRIYVEYFGE

SEQ ID NO: 21164 - protein, 137 aa, unidentified
  source 1..137: note = Hydrobacter penzbergensis
  REGION 1..137: note = tr|A0A1H2SUB1|A0A1H2SUB1_9BACT 6-pyruvoyltetrahydropterin/6-carboxytetrahydropterin synthase OS=Hydrobacter penzbergensis OX=1235997; GN = SAMN05444410_10274 PE=4 SV=1
MNHKVAVFRKEHFNAAHRLHNPAWSEEKNNAEFGLCNNEHYHGHNYELVVKLVGVPDPATGYVMNLKDLSEIIREEVHTRFDHKNLNLDAVEFANLNPTAENIAVVIYQLLRKRIPEHLELTVRLYETKRNFVEYPA

SEQ ID NO: 21165 - protein, 282 aa, unidentified
  source 1..282: note = Hydrocarboniclastica marina
  REGION 1..282: note = tr|A0A4P7XF71|A0A4P7XF71_9ALTE 6-pyruvoyl tetrahydropterin reductase OS=Hydrocarboniclastica marina; OX = 2259620 GN=soil367_06415 PE=4 SV=1
MNRLFVENLTVIDFAFLHPRRGLVGESWIVDVELAGELDEQGMVFDFSSVKKIIKQIIDETVDHCLAYPTDAPNLHVIDAAQVTLHWQLDDGSRIEHYSPRTALCPVPGTAINADTLGPVLIAAIKGVLPGNVEDVELTLRPEVIEGAFYHYVHGLKKHLGNCQRIAHGHRSRLKVIRDDARDTQLEATWASQWQDIYIGTQEDICERFLENDIPYLRFRYQANQGDFELLVPEKRAYLIATDSTVEWIADHMATQIKQVHPQCRVRVQAFEGVGKGAIAER

SEQ ID NO: 21166 - protein, 282 aa, Hydrocarboniphaga daqingensis
  REGION 1..282: note = tr|A0A1M5KGJ9|A0A1M5KGJ9_9GAMM 6-pyruvoyl tetrahydropterin synthase OS=Hydrocarboniphaga daqingensis; OX = 490188 GN=SAMN04488068_0551 PE=4 SV=1
MTSLFVEQLTVIDCAYLDATRGLVGESWIVDIELIGDLDEQSMVLDFGEVKRRIKKVIDQSADHTLIVPQQASGLSLHQAGERSSLSFRSARGLIEHHSPSIALSVADADRIDAAAVVAYLQPRVASVLPPNVDELRLSLRSERIDGAFYHYVHGLKKHDGHCQRIAHGHRSRIHIGIGGQRQPTLEAALAQRWADIYLGTIDDLVDSSGGQCRYAYTAAEGRFELALPAAHVENLPGDTTVERIAEWIASGRWLPDAPAALEVRAYEGVMKGAIARRPIAA

SEQ ID NO: 21167 - protein, 279 aa, Hydrocarboniphaga effusa
  REGION 1..279: note = tr|I8T4L0|I8T4L0_9GAMM Uncharacterized protein; OS = Hydrocarboniphaga effusa AP103 OX=1172194 GN=WQQ_38530; PE = 4 SV=1
MEQLTVIDCAYLDARRGLVGESWIVDVELHGDLDEQSMVLDFGDVKKRLKRAIDGSVDHTLLVPQLAPELTIGQRDGDIELQFHSNAGLIEHRSPSVAVSLVDAESIDAQAVTDYLLPHLKAVVPANVAEIHLNLRTERIDGAYYHYVHGLKKHQGQCQRIAHGHRSRIEIRVDGIRSQALEAALAARWTDIYLATREDVVGAADGRLRFAYRSPEGRFELGLPESRVELIDSDTTVEKLAEWIAKRMSGNVKGGQTVQAKAYEGVMKGAIASCKNGDS

SEQ ID NO: 21168 - protein, 135 aa, Hydrocarboniphaga effusa
  REGION 1..135: note = tr|I8TCS9|I8TCS9_9GAMM Queuosine biosynthesis protein QueD OS=Hydrocarboniphaga effusa AP103 OX=1172194; GN = WQQ_15950 PE=4 SV=1
MYSITVRDHVMIAHSFRGEVFGPAQKLHGATYVIDVVFKRPELDADGLVVDIGLASRAVSAVLRAIDYRNLDDEPQFKGVNTTTEYLARYVFDRIVDAIRAGEIGETARGLAQLGVTLNESHVAAAGYEAALRDL

SEQ ID NO: 21169 - protein, 290 aa, Hydrococcus rivularis
  REGION 1..290: note = tr|A0A1U7HPS1|A0A1U7HPS1_9CYAN 6-pyruvoyl tetrahydropterin synthase OS=Hydrococcus rivularis NIES-593 OX=1921803 GN=NIES593_04180 PE=4 SV=1
MQCVIHRRAQFSASHRYWLPELDEAENWERFGAGSRFPGHGHNYVLYVSLAGEIDEYGMVQNLSNVKRVIQQEVTSQLDYAYLNDVWSEFQQTLPTTENIARVIWQRLAPHLPLVNIQLFEHPDLWADYKGNGMEATLTVKTHFSAAHQLALPELSQEENNEIYGKCARPNGHGHNYHLEVSVVGEIDPRTGMIVDLGDLQKAIDDYVVEPFDHTFLNKDIPHFAKVVPTAENIALYIAQLLQQPIRELGAELEKVKLIESPNNSCEIYCRQLAEGTTNLQTKKPALAAR

SEQ ID NO: 21170 - protein, 150 aa, Hydrocoleum sp.
  REGION 1..150: note = tr|A0A261KRJ1|A0A261KRJ1_9CYAN 6-carboxy-5,6,7,8-tetrahydropterin synthase OS=Hydrocoleum sp. CS-953 OX=1671698 GN=AFK68_13705 PE=4 SV=1
MELNEGKEGKSQTLKNESNSETWIIGKEFRFEASHQLPNHDGKCARLHGHSWRGIIYVSGNKLVNSGAKQGMIMDYGDIKKYLKPLLDNYLDHYHLNETTGLANPTSEAIAKWIYEQLEDKIPGLVAVRIDETCTSQCIYSKGESNFLIL

SEQ ID NO: 21171 - protein, 193 aa, Hydrogenimonas sp.
  REGION 1..193: note = tr|A0A432R0B3|A0A432R0B3_9PROT 6-carboxytetrahydropterin synthase QueD OS=Hydrogenimonas sp. OX=2231112 GN=DSY46_05095 PE=4 SV=1
MIIRKLYKFENAHIVRGCTSRRCSRSIHGHSYKVELLFTAPSLDRGQMVYDFGLTKGMIKDFIDAFDHAITLWSDDDPNYLADMKKWSERWVELPVNPSAEQFARTFFLLIDRVLEQTDMMNGESDVTLDSVIVHETETGYAQADRNDAYNRDMGAIKLDKIIFSEQVKAEWHNPKMFEELLEGKRFVNPSVV

SEQ ID NO: 21172 - protein, 193 aa, Hydrogenimonas sp.
  REGION 1..193: note = tr|A0A3G9GWG2|A0A3G9GWG2_9PROT 6-carboxytetrahydropterin synthase OS=Hydrogenimonas sp.; OX = 2231112 GN=NNO_0203 PE=4 SV=1
MKIRKMFRFENAHIVRGCTTRRCSRSIHGHSYRVELIFSSEALDRGQMVYDFGLTKGMIKELIDSFDHAITLWEGDDPEYLSDMKRWSERWVQIPVNPSAEQYARLFFVMIDRVLRQTEMVNRESGVELDSVVVHETESGYAEASREDAYSPRLGEIELRRFIFSKRVREEWSDPYMFERLLEGHIFENPKVV

SEQ ID NO: 21173 - protein, 193 aa, Hydrogenimonas thermophila
  REGION 1..193: note = tr|A0A1I5R3D9|A0A1I5R3D9_9PROT 6-pyruvoyltetrahydropterin/6-carboxytetrahydropterin synthase OS=Hydrogenimonas thermophila OX=223786; GN = SAMN05216234_12424 PE=4 SV=1
MIIRKLYKFENAHIVRKCTSRRCSRSIHGHSYKVELFFTAPSLDRGEMVYDFGLTKGMIKDFIDAFDHAITLWSSDDPEYLRDMKKWSERWVELPVNPSAEQFARTFFLIIDRVLQQTDMVNGESDVTIDSVIVHETDTGYAKADHSDAYNEEMGTTDLSKIIFSDQVKAEWKNPKMFEELLDGKRFVNPFVA

SEQ ID NO: 21174 - protein, 164 aa, Hydrogenivirga caldilitoris
  REGION 1..164: note = tr|A0A497XSI3|A0A497XSI3_9AQUI 6-pyruvoyltetrahydropterin/6-carboxytetrahydropterin synthase OS=Hydrogenivirga caldilitoris OX=246264; GN = BCF55_1510 PE=4 SV=1
MRWEISKTFRFEAGHRVWKQNLTYGRGAEFTRNVEVPQNKCVNLHGHSYLLEVTVGSDTLSEQDMVMDFYHIKNALKELIDRIDHSFIVDRNDPIYPELEEVATKYGAMKVFPVDFCPTAEALAKFFYDFLTERLKDAGLLGEVQVVKVVLWETSTSKAEYRAE

SEQ ID NO: 21175 - protein, 114 aa, Hydrogenivirga caldilitoris
  REGION 1..114: note = tr|A0A497XQM8|A0A497XQM8_9AQUI 6-carboxy-5,6,7,8-tetrahydropterin synthase; OS = Hydrogenivirga caldilitoris OX=246264 GN=BCF55_1564; PE = 3 SV=1
MPWTIRVKRKFNAAHFLTDYHGSPEPLHGHTWGVEVYLEAYELDKGGMGIDFVEIDNFLKDLLPDYKLLNELFDFSPSAENLAMWLYKKVKERYPTLKKVVVWETENCGAEYSE

SEQ ID NO: 21176 - protein, 115 aa, Hydrogenivirga sp.
  REGION 1..115: note = tr|A8V2T0|A8V2T0_9AQUI 6-carboxy-5,6,7,8-tetrahydropterin synthase; OS = Hydrogenivirga sp. 128-5-R1-1 OX=392423 GN=HG1285_12307; PE = 3 SV=1
MPYVVRVRKEFQAAHFLTDYHGKPEPLHGHTWEIEVFIRADKLDKGGMGYDFIEIDKFLDEILPNYKCMNDIYDFSPSAENVAKYLYDKIKEKYPSLQKVVVWETKHGGAEYYEE

SEQ ID NO: 21177 - protein, 80 aa, Hydrogenivirga sp.
  REGION 1..80: note = tr|A8V3A8|A8V3A8_9AQUI Uncharacterized protein (Fragment) OS=Hydrogenivirga sp. 128-5-R1-1 OX=392423; GN = HG1285_10956 PE=4 SV=1
NQIDHSFIIDKNDPLYPKFKEDFGFLKLFVVDFCPTAEAIAKFIYDFLEKKLEEAGLLEDIKVVSITVWETETGKAVYRK

SEQ ID NO: 21178 - protein, 113 aa, Hydrogenobacter hydrogenophilus
  REGION 1..113: note = tr|A0A285P6E2|A0A285P6E2_9AQUI 6-pyruvoyltetrahydropterin/6-carboxytetrahydropterin synthase (Fragment) OS=Hydrogenobacter hydrogenophilus; OX = 35835 GN=SAMN06265353_1 762 PE=4 SV=1
WTLVVKRKFNAAHFLTDYHGSPEPLHGHTWEVELHIRADALDTGGMGFDFVEIDNFLKEILPDYKLLNDLFDFSPSAENIAKWLYEKVKERYPSLQKVVVWETQNCGAEYFEL

SEQ ID NO: 21179 - protein, 164 aa, Hydrogenobacter hydrogenophilus
  REGION 1..164: note = tr|A0A285P3J8|A0A285P3J8_9AQUI 6-pyruvoyltetrahydropterin/6-carboxytetrahydropterin synthase OS=Hydrogenobacter hydrogenophilus OX=35835; GN = SAMN06265353_1553 PE=4 SV =1
MKWQITKVFNFEAGHRVWKQNLTYGRGAQFTQKEGVPQNKCVNLHGHSYTLEVVLGSDTLSEQDMVMDFYHVKNALKDLIDTIDHSFIIDINDPIYQELKEVAEKYGALKIFPVDFCPTAEALAKYFYDFLKKKLQEAGLLGEVRVVKVVLWETKTSKAEYMPE

SEQ ID NO: 21180 - protein, 164 aa, Hydrogenobacter thermophilus
  REGION 1..164: note = tr|D3DI44|D3DI44_HYDTT 6-pyruvoyl tetrahydrobiopterin synthase OS=Hydrogenobacter thermophilus (strain DSM 6534 / IAM 12695 / TK-6); OX = 608538 GN=HTH_1038 PE=4 SV=1
MKWKITKVFNFEAGHRVWKQNLTHGRGAELTGRDVPLQNKCVNLHGHSYTLEVTLGSDTLSEQDMVMDFYHVKNALKDLIDTMDHSFIIDVNDPMYEELKSLAEKYGAFKIFPVPFCPTAEALAKYFYDFLTQKLEQAGLLKDVKVVSVVLWETKTSKAEYRPE

SEQ ID NO: 21181 - protein, 114 aa, Hydrogenobacter thermophilus
  REGION 1..114: note = tr|D3DH61|D3DH61_HYDTT 6-carboxy-5,6,7,8-tetrahydropterin synthase; OS = Hydrogenobacter thermophilus (strain DSM 6534 / IAM 12695 / TK-6) OX=608538 GN=HTH_0703 PE=3 SV =1
MPWTVIVKREFQAAHFLTDYHGAPEPLHGHTWKVEVYIRADSLDSGGMGFDFVEIDGFLKEILPDYTLLNDIFDFSPSAENVAKWLYHKVKDRYPTVQKVVVWETQYCGAEYWE

SEQ ID NO: 21182 - protein, 113 aa, Hydrogenobaculum sp.
  REGION 1..113: note = tr|A0A2J6W7V0|A0A2J6W7V0_9AQUI 6-carboxy-5,6,7,8-tetrahydropterin synthase; OS = Hydrogenobaculum sp. OX=2053560 GN=C0170_06290 PE=3 SV=1
MPYTIRVKKKFNAAHFLTYYKGAPEPIHGHTFGIEVFIEAKELDQGGIGVDFVEVDNYLDDILPDYKLLNDVFDFSPSAENLAKYFFDTLKAKYNVKKVVVWETENCGAEYYE

SEQ ID NO: 21183 - protein, 162 aa, Hydrogenobaculum sp.
  REGION 1..162: note = tr|M1R8L2|M1R8L2_9AQUI 6-pyruvoyl-tetrahydropterin synthase OS=Hydrogenobaculum sp. HO OX=547144; GN = HydHO_1278 PE=4 SV=1
MWYISKTFRFEAGHRVWKQNLSCSRGSSLGSDCIENKCVNLHGHSYEIEVVLCSNVLDNQDMVMDFHHLKSALNPLIDQFDHSFIIDKNDPLFEAFKKINQDFGLKLTTVDFCPTAEALAKYIYDYVKEKFEKAGLLNEVDIYKVVVWETKTSKAEYIGERL

SEQ ID NO: 21184 - protein, 144 aa, Hydrogenophaga intermedia
  REGION 1..144: note = tr|A0A1L1PKE6|A0A1L1PKE6_HYDIT Queuosine biosynthesis protein QueD OS=Hydrogenophaga intermedia; OX = 65786 GN=BN948_03671 PE=4 SV=1
MFSITVRDHFMIAHSFRGEVFGPAQRLHGATYMVDLELRRAALDPDGIVADIGLATQVLREELARLNFRNLDELPEFAGRNTTTEFLAHALFQRLAARIAAGELGPHAVPGSASGGLTAMRVSLQESHVAWAAYEAVLAPLVAG

SEQ ID NO: 21185 - protein, 144 aa, Hydrogenophaga sp.
  REGION 1..144: note = tr|A0A1B3M405|A0A1B3M405_9BURK Uncharacterized protein OS=Hydrogenophaga sp. RAC07 OX=1842537; GN = BSY239_1732 PE=4 SV=1
MYAVNVRDHFMIAHSFQGAVFGPAQRMHGATYVVDLELRREALDADGIVVDIGLATQVLREELAALNFRNLDEEPQFNGRNTTTEFLARLIFDRVAARMAAGALGANALPSAGSAGVQHIRVTLNESHVAWASYEGAVPVRATA

SEQ ID NO: 21186 - protein, 141 aa, Hydrogenophaga sp.
  REGION 1..141: note = tr|A0A1Q3RDL3|A0A1Q3RDL3_9BURK Uncharacterized protein OS=Hydrogenophaga sp. 70-12 OX=1895769; GN = BGO22_06475 PE=4 SV=1
MFTLTVRDHFMIAHSFRGAVFGPAQALHGATYVVDLALRRPALDPDGLVVDIGLATQLLREELARLNFRNLDEAPEFAGRNTTTEFLAHALFERLAARIAAGALGPHAVPGGATGGLAAMRVTLNESHVASASYEAALPAA

SEQ ID NO: 21187 - protein, 120 aa, unidentified
  source 1..120: note = Hydrogenophilaceae bacterium
  REGION 1..120: note = tr|A0A1J4YZF9|A0A1J4YZF9_9PROT 6-carboxy-5,6,7,8-tetrahydropterin synthase; OS = Hydrogenophilaceae bacterium CG1_02_62_390 OX=1805218; GN = AUJ86_03790 PE=3 SV=1
MDIFNIFHLESARRLPNLPAEHPCARVHGHSFQVEVHLSGPLDETLGWVTDFAEVEVAWAPVKAALDHRYLNDVPGLDNPTSERLAIWIWDRLKPMLPGLAKIIIRETASSGCVYEGERA

SEQ ID NO: 21188 - protein, 166 aa, unidentified
  source 1..166: note = Hydrogenophilales bacterium
  REGION 1..166: note = tr|A0A259ELV2|A0A259ELV2_9PROT Uncharacterized protein OS=Hydrogenophilales bacterium 17-64-11 OX=1970526; GN = B7X91_09150 PE=4 SV=1
MPSAPFVTWVEPADLGFNSAHFITYGKVCENLHGHNFHARVAAHGGDSGEGYVLDFVALTRLARGICQQLSDRVILPGTSPVVKLAEEDGLIKAESFGKRFWVEKEGCVVLPIANVTAELLAFHIGERLVEALRRENLTAGVQLLEVGVEEADRQWGFSRHRPRHD

SEQ ID NO: 21189 - protein, 156 aa, unidentified
  source 1..156: note = Hydrogenophilales bacterium
  REGION 1..156: note = tr|A0A5C7EKR5|A0A5C7EKR5_9PROT 6-carboxytetrahydropterin synthase QueD; OS = Hydrogenophilales bacterium SM250 OX=2602750 GN=queD; PE = 4 SV=1
MLITRRLEFDAGHRIPNHSSNCRHLHGHRYALEVTLSGNIITSEGAPEQGMVMDFAEVKAIAQRHVVDAWDHAFLVYAQDTVVVEFLRSLPGHKTVVLAAPPTAENLALEAFRILDAAYRDVYGNQLKLERVRVYETPNCWADAVRGQDPSLQGKG

SEQ ID NO: 21190 - protein, 167 aa, Hydrogenophilus thermoluteolus
  REGION 1..167: note = tr|A0A2Z6DXH5|A0A2Z6DXH5_HYDTE Uncharacterized protein OS=Hydrogenophilus thermoluteolus OX=297; GN = HPTL_0882 PE=4 SV=1
MTLERQPDLPPGVEAEFAITRRLEFDAGHRIPDHRSLCRHVHGHRYVLELTLVGMPDQTPGSPERGMVMDFGDVKRIAWEQLVGHWDHAFLVWNEDPVADAIDAVLPNHRTVRLDVIPTAENLARIAFTTLAPHFRARYGRHLRLARVRLYETPNCWADYPLEIGAH

SEQ ID NO: 21191 - protein, 162 aa, Hydrogenothermus marinus
  REGION 1..162: note = tr|A0A3M0BN66|A0A3M0BN66_9AQUI 6-pyruvoyltetrahydropterin/6-carboxytetrahydropterin synthase OS=Hydrogenothermus marinus OX=133270; GN = CLV39_0342 PE=4 SV=1
MRYEITKKFKFEAGHRVWKQNLMAGKGAKLMGNEIPPNPCLNIHGHSYKLEVTVGSDTLNEQEMVIDFYHIKAALKDLIDNQIDHSFIIDKNDPLYPKFKEDFGFLKLFIVDFCPTAEAIAKFIYEFLEKKLEEAGLLEDIKIVSITVWETETGKATYKGEK

SEQ ID NO: 21192 - protein, 115 aa, Hydrogenothermus marinus
  REGION 1..115: note = tr|A0A3M0BRL0|A0A3M0BRL0_9AQUI 6-carboxy-5,6,7,8-tetrahydropterin synthase; OS = Hydrogenothermus marinus OX=133270 GN=CLV39_0790 PE=3; SV = 1
MPYIVRVRKEFQAAHFLTDYHGKPEPLHGHTWEVEIFIRADKLDKGGMGFDFIEIDKFLDEILPNYKCMNDIYDFSPSAENVAKYLYDKIKERYPSLQKVVVWETKHGGAEYYEE

SEQ ID NO: 21193 - protein, 115 aa, Hydrogenothermus sp.
  REGION 1..115: note = tr|A0A432REF0|A0A432REF0_9AQUI 6-carboxy-5,6,7,8-tetrahydropterin synthase; OS = Hydrogenothermus sp. OX=2231113 GN=DSY47_03515 PE=3 SV=1
MPYIVRVRKEFQAAHYLTDYHGKPEPLHGHTWEVEVFIRADKLDNGGMGYDFIEIDRFLDEILPNYKCMNDIYDFSPSAENVARYLYEKIKEKYPSLQKVVVWETKHGGAEYYEE

SEQ ID NO: 21194 - protein, 160 aa, Hydrogenothermus sp.
  REGION 1..160: note = tr|A0A432RBL7|A0A432RBL7_9AQUI 6-carboxy-5,6,7,8-tetrahydropterin synthase; OS = Hydrogenothermus sp. OX=2231113 GN=DSY47_05850 PE=4 SV=1
MKYEITKRFKFEAGHRVWKQNLMAGKGAKLMGNEIPPNPCLNIHGHSYKVEVTVGSDTLNEQDMVIDFYHIKAALKDLIDNQIDHSFIIDKNDPLYPKFKEDFGFLKLFVVDFCPTAEALAKFIYDFLTKKLEEAGLLDDIKVVGVTVWETETGKAVYKG

SEQ ID NO: 21195 - protein, 125 aa, unidentified
  source 1..125: note = Hydrogenovibrio crunogenus
  REGION 1..125: note = tr|Q31FT9|Q31FT9_HYDCU 6-carboxy-5,6,7,8-tetrahydropterin synthase; OS = Hydrogenovibrio crunogenus (strain XCL-2) OX=317025; GN = Tcr_1389 PE=3 SV=1
MAQQFVLKTLLDFASAHSLRGYPGDCAKLHGHNWKIEVQVVGDKLNDIGMLVDFKEIKRHAKEVISELDHTFLNDHPHFKEKNPTAENIAEYIYKQIQQRIQSSTVKMHSLTVWENDRNCVIYSE

SEQ ID NO: 21196 - protein, 125 aa, unidentified
  source 1..125: note = Hydrogenovibrio crunogenus
  REGION 1..125: note = tr|A0A4P7P0I0|A0A4P7P0I0_9GAMM 6-carboxy-5,6,7,8-tetrahydropterin synthase; OS = Hydrogenovibrio crunogenus OX=39765 GN=queD PE=3 SV=1
MAQQFVLKTLLDFASAHSLRGYPGDCAKLHGHNWKIEVQVVGDKLNDIGMLVDFKEIKRHAKEVISELDHTFLNDHPHFKEKNPTAENIAEYLYQQIQQRIESSTVNMHSLTVWENDRNCVIYSE

SEQ ID NO: 21197 - protein, 129 aa, Hydrogenovibrio marinus
  REGION 1..129: note = tr|A0A066ZSW1|A0A066ZSW1_HYDMR 6-carboxy-5,6,7,8-tetrahydropterin synthase; OS = Hydrogenovibrio marinus OX=28885 GN=EI16_03430 PE=3 SV=1
MAQQFVLKTLLDFASAHSLRGYPGDCANLHGHNWKIEVEIVGQELNDIGMVIDFKQIKKHAKEIVKELDHKFLNDIEYFKTVNPTAENIAQYLFRQIQQRIEAPNVTMHQITVWENDRNCVIYSEPSTS

SEQ ID NO: 21198 - protein, 125 aa, Hydrogenovibrio sp.
  REGION 1..125: note = tr|A0A2I2A4Q6|A0A2I2A4Q6_9GAMM 6-carboxy-5,6,7,8-tetrahydropterin synthase; OS = Hydrogenovibrio sp. SC-1 OX=2065820 GN=queD PE=3 SV=1
MAQQFILKTLLDFASAHSLRGYPGDCAKLHGHNWKIEIEVIGHKLNEIGMLIDFKEIKRHAKAVIDELDHSFLNDHPHFKELNPTAEHIAQYIYREIQNRIGSNQLKMHRLTVWENDRNCVIYSE

SEQ ID NO: 21199 - protein, 127 aa, unidentified
  source 1..127: note = Hydrogenovibrio thermophilus
  REGION 1..127: note = tr|A0A410H3M1|A0A410H3M1_9GAMM 6-carboxy-5,6,7,8-tetrahydropterin synthase; OS = Hydrogenovibrio thermophilus OX=265883 GN=queD PE=3 SV=1
MAQQFVLKTLLDFAAAHSLKNYPGDCAKLHGHNWKIEVQVQGSKLNEIGMLVDFKEIKKHAKQVVAELDHTFLNDHPYFKELNPTAENIAVFLYREIESRIQSDTVTMHSLTVWENDRNCVIYSEND

SEQ ID NO: 21200 - protein, 334 aa, unidentified
  source 1..334: note = Hydromonas duriensis
  REGION 1..334: note = tr|A0A4R6YAY6|A0A4R6YAY6_9BURK 6-pyruvoyltetrahydropterin/6-carboxytetrahydropterin synthase OS=Hydromonas duriensis OX=1527608 GN=DFR44_10222; PE = 4 SV=1
MTIESICCFNFEAARTLSSVASTHGHSFKVTARARVEQDVLEQSLADVCQPWQMQDLNAFFSNPTDVLIAQHIADTLQQQLGQVVKVELRSSPDVWVACTENAIFHGLTASFSAAHYLPNVPEGHQCGRLHGHGFKVKLWADARLSDASALEKAWLDVRAQLHHAYLNHIEGLENPTSEHLTEWLWQRLGAALPMRAVEVFETSTAGSRRDASGFTIWKELRFEAACPFDDAGRYTGHSYLTRLYLHGSQLDVHAGWLRDFAEVKAIFKPIYQQLDHYALDCISDLSTYDNGSLAAWLVGQLNDTLPELRAVEVFESEQRGAAAYVQRSCDVHC

SEQ ID NO: 21201 - protein, 340 aa, unidentified
  source 1..340: note = Hydromonas sp.
  REGION 1..340: note = tr|A0A345DD83|A0A345DD83_9BURK 6-carboxy-5,6,7,8-tetrahydropterin synthase OS=Hydromonas sp. F02 OX=2268024 GN=queD PE=4 SV=1
MNNLLKQRFIAGMGFEAARRLGSSERHGHSFWVTVTCEVPLDVLKQALASVCAVWHMRDLNDFFIEPSDVTLAQCIRVTVQSQLAHVGDGGDREVSVELRSAPNVGVCYEGAQVCRWLSADFSAAHFLPNVPEGHQCGRLHGHGFKVKLSVDAQACAPERLAGAWQHLHAQLHHSHLNHIKGLENPTSEHLTEWLWQQLQSVVPLCSVEVFETSTAGSRRDAKGFTIWKEVRFEAAQPFDGAGRYTGHSYLARLYLQGETLDAQAGWLRDFADVKAVFKPIYNQLDHYALDAIADLTAYDSATLAAWMATQLSGALPELSRVDVFENESSGAAVFVQEGA

SEQ ID NO: 21202 - protein, 136 aa, unidentified
  source 1..136: note = Hydrotalea sandarakina
  REGION 1..136: note = tr|A0A2W7SBX8|A0A2W7SBX8_9BACT 6-pyruvoyltetrahydropterin/6-carboxytetrahydropterin synthase OS=Hydrotalea sandarakina OX=1004304; GN = LX80_00755 PE=4 SV=1
MVYLTRQEHFNAAHKLYNPNWSKEKNEAVFGVCANENWHGHNYDLFVTIKGNPDPETGFLYDVKKLSQLIKTKVIDKLDHKNLNLDVDFMLGKMCSTENLAIAIWEQLQPHLPENVQLHCIKLYETARIYVEYFGE

SEQ ID NO: 21203 - protein, 139 aa, unidentified
  source 1..139: note = Hydrotalea sandarakina
  REGION 1..139: note = tr|A0A2W7SF80|A0A2W7SF80_9BACT 6-carboxy-5,6,7,8-tetrahydropterin synthase OS=Hydrotalea sandarakina OX=1004304 GN=LX80_02245 PE=3 SV=1
MMDLNKVAIYRKEHFNAAHRLHNANWSDEKNAEIFGLCNNKNFHGHNYELIVKVTGIPDANTGYVIDTKVLSTIIKEEVLNRFDHKNLNLDTVYFKELNPTAENIAKVIYQLLRNKLDENLELKIFLYETERNYVEYPA

SEQ ID NO: 21204 - protein, 158 aa, Hydrotalea sp.
  REGION 1..158: note = tr|A0A4Q0AWH8|A0A4Q0AWH8_9BACT 6-carboxytetrahydropterin synthase OS=Hydrotalea sp. AMD; OX = 2501297 GN=EO766_10940 PE=4 SV=1
MKASINKTEVMIQVTKIFKFEMAHAIYGYDGPCKNIHGHSYVLHVSVTLKNATDEYLLAPGFVIDFKMLKKIVNEAIVQQLDHSVVVSKAFIQAHPQLADLSNVRIWEMEPSAENIISYIQKQLQLLLPDAIQLQKLQLFETADSYAEWINTKSRFHE

SEQ ID NO: 21205 - protein, 138 aa, Hydrotalea sp.
  REGION 1..138: note = tr|A0A4Q0AVC9|A0A4Q0AVC9_9BACT 6-carboxy-5,6,7,8-tetrahydropterin synthase OS=Hydrotalea sp. AMD OX=2501297 GN=EO766_13005 PE=3 SV=1
MKQNKVAVYRKEHFNAAHRLHNNAWSDEKNATVFGLCNNKNFHGHNYELIVKVTGEPNPDTGYVLDLKVLSALIKKEILDQFDHKNLNLDTGYFQQVNPTAENIAKVIYQLLRDKLDEQLELKIFLYETERNYVEYPA

SEQ ID NO: 21206 - protein, 289 aa, unidentified
  source 1..289: note = Hyella patelloides
  REGION 1..289: note = tr|A0A563W4T3|A0A563W4T3_9CYAN Uncharacterized protein OS=Hyella patelloides LEGE 07179 OX=945734; GN = H1P_870015 PE=4 SV=1
MKCIINRRAKFSASHRYWLPELDEAENQRLFGACSRFPGHGHNYVLYVSLEGELDQYGMVENLSTVKKVIKKEVTSQLDYGYLNDAWSEFSETLPTTENIARVIWQKLAPHLPLVDIQLYESPELWANYRGNNMESALTIKTHFSAAHRLAKPELSLQENTEVYGKCARVNGHGHNYHLEVSVVGQIDSRTGMLVDLGELQRVIDELVVEPMDHTFLNKDIPYFAEVVPTAENIALYIAQTLSSPIKELGAELDKVKLIESPNNSCEIFCRQGVSNLSSTENKKPAMAV

SEQ ID NO: 21207 - protein, 135 aa, Hymenobacter actinosclerus
  REGION 1..135: note = tr|A0A1I0AKF4|A0A1I0AKF4_9BACT 6-carboxy-5,6,7,8-tetrahydropterin synthase; OS = Hymenobacter actinosclerus OX=82805; GN = SAMN04487998_0739 PE=3 SV=1
MPITICRQEHFNAAHRLHNPAWSDERNQEVFDKCNNANYHGHNYQLIVRLTGEIDPETGYVYDMKKLSDLIKREILDTFDHRNLNLDVADFQHLNPTAENIAVVSWNRLRPHLADNLALSVTLYETERNFVEYHG

SEQ ID NO: 21208 - protein, 139 aa, Hymenobacter actinosclerus
  REGION 1..139: note = tr|A0A1I0B4J7|A0A1I0B4J7_9BACT 6-pyruvoyltetrahydropterin/6-carboxytetrahydropterin synthase OS=Hymenobacter actinosclerus OX=82805; GN = SAMN04487998_0939 PE=4 SV=1
MIYISRQEHFNAAHKLHNPKWSDERNAEVFGPCANVNWHGHNYDLIVTVKGRPDPDTGFVIDLKQLSTLIRTHVIDQVDHKNLNLDVPFMAGQLASTENLVVAFWKILAPEIEAISPGRLHSLKLYETPRNFVEYFGEE

SEQ ID NO: 21209 - protein, 135 aa, unidentified
  source 1..135: note = Hymenobacter amundsenii
  REGION 1..135: note = tr|A0A246FMD8|A0A246FMD8_9BACT 6-carboxy-5,6,7,8-tetrahydropterin synthase; OS = Hymenobacter amundsenii OX=2006685 GN=CDA63_06725 PE=3; SV = 1
MTVTICRQEHFNAAHRLHNSAWTDARNEQVFGKCNNPNYHGHNYRLIVRLTGEIDPETGYVYDMKRLSDLIKREILDIFDHRNLNLDTAEFRDLNPTAENIAVVSWNRLRPHVASHLALSVTLYETERNSVEYHG

SEQ ID NO: 21210 - protein, 139 aa, unidentified
  source 1..139: note = Hymenobacter amundsenii
  REGION 1..139: note = tr|A0A246FND9|A0A246FND9_9BACT 6-carboxytetrahydropterin synthase QueD OS=Hymenobacter amundsenii OX=2006685 GN=CDA63_04120 PE=4 SV=1
MIYISRQEHFNAAHKLHNPKWSEERNREVFGPCANVNWHGHNYDLIVTVKGQPDPETGFVIDLKELSTLIRTHVIDQVDHKNLNIDVPFMQGQLASTENLVVAFWKILQPEIEQISPARLHCLKLYETPRNFVEYYGEA

SEQ ID NO: 21211 - protein, 138 aa, unidentified
  source 1..138: note = Hymenobacter aquaticus
  REGION 1..138: note = tr|A0A4Z0PXM1|A0A4Z0PXM1_9BACT 6-carboxytetrahydropterin synthase OS=Hymenobacter aquaticus OX=1867101 GN=E5K00_19730 PE=4 SV=1
MIYVSRQEHFNAAHKLYNPAWTEERNKEVFGPCANTNWHGHNYDLIVTVKGQPDPETGFVIDLKQLSTLIREHIVDQVDHKNLNLDVPFMKDQLASTENLVVAFWEILNREIPKISRAQLHCIKLYETPRNFVEYYGE

SEQ ID NO: 21212 - protein, 135 aa, unidentified
  source 1..135: note = Hymenobacter aquaticus
  REGION 1..135: note = tr|A0A4Z0PXJ9|A0A4Z0PXJ9_9BACT 6-carboxy-5,6,7,8-tetrahydropterin synthase; OS = Hymenobacter aquaticus OX=1867101 GN=E5K00_18280 PE=3; SV = 1
MNVTVCRTEHFNAAHRLHNPAWSDERNAQVFGKCNNPHYHGHNYVLTVRLTGSIDPATGYVYDLKRLSDLIKREILDTFDHRNLNLDTEEFRDLNPTAENIAVVIWNRLRAHVEPQLALSVTLYETDRNFVEYHG

SEQ ID NO: 21213 - protein, 138 aa, Hymenobacter chitinivorans
  REGION 1..138: note = tr|A0A2M9AR20|A0A2M9AR20_9BACT 6-pyruvoyltetrahydropterin/6-carboxytetrahydropterin synthase OS=Hymenobacter chitinivorans DSM 11115; OX = 1121954 GN=CLV45_4832 PE=4 SV =1
MIYVSRQEHFNAAHKLYNPAWTEERNKEVFGPCANTNWHGHNYDLIVTVKGQPDPETGFVIDLKQLSTIIRQHVVDQVDHKNLNLDVPFMKDQLASTENLVVAFWQILAREIPRISSAQLHCIKLYETPRNFVEYYGE

SEQ ID NO: 21214 - protein, 135 aa, Hymenobacter chitinivorans
  REGION 1..135: note = tr|A0A2M9BAQ9|A0A2M9BAQ9_9BACT 6-carboxy-5,6,7,8-tetrahydropterin synthase; OS = Hymenobacter chitinivorans DSM 11115 OX=1121954; GN = CLV45_3380 PE=3 SV=1
MQVTVGRTEHFNAAHRLHNPAWSDERNTQVFGKCNNPHYHGHNYEVTVRLTGPVDPATGYVYDLKRLSDLIKREILDTFDHRNLNLDTEDFRELNPTAENIAVVIWNRLRAHVEPHLVLSVTLYETDRNFVEYHG

SEQ ID NO: 21215 - protein, 137 aa, unidentified
  source 1..137: note = Hymenobacter coccineus
  REGION 1..137: note = tr|A0A1G1TLG0|A0A1G1TLG0_9BACT 6-carboxytetrahydropterin synthase QueD OS=Hymenobacter coccineus OX=1908235 GN=BEN49_18745 PE=4 SV=1
MIYVSRHEHFNAAHKLHNPKWSDERNREVFGPCANVNWHGHNYDLVVTVKGTPDPDTGFVVDLKALSDLIKEHVTSQVDHKNLNLDVPFLAGQMASTENLAVAFWEIIARELPAITPAQLHCVKLYETPRNFVEYYG

SEQ ID NO: 21216 - protein, 135 aa, unidentified
  source 1..135: note = Hymenobacter coccineus
  REGION 1..135: note = tr|A0A1G1TJU9|A0A1G1TJU9_9BACT 6-pyruvoyl tetrahydrobiopterin synthase OS=Hymenobacter coccineus; OX = 1908235 GN=BEN49_20780 PE=4 SV=1
MSVTVCRAEHFNAAHRLHNPAWDEAQNQRVFGPCNNPNYHGHNYNLVVRLTGAVDPDTGYVYDMKRLSNLIKREVLDRYDHRNLNLDVEEFRTLNPTVEHIAVAIWQRLRPHLAAKLALSVTLHETERNFAEYHG

SEQ ID NO: 21217 - protein, 135 aa, Hymenobacter daecheongensis
  REGION 1..135: note = tr|A0A1M6CKW7|A0A1M6CKW7_9BACT 6-carboxy-5,6,7,8-tetrahydropterin synthase; OS = Hymenobacter daecheongensis DSM 21074 OX=1121955; GN = SAMN02745146_1182 PE=3 SV=1
MPITVCRKEHFNAAHRLHNPAWSDEQNQRVFGKCNNPHYHGHNYELTVRLTGDIDPETGYVYDLKRLSDLMKREILDTFDHRNLNLDTVDFRDLNPTAENIAVVIWNRLRPHLEPHLALSVTLYETDRNFVEYHG

SEQ ID NO: 21218 - protein, 138 aa, Hymenobacter daecheongensis
  REGION 1..138: note = tr|A0A1M6MG23|A0A1M6MG23_9BACT 6-pyruvoyltetrahydropterin/6-carboxytetrahydropterin synthase OS=Hymenobacter daecheongensis DSM 21074; OX = 1121955 GN=SAMN02745146_0272PE=4 SV=1
MIYVSRQEHFNAAHKLYNPAWTQERNQQVFGPCANTNWHGHNYDLIVTVKGQPDPETGFVIDLKALSSLIREHVVDQVDHKNLNLDVPFMKDQLASTENLVVAFWQILAPEIAKISAAQLHCIKLYETPRNFVEYYGE

SEQ ID NO: 21219 - protein, 138 aa, Hymenobacter elongatus
  REGION 1..138: note = tr|A0A4Z0PEB2|A0A4Z0PEB2_9BACT 6-carboxytetrahydropterin synthase OS=Hymenobacter elongatus OX=877208 GN=E5J99_20500 PE=4 SV=1
MIYVSRQEHFNAAHKLYNPTWTAERNTEVFGPCSNANWHGHNYDLIVTVKGQPAPETGFVIDLKQLSTLIREHIVDQVDHKNLNLDVPFMAGQLASTENLVVAFWQILAREIPKISTAQLHCIKLYETPRNFVEYYGE

SEQ ID NO: 21220 - protein, 135 aa, Hymenobacter elongatus
  REGION 1..135: note = tr|A0A4Z0PR91|A0A4Z0PR91_9BACT 6-carboxy-5,6,7,8-tetrahydropterin synthase; OS = Hymenobacter elongatus OX=877208 GN=E5J99_03500 PE=3; SV = 1
MKVTVCRTEHFNAAHRLHNPAWSDEKNAQVFGKCNNPHYHGHNYELTIRLTGEVDPATGYVYDLKRLSDLIKHEILDTFDHRNLNLDTEDFRALNPTAENIAVVIWNRLRTHVEPHLTLSVTLYETARNFVEYHG

SEQ ID NO: 21221 - protein, 135 aa, Hymenobacter gelipurpurascens
  REGION 1..135: note = tr|A0A212U9U7|A0A212U9U7_9BACT 6-carboxy-5,6,7,8-tetrahydropterin synthase; OS = Hymenobacter gelipurpurascens OX=89968; GN = SAMN06265337_2690 PE=3 SV=1
MQVTICRKEHFNAAHRLHNPAWSDEQNQRVFGKCNNPHYHGHNYELIVRLTGPIDPDTGYVYDMKRLSDLMKREILDTFDHRNLNLDTEDFRNLNPTAENIAVVIWNRLRPHLAAHLGLSVTLYETERNFVEYHG

SEQ ID NO: 21222 - protein, 140 aa, Hymenobacter gelipurpurascens
  REGION 1..140: note = tr|A0A212U8I8|A0A212U8I8_9BACT 6-pyruvoyltetrahydropterin/6-carboxytetrahydropterin synthase OS=Hymenobacter gelipurpurascens OX=89968; GN = SAMN06265337_2419 PE=4 SV=1
MVYISRQEHFNAAHKLYNPNWSEERNTEVFGPCANANWHGHNYDLIVTVKGKPNPETGFVIDLKQLSTVIRTHVVDQVDHKNLNLDVPFMQGQLASTENLVIAFWKILQPQIEQISPARLHSIKLFETPRNFVEYFGEEG

SEQ ID NO: 21223 - protein, 138 aa, unidentified
  source 1..138: note = Hymenobacter glacialis
  REGION 1..138: note = tr|A0A1G1T4E2|A0A1G1T4E2_9BACT 6-carboxytetrahydropterin synthase QueD OS=Hymenobacter glacialis OX=1908236 GN=BEN48_14150 PE=4 SV=1
MIYVSRQEHFNAAHKLHNPKWSDERNREVFGPCANTNWHGHNYDLIVTVKGQPDPETGFVVDLKALSDLLREHITEQVDHKNLNLDVPFMAGQMASTENLAIAFWQILERELPAITQARLHCVKLYETPRNFVEYYGA

SEQ ID NO: 21224 - protein, 135 aa, unidentified
  source 1..135: note = Hymenobacter glacialis
  REGION 1..135: note = tr|A0A1G1T306|A0A1G1T306_9BACT 6-carboxy-5,6,7,8-tetrahydropterin synthase; OS = Hymenobacter glacialis OX=1908236 GN=BEN48_14740 PE=3; SV = 1
MQVTVCRTEHFNAAHRLHNPAWDAEQNQRVFGKCNNPNYHGHNYNLTVRLTGTVDPETGYVYDMKRLSDLIKVEVLNRYDHHNLNLDTEDFRNLNPTAENMAVVIWQRLRPHLAETLALSVTLYETDRNFVEYHG

SEQ ID NO: 21225 - protein, 139 aa, unidentified
  source 1..139: note = Hymenobacter gummosus
  REGION 1..139: note = tr|A0A431TY88|A0A431TY88_9BACT 6-carboxytetrahydropterin synthase OS=Hymenobacter gummosus OX=1776032 GN=EJV47_21900 PE=4 SV=1
MIYISRQEHFNAAHKLYNPAWSEERNKEVFGPCANANWHGHNYDLIVTVKGQPDPDTGFVVDLKALSTLIREHIIRHVDHKNLNLDVPFMSGKLASTENLAVAFWEILQRELPRITSTAQLHGIKIYETPRNFVEYFGE

SEQ ID NO: 21226 - protein, 135 aa, unidentified
  source 1..135: note = Hymenobacter gummosus
  REGION 1..135: note = tr|A0A3S0K610|A0A3S0K610_9BACT 6-carboxytetrahydropterin synthase OS=Hymenobacter gummosus OX=1776032 GN=EJV47_11335 PE=4 SV=1
MNVTVGRVESFNAAHRLYNPAWSDEQNVAFFGPCSNANYHGHNYVLTVRLTGAPDAATGYVYDLKDLSRLIKREILDTFDHRNLNLDTEDFRQLNPTAENIARVCWQRLRPHLAPHLALSVTLHETDRNFVEYHG

SEQ ID NO: 21227 - protein, 138 aa, unidentified
  source 1..138: note = Hymenobacter lapidarius
  REGION 1..138: note = tr|A0A1G1T8Q4|A0A1G1T8Q4_9BACT 6-carboxytetrahydropterin synthase QueD OS=Hymenobacter lapidarius OX=1908237 GN=BEN47_11375 PE=4 SV=1
MIYVSRQEHFNAAHKLHNPKWSDERNREVFGPCANTNWHGHNYDLIVTVKGQPDPETGFVVDLKALSDLLREHITEQVDHKNLNLDVPFMAGQMASTENLAIAFWQILERELPAITQAQLHCVKLYETPRNFVEYYGA

SEQ ID NO: 21228 - protein, 135 aa, unidentified
  source 1..135: note = Hymenobacter lapidarius
  REGION 1..135: note = tr|A0A1G1T4Z3|A0A1G1T4Z3_9BACT 6-carboxy-5,6,7,8-tetrahydropterin synthase; OS = Hymenobacter lapidarius OX=1908237 GN=BEN47_13885 PE=3; SV = 1
MQVTVCRTEHFNAAHRLHNPAWDAEQNQRVFGKCNNPNYHGHNYNLTVRLTGPVDPETGYVYDMKRLSDLIKVEVLNRYDHHNLNLDTEDFRNLNPTAENMAVVIWQRLRPHLAEALALSVTLYETDRNFVEYHG

SEQ ID NO: 21229 - protein, 140 aa, unidentified
  source 1..140: note = Hymenobacter mucosus
  REGION 1..140: note = tr|A0A238VXJ4|A0A238VXJ4_9BACT 6-pyruvoyltetrahydropterin/6-carboxytetrahydropterin synthase OS=Hymenobacter mucosus OX=1411120; GN = SAMN06269173_10211 PE=4 SV=1
MVYISRQEHFNAAHKLYNPAWSEERNREVFGPCANANWHGHNYDLIVTVKGKPDPETGFVIDLKQLSTVIRTHVVDQVDHKNLNIDVPFMQGQLASTENLVIAFWNILQPEIERISPARLHSIKLYETPRNFVEYFGEDN

SEQ ID NO: 21230 - protein, 135 aa, unidentified
  source 1..135: note = Hymenobacter mucosus
  REGION 1..135: note = tr|A0A238W5S6|A0A238W5S6_9BACT 6-carboxy-5,6,7,8-tetrahydropterin synthase; OS = Hymenobacter mucosus OX=1411120 GN=SAMN06269173_102252; PE = 3 SV=1
MQVTVCRKEHFNAAHRLHNPEWSDEQNQRVFGKCNNPHYHGHNYELIVRLTGEIDPRTGYVYDMKILSDLMKREILDTFDHRNLNLDTEEFRNLNPTAENIAVVIWNRLRPHLEEHLTLSVTLYETERNFVEYHG

SEQ ID NO: 21231 - protein, 137 aa, unidentified
  source 1..137: note = Hymenobacter nivis
  REGION 1..137: note = tr|A0A502GZ49|A0A502GZ49_9BACT 6-carboxytetrahydropterin synthase OS=Hymenobacter nivis; OX = 1850093 GN=EAH73_07860 PE=4 SV=1
MIYVSRHEHFNAAHKLHNPKWSDERNREVFGPCANVNWHGHNYDLVVTVKGMPDPDTGFVVDLKALSDLIKEHVTDQVDHKNLNLDVPFLAGQMASTENLAVAFWQILARELPAITPAQLHCVKLYETPRNFVEYYG

SEQ ID NO: 21232 - protein, 135 aa, unidentified
  source 1..135: note = Hymenobacter nivis
  REGION 1..135: note = tr|A0A2Z3GV61|A0A2Z3GV61_9BACT 6-pyruvoyl tetrahydrobiopterin synthase OS=Hymenobacter nivis; OX = 1850093 GN=DDQ68_11290 PE=4 SV=1
MSVTVCRVEHFNAAHRLHNPAWDDAQNQRVFGPCNNPNYHGHNYNLVVRLTGAVDPDTGYVYDMKRLSDLIKREVLDRYDHRNLNLDVEEFRTLNPTAEHIAVAIWQRLRPHLAAELALSVTLHETERNFVEYHG

SEQ ID NO: 21233 - protein, 135 aa, Hymenobacter perfusus
  REGION 1..135: note = tr|A0A428KH70|A0A428KH70_9BACT 6-carboxy-5,6,7,8-tetrahydropterin synthase; OS = Hymenobacter perfusus OX=1236770 GN=EI293_01030 PE=3; SV = 1
MTVTICRKEHFNAAHRLHNSAWSDAQNQATFGKCNNPHYHGHNYELIVRLTGSIDPETGYVYDMKRLSDLIKREILDTFDHRNLNLDTAEFRHLNPTAENIAVVIWNRLRPHLEERLALSVTLYETERNFVEYHG

SEQ ID NO: 21234 - protein, 139 aa, Hymenobacter perfusus
  REGION 1..139: note = tr|A0A3R9NZY4|A0A3R9NZY4_9BACT 6-carboxytetrahydropterin synthase OS=Hymenobacter perfusus OX=1236770 GN=EI293_00055 PE=4 SV=1
MVYISRQEHFNAAHKLHNPNWSEERNREVFGPCANANWHGHNYDLIVTVKGRPDPETGFVIDLKQLSTVIRTHVVDEVDHKNLNLDVPFMQGQLASTENLVIAFWKILQPEIERISAAKLHSIKLYETPRNFVEYFGEE

SEQ ID NO: 21235 - protein, 139 aa, Hymenobacter psychrophilus
  REGION 1..139: note = tr|A0A1H3G090|A0A1H3G090_9BACT 6-pyruvoyltetrahydropterin/6-carboxytetrahydropterin synthase OS=Hymenobacter psychrophilus OX=651662; GN = SAMN04488069_104296 PE=4 SV=1
MIYISRQEHFNAAHKLHNPKWSDERNKEVFGPCANTNWHGHNYDLIVTVKGRPDPETGFVIDLKELSTLIRTHVIDQVDHKNLNLDVPFMAGQLASTENLVVAFWKILQPEIEAISPARLHSLKLYETPRNFVEYFGEE

SEQ ID NO: 21236 - protein, 135 aa, Hymenobacter psychrophilus
  REGION 1..135: note = tr|A0A1H3FLA2|A0A1H3FLA2_9BACT 6-carboxy-5,6,7,8-tetrahydropterin synthase; OS = Hymenobacter psychrophilus OX=651662; GN = SAMN04488069_10495 PE=3 SV=1
MTITICRQEHFNAAHRLHNPAWSDERNQQVFDKCNNPNYHGHNYQLIVRLTGEIDPETGYVYDMKKLSDLIKREILDTFDHRNLNLDVAEFRNLNPTAENIAVVSWNRLRPHLAPQLALSVTLYETERNFVEYHG

SEQ ID NO: 21237 - protein, 138 aa, Hymenobacter psychrotolerans
  REGION 1..138: note = tr|A0A1M6WXL9|A0A1M6WXL9_9BACT 6-pyruvoyltetrahydropterin/6-carboxytetrahydropterin synthase OS=Hymenobacter psychrotolerans DSM 18569; OX = 1121959 GN=SAMN02746009_019 28 PE=4 SV=1
MIYISRQEHFNAAHKLYNPKWSEERNREVFGPCANANWHGHNFDLIVTVKGKPDPETGFVIDLKQLSTLIRTHVIEKVDHKNLNLDVPFMEGQMASTENLAIAFWKILAPEIEQISPARLHSIKLYETPRNFVEYLGE

SEQ ID NO: 21238 - protein, 135 aa, Hymenobacter psychrotolerans
  REGION 1..135: note = tr|A0A1M6TM27|A0A1M6TM27_9BACT 6-carboxy-5,6,7,8-tetrahydropterin synthase; OS = Hymenobacter psychrotolerans DSM 18569 OX=1121959; GN = SAMN02746009_01161 PE=3 SV=1
MPVTVCRKEHFNAAHRLHNPAWSEEQNQRVFGKCNNPHYHGHNYELTVRLTGEVDPATGYVYDMKRLSDLIKREILDTFDHRNLNLDTEEFRHLNPTAENIAVVIWNRLRPHLAAQLALSVTLYETERNFVEYHG

SEQ ID NO: 21239 - protein, 139 aa, Hymenobacter rigui
  REGION 1..139: note = tr|A0A3R9MQP1|A0A3R9MQP1_9BACT 6-carboxytetrahydropterin synthase OS=Hymenobacter rigui; OX = 334424 GN=EI291_14430 PE=4 SV=1
MVYISRQEHFNAAHKLHNPNWSEERNREVFGPCANANWHGHNYDLIVTVKGRPDPETGFVIDLKQLSTVIRTHIVDEVDHKNLNIDVPFMQGQLASTENLVIAFWNILQPEIERISSARLHSIKLYETPRNFVEYFGEE

SEQ ID NO: 21240 - protein, 135 aa, Hymenobacter rigui
  REGION 1..135: note = tr|A0A3R9VCM8|A0A3R9VCM8_9BACT 6-carboxy-5,6,7,8-tetrahydropterin synthase; OS = Hymenobacter rigui OX=334424 GN=EI291_03795 PE=3 SV=1
MTITICRKEHFNAAHRLHNPAWDDEQNQAAFGKCNNPHYHGHNYELIVRLTGSIDPETGYVYDMKRLSDLIKREILDTFDHRNLNLDTEEFRHLNPTAENIAVVIWNRLRPHLKDSLALSVTLYETERNFVEYHG

SEQ ID NO: 21241 - protein, 138 aa, Hymenobacter roseosalivarius
  REGION 1..138: note = tr|A0A1W1VWQ2|A0A1W1VWQ2_9BACT Uncharacterized protein OS=Hymenobacter roseosalivarius DSM 11622; OX = 645990 GN=SAMN00120144_1628 PE=4 SV=1
MIYVSRQEHFNAAHKLHNPNWSDERNREVFGPCANTNWHGHNYDLIVTVKGQPDPETGFVIDLKQLSNLIREHVTNQVDHKNLNLDVPFMQGKMASTENLVVAFWEILTRELCSISSAQLHCIKLYETPRNFVEYYGE

SEQ ID NO: 21242 - protein, 135 aa, Hymenobacter roseosalivarius
  REGION 1..135: note = tr|A0A1W1VUN0|A0A1W1VUN0_9BACT 6-carboxy-5,6,7,8-tetrahydropterin synthase; OS = Hymenobacter roseosalivarius DSM 11622 OX=645990; GN = SAMN00120144_0286 PE=3 SV=1
MQVTVCRKEHFNAAHRLFNPAWDEARNQQVFDKCNNPNYHGHNYELIVRLTGTVDPETGYVYDLKRLSDLIKREILDTFDHRNLNLDTEEFRHLNPTAENIAVVIWRKLRAHVEPHLLLSVTLYETERNFVEYHG

SEQ ID NO: 21243 - protein, 138 aa, unidentified
  source 1..138: note = Hymenobacter rubripertinctus
  REGION 1..138: note = tr|A0A418R3W5|A0A418R3W5_9BACT 6-carboxytetrahydropterin synthase OS=Hymenobacter rubripertinctus OX=2029981 GN=D0T11_05635 PE=4 SV=1
MIYISRQEHFNAAHKLHNPNWSEERNREVFGPCANVNWHGHNYDLIVTVKGQPDPETGFVIDLKQLSTLILTHVIDQVDHKNLNLDVPFMQGQLASTENLVVAFWKILQPEIERISSARLHCLKLYETPRNFVEYYGE

SEQ ID NO: 21244 - protein, 135 aa, unidentified
  source 1..135: note = Hymenobacter rubripertinctus
  REGION 1..135: note = tr|A0A418QUM7|A0A418QUM7_9BACT 6-carboxytetrahydropterin synthase OS=Hymenobacter rubripertinctus OX=2029981 GN=D0T11_13800 PE=4 SV=1
MIVTICRKEHFNAAHRLHNPAWSAERNQATFGKCNNPNYHGHNYELIVRLTGAIDPETGYVYDMKRLSDLMKREILDTFDHRNLNLDTADFRHLNPTAENMTVVIWNRLRPHLDNRLALSVTLYETERNFVEYHG

SEQ ID NO: 21245 - protein, 135 aa, unidentified
  source 1..135: note = Hymenobacter sedentarius
  REGION 1..135: note = tr|A0A0U4AXA1|A0A0U4AXA1_9BACT 6-carboxy-5,6,7,8-tetrahydropterin synthase; OS = Hymenobacter sedentarius OX=1411621 GN=AUC43_09875 PE=3; SV = 1
MQVTVCRTEHFNAAHRLHNSNWSAEQNTRVFGKCNNPNYHGHNYNLTVRLTGPVDPETGYVYDLKRLSDLIKHEVLDRYDHRNLNLDTEEFRTLNPTAENIATVIWQRLRPHLDTGLALSVTLYETDRNFVEYHG

SEQ ID NO: 21246 - protein, 138 aa, unidentified
  source 1..138: note = Hymenobacter sedentarius
  REGION 1..138: note = tr|A0A0U4AY04|A0A0U4AY04_9BACT 6-pyruvoyl tetrahydrobiopterin synthase OS=Hymenobacter sedentarius; OX = 1411621 GN=AUC43_11315 PE=4 SV=1
MIYVSRQEHFNAAHKLHNPKWSDERNREVFGPCANANWHGHNYDLIVTVKGQPDPDTGFVVDLKALSDLLRVHITEQVDHKNLNLDVPFMAGQMASTENLVIAFWQILERELPAITEAKLHCVKLYETPRNFVEYYGG

SEQ ID NO: 21247 - protein, 138 aa, Hymenobacter sp.
  REGION 1..138: note = tr|A0A4Q5L9I8|A0A4Q5L9I8_9BACT 6-carboxytetrahydropterin synthase OS=Hymenobacter sp. 1-3-3-3 OX=2025506 GN=EWM57_17985 PE=4 SV=1
MIYVSRQEHFNAAHKLYNPAWSQERNQEVFGPCANTNWHGHNYDLIVTVKGHPDPETGFVVDLKALSVLIRTHIVDQVDHKNLNLDVPFMKDQLASTENLVVAFWRILAPEIPKISGAQLHCIKLYETPRNFVEYYGE

SEQ ID NO: 21248 - protein, 135 aa, Hymenobacter sp.
  REGION 1..135: note = tr|A0A495VHM7|A0A495VHM7_9BACT 6-carboxy-5,6,7,8-tetrahydropterin synthase; OS = Hymenobacter sp. YR204 OX=2135668 GN=C8J96_0233 PE=3; SV = 1
MKVTVCRKEHFNAAHRLYNPAWTDERNAEVFGPCANVNYHGHNYELVVRVTGEIDPDTGYVYDMKRLSSLIKTEILDTFDHRNLNLDTADFRNLIPTAENIAVVIWQRLRPHLAAPLGLSVTLFETERNFVEYHG

SEQ ID NO: 21249 - protein, 139 aa, unidentified
  source 1..139: note = Hymenobacter swuensis
  REGION 1..139: note = tr|W8F3N6|W8F3N6_9BACT 6-pyruvoyltetrahydropterin synthase OS=Hymenobacter swuensis DY53 OX=1227739; GN = Hsw_3037 PE=4 SV=1
MVYISRQEHFNAAHKLHNPNWSEERNREVFGPCANANWHGHNYDLIVTVKGRPDAETGFVIDLKQLSTVIRTYVVDEVDHKNLNLDVPFMQGQLASTENLVIAFWKILQPEIERISAAKLHSIKLYETPRNFVEYLGEE

SEQ ID NO: 21250 - protein, 135 aa, unidentified
  source 1..135: note = Hymenobacter swuensis
  REGION 1..135: note = tr|W8F491|W8F491_9BACT 6-carboxy-5,6,7,8-tetrahydropterin synthase; OS = Hymenobacter swuensis DY53 OX=1227739 GN=Hsw_3242 PE=3; SV = 1
MTVTICRKEHFNAAHRLHNSAWSDAQNQDTFGKCNNPHYHGHNYELIVRLTGSIDPETGYVYDMKLLSDLIKREILDTFDHRNLNLDTVEFRHLNPTAENIAVVIWNRLRPHLEERLALSVTLYETERNFVEYHG

SEQ ID NO: 21251 - protein, 139 aa, unidentified
  source 1..139: note = Hymenobacter wooponensis
  REGION 1..139: note = tr|A0A4Z0MGS9|A0A4Z0MGS9_9BACT 6-carboxytetrahydropterin synthase OS=Hymenobacter wooponensis OX=1525360 GN=EU557_17215 PE=4 SV=1
MVYISRQEHFNAAHKLYNPNWSEERNREVFGPCANANWHGHNYDLIVTVKGKPDPETGFVIDLKQLSTVIRTHVVDQVDHKNLNMDVPFMEGQLASTENLVIAFWKILQPEIERISPARLHSIKLYETPRNFVEYFGEE

SEQ ID NO: 21252 - protein, 135 aa, unidentified
  source 1..135: note = Hymenobacter wooponensis
  REGION 1..135: note = tr|A0A4Z0MH01|A0A4Z0MH01_9BACT 6-carboxytetrahydropterin synthase OS=Hymenobacter wooponensis OX=1525360 GN=EU557_18810 PE=4 SV=1
MQVTVCRKEHFNAAHRLHNPAWSEEQNQRVFGKCNNPHYHGHNYELIARLTGPIDPDTGYVYDMKRLSDLMKREILDIFDHRNLNLDTEDFRNLNPTAENIAVVIWNRLRPHLAAHLSLSVTLYETERNFVEYHG

SEQ ID NO: 21253 - protein, 134 aa, unidentified; identical to SEQ ID NO: 20332
  source 1..134: note = Hyphomicrobiaceae bacterium
  REGION 1..134: note = tr|A0A3S5JEK0|A0A3S5JEK0_9RHIZ 6-carboxytetrahydropterin synthase OS=Hyphomicrobiaceae bacterium TMED74 OX=1986774 GN=CBC34_017860 PE=4 SV=1

SEQ ID NO: 21254 - protein, 145 aa, unidentified
  source 1..145: note = Hyphomicrobiaceae bacterium
  REGION 1..145: note = tr|A0A5C7M120|A0A5C7M120_9RHIZ 6-carboxytetrahydropterin synthase OS=Hyphomicrobiaceae bacterium OX=2015799 GN=E6R03_05565 PE=4 SV=1
MPIQAHRYHDISVGHRVYNQGSKCEMLHGHNYRIHFNVEAQELNEIGMVLDFGVIKSTLCMWIKNNWDHKFLIWEQDPWSRYLLEIDPTVVWTSFNPTAENMAKFLVEVIGPELLVGHACRLVSVTVEETRKCSASFNLPQGYKE

SEQ ID NO: 21255 - protein, 181 aa, Hyphomicrobium denitrificans
  REGION 1..181: note = tr|D8JX66|D8JX66_HYPDA Uncharacterized protein; OS = Hyphomicrobium denitrificans (strain ATCC 51888 / DSM 1869 / NCIB 11706 / TK 0415) OX=582899 GN=Hden_1390 PE=4; SV = 1
MRRSKYRSATRQYEDRRPARIRPGQPAAKPSLGSTIFHDTAMPRAAGKGDWDVTVPHDATATDGQTIRITATYTFEAAHFLPKVHDGHKCRRLHGHNYRVDVSVAGGLDERGFVLDYAELDGIVQPVIDELDHRCLNDIPGLENPTSEILALWLRSRIAAKAGTKPMIRVWETPRYLVEVS

SEQ ID NO: 21256 - protein, 134 aa, Hyphomicrobium denitrificans
  REGION 1..134: note = tr|D8JX86|D8JX86_HYPDA Uncharacterized protein; OS = Hyphomicrobium denitrificans (strain ATCC 51888 / DSM 1869 / NCIB 11706 / TK 0415) OX=582899 GN=Hden_1410 PE=4; SV = 1
MFSVEVRDRIMIAHSLPDPFFGPAQNLHGATYVVDVAFFREKLTAENVVVDIGAALRVLNETLKPLGYQNLDALPQFKGHLTTTEFLCKYIFDRMAEAATSGKFGTEGQRLSRIRVTLSETDLARASYEGPISG

SEQ ID NO: 21257 - protein, 134 aa, Hyphomicrobium facile
  REGION 1..134: note = tr|A0A1I7NDD2|A0A1I7NDD2_9RHIZ 6-pyruvoyl-tetrahydropterin synthase OS=Hyphomicrobium facile OX=51670 GN=SAMN04488557_1647 PE=4 SV=1
MYSVEVRDRIMIAHSLPNPFFGPAQNLHGATYVVDVAFFREKLTEQNVVVDIGAALSVLGATLQPLAYQNLDVLPQFKGALTTTEFLCKYIFDRIAKAAASGALGEEGKTLARIRVTLSETDLARASYEGPIGG

SEQ ID NO: 21258 - protein, 128 aa, Hyphomicrobium facile
  REGION 1..128: note = tr|A0A1I7NUY4|A0A1I7NUY4_9RHIZ 6-carboxy-5,6,7,8-tetrahydropterin synthase; OS = Hyphomicrobium facile OX=51670 GN=SAMN04488557_3685; PE = 3 SV=1
MQIYKEFRFEAAHFLPSAAPGTPNARVHGHSFRARIVVEGEPGPTTGYIFHFDELSSALRETEDALDHRMLNDIDGLEAPTLERIAVWIWNRLSNRIPGLCQVEVHRDSCSEGCIYRGPSPEARLAAE

SEQ ID NO: 21259 - protein, 140 aa, unidentified
  source 1..140: note = Hyphomicrobium nitrativorans
  REGION 1..140: note = tr|V5SFQ8|V5SFQ8_9RHIZ 6-carboxy-5,6,7,8-tetrahydropterin synthase; OS = Hyphomicrobium nitrativorans NL23 OX=1029756; GN = W911_10905 PE=3 SV=1
MAPCPEISYLSPMRIYKDFLFEAAHYLPSAPIGHPNSRVHGHSFRARVVIDGQPDAKSGLVFHFDDLTAAIEEARDALDHRLLNEIEGLEAPTLERISIWLWNRLQNRVPGLAEIQVSRDSCNEGCIYRGDAPTLPHAAE

SEQ ID NO: 21260 - protein, 127 aa, Hyphomicrobium sp.
  REGION 1..127: note = tr|A0A258KZ69|A0A258KZ69_9RHIZ 6-carboxy-5,6,7,8-tetrahydropterin synthase; OS = Hyphomicrobium sp. 32-62-53 OX=1970390 GN=B7Y80_13315; PE = 3 SV=1
MRIYRDFLFEAAHFLPSAPPGHPNSRIHGHSFRARVWIDGEPNAETGVVFHFDDLSAALTDCQDALDHRMLNDVEGLSAPTLERIAMWIWERIDNRVPGLSQIEVHRDSCHEGVIYNGPHRLARAAE

SEQ ID NO: 21261 - protein, 134 aa, Hyphomicrobium sp.
  REGION 1..134: note = tr|F8J5A4|F8J5A4_HYPSM Uncharacterized protein; OS = Hyphomicrobium sp. (strain MC1) OX=717785 GN=HYPMC_2597; PE = 4 SV=1
MFSVEVRNRIMIAHSLPDPFFGPAQNMHGATFVVDVAFFREALTAQNVVVDIGAALDVLGQTLRPLAYQNLDTLPQFKGVLTTTEFICKYIFDQMAAAALSGALGDDGKTLARIRVTLSETDLARASYEGPIGG

SEQ ID NO: 21262 - protein, 128 aa, Hyphomicrobium sulfonivorans
  REGION 1..128: note = tr|A0A109BC44|A0A109BC44_HYPSL 6-carboxy-5,6,7,8-tetrahydropterin synthase; OS = Hyphomicrobium sulfonivorans OX=121290 GN=APY04_2608; PE = 3 SV=1
MRIYKEFLFEAAHYLPTAPPGHPNSRVHGHSFRARITVDGAPGADTGYVFHFDELSQMMAEAQDALDHRLLNEIEGLEAPTLERIAIWLWNRLQNRVPGLSQIEIARDSCREGAIYCGPAPETRIAAE

SEQ ID NO: 21263 - protein, 139 aa, unidentified
  source 1..139: note = Hyphomonadaceae bacterium
  REGION 1..139: note = tr|A0A0F2QF10|A0A0F2QF10_9RHOB 6-carboxy-5,6,7,8-tetrahydropterin synthase; OS = Hyphomonadaceae bacterium BRH_c29 OX=1629720; GN = VR75_12340 PE=3 SV=1
MATELANAQTDRAALSPEGRVFEITKAVHFEAAHFMGGKPEGHPYRNMHGHSFRVEATVAGVVKPGEQWVEDFSHLTACLNATAEKLDHKLLNEIDGLDVPTLERICLWVAADLAEALPGLKRVALARPSLNERCELVL

SEQ ID NO: 21264 - protein, 140 aa, unidentified
  source 1..140: note = Hyphomonadaceae bacterium
  REGION 1..140: note = tr|A0A352CBD3|A0A352CBD3_9RHOB 6-carboxy-5,6,7,8-tetrahydropterin synthase; OS = Hyphomonadaceae bacterium OX=2026748 GN=DCZ49_03670; PE = 3 SV=1
MALVAANAQDYGHSVTDALFSLCKTITFDAAHYLPQEDPAHPYGRLHGHSFALDVTIRGKAQPGAEWVEDFDAITQALAELRGLLDHRLLNEVEGLERPTLERLCQWTAARLQRRFPGLARVTVRRPSLGESCTLELAAS

SEQ ID NO: 21265 - protein, 119 aa, Hyphomonas adhaerens
  REGION 1..119: note = tr|A0A069E5M7|A0A069E5M7_9RHOB 6-carboxy-5,6,7,8-tetrahydropterin synthase OS=Hyphomonas adhaerens MHS-3 OX=1280949 GN=HAD_07920 PE=3 SV=1
MFEITKSVNFEAAHFMGGKPEGHPYRNMHGHSFRLEATVAGVVKPGEQWVEDFGHLTACLNATAEKLDHRLLNEIDGLDVPTLERICLWVAEDLREALPGLKRVALARPSLNERCELVL

SEQ ID NO: 21266 - protein, 139 aa, unidentified
  source 1..139: note = Hyphomonas atlantica
  REGION 1..139: note = tr|A0A059EB98|A0A059EB98_9RHOB 6-carboxy-5,6,7,8-tetrahydropterin synthase OS=Hyphomonas atlantica OX=1280948 GN=HY36_00530 PE=3 SV=1
MTTQTDQTSQSSAATNPEGSVFAISKSVNFEAAHYMGGKPEGHPYRNVHGHSFVLEATVAGTVKPGEQWVEDFSHLTACLKETAAKLDHKLLNDIEGLEVPTLERICLWAAADLKAGLPGLTKVAISRPSLNERCELVL

SEQ ID NO: 21267 - protein, 139 aa, unidentified
  source 1..139: note = Hyphomonas atlantica
  REGION 1..139: note = tr|A0A356W951|A0A356W951_9RHOB 6-carboxy-5,6,7,8-tetrahydropterin synthase OS=Hyphomonas atlantica OX=1280948 GN=DD728_15310 PE=3 SV=1
MTTQTDQTSQSSAATNPEGSVFAISKSVNFEAAHYMGGKPEGHPYRNVHGHSFVLEATVAGTVKPGEQWVEDFSHLTACLQETAAKLDHKLLNDIEGLEVPTLERICLWAAADLKAGLPGLTKVAISRPSLNERCELVL

SEQ ID NO: 21268 - protein, 139 aa, unidentified
  source 1..139: note = Hyphomonas beringensis
  REGION 1..139: note = tr|A0A062UGU7|A0A062UGU7_9RHOB 6-carboxy-5,6,7,8-tetrahydropterin synthase OS=Hyphomonas beringensis OX=1280946 GN=HY29_12480 PE=3 SV=1
MTTKLETSSAARPSLSPEGRVFEITKSVNFEAAHFMGGKPEGHPYRNMHGHSFQLEATVAGVVKPGEQWVEDFSHLTACLQATAAKLDHTLLNEVPGLEVPTLERICLWAAADLADGLPGLKRVALARPSLNERCELVL

SEQ ID NO: 21269 - protein, 123 aa, unidentified
  source 1..123: note = Hyphomonas chukchiensis
  REGION 1..123: note = tr|A0A062UEX5|A0A062UEX5_9RHOB 6-carboxy-5,6,7,8-tetrahydropterin synthase OS=Hyphomonas chukchiensis OX=1280947 GN=HY30_11980 PE=3 SV=1
MEGRVFEISKAVTFEAAHFMGGKPEGHPYRNVHGHSFRLEATVAGTVKAGEQWVEDFSHLTATLEATAAKLDHKLLNEIEGLDVPTLERICLWAAADLAPGLPGLTRVAVARPSLNERCELVL

SEQ ID NO: 21270 - protein, 132 aa, Hyphomonas hirschiana
  REGION 1..132: note = tr|A0A059G0R8|A0A059G0R8_9RHOB 6-carboxy-5,6,7,8-tetrahydropterin synthase OS=Hyphomonas hirschiana VP5 OX=1280951 GN=HHI_02560 PE=3 SV=1
MKEGLKAEGQIFEISKAVFFEAAHFMGGKPEGHPYRSVHGHSFRLEATVAGIVKPGEQWVEDFSHLTATLEATAAKLDHRLLNDIEGLEVPTLERICLWAAADLGQPLPGLARVAVARPSLNERCELVLKRI

SEQ ID NO: 21271 - protein, 119 aa, Hyphomonas jannaschiana
  REGION 1..119: note = tr|A0A059FEW3|A0A059FEW3_9RHOB 6-carboxy-5,6,7,8-tetrahydropterin synthase OS=Hyphomonas jannaschiana VP2 OX=1280952 GN=HJA_07617 PE=3 SV=1
MFEITKAVHFEAAHFMGGKPEGHPYRNMHGHSFRLEATVAGVVKEGEQWVEDFSHLTACLNATAEKLDHKLLNEIDGLEIPTLERICLWVAEDLREALPGLKRVALARPSLNERCELVL

SEQ ID NO: 21272 - protein, 119 aa, Hyphomonas johnsonii
  REGION 1..119: note = tr|A0A059FR66|A0A059FR66_9RHOB 6-carboxy-5,6,7,8-tetrahydropterin synthase OS=Hyphomonas johnsonii MHS-2 OX=1280950 GN=HJO_08357 PE=3 SV=1
MFEITKSVNFEAAHYMGGKPEGHPYRNVHGHSFRLEATVAGTVKPGEQWVEDFSHLTAALDATAAKLDHKLLNDIEGLDVPTLERICLWAAADLAPALPGLTRVAVARPSLNERCELVL

SEQ ID NO: 21273 - protein, 146 aa, Hyphomonas neptunium
  REGION 1..146: note = tr|Q0C4T0|Q0C4T0_HYPNA 6-carboxy-5,6,7,8-tetrahydropterin synthase OS=Hyphomonas neptunium (strain ATCC 15444) OX=228405 GN=HNE_0533 PE=3; SV = 1
MAPELANTQTDRASLKEGLKAEGQIFEISKAVFFEAAHFMGGKPEGHPYRSVHGHSFRLEATVAGIVKPGEQWVEDFSHLTATLEATAAKLDHRLLNDIEGLEVPTLERICLWAAADLGQPLPGLARVAVARPSLNERCELVLKRI

SEQ ID NO: 21274 - protein, 139 aa, Hyphomonas oceanitis
  REGION 1..139: note = tr|A0A059GA99|A0A059GA99_9RHOB 6-carboxy-5,6,7,8-tetrahydropterin synthase OS=Hyphomonas oceanitis SCH89 OX=1280953 GN=HOC_04257 PE=3 SV=1
MATELANAQTDRASLSVEGRVFEISKAVTFEAAHYMGGKPEGHPYRNVHGHSFRLEATVAGTVKAGEQWVEDFSHLTATLEATAAKLDHKLLNEIEGLDVPTLERICLWAAADLAPGLPGLTRVAVARPSLNERCELVL

SEQ ID NO: 21275 - protein, 132 aa, Hyphomonas polymorpha
  REGION 1..132: note = tr|A0A062VKL7|A0A062VKL7_9RHOB 6-carboxy-5,6,7,8-tetrahydropterin synthase OS=Hyphomonas polymorpha PS728 OX=1280954 GN=HPO_02307 PE=3 SV=1
MNEGLKAEGQIFEISKAVFFEAAHFMGGKPEGHPYRSVHGHSFRLEATVAGVVKPGEQWVEDFSHLTATLEATAAKLDHKLLNEIEGLEVPTLERICLWAAADLGKTLPGLARVAVARPSLNERCELVLKRV

SEQ ID NO: 21276 - protein, 152 aa, Hyphomonas sp.
  REGION 1..152: note = tr|A0A1Z9Y0D2|A0A1Z9Y0D2_9RHOB 6-pyruvoyl tetrahydrobiopterin synthase OS=Hyphomonas sp. TMED17; OX = 1986605 GN=CBB77_00620 PE=4 SV=1
MATKLANAQTDRPALSLSGQVFEITKSVRFEAAHFMSSSPEGHPYRNIHGHSFCLEATIAGCLDEDQDWVEDFSVFTDKLNEVAKMLDHKLLNEIDGLGVPSLERLCVWVANQLVVDFVGLQSVVISRPSLDERCKLVIPSVAHSGERPLQD

SEQ ID NO: 21277 - protein, 142 aa, Hyphomonas sp.
  REGION 1..142: note = tr|A0A258C039|A0A258C039_9RHOB 6-carboxy-5,6,7,8-tetrahydropterin synthase OS=Hyphomonas sp. 32-62-5 OX=1970391 GN=B7Z22_01655 PE=3 SV=1
MATELANPQTDRSSLKAEGQIFEISKAVFFEAAHFMGGKPEGHPYRSVHGHSFRLEATVAGVVKPGEQWVEDFSHLTATLEATAAKLDHKLLNEIEGLEVPTLERICLWAAADLGKTLPGLARVAVARPSLNERCELVLKRV

SEQ ID NO: 21278 - protein, 140 aa, unidentified
  source 1..140: note = Hypnocyclicus thermotrophus
  REGION 1..140: note = tr|A0A4R7L1R0|A0A4R7L1R0_9FUSO 6-carboxy-5,6,7,8-tetrahydropterin synthase; OS = Hypnocyclicus thermotrophus OX=1627895 GN=EV215_1812; PE = 3 SV=1
MYILQTEHSFDSAHFLKGYKGKCANIHGHRWRVVVEIKSDALVENGHLRGMVVDFGDLKKVVKEFVDFHDHALIVEKNSLSKELFNMLQGENFRLIEVEFRPTAENFSKYFYDEFNKKFDVKRVIVYETPNNSAIYEEQR

SEQ ID NO: 21279 - protein, 152 aa, Hyunsoonleella jejuensis
  REGION 1..152: note = tr|A0A1H9BA35|A0A1H9BA35_9FLAO 6-pyruvoyltetrahydropterin/6-carboxytetrahydropterin synthase OS=Hyunsoonleella jejuensis OX=419940; GN = SAMN05421824_0510 PE=4 SV=1
MQMSNIRITKQFSFETGHALYGYDGKCKNVHGHSYRLDVTVFGKPITDTSNVKYGMVIDFGDLKKIVKEEIVNVFDHATVFNKNTPHVELAKELENRGHNILLVDYQPTSEMMVIDFAKKIKARLPENIKLHSLKLQETATSFAEWFANDQD

SEQ ID NO: 21280 - protein, 136 aa, Hyunsoonleella jejuensis
  REGION 1..136: note = tr|A0A1H9J112|A0A1H9J112_9FLAO 6-carboxy-5,6,7,8-tetrahydropterin synthase; OS = Hyunsoonleella jejuensis OX=419940 GN=SAMN05421824_2353; PE = 3 SV=1
MKVTVSRKAHFNAAHRLYRKDWSFEKNDTVFGKCNNPNFHGHNYELIVSVTGEIDVETGYVIDMKVLKDIIKSEVEDAFDHKNLNVEVAEFKNLNPTAENIAVVIYDKMKSKLDSNLDLEITLYETPRNFVTYAGD

SEQ ID NO: 21281 - protein, 136 aa, unidentified
  source 1..136: note = Hyunsoonleella pacifica
  REGION 1..136: note = tr|A0A4V2JBA2|A0A4V2JBA2_9FLAO 6-carboxy-5,6,7,8-tetrahydropterin synthase; OS = Hyunsoonleella pacifica OX=1080224 GN=EYD46_00025 PE=3; SV = 1
MKVTVSRKAHFNAAHRLYRKDWSFEKNDAVFGKCNNPNFHGHNYELIASVTGDIDKETGYVIDMKVLKGIIKTEVEDAFDHKNLNLEVPEFKDLNPTAENIAVVIYDKMKAKLDSKLDLEITLYETPRNFVTYSGN

SEQ ID NO: 21282 - protein, 150 aa, unidentified
  source 1..150: note = Hyunsoonleella pacifica
  REGION 1..150: note = tr|A0A4Q9FL98|A0A4Q9FL98_9FLAO 6-carboxytetrahydropterin synthase OS=Hyunsoonleella pacifica OX=1080224 GN=EYD46_13830 PE=4 SV=1
MSNIRITKQFSFEAGHALHGYDGKCKNIHGHSYSLEVTVIGKPITDTSHVKHGMVIDFGDLKKIVKTEIVDVFDHAIVFNQNTPHADLGRNLAAEGHNVLLVDYQPTSEMMIIDFAKKIQAYLPENIKLHSLKLRETATSYAEWYASDQD

SEQ ID NO: 21283 - protein, 136 aa, Hyunsoonleella sp.
  REGION 1..136: note = tr|A0A4Q9FDM9|A0A4Q9FDM9_9FLAO 6-carboxy-5,6,7,8-tetrahydropterin synthase; OS = Hyunsoonleella sp. T58 OX=2527939 GN=EYD45_08600 PE=3; SV = 1
MKVTVSRKAHFNAAHRLYRKDWSFEKNDTIFGKCNNPNFHGHNYELIASVTGEIDPETGYVIDMKVLKDIIKSEVEVAFDHKNLNLEVPEFENLNPTAENIAVVIYNKMKSKLDSDLDLEITLYETPRNFVTYSGG

SEQ ID NO: 21284 - protein, 150 aa, Hyunsoonleella sp.
  REGION 1..150: note = tr|A0A4Q9FBH2|A0A4Q9FBH2_9FLAO 6-carboxytetrahydropterin synthase OS=Hyunsoonleella sp. T58 OX=2527939 GN=EYD45_15685 PE=4 SV=1
MSNIRITKQFSFETGHALYGYDGKCKNVHGHSYRLDVTVIGKPISDTSNVKYGMVIDFGDLKKIVKEEIVSVFDHATVFNKNTPHVELAKELQTRGHNILLVDYQPTSEMMVIDFAKKIKARLPENIKLHSLKLQETATSFAEWFANDQD

SEQ ID NO: 21285 - protein, 150 aa, unidentified
  source 1..150: note = Ichthyenterobacterium magnum
  REGION 1..150: note = tr|A0A420DX02|A0A420DX02_9FLAO 6-pyruvoyltetrahydropterin/6-carboxytetrahydropterin synthase OS=Ichthyenterobacterium magnum OX=1230530; GN = BXY80_0830 PE=4 SV=1
MSNIRITKQFSFETGHALYGYDGKCKNVHGHSYRLSVTVIGKPINDKTNVKFGMVIDFSDLKKIVKEDIVNVFDHATVFNKNTPHVELAKELEDRGHNVLLVDYQPTSEMMVIDFASKIKKRLPENIKLHSLKLQETATSFAEWYASDNE

SEQ ID NO: 21286 - protein, 136 aa, unidentified
  source 1..136: note = Ichthyenterobacterium magnum
  REGION 1..136: note = tr|A0A420DV57|A0A420DV57_9FLAO 6-carboxy-5,6,7,8-tetrahydropterin synthase; OS = Ichthyenterobacterium magnum OX=1230530 GN=BXY80_0129; PE = 3 SV=1
MRVTVSRKAHFNAAHRLYRKDWTHEKNDAIFGKCNNPNFHGHNYELIVSVTGEIDKETGYVIDMKVLKDIIKSEVEDAFDHKNLNLEVLEFKDLNPTAENIVVVIYNKIKPKLDASFDIEITLYETPRNFVVYSGE

SEQ ID NO: 21287 - protein, 131 aa, Ideonella sp.
  REGION 1..131: note = tr|A0A437RRH1|A0A437RRH1_9BURK 6-carboxy-5,6,7,8-tetrahydropterin synthase OS=Ideonella sp. KYPY4 OX=1862385 GN=EOE66_02110 PE=3 SV=1
MSLSQPAGAVYELSQRFYFEAAHTLRRSQETAGSLRIHGHTYEAEVTLSGRPDPATGMLIDLALVRAEIARVRSLLDHRFLDEVEGLGPATLENLCAYLRAQLQTGLPALCAVMVERRASGDRCVLRWPAA

SEQ ID NO: 21288 - protein, 372 aa, Ideonella sp.
  REGION 1..372: note = tr|A0A523Q3F8|A0A523Q3F8_9BURK 6-pyruvoyl tetrahydropterin synthase OS=Ideonella sp. MAG2 OX=2083017; GN = C4K60_15180 PE=4 SV=1
MHSLTPTHLLHSASAGFEAALQVGLLPEGHRSRRLHGHSFFATVRAALPAGWAPFSGGEVAELQRRMEACTAPLDYALLNDTLPQPTDENLARWIRARLETEFDVPGIHQVGVQSTPHCGVDLDAAGQAHVWRRYRFQAAHRLPNVPAGHKCGRMHGHGFEVILHANQDVGGRDIGIDYDHLDALWAPLHFALNYHCLNEIPGLENPTSEVISAWLWQRLKPVLPELSWVTVYETGSCGANFDGTHYRIWKELTLDSAIRLRHAPEGSPLSAIHGHTYTLRLHLSAPLDAVMGWTVDFGDVKTLFDPIFKAIDHRPLYEIADLPDGDAMSLAHWVLAKGRAALPELDRVDLYETRGCGAIVSAQDETELLPV

SEQ ID NO: 21289 - protein, 294 aa, Idiomarina abyssalis
  REGION 1..294: note = tr|A0A370QCI7|A0A370QCI7_9GAMM 6-pyruvoyl tetrahydropterin synthase-like protein OS=Idiomarina abyssalis OX=86102 GN=DFO82_0474 PE=4 SV=1
MQLFVNDLTVIDCSYLCPERGIVGESWIVDIVLDGALNEQSMVLDFGRVKKQVKAIIDNSVDHKLVVPAEHSYTKVTHNSDDSANWVDFLRPEQGSIHLFCPADAFAFIDADVVSIETVTDYLKAVIKRELPVNVEGLQLFLRPENIDGFYYHYTHGLKKHDGNCQRIAHGHRSKIQIRLDNIRQPVLEKEWSDKWEDIYLGTTEDLRSKKELTLSEAATSVTSDSTHTYYSYVADQGLFELIVPNAENFVIETDSTVECIADFLAAEIKSKHAGQAVEVRAFEGVGKGAIAYA

SEQ ID NO: 21290 - protein, 293 aa, Idiomarina aestuarii
  REGION 1..293: note = tr|A0A2T4D6C8|A0A2T4D6C8_9GAMM Uncharacterized protein OS=Idiomarina aestuarii OX=624146 GN=C9927_02165; PE = 4 SV=1
MQLFVNDLTVIDFSYLCPERGIVGESWIVDIVLDGSLNEQSMVLDFGRVKKQIKRIIDGAVDHKLAVPAEHAYTQVTHDADDTCYWVDFMRPNQKSIHLFCPADAFAFIDADAVTIATVTDYLRAVIQRELPDNVDGLTLLLRAEDIPGAFYHYTHGLKKHDGNCQRIAHGHRSRLYIALDDARQPQLEAEWARRWQDIYLGSQEDVKPISALQRSAAATNCNDKTHVGYSYVADQGLFELLVPESENYVIPTDSTVECIAEYLAQQVKSAHPLAKVTVTGFEGVGKGAIGYA

SEQ ID NO: 21291 - protein, 115 aa, Idiomarina aestuarii
  REGION 1..115: note = tr|A0A2T4CMN3|A0A2T4CMN3_9GAMM Uncharacterized protein (Fragment) OS=Idiomarina aestuarii OX=624146; GN = C9986_02200 PE=4 SV=1
MQLFVNDLTVIDFSYLCPERGIVGESWIVDIVLDGSLNEQSMVLDFGRVKKQIKRIIDGAVDHKLAVPAEHAYTQVTHDADDTCYWVDFMRPNQKSIHLFCPADAFAFIDADAVT

SEQ ID NO: 21292 - protein, 294 aa, unidentified
  source 1..294: note = Idiomarina aquatica
  REGION 1..294: note = tr|A0A4R6PTS3|A0A4R6PTS3_9GAMM 6-pyruvoyl tetrahydropterin synthase-like protein OS=Idiomarina aquatica OX=1327752 GN=DEU29_101209 PE=4 SV=1
MQLFVNDLTVIDCSYLCPERGIVGESWIVDIVLDGALNEQSMVLDFGRVKKQIKRIIDDSVDHKLVVPAEHAYTSVTYNDDESSQWVDFMRPNGKSIHLYCPADAFAYIDAEQVNELTVTDYLRAVIKRELPGNVEGLKLMLRPESIDGFYYHYTHGLKKHDGNCQRIAHGHRSKIQIFLDNIRQPVLEKQWSDRWADIYLGSTDDQADLKSLLRSANAKQAATAATHIGYSYTADQGLFELCVPKAENYLIDTDSTVECIAQYLADTIKTSVAEQAVQVRAYEGVGKGAIAYA

SEQ ID NO: 21293 - protein, 294 aa, unidentified
  source 1..294: note = Idiomarina aquimaris
  REGION 1..294: note = tr|A0A432XQ28|A0A432XQ28_9GAMM Uncharacterized protein OS=Idiomarina aquimaris OX=641841 GN=CWE21_01565; PE = 4 SV=1
MQLFVNDLTVIDFSYLCAERGIVGESWIVDIILDGSLNEQSMVLDFGKVKKQIKRIIDDAVDHKLAVPADHAYTRVTHTDDDSSYWVDFLRPEGRSIHLFCPADAFAFIDAESVSMESVNAYLRAVIKRELPGNVAGLEVILREEAIPGAYYHYTHGLKKHDGNCQRIAHGHRSQLQVFIDSERATQVEQRWAKRWQDIYLGSQEDTCSVEDLSRSDAALAINDASHQSYRYIADQGLFELAVPHSENDLIASDSTVECIADYLAQTIAREEQAAGRVKVMAYEGVGKGAIGYA

SEQ ID NO: 21294 - protein, 294 aa, unidentified
  source 1..294: note = Idiomarina atlantica
  REGION 1..294: note = tr|A0A094IPZ0|A0A094IPZ0_9GAMM 6-pyruvoyl tetrahydropterin synthase OS=Idiomarina atlantica; OX = 1517416 GN=IDAT_01240 PE=4 SV=1
MQLFVNDLTVIDFSYLCPERGIVGESWIVDIILDGSLNEQSMVLDFGRVKKQIKRIIDDAVDHKLAVPAEHPFTRVTHADDENSYWVDFLRPQQRSIHLFCPADAYAFIDADRVDMSSINAYLRAVIKRELPGNIEGLEVLLRSEQIDDAYYHYTHGLKKHDGNCQRIAHGHRSRLQIFIDGQRDRALEQLWAERWRDIYLGSQEDVAALANLQRSAAAADLSETTHIGYSYTADQGLFELIVPLPENDLIATDSTVECIATHLADAIRVQRPAANTVQVRAFEGVGKGAIAYA

SEQ ID NO: 21295 - protein, 293 aa, Idiomarina baltica
  REGION 1..293: note = tr|A0A348WR01|A0A348WR01_9GAMM Uncharacterized protein OS=Idiomarina baltica OX=190892 GN=DCR58_09305; PE = 4 SV=1
MLLFVDDLTVIDCSYLCAERGIVGESWIVDIELDGSLNEQSMVLDFGRVKKQIKAIIDRSVDHKLLVPSNHAYTRVTHSDDDESHWVDFMRPEGRSIHLFCPAEAFAYIDAEKVDALTVTDYLRAVIKRELPGNVQGLRLSLRPEAIDGFYYHYTHGLKKHDGNCQRIAHGHRSKIQIALDNIRQPVLEKQWSERWADIYIGSEEDKAEIKRLQRSESAKQLSEATHVGYSYVADQGLFELIVPKSENDFIDSDSTVECIAEFIAAKIKQDHPEQRVRVRAFEGVGKGAIAYA

SEQ ID NO: 21296 - protein, 297 aa, Idiomarina donghaiensis
  REGION 1..297: note = tr|A0A432XMH1|A0A432XMH1_9GAMM Uncharacterized protein OS=Idiomarina donghaiensis OX=519452; GN = CWE24_05385 PE=4 SV=1
MQLFVNDLTVIDFSYLCPERGMVGESWIVDIILDGSLNEQSMVLDFGRVKKQIKRIIDDAVDHKLAVPAEHPYTNVTHHDDGNSHWVDFLRPNQRSIHLFCPADAFAFIDAQQVTMQSVTDYLRAVIKRELPENVQGLTLELRAEEIPGAFYHYTHGLKKHDGNCQRIAHGHRSRLYVALNGERNADLEQQWAQTWQDIYLGSEEDLAVIEQLQLSPVFAQKNLMVTTQTHMAYSYTADQGLFEILVPVAENYTIPTDSTVECIASYLAQSIKQEHPNDAVQVTGFEGVGKGAIGYA

SEQ ID NO: 21297 - protein, 293 aa, Idiomarina fontislapidosi
  REGION 1..293: note = tr|A0A432Y9V0|A0A432Y9V0_9GAMM Uncharacterized protein OS=Idiomarina fontislapidosi OX=263723; GN = CWE25_04465 PE=4 SV=1
MLLFVDDLTVIDCSYLCAERGIVGESWIVDIELDGSLNEQSMVLDFGRVKKQIKAIIDRSVDHKLLVPSGHAFTQVTHSADDESHWVDFMRPEGRSIHLFCPAEAFAYIDAEKVDALTVTDYLRAVIKRELPGNVQGLRLSLRPEAIDGFYYHYTHGLKKHDGNCQRIAHGHRSKIQIALDNIRQPVLEKQWSERWEDIYIGSEEDKVEIKRLQRSESAKQISEATHVGYSYVADQGLFELMVPKSENDFIDSDSTVECIAEFIAAQIKQTHPEQRVKVKAFEGVGKGAIAYA

SEQ ID NO: 21298 - protein, 294 aa, unidentified
  source 1..294: note = Idiomarina halophila
  REGION 1..294: note = tr|A0A432Y0K9|A0A432Y0K9_9GAMM Uncharacterized protein OS=Idiomarina halophila OX=1449799 GN=CWI69_03440; PE = 4 SV=1
MQLFVNDLTVIDFSYLCPERGIVGESWIVDIVLDGSLNEQSMVLDFGRVKKQIKRIIDDAVDHKLAVPANHPYTLVTHDADDSCYWVDFLRPEQGSIHLFCPADAFAFIDAEQVTMASINAYLRAVIKRELPGNVAGLEVTLRAEEIEGAYYHYTHGLKKHDGNCQRIAHGHRSRIQVELDGARAPAVEQSWAERWRDIYLGSSEDVSPVAALQRSAEALKCSDETHVGYGYVADQGRFELIVPKAENYIIDNDSTVECIAEYLAQAIHAELKDKAAVTVKAYEGVGKGAIGYA

SEQ ID NO: 21299 - protein, 294 aa, Idiomarina homiensis
  REGION 1..294: note = tr|A0A432Y401|A0A432Y401_9GAMM Uncharacterized protein OS=Idiomarina homiensis OX=364198 GN=CWI70_02580; PE = 4 SV=1
MQLFVNDLTVIDFSYLCAERGIVGESWIVDIILDGSLNEQSMVLDFGKVKKQIKRIIDDAVDHKLAVPADHSYTRVTHTDDDSSYWVDFLRPQERSIHLFCPADAFAFIDAEEVSMASVNAYLRAVIKRELPGNVAGLEVILREENIAGAYYHYTHGLKKHDGNCQRIAHGHRSQLQVFIDNARAPQVEERWARRWQDIYLGSQEDTCSVNELKLSSAGKLVSDSSHQAYRYTADQGLFELAVPHQENDLIASDSTVECIADYLAQTIALEENAQGRVKVMAYEGVGKGAIGYA

SEQ ID NO: 21300 - protein, 293 aa, unidentified
  source 1..293: note = Idiomarina indica
  REGION 1..293: note = tr|A0A1G6A5R2|A0A1G6A5R2_9GAMM 6-pyruvoyl tetrahydropterin synthase OS=Idiomarina indica OX=1159017; GN = SAMN02927930_00144 PE=4 SV=1
MQLFVNDLTVIDFSYLCPERGMVGESWIVDIVLDGSLNEQSMILDFGRVKKQIKRIIDGAVDHKLAIPAEHPFTQVTRHEDGNSYWVDFMRPEQRSIHLFCPADAFAFIDADTVTMASVTEYLRAVIKRELPENVEGLELLLRAEEIPGAFYHYTHGLKKHDGNCQRIAHGHRSRLYIAVDNERSASLEAEWAETWRDIYLGSAEDVVPLEQVNRSAAARDVSEQSHVAYSYTADQGLFELLVPRSENYIIPTDSTVECIAAYLATTIKQQRPQSAIRVTAFEGVGKGAISDA

SEQ ID NO: 21301 - protein, 294 aa, Idiomarina insulisalsae
  REGION 1..294: note = tr|A0A432YH46|A0A432YH46_9GAMM Uncharacterized protein OS=Idiomarina insulisalsae OX=575789; GN = CWI71_07700 PE=4 SV=1
MQLFVNDLTVIDFSYLCPERGIVGESWIVDIILDGSLNEQSMVLDFGKVKKQIKRIIDDAVDHKLAVPADHPYTRVSHTDDDSSYWVDFLRPAGKSIHLFCPADAFAFIDADRVSMASVNAYLRAVIKRELPGNVAGLEVILREEVIAGAYYHYTHGLKKHDGNCQRIAHGHRSQLQIFIDGLRRQQVEQQWALRWQDIYLGSREDTCSCSELRRSIHAEAIDDNSHQAYRYTADQGLFELAVPQDENFIIANDSTVECIAEFLAAEIAVENQATGQVKVLAFEGVGKGAIGYA

SEQ ID NO: 21302 - protein, 294 aa, Idiomarina loihiensis
  REGION 1..294: note = tr|Q5QTY3|Q5QTY3_IDILO Uncharacterized conserved protein OS=Idiomarina loihiensis (strain ATCC BAA-735 / DSM 15497 / L2-TR) OX=283942 GN=IL1256 PE=4 SV=1
MQLFVNDLTVIDCSYLCPERGIVGESWIVDIVLDGALNEQSMVLDFGRVKKQVKAIIDNSVDHKLVVPAEHSYTKVTHNSDDSANWVDFLRPEQGSIHLFCPADAFAFIDADVVSMETVTDYLKAVIKRELPVNVEGLQLFLRPENIDGFYYHYTHGLKKHDGNCQRIAHGHRSKIQIRLDNIRQPVLEKEWSDKWEDIYLGTTEDVRSKKELTLSEAATSATSDSTHTYYSYVADQGLFELIVPNAENFVIETDSTVECIADFLAAEIKSKHAGQAVEVRAFEGVGKGAIAYA

SEQ ID NO: 21303 - protein, 294 aa, Idiomarina loihiensis; identical to SEQ ID NO: 21302
  REGION 1..294: note = tr|A0A349C2H9|A0A349C2H9_9GAMM Uncharacterized protein OS=Idiomarina loihiensis OX=135577 GN=DCR51_03655; PE = 4 SV=1

SEQ ID NO: 21304 - protein, 293 aa, Idiomarina marina
  REGION 1..293: note = tr|A0A432YJL2|A0A432YJL2_9GAMM Uncharacterized protein OS=Idiomarina marina OX=502366 GN=CWI76_02595 PE=4; SV = 1
MQLFVNDLTVIDFSYLCPERGMVGESWIVDIILDGSLNEQSMVLDFGRVKKQIKRIIDGAVDHKLAVPAEHAYTHVTHHDDGNSYWVDFMRPEQRSIHLFCPADAFAFIDAQRVTMASVTDYLRAVIKRELPDNVQGLELQLRAEEIPGAFYHYTHGLKKHDGNCQRIAHGHRSRIYIALNGTRSESLEQQWASTWQDIYLGSEEDVVPVAQLQRSQYAQHVTAQSHVGYSYIADQGLFELLVPVAENYIIPTDSTVECIATYLAQTIKRSHPNESIQVTGFEGVGKGAIGYA

SEQ ID NO: 21305 - protein, 293 aa, Idiomarina maritima
  REGION 1..293: note = tr|A0A1I6GDG8|A0A1I6GDG8_9GAMM 6-pyruvoyl tetrahydropterin synthase OS=Idiomarina maritima OX=519453; GN = SAMN04488070_0509 PE=4 SV=1
MQLFVNDLTVIDFSYLCPERGMVGESWIVDIILDGSLNEQSMVLDFGRVKKQIKRIIDGAVDHKLAVPAEHQYTHVTHHDDGNSYWVDFMRPNQRSIHLFCPADAFAFIDAEQVTMASVTEYLRAVIKRELPDNVQGLELHLRAEEIPGAFYHYTHGLKKHDGNCQRIAHGHRSRLYIALDGVRSAQLEQQWAATWQDIYLGSQEDVAAIAQLQLSQYGQSVTEKSHIAYSYTADQGLFELIVPVAENYVIPTDSTVECIATYLADTIKQSYPSNAIKVTGFEGVGKGAIGYA

SEQ ID NO: 21306 - protein, 293 aa, Idiomarina maritima
  REGION 1..293: note = tr|A0A317QDV1|A0A317QDV1_9GAMM 6-pyruvoyl tetrahydropterin synthase-like protein OS=Idiomarina maritima OX=519453 GN=DET45_102114 PE=4 SV=1
MQLFVNDLTVIDFSYLCPERGMVGESWIVDIILDGSLNEQSMVLDFGRVKKQIKRIIDGAVDHKLAVPAEHPFTRVHHHADGNSYWVDFLRPQQASIHLFCPADAFAFIDAEAVTMATVTDYLRAVIKRELPDNVQGLELLLRPEQIDGAFYHYTHGLKKHDGNCQRIAHGHRSRLFIALDGNRDEALEQQWAAKWQDIYLGSTEDVVELAQLQLSPSATDVTPASHIGYSYTADQGLFELVVPVAENYLIPTDSTVECIATYLAQAVKQQHPDCAVKVTGFEGVGKGAIGYA

SEQ ID NO: 21307 - protein, 293 aa, unidentified
  source 1..293: note = Idiomarina piscisalsi
  REGION 1..293: note = tr|A0A432YWC5|A0A432YWC5_9GAMM Uncharacterized protein OS=Idiomarina piscisalsi OX=1096243 GN=CWI73_01785; PE = 4 SV=1
MQLFVNDLTVIDCSYLCPQRGIVGESWIVDIVLDGNLNEQSMVLDFGKVKKQVKAIIDDSVDHKLLVPGDHPYTKVTHNKDDSSYWVDFERDNSRSIHLFCPSDSFAFIDAEVVSIETVTDYVKAVIKQELPVNVEGLKLTLRPEQIDGFYYHYTHGLKKHDGNCQRIAHGHRSKLQIFIDGIRQPALEKSWCDKWEDIYIGTEEDIATFNEMTLSKAAKVVDENTHIGYSYTSIQGLFELVMPRSENYVIESDSTVECIAQYLASTIGQEFAGKSVEVRAYEGVGKGAIAYA

SEQ ID NO: 21308 - protein, 293 aa, unidentified
  source 1..293: note = Idiomarina planktonica
  REGION 1..293: note = tr|A0A1Y6EST9|A0A1Y6EST9_9GAMM 6-pyruvoyl tetrahydropterin synthase OS=Idiomarina planktonica; OX = 1323738 GN=SAMN06297229_1355 PE=4 SV=1
MQLFVNDLTVIDFSYLCPQRGIVGESWIVDIILDGALNEQSMVLDFGRVKKQIKAIIDDSVDHKLAVPAEHEYTQVTRNEDKSSYWVDFMRPNERSIHLHCPADAFAFIDSEQVTIDTVTDYLRAVIKRELPENVAGLQLQLRAEAIPGAFYHYTHGLKKHDGNCQRIAHGHRSRLYISLDGKRSETLEAAWCERWRDIYIGSLEDEVSLAEVDCSQTAGQCNEHTHVAYAYTADQGLFELLVPRGENYIIPTDSTVECLAQYLADQVKQQYPQAKVQVTAFEGVGKGAIGYA

SEQ ID NO: 21309 - protein, 294 aa, Idiomarina ramblicola
  REGION 1..294: note = tr|A0A432Z506|A0A432Z506_9GAMM Uncharacterized protein OS=Idiomarina ramblicola OX=263724 GN=CWI78_00525; PE = 4 SV=1
MQLFVNDLTVIDCSYLCPERGIVGESWIVDIVLDGALNEQSMVLDFGRVKKQVKAIIDNSVDHKLVVPAEHPYTQVTHNSDDSANWVDFLRPDERSIHLFCPADAFAFIDADVVSIQTVTEYLKAVIKRELPGNVEGLRLLLRPESIDGFYYHYTHGLKKHDGNCQRIAHGHRSKIQIRLDDIRQPVLEKKWSDKWQDIYLGTTEDVCSHSRLKLSEAAHSATSDGSHTYYSYVADQGLFELIVPNAENFVIDTDSTVECIADFLATEIKREYPAKKVEVRAFEGVGKGAIAYA

SEQ ID NO: 21310 - protein, 293 aa, Idiomarina salinarum
  REGION 1..293: note = tr|A0A094LAL6|A0A094LAL6_9GAMM 6-pyruvoyl tetrahydropterin synthase OS=Idiomarina salinarum; OX = 435908 GN=IDSA_04060 PE=4 SV=1
MQLFVNDLTVIDFSYLCPQRGIVGESWIVDIILDGSLNEQSMVLDFGRVKKQIKRIIDGAVDHKLAIPAEHPYTQVSYHPDGNSYWVDFMRPDDRSIHLFCPSDAFAFIDAQEVTLESITEYLRAVIKRELPENVAGLSLQLRPEEIPGAFYHYTHGLKKHDGNCQRIAHGHRSRLYITLDGDRNSELESQWCERWRDIYLGSAEDVEPLDNLLRSSSAVALTEETHIGYSYSADQGLFELIVPRPENYVIPTDSTVECIAVYLATKVKQQCADAEVQVTAFEGVGKGAIGYA

SEQ ID NO: 21311 - protein, 294 aa, Idiomarina sediminum
  REGION 1..294: note = tr|A0A432Z7N2|A0A432Z7N2_9GAMM Uncharacterized protein OS=Idiomarina sediminum OX=431675 GN=CWI80_00670; PE = 4 SV=1
MQLFVNDLTVIDFSYVCPERGIVGESWIVDIILDGSLNEQSMVLDFGQVKKQIKRIIDDAVDHKLAIPAEHPYTHVTHSDDQNSHWVDFMRPNHRSIHLFCPAEAFAYIDADRVTKASVIAYLRGIIKRELPGNVAGLQLTLREEVIDGAYYHYTHGLKKHDGNCQRIAHGHRSRLQIFVDDTRQPELEALWAERWQDIYLGSTEDRCEPTALQRSVAAQQLTSSTHVAYAYEADQGRFELLVPTQENYCIATDSTVECIAEYLAAQVRSEQNPAGKIRVLAYEGVGKGAIMYA

SEQ ID NO: 21312 - protein, 294 aa, Idiomarina seosinensis
  REGION 1..294: note = tr|A0A432ZJU8|A0A432ZJU8_9GAMM Uncharacterized protein OS=Idiomarina seosinensis OX=281739 GN=CWI81_03425; PE = 4 SV=1
MQLFVNDLTVIDCSYLCPQRGIVGESWIVDIVLDGALNEQSMVLDFGRVKKQIKRIIDDSVDHKLVVPTEHEYTNVTYHSDDSSQWVDFMRPNGKSIHLFCPADAFAYIDAQEVNALTVTDYLRAVIKRELPGNVEGLKLFLRPEAIDGFYYHYTHGLKKHDGNCQRIAHGHRSKLQIFLDNIRQPVLEKQWSDKWADIYLGSSEDQSELTNLLRSAQAKQAATAATHVGYSYTADQGLFELSVPKAENYLIETDSTVECIAQYLADTIKQQVPDQSVQVRAYEGVGKGAIAYA

SEQ ID NO: 21313 - protein, 294 aa, Idiomarina sp.
  REGION 1..294: note = tr|A0A2D8HXF7|A0A2D8HXF7_9GAMM Uncharacterized protein OS=Idiomarina sp. OX=1874361 GN=CMF11_08440 PE=4; SV = 1
MQLFVNDLTVIDCSYLCPERGIVGESWIVDIVLDGALNEQSMVLDFGRVKKQVKAIIDNSVDHKLVVPAEHPYTKVTHNSDDSANWVDFVRPEQRSIHLFCPADAFAFIDAEVVSIETVTDYLKAVIKRELPVNVEGLSLFLRPENIDGFYYHYTHGLKKHDGNCQRIAHGHRSKIQIKLDNIRQPVLEKEWSDKWQDIYLGTTEDVCTRSNLQLSDAASDLSSDSSHTFYSYTADQGLFELAVPNAENFVIDTDSTVECIADYLVAEIKSQNPDKKVEVRAFEGVGKGAIAYA

SEQ ID NO: 21314 - protein, 293 aa, Idiomarina sp.
  REGION 1..293: note = tr|A0A1S2SWE7|A0A1S2SWE7_9GAMM Uncharacterized protein OS=Idiomarina sp. MD25a OX=1889913 GN=BFR57_12505; PE = 4 SV=1
MLLFVDDLTVIDCSYLCAERGIVGESWIVDIELDGSLNEQSMVLDFGRVKKQIKAIIDRSVDHKLLVPSSHAYTRVTHSDDDESHWVDFMRPEGRSIHLFCPAEAFAYIDAEKVDALTVTDYLRAVIKRELPGNVQGLRLSLRPEAIDGFYYHYTHGLKKHDGNCQRIAHGHRSKIQIALDNIRQPVLEKQWSERWADIYIGSEEDKVEIKRLQRSESAKQLSEATHVGYSYVADQGLFELIVPKSENDFIDSDSTVECIAEFIAAKIKQDHPEQRVRVRAFEGVGKGAIAYA

SEQ ID NO: 21315 - protein, 293 aa, Idiomarina tainanensis; identical to SEQ ID NO: 21306
  REGION 1..293: note = tr|A0A368V408|A0A368V408_9GAMM 6-pyruvoyl tetrahydropterin synthase-like protein OS=Idiomarina tainanensis OX=502365 GN=DFO79_102115 PE=4 SV=1

SEQ ID NO: 21316 - protein, 293 aa, Idiomarina taiwanensis
  REGION 1..293: note = tr|A0A432ZN72|A0A432ZN72_9GAMM Uncharacterized protein OS=Idiomarina taiwanensis OX=337250 GN=CWI83_02180; PE = 4 SV=1
MLLFVNDLTVIDFSYLCPERGIVGESWIVDIVLDGRLNEQSMVLDFGRVKKQIKKIIDESVDHKLAVPAEHPYTRVQKHAESEQYWVDFMRPEQASIHLYCPADAFAFIDAEQVDKASVMAYLRAVIRQQLPENVEQIELALREEQIDGAFYHYTHGLKKHDGNCQRIAHGHRSRIHIEVNGQRDTALEQKWAERWRDIYIGSSEDRCQLDALERSEAAQQVSDRTHIGYGYDADQGRFELILPQLENDLIDADSTVECIAEHIAQALKQQNPQATICVRAFEGVGKGAISYA

SEQ ID NO: 21317 - protein, 294 aa, unidentified
  source 1..294: note = Idiomarina tyrosinivorans
  REGION 1..294: note = tr|A0A432ZTV5|A0A432ZTV5_9GAMM Uncharacterized protein OS=Idiomarina tyrosinivorans OX=1445662; GN = CWI84_00480 PE=4 SV=1
MQLFVNDLTVMDFSYLCPQRGIVGESWIVDIVLDGALNEQSMVLDFGKVKKQIKAIIDDSVDHKLLVPTEHEYTAVKHNHDDTSQWVDFARPEGRSIHLYCPADAFAFIEAETITMQAVIDYLRAVIKRELPQNVEGLQLSLRTEQIDGFYYHYTHGLKKHDGNCQRIAHGHRSKITIALDNIRQPVLEKLWSNQWQDIYLGSRDDVVSVPELNRSEAAKQLTREATHVGYSYVAEQGLFELIVPKAENYLLETDSTVECIAEYLAQQIHQRHPKQKVMVRAFEGVGKGAIAYA

SEQ ID NO: 21318 - protein, 297 aa, unidentified
  source 1..297: note = Idiomarina woesei
  REGION 1..297: note = tr|A0A0K6GVH1|A0A0K6GVH1_9GAMM 6-pyruvoyl tetrahydropterin synthase OS=Idiomarina woesei OX=1381080; GN = Ga0061064_0188 PE=4 SV=1
MQLFVNDLTVIDFSYLCPERGMVGESWIVDIILDGSLNEQSMVLDFGRVKKQIKRIIDDAVDHKLAVPAEHPYTCVTHHDDGNSYWVDFLRPKQCSIHLFCPADAFAFIDAQQVTMQSVTDYLRAVIKRELPENVQGLSLQLRAEEIPGAFYHYTHGLKKHDGNCQRIAHGHRSRLYVALNGERNTTLELQWAQTWQDIYLGSEEDLVAIEQLQLSPVFAQRNLSVTTQTHKAYSYTADQGLFEILVPAAENYTIPTDSTVECIANYLAQTIKQAHPTDAVQVTGFEGVGKGAIGYA

SEQ ID NO: 21319 - protein, 293 aa, Idiomarina xiamenensis
  REGION 1..293: note = tr|K2LB65|K2LB65_9GAMM Uncharacterized protein; OS = Idiomarina xiamenensis 10-D-4 OX=740709 GN=A10D4_02372; PE = 4 SV=1
MQLFVNDLTVIDFSYLCARRGIVGESWIVDIVLDGDLNEQSMVLDFGRVKKQIKRIIDDAVDHKLAVPADSTLTQVTHNQDDSAYWVDFNRPDGRSIHLYCPADAYAFIEAEQIDQASVMAYLRAVIKQQLPDNIDGLQLFLRAESIDGFYYHYTHGLKKHDGNCQRIAHGHRSKIHIALDDIRQPALEKQWSDRWCDIYLGSEEDTCKVEQLTRSAAAQGCSDDSHQAYRYHADQGLFELLVPQAENDLIPTDSTVECIAQFVADSIKRRHPQQRVKVLAYEGVGKGAIAYA

SEQ ID NO: 21320 - protein, 293 aa, Idiomarina zobellii
  REGION 1..293: note = tr|A0A1G7NRX2|A0A1G7NRX2_9GAMM 6-pyruvoyl-tetrahydropterin synthase OS=Idiomarina zobellii OX=86103 GN=SAMN04515658_104139 PE=4 SV=1
MQLFVNDLTVIDCSYLCPQRGIVGESWIVDIVLDGNLNEQSMVLDFGKVKKQVKAIIDDSVDHKLLVPGDHPYTKVTHNEDDSSYWVDFERDNSRSIHLFCPSDSFAFIDAEVVSIETVTDYVKAVIKQELPVNVEGLKLTLRPEQIDGFYYHYTHGLKKHDGNCQRIAHGHRSKLQIFIDGIRQPALEKSWCDKWEDIYIGTEDDIATFNEMTLSKAANGVDENTHIGYSYTSIQGLFELVMPRSENYVIESDSTVECIAQYLASTIGQEHAGKSVEVRAYEGVGKGAIAYA

SEQ ID NO: 21321 - protein, 293 aa, unidentified
  source 1..293: note = Idiomarinaceae bacterium
  REGION 1..293: note = tr|A0A2E4SG00|A0A2E4SG00_9GAMM Uncharacterized protein OS=Idiomarinaceae bacterium OX=1898113; GN = CMF20_03410 PE=4 SV=1
  VARIANT 15: note = Xaa can be any naturally occurring amino acid
  VARIANT 17: note = Xaa can be any naturally occurring amino acid
  VARIANT 19: note = Xaa can be any naturally occurring amino acid
  VARIANT 66: note = Xaa can be any naturally occurring amino acid
  VARIANT 79: note = Xaa can be any naturally occurring amino acid
  VARIANT 122: note = Xaa can be any naturally occurring amino acid
  VARIANT 242: note = Xaa can be any naturally occurring amino acid
  VARIANT 245: note = Xaa can be any naturally occurring amino acid
MQLFVNDLTVIDCSXLXPXRGIVGESWIVDIVLDGNLNEQSMVLDFGKVKKQVKAIIDDSVDHKLXVPGDHPYTKVTHXEDDSSYWVDFERDNSRSIHLFCPSDSFAFIDAEVVSIETVTDXVKAVIKQELPVNVEGLKLTLRPEQIDGFYYHYTHGLKKHDGNCQRIAHGHRSKLQIFIDGIRQPALEKSWCDKWEDIYIGTEDDIATFNEMTLSKAANGVDENTHIGYSYTSIQGLFELXMPXSENYVIESDSTVECIAQYLASTIGQEHAGKSVEVRAYEGVGKGAIAYA

SEQ ID NO: 21322 - protein, 293 aa, unidentified
  source 1..293: note = Idiomarinaceae bacterium
  REGION 1..293: note = tr|A0A2E6UC81|A0A2E6UC81_9GAMM Uncharacterized protein OS=Idiomarinaceae bacterium OX=1898113; GN = CMF17_10295 PE=4 SV=1
MLLFVDDLTVIDCSYLCAERGIVGESWIVDIELDGSLNEQSMVLDFGRVKKQIKAIIDRSVDHKLLVPSSHAYTRVTHSDDDESHWVDFMRPEGRSIHLFCPAEAFAYIDAEKVDALTVTDYLRAVIKRELPGNVQGLRLSLRPEAIDGFYYHYTHGLKKHDGNCQRIAHGHRSKIQIALDNIRQPVLEKQWSERWADIYIGSEEDKAEIKRLQRSESAKQLSEATHVGYSYVADQGLFELIVPKSENDFIDSDSTVECIAEFIAAKIKQDHPEQRVRVRAFEGVGKGAIAYA

SEQ ID NO: 21323 - protein, 140 aa, unidentified
  source 1..140: note = Ignatzschineria cameli
  REGION 1..140: note = tr|A0A2U2ATV1|A0A2U2ATV1_9GAMM 6-carboxy-5,6,7,8-tetrahydropterin synthase; OS = Ignatzschineria cameli OX=2182793 GN=DC077_02445 PE=3; SV = 1
MLQQFYPTPAHNFRYELNKDMHFAAAHFIPNAAAGVCQNVHGHTYFANITIVGNELDECGFLINFQTLKALLHGVYDHTLMNDHPDFQNRPPSTEVVAEMAWRRIQAALDQEPHRPRCLQVLIRETPTSYVRYLPQAEDF

SEQ ID NO: 21324 - protein, 141 aa, Ignatzschineria indica
  REGION 1..141: note = tr|A0A2U2ALQ6|A0A2U2ALQ6_9GAMM 6-carboxy-5,6,7,8-tetrahydropterin synthase; OS = Ignatzschineria indica OX=472583 GN=DC082_00915 PE=3; SV = 1
MLQQFYPTPAHSFRYELNKDMHFAAAHFIPNELAGVCQRVHGHTYFANITVVGNELDECGFLINFQTLKALLHGVYDHTLMNDHPDFYHEPPSTEVVAKMAWQRIQKALDQEPHQPRCIQILIRETPTSYVRYLPQEEDFK

SEQ ID NO: 21325 - protein, 140 aa, Ignatzschineria sp.; identical to SEQ ID NO: 21323
  REGION 1..140: note = tr|A0A256CIY2|A0A256CIY2_9GAMM 6-carboxy-5,6,7,8-tetrahydropterin synthase; OS = Ignatzschineria sp. F8392 OX=1980117 GN=B9T19_08355; PE = 3 SV=1

SEQ ID NO: 21326 - protein, 141 aa, Ignatzschineria ureiclastica
  REGION 1..141: note = tr|A0A2U2ACX8|A0A2U2ACX8_9GAMM 6-carboxytetrahydropterin synthase QueD OS=Ignatzschineria ureiclastica OX=472582 GN=DC083_09420 PE=4 SV=1
MLQQFYPTPAHPFRYELNKDLHFAAAHHIPDPSAGICQQIHGHTYFANITIVGDALDECGFLVNFQLIKKLVHAPYDHTLLNNHEDFSTRPPSTEVVTEAIWRRIQDHLNTLPHQPRCLQVLVRETPTSYVCYRPKAEDFI

SEQ ID NO: 21327 - protein, 31 aa, unidentified
  source 1..31: note = Ignavibacteria bacterium
  REGION 1..31: note = tr|A0A2M7MQN7|A0A2M7MQN7_9BACT 6-pyruvoyl tetrahydrobiopterin synthase (Fragment) OS=Ignavibacteria bacterium CG_4_10_14_3_um_filter_37_18 OX=1974037; GN = COZ25_00625PE=4 SV=1
WKELYHKIPVGKLYSVKLFETENNYVEYRGE

SEQ ID NO: 21328 - protein, 137 aa, unidentified
  source 1..137: note = Ignavibacteria bacterium
  REGION 1..137: note = tr|A0A1G0VEM0|A0A1G0VEM0_9BACT 6-carboxy-5,6,7,8-tetrahydropterin synthase; OS = Ignavibacteria bacterium RIFOXYB2_FULL_37_11 OX=1798448; GN = A2299_18270 PE=3 SV=1
MVYVTRREIFSASHRLFNPNLSEEENNSLFGKCNNPNGHGHNYTLEVTICGEVNPKTGYLIDLKLLKQIIIDNVINKVDHKNLNLDVDFLAGKIPTAENIAIAVWDELENKIPNGKLYSIRLLETENNYIEYKGKNV

SEQ ID NO: 21329 - protein, 135 aa, unidentified
  source 1..135: note = Ignavibacteriae bacterium
  REGION 1..135: note = tr|A0A2G6E2V7|A0A2G6E2V7_9BACT 6-carboxy-5,6,7,8-tetrahydropterin synthase; OS = Ignavibacteriae bacterium OX=2026749 GN=CR986_10255; PE = 3 SV=1
MIYVTRREVFSASHRLHNENLSNEENKSIFGKCNNPNGHGHNYILEVVVAGEIDKKTGYVIDLKLLKTIIIENVIKKVDHKHLNFDVDFMKDINPTTENFVIAIWNQLKNKIPSGRLYAIRLHETENNFIEYKGE

SEQ ID NO: 21330 - protein, 145 aa, unidentified
  source 1..145: note = Ignavibacteriae bacterium
  REGION 1..145: note = tr|A0A2N1V7K9|A0A2N1V7K9_9BACT 6-carboxy-5,6,7,8-tetrahydropterin synthase; OS = Ignavibacteriae bacterium HGW-Ignavibacteriae-4; OX = 2013811 GN=CVV25_03930 PE=3 SV=1
MLFITKSVEFSASHRLFNPEWDFAKNQEVYDKCNNPNGHGHNYVLEVTVKGKPNPDTGYVIDLKKLKSILVNNVLIHLDHKHLNVDVDFLKGVIPTVENITVLIWDIVKPHITDGELYKLKLYETPSSWVEYFGEPIEIKRFENE

SEQ ID NO: 21331 - protein, 98 aa, unidentified
  source 1..98: note = Ignavibacteriales bacterium
  REGION 1..98: note = tr|A0A2M7I2J9|A0A2M7I2J9_9BACT 6-carboxytetrahydropterin synthase (Fragment); OS = Ignavibacteriales bacterium CG12_big_fil_rev_8_21_14_0_65_30_8 OX=1974046 GN=COW08_04 855 PE=4 SV=1
MKIAKEFRWEMGHRLPDHFGKCKNIHGHSYKMMVEFEGELDKNGMIIDYYIVKEIIEPIVEELDHSFMVNKNDDLVLEFLEKLDSKKVIVDFDSTVEN

SEQ ID NO: 21332 - protein, 141 aa, unidentified
  source 1..141: note = Ignavibacteriales bacterium
  REGION 1..141: note = tr|A0A2M7ZIK4|A0A2M7ZIK4_9BACT 6-carboxytetrahydropterin synthase OS=Ignavibacteriales bacterium CG_4_9_14_3_um_filter_30_11 OX=1974043; GN = CO128_08965 PE=4 SV=1
MKIAKEFRWEMGHRLPDHFGKCKNIHGHSYKMMVEFEGELDKNGMIIDYYIVKEIIEPIVEKLDHSFMVNKKDNLVLDFLEKLNSKKMIVDFDSTVENITRYLIKEISKASLPKNVTGLKVRVCETPDDYAEETTNLNYEL

SEQ ID NO: 21333 - protein, 135 aa, Ignavibacterium album
  REGION 1..135: note = tr|I0AJ91|I0AJ91_IGNAJ 6-carboxy-5,6,7,8-tetrahydropterin synthase; OS = Ignavibacterium album (strain DSM 19864 / JCM 16511 / NBRC 101810 / Mat9-16) OX=945713 GN=ptpSPE=3 SV=1
MVYITRRETFAAAHRLFIPELSDEENLKIFGKCSHPNWHGHNYTLEVVIAGEINPETGFVLDIKKLKEIIHKFVIDKVDHKNLNLDTDFMKGLIPTSENICIAIWNQLKDKIPSGKLYSVKLYETENNYFEYRGE

SEQ ID NO: 21334 - protein, 138 aa, Ignavibacterium album
  REGION 1..138: note = tr|I0AGF9|I0AGF9_IGNAJ 6-Pyruvoyl-tetrahydropterin synthase OS=Ignavibacterium album (strain DSM 19864 / JCM 16511 / NBRC 101810 / Mat9-16) OX=945713 GN=ptpS PE=4 SV =1
MKIAKAFRWEMGHRLPEHFGLCKNIHGHSYKMIVEFEGELNKDQMVIDYYDVEKIINPIINQLDHAFMVNTNDKIVLDFLEKMNSKKVVVDFDATAENICKFLLSEISKSNLPENINSVKVRVYETQFDYAEDTLQLK

SEQ ID NO: 21335 - protein, 119 aa, Ilumatobacter fluminis
  REGION 1..119: note = tr|A0A4R7HWP6|A0A4R7HWP6_9ACTN 6-carboxy-5,6,7,8-tetrahydropterin synthase; OS = Ilumatobacter fluminis OX=467091 GN=BDK89_0141 PE=3 SV=1
MEIFREFTFEAAHRLPNVSEGHKCGRLHGHSYRIELHVDGEPDERTGWVMDFAEIKQAFAPILDRLDHHYLNDVPGLENPTSETLAAWLWSQLDGDLPLSKVVVRETCTSGCVYRGPAS

SEQ ID NO: 21336 - protein, 142 aa, Ilyobacter polytropus
  REGION 1..142: note = tr|E3HCY3|E3HCY3_ILYPC 6-carboxy-5,6,7,8-tetrahydropterin synthase OS=Ilyobacter polytropus (strain DSM 2926 / CuHBu1) OX=572544; GN = Ilyop_2278 PE=3 SV=1
MYILKAEHHFDSAHFLKGYQGKCANIHGHRWRVVAEVEGDKLFSEGQLRDMVVDFGDLKRDIKKMVDYYDHSLIIESGSMRKETLSFLIEDGFNIIEVDFRPTAERFASKFYEELENMGYRIKRIHVYETPTNCALYERQGG

SEQ ID NO: 21337 - protein, 164 aa, unidentified
  source 1..164: note = Imhoffiella purpurea
  REGION 1..164: note = tr|W9V734|W9V734_9GAMM Folate biosynthesis protein PTPS-III OS=Imhoffiella purpurea OX=1249627 GN=D779_1522; PE = 4 SV=1
MADQTLTRIEISKDYLNFSAGHFTIFSASERENLHGHNFQVRCSVSAHVGADGMAFDYVVLKRILRELCDALDERVLLPELSPHLRLEHQEGQVIALFADERIGFLERDVLLLPVRNVTIEELAPLLLTRLRDRIEIADRGIRCMELGVSSGAGQWAYACWESD

SEQ ID NO: 21338 - protein, 365 aa, unidentified
  source 1..365: note = Imhoffiella purpurea
  REGION 1..365: note = tr|W9V6V5|W9V6V5_9GAMM Queuosine biosynthesis QueD, PTPS-I OS=Imhoffiella purpurea OX=1249627 GN=D779_1596; PE = 4 SV=1
MTEQLFHVAAAPFESARRVAILPEGHRARRLHGHSFLAKVRARLPQDWGGFRGAESGALLESLAGAVEALDYRDLNELLPVPTDENLARWLRDRLDVPGVASIGVQSTSEQGADLDDGEDRVHVWRRFRFEAAHRLPNVPEGHQCGRMHGHGFEVILHADQSLAGADMGIDFDRLAALWAPLQAELHHACLNEIPGLENPTSEMLSRWIWERLTPRLPALSWVTVYETATAGCHYDGEHYRIWKEQRFESALRLELAPEGDSRRRLHGHSYLLRLHLTAPLDAVLGWTVDYGDVKRLFDPVYRRLDHHRLDGLHGLSAADPGSLALWIREAALGGLPQLDRIDLHETPGCGASLCWGELGPALPS

SEQ ID NO: 21339 - protein, 139 aa, unidentified
  source 1..139: note = Imperialibacter sp.
  REGION 1..139: note = tr|A0A5E7ZWQ7|A0A5E7ZWQ7_9BACT 6-carboxytetrahydropterin synthase QueD OS=Imperialibacter sp. EC-SDR9 OX=2038371 GN=IMPR6_380009 PE=4 SV=1
MIYVSRKEHFNAAHKLYNPAWSKEKNEAVFGPCANENWHGHNFDLIITVKGMPDPETGFVIDLKKLSTLIRTRVIDKVDHKNLNLDVDFLEGKMASCENIVFEFWKILFPGVKEIAPNATLHAIKLYETPRNYVEYFGE

SEQ ID NO: 21340 - protein, 135 aa, unidentified
  source 1..135: note = Imperialibacter sp.
  REGION 1..135: note = tr|A0A5E8AS83|A0A5E8AS83_9BACT 6-carboxy-5,6,7,8-tetrahydropterin synthase; OS = Imperialibacter sp. EC-SDR9 OX=2038371 GN=IMPR6_60091; PE = 3 SV=1
MKVAVYRKEHFNAAHRLNNPAWSEEKNREVFGKCNNGNYHGHNYDLVVKLVGDPDPETGYVFDMKVLSDLVKEHVTRKFDHKNLNIDVEEFRSLNPTAENIAIVIYDLLRARIDSKLDLKITLYETERNFVEYPA

SEQ ID NO: 21341 - protein, 149 aa, unidentified
  source 1..149: note = Imtechella halotolerans
  REGION 1..149: note = tr|I0WJL2|I0WJL2_9FLAO 6-carboxy-5,6,7,8-tetrahydropterin synthase OS=Imtechella halotolerans K1 OX=946077 GN=W5A_01105 PE=3 SV=1
MTQIRITKQFSFETGHALYGYDGKCKNVHGHSYKLSVTVIGSPNIDTTNVKYGMVIDFGDLKKIVKEEIVDIFDHATVFNQNTPHIDLANELKSRNHNVILVDYQPTSENMVIDFANKIRRRLPKNINLFSLKLQETETSYAEWYASDN

SEQ ID NO: 21342 - protein, 136 aa, unidentified
  source 1..136: note = Imtechella halotolerans
  REGION 1..136: note = tr|I0WGV7|I0WGV7_9FLAO Putative 6-pyruvoyl tetrahydropterin synthase OS=Imtechella halotolerans K1; OX = 946077 GN=W5A_05393 PE=4 SV=1
MKVKVSRKAYFNAAHRLYRPDWSFEKNEAIFGKCNNPNYHGHNYELIASVFGNIDPETGYVIDIKILKDLIYKHIELAFDHKNLNEDVPEFKSLNPTAEHIAVVIWKKLRPHLPLNLDLEITLYETPRNFVTYRGE

SEQ ID NO: 21343 - protein, 139 aa, Indibacter alkaliphilus
  REGION 1..139: note = tr|S2DKN0|S2DKN0_9BACT 6-pyruvoyl tetrahydrobiopterin synthase OS=Indibacter alkaliphilus LW1 OX=1189612 GN=A33Q_0310 PE=4 SV=1
MIHVCRKEHFNAAHKLWNPNWSEEKNKEVFGPCSNVNWHGHNFELIVTVKGMPDPETGFVVDLKELSSVIKTLVIDKVDHKNLNLDVDFMQGKMASCENLVVEFWKILAPAINEIVTDGSLYKLTLYETPRNFVEYYGE

SEQ ID NO: 21344 - protein, 135 aa, Indibacter alkaliphilus
  REGION 1..135: note = tr|S2DI24|S2DI24_9BACT 6-carboxy-5,6,7,8-tetrahydropterin synthase OS=Indibacter alkaliphilus LW1 OX=1189612 GN=A33Q_2155 PE=3 SV=1
MLSITKIFSFESAHSISDYEGACSNLHGHSYVLHVTVSGEELEKDMLLDFKALKKIVKEEIIEKLDHTLVLKNTENHKRDFQQMWQKIFWMEHEPTAERMLLWMKDRIVPKLPSHVKLESLTLYETATCYACWKG

SEQ ID NO: 21345 - protein, 366 aa, Inhella sp.
  REGION 1..366: note = tr|A0A437LI10|A0A437LI10_9BURK 6-pyruvoyl tetrahydropterin synthase OS=Inhella sp. CCP-18 OX=2499851; GN = EOD73_13050 PE=4 SV=1
MNPSLLHSAGAGFEAACHIPALPEGHRSRRLHGHSYFARVRGALPSGWAPFPGAEVATLRERLEAAVAPLDHGLLNDHLPNPTDENLARWLRAQLGDVPGLGQVSVASTPHSGVDLDTAGHAHVWRRYRFQSAHWLPNVPPGHQCGRLHGHGFEVIVHANQTLGANDDLAIDYDHLDDLWAPLHFQLNYRCLNELPGLDNPTSERLSSWIWAQLKPQLPALSWVTVFETGSSGANFDGANYRIWKEFSMDSAVQLRRAPQGHPLAGVHGHTFTLRLHLQAPLDAVLGWAVDYGDVKALFNPVFKRLDHHPLHQDPALSDGDCATLATHVLQAAREVLPATDRVDLFETRGSGAIATLGDTNELIPV

SEQ ID NO: 21346 - protein, 137 aa, unidentified
  source 1..137: note = Inmirania thermothiophila
  REGION 1..137: note = tr|A0A3N1YCL2|A0A3N1YCL2_9GAMM 6-pyruvoyltetrahydropterin/6-carboxytetrahydropterin synthase OS=Inmirania thermothiophila OX=1750597; GN = EDC57_1054 PE=4 SV=1
MNSRYRVTRTVHFCYGHRLLGHPGRCRHLHGHSARAEITLAADGLDALGMVADFGEIQRAADAFIDAELDHNLLLQAGDPVLPTLQEAGERVFVMEAPPTAENIARLICERLRGAGLPVVEVAVWEGEASCARYRPA

SEQ ID NO: 21347 - protein, 134 aa, Inquilinus limosus
  REGION 1..134: note = tr|A0A211ZG15|A0A211ZG15_9PROT Uncharacterized protein OS=Inquilinus limosus OX=171674 GN=BWR60_26145; PE = 4 SV=1
MYTVSVRDHFMIAHSFRGAVFGPAQKLHGATYVVDLAFRRAELDADGIVVDIGLASEALKAVMGELNYRNLDDEAAFAGRNTTTEVLARTIFDRIAARIAAGGLGAGAAAIESLVVTLHESHVAWASYEGRLAR

SEQ ID NO: 21348 - protein, 118 aa, Inquilinus limosus
  REGION 1..118: note = tr|A0A211ZNX1|A0A211ZNX1_9PROT 6-carboxy-5,6,7,8-tetrahydropterin synthase OS=Inquilinus limosus OX=171674 GN=BWR60_12740 PE=3 SV=1
MKITQAFTFEAAHRLPNVPATHRCHRMHGHSYRVELRLEGPVDPESGFVVDFFDVEAAFAPILARLDHYCLNEIEGLANPTAEHIAVWIWDRVRPSLPLLAAVTVYETPNCWAEYDGR

SEQ ID NO: 21349 - protein, 138 aa, Inquilinus sp.
  REGION 1..138: note = tr|A0A554SFH9|A0A554SFH9_9PROT 6-carboxytetrahydropterin synthase OS=Inquilinus sp. KBS0705 OX=2578108 GN=FFF34_013875 PE=4 SV=1
MIHITRKEHFNAAHRMYREEWSAEKNEEVFGKCANPNWHGHNYNLFVTVKGEVTHATGYLIDLKELKVIINDYVIEKLDHKNINKDVDFMAGKMASTELLCIEIFNQLKGPIEAYPGVFLHSVKLYETENNFAEYFGG

SEQ ID NO: 21350 - protein, 185 aa, Insolitispirillum peregrinum
  REGION 1..185: note = tr|A0A1N7MVK3|A0A1N7MVK3_9PROT 6-pyruvoyltetrahydropterin/6-carboxytetrahydropterin synthase OS=Insolitispirillum peregrinum OX=80876; GN = SAMN05421779_104387 PE=4 SV= 1
MSLMHVTRRLEIDAGHRIMLHGSKCRHLHGHRYAIEATVCSPQAELHQSGEQAGMVLDFGFLKQEMTACIDQPCDHGFMASLADLDVLRMFAPPAQAFDPWLAGVRQQVERDGYLATTDCRVGSKLYVVPFHPTAEELARHWFQRLQPRVLERSHGLAHLDRVRVWETPNCWAEYTGDGVLSSAG

SEQ ID NO: 21351 - protein, 142 aa, unidentified; identical to SEQ ID NO: 19341
  source 1..142: note = Intestinibacter bartlettii
  REGION 1..142: note = tr|B0A670|B0A670_9FIRM 6-carboxy-5,6,7,8-tetrahydropterin synthase; OS = Intestinibacter bartlettii DSM 16795 OX=445973; GN = SAMN02745147_0109 PE=3 SV=1

SEQ ID NO: 21352 - protein, 132 aa, Intrasporangium calvum
  REGION 1..132: note = tr|E6SDC9|E6SDC9_INTC7 Uncharacterized protein; OS = Intrasporangium calvum (strain ATCC 23552 / DSM 43043 / JCM 3097 / NBRC 12989 / 7 KIP) OX=710696 GN=Intca_1028; PE = 4SV=1
MFSVTVRDHMMVAHSFRGEIFGPAQRLHGATFVVDVTFRGPALDRDNVLVDIGLATSEVHEVVSDLNYRNLDDEPAFAGVNTSAEALAKAVADRVAERVHGGRLRDAAQQVTEISVTLRESHVAWAGYERPL

SEQ ID NO: 21353 - protein, 132 aa, Intrasporangium oryzae
  REGION 1..132: note = tr|W9GCP6|W9GCP6_9MICO 6-pyruvoyl tetrahydropterin synthase OS=Intrasporangium oryzae NRRL B-24470 OX=1386089; GN = N865_02685 PE=4 SV=1
MFSVTVRDHMMIAHSLRGEVFGPAQRLHGATYVVDATFRREALDPDSLVVDIGRAAEQLREVLGELGYRNLDDEPTLTGLTTTTEALAQVVADRLAERVHDGRLGEGARGLSAVAVTLHESHVAWATYERSL

SEQ ID NO: 21354 - protein, 198 aa, Iodobacter fluviatilis
  REGION 1..198: note = tr|A0A377ST37|A0A377ST37_9NEIS Queuosine biosynthesis protein QueD OS=Iodobacter fluviatilis OX=537; GN = NCTC11159_03751 PE=4 SV=1
MLIRKLFKFENAHIVRNCSSERCRSSIHGHSYRVEVLLEANALDHGQMVYDFGLMKGTIRDVVDAFDHAVCFWDKDDAEYIRLCKQFSTRWIAMPVSPSAEQFARMFFVIIDALLQQTVMANGEADVTLHSVIAHETDTGYAQAFRADAINERMGIIRLEDVVFSEQCQAEWKDPEMYKKLLDGQRFINPAVPRQVEI

SEQ ID NO: 21355 - protein, 198 aa, Iodobacter sp.
  REGION 1..198: note = tr|A0A3S8ZWD2|A0A3S8ZWD2_9NEIS 6-carboxytetrahydropterin synthase OS=Iodobacter sp. H11R3; OX = 2496266 GN=EJO50_15410 PE=4 SV=1
MLIRKLFKFENAHIVRNCSSERCRSSIHGHSYRVEILLEANALDHGQMVYDFGLMKGTIRDVIDAFDHAICFWDRDDTEYIRLCKQFSTRWIAMPVSPSAEQFSRIFFVIIDALLQQTIMANGEADVTLHSVIAHETDTGYAQAFRADAINERMGIIRLEDIIFSEQCQAEWKDPDMYKKLLSGKHFSNPPAPRQIEV

SEQ ID NO: 21356 - protein, 198 aa, Iodobacter sp.
  REGION 1..198: note = tr|A0A2G3J5R7|A0A2G3J5R7_9NEIS 6-carboxytetrahydropterin synthase QueD OS=Iodobacter sp. BJB302 OX=1506510 GN=CSQ88_20075 PE=4 SV=1
MLIRKLFKFENAHIVRNCSSERCRSSIHGHSYRVEVLLEANALDHGQMVYDFGLMKGTIRDVVDAFDHAVCFWDKDDAEYIRLCKQFSTRWIAMPVSPSAEQFSRMFFVIIDALLQQTVMANGEADVTLHSVIAHETDTGYAQAFRADAINERMGIIRLEDVVFSEQCQAEWKDPEMYKKLLDGQRFINPAVPRQVEA

SEQ ID NO: 21357 - protein, 177 aa, Isosphaera pallida
  REGION 1..177: note = tr|E8QZT4|E8QZT4_ISOPI Uncharacterized protein; OS = Isosphaera pallida (strain ATCC 43644 / DSM 9630 / IS1B) OX=575540 GN=Isop_2655 PE=4 SV=1
MTMPNPPALAGHYRVRVTKDHLVFAAGHFITYNGDHCERIHGHNYRVAVEVEGPLDDNHYVFDFIALLELSRSIVAEWDHRMLLPDGSGLIAVHDDPGEGPAHVRVCYKERRWVFPKEECVILPIPNTTTELLARLFGQRLWERMGQQGLKPPSVLRVEVEENFGQMAAAEWRNPSE

SEQ ID NO: 21358 - protein, 154 aa, Isosphaera pallida
  REGION 1..154: note = tr|E8QWX4|E8QWX4_ISOPI PreQ(0) biosynthesis protein QueD OS=Isosphaera pallida (strain ATCC 43644 / DSM 9630 / IS1B) OX=575540 GN=Isop_3456 PE=4 SV=1
MYRVTREMKFCYGHRLINYEGKCRHLHGHNGRVLVTLESPTLDHRGMLIDFADIKAVLQQWIDDTLDHNMLLCKDDPLVPILRERGERHYVMETNPTAENIARLIFERGREAGLPIVEVTLWETDTCHASFQGPLTITAVDVQANANGRVVAYG

SEQ ID NO: 21359 - protein, 133 aa, unidentified
  source 1..133: note = Isosphaeraceae bacterium
  REGION 1..133: note = tr|A0A432MPI7|A0A432MPI7_9BACT 6-carboxytetrahydropterin synthase OS=Isosphaeraceae bacterium GM2012 OX=2080755 GN=TsocGM_03850 PE=4 SV=1
MYRVAREIEFCYGHRLINYDGKCRHLHGHNGKAVILLEGEALDRRGMLVDFGDIKQHVQRWIDENLDHNMLLCRDDPILPVLQDLGERVFVMDANPTAENIAALIYRQARDAGLPVVRVTLWETPKCHAIFGD

SEQ ID NO: 21360 - protein, 168 aa, unidentified
  source 1..168: note = Isosphaeraceae bacterium
  REGION 1..168: note = tr|A0A432MEY8|A0A432MEY8_9BACT 6-pyruvoyl tetrahydropterin synthase family protein OS=Isosphaeraceae bacterium GM2012 OX=2080755 GN=TsocGM_20530 PE=4 SV=1
MTSRRYTVRVTKDELVFSAGHFITFNGDECERIHGHNWRVAVEVDGPLDENHYVFDFIALRDLTRALVAELDHRMLLPDRNPHIRVGVEGRNVVCRHRDRLWSFPAEECVILPIENTTAERIADHLGDRLRAAIASRGMPFPRAMRVSVEENFGQWATAHWDAEEDGG

SEQ ID NO: 21361 - protein, 120 aa, unidentified
  source 1..120: note = Izhakiella australiensis
  REGION 1..120: note = tr|A0A1S8YLG9|A0A1S8YLG9_9ENTR 6-carboxy-5,6,7,8-tetrahydropterin synthase OS=Izhakiella australiensis OX=1926881 GN=BTJ39_13275 PE=3 SV=1
MSITLFKDFQFEAAHRLPHVPEGHKCGRLHGHSFMVRLEVTGDVDPYTGWVMDFAELKAAFKPVYDQLDHHYLNEIDGLENPTSEVLAQWIWQQMKPRVPGLSAVMVKETCTAGCVWRGE

SEQ ID NO: 21362 - protein, 128 aa, unidentified
  source 1..128: note = Izhakiella capsodis
  REGION 1..128: note = tr|A0A1I4W8Q3|A0A1I4W8Q3_9ENTR 6-carboxy-5,6,7,8-tetrahydropterin synthase OS=Izhakiella capsodis OX=1367852 GN=SAMN05216516_102368 PE=3 SV=1
MSMTLFKDFQFEAAHRLPHVPDGHKCGRLHGHSFMVRLEVTGDVDPYTGWVMDFAELKSAFKPVYDRLDHYYLNEIDGLENPTSEVLAQWIWQQMKPHVPLLSAVMVKETCTAGCVWRGESSTGDSRC

SEQ ID NO: 21363 - protein, 121 aa, unidentified
  source 1..121: note = Izhakiella sp.
  REGION 1..121: note = tr|A0A4P8YNV5|A0A4P8YNV5_9ENTR 6-carboxy-5,6,7,8-tetrahydropterin synthase OS=Izhakiella sp. KSNA2 OX=2579935 GN=queD PE=3 SV=1
MMSTTLFKEFTFEAAHRLPHVPEGHKCGRLHGHSFMVRLEVTGEVDPHTGWVIDFAELKAAFKPTWERLDHYYLNDIPGLENPTSEVLARWIWQQVKPQLPLLSAVQVKETCTAGCVYRGE

SEQ ID NO: 21364 - protein, 131 aa, Jannaschia pohangensis
  REGION 1..131: note = tr|A0A1I3NWC3|A0A1I3NWC3_9RHOB 6-pyruvoyl-tetrahydropterin synthase OS=Jannaschia pohangensis OX=390807 GN=SAMN04488095_2273 PE=4 SV=1
MFAVEVRDHVMIAHSLPSPVFGPAQGMHGATFVVDAAFYTEDLDENGLVVDMGLATNALAEALEPLRYSNLDDVPAFAGKITTTEFLCHHIWSLLRDAAKTTGLGDGGRLRRIRVMLHESHVARGWYEADI

SEQ ID NO: 21365 - protein, 148 aa, Janthinobacterium agaricidamnosum
  REGION 1..148: note = tr|A0A3G2EA72|A0A3G2EA72_9BURK 6-carboxy-5,6,7,8-tetrahydropterin synthase; OS = Janthinobacterium agaricidamnosum OX=55508 GN=queD PE=3; SV = 1
MLTITRKLEFDAGHRIPDHKSQCRNLHGHRYTVEITLVGKVIEAEGNSDNGMIMDFSDVKTLAKQHLVDVWDHAFLVYEKDTAVRDFLASLPDHKTVVIDRIPTVENLARIAFEILKAAFTDHFGTGLHLHKLVLHETPNCWAEVTDD

SEQ ID NO: 21366 - protein, 148 aa, Janthinobacterium agaricidamnosum
  REGION 1..148: note = tr|W0V5Z4|W0V5Z4_9BURK Queuosine biosynthesis protein QueD OS=Janthinobacterium agaricidamnosum NBRC 102515 = DSM 9628 OX=1349767 GN=queD PE=4 SV=1
MLTITRKLEFDAGHRIPDHKSQCRNLHGHRYTVEITLVGQIIQAEGNSDNGMIMDFSDIKALAKEHLVDVWDHAFLVYEKDSVVRDFLATLPNHKTVVIDRIPTVENLAQIAFDILKAAYTDRFGTGLHLHKLVLHETPNCWAEITDA

SEQ ID NO: 21367 - protein, 148 aa, Janthinobacterium lividum
  REGION 1..148: note = tr|A0A377QQ53|A0A377QQ53_9BURK 6-carboxy-5,6,7,8-tetrahydropterin synthase; OS = Janthinobacterium lividum OX=29581 GN=NCTC9796_03298; PE = 3 SV=1
MLTITRKLEFDAGHRIPDHKSQCRNLHGHRYTVEITLVGKVIEAEGNSDNGMIMDFSDVKTLAKQHLVDVWDHAFLVYEKDTAVRDFLASLPDHKTVVIDRIPTVENLARLAFEILKAAFTDHFGTGLHLHKLVLHETPNCWAEVTDD

SEQ ID NO: 21368 - protein, 148 aa, Janthinobacterium lividum
  REGION 1..148: note = tr|A0A031GLU8|A0A031GLU8_9BURK 6-carboxy-5,6,7,8-tetrahydropterin synthase; OS = Janthinobacterium lividum OX=29581 GN=queD PE=3 SV=1
MLTITRKLEFDAGHRIPDHKSQCRNLHGHRYTVEITLVGKVIEAEGNSDNGMIMDFSDVKTLAKQHLVDVWDHAFLVYEKDTAVRDFLASLPDHKTVVIDRIPTVENLARIAFDILKAAFTDHFGTGLHLHKLVLHETPNCWAEVTDD

SEQ ID NO: 21369 - protein, 148 aa, Janthinobacterium sp.
  REGION 1..148: note = tr|L9PAY0|L9PAY0_9BURK 6-carboxy-5,6,7,8-tetrahydropterin synthase; OS = Janthinobacterium sp. HH01 OX=1198452 GN=queD PE=3 SV=1
MLTITRKLEFDAGHRIPDHKSQCRNLHGHRYTLEITLTGNIITAEGNSDNGMIMDFSDIKALAKEHLVDVWDHAFIVYEKDAAVREFLATLPGHKTVVIDRIPTVENLAHVAFGILKSAYKDRYGTGLHLHKLVLHETPNCWAEITDA

SEQ ID NO: 21370 - protein, 148 aa, Janthinobacterium sp.; identical to SEQ ID NO: 21365
  REGION 1..148: note = tr|A0A1E7VUM9|A0A1E7VUM9_9BURK 6-carboxy-5,6,7,8-tetrahydropterin synthase; OS = Janthinobacterium sp. HH106 OX=1537278 GN=JAB8_53190; PE = 3 SV=1

SEQ ID NO: 21371 - protein, 148 aa, unidentified; identical to SEQ ID NO: 21365
  source 1..148: note = Janthinobacterium svalbardensis
  REGION 1..148: note = tr|A0A290WXI6|A0A290WXI6_9BURK 6-carboxy-5,6,7,8-tetrahydropterin synthase; OS = Janthinobacterium svalbardensis OX=368607 GN=queD PE=3; SV = 1

SEQ ID NO: 21372 - protein, 132 aa, unidentified
  source 1..132: note = Jatrophihabitans sp.
  REGION 1..132: note = tr|A0A286EVJ2|A0A286EVJ2_9ACTN 6-pyruvoyl-tetrahydropterin synthase OS=Jatrophihabitans sp. GAS493 OX=1907575 GN=SAMN05892883_4110 PE=4 SV=1
MFSVTVRDHIMIAHSFRGEVFGPAQRLHGATYIVDATLRRPDLDADGIVVDIGRAAEELHRILAQLSYRNLDDEPEFAGVNTSTEMLAKVIADRMADRIQAGEFGAAARGLVGLCVTLHESHVAWATYERPL

SEQ ID NO: 21373 - protein, 150 aa, Jejuia pallidilutea
  REGION 1..150: note = tr|A0A362XDJ0|A0A362XDJ0_9FLAO 6-pyruvoyltetrahydropterin/6-carboxytetrahydropterin synthase OS=Jejuia pallidilutea OX=504487 GN=CLV33_103130; PE = 4 SV=1
MSNIRITKQFSFETGHALYGYDGKCKNVHGHSYRLDVTVIGKPITDNTNVKYGMVIDFGDLKKIVKEEIVNVFDHATVFNKNTPHVDLANELKKRGHNVLLVNYQPTSEMMVIDFAKKIKARLPQNIKLHSLKLQETATSFAEWFAYDQE

SEQ ID NO: 21374 - protein, 150 aa, Jejuia pallidilutea
  REGION 1..150: note = tr|A0A090VZ89|A0A090VZ89_9FLAO 6-carboxytetrahydropterin synthase OS=Jejuia pallidilutea; OX = 504487 GN=JCM19301_3974 PE=4 SV=1
MSNIRITKQFSFETGHALYGYDGKCKNVHGHSYRLDVTVIGKPITDNTNVKYGMVIDFGDLKKIVKEEIVNVFDHATVFNKNTPHVELANELKKRGHNVLLVNYQPTSEMMVIDFAKKIKARLPQNIKLHSLKLQETATSFAEWFAYDQE

SEQ ID NO: 21375 - protein, 198 aa, Jeongeupia sp.
  REGION 1..198: note = tr|A0A1D9BGL3|A0A1D9BGL3_9NEIS 6-carboxytetrahydropterin synthase QueD OS=Jeongeupia sp. USM3 OX=1906741 GN=BJP62_13375 PE=4 SV=1
MLIRKLFKFENAHIVRNCSSDRCRRSIHGHSYKVEVLLEAHALDHGQMVYDFGLMKGTIKDVIDAFDHAVCFWDKDDPDYIALCQRFSARWISLPVSPSAEQFARLFFVVIDALLRQTTMANGEGDVVLHSVIAHETDTGYAQAFRDDAYNPRMGTIALNDIVFSEQVCAEWRDPAMYDKLLAGELFANPPVELQVRP

SEQ ID NO: 21376 - protein, 147 aa, Jeotgalibacillus alimentarius
  REGION 1..147: note = tr|A0A0C2VXT3|A0A0C2VXT3_9BACL 6-carboxy-5,6,7,8-tetrahydropterin synthase; OS = Jeotgalibacillus alimentarius OX=135826 GN=KP77_19990; PE = 3 SV=1
MMQQIYPAPAHDFSYELNKDFHFSAAHAIPSEDAGKCRYVHGHTYYVNITVAGDELDHAGFLINFKKIKELIHDRFDHSLLNDDQLFSQVDPDYFPTTEVVARSIWEIIEQHLEQTDNKPTCLQVFLRETPTSYVLYRPKGNRHGKS

SEQ ID NO: 21377 - protein, 144 aa, Jeotgalibacillus campisalis
  REGION 1..144: note = tr|A0A0C2S1F2|A0A0C2S1F2_9BACL 6-carboxy-5,6,7,8-tetrahydropterin synthase; OS = Jeotgalibacillus campisalis OX=220754 GN=KR50_20410; PE = 3 SV=1
MIQQIYPSPDHPFSYELNKDFHFAAAHSIPHEAAGKCQQVHGHTYFANVTIAGDELDESGFLVNFKTIKNLLHDRFDHKVLNEDERFPSESGNTFPTTEVVARVMYEIIQEYLDKTMNKPTCLQIYLRETPTSYVIYRPKTGRV

SEQ ID NO: 21378 - protein, 145 aa, unidentified
  source 1..145: note = Jeotgalibacillus malaysiensis
  REGION 1..145: note = tr|A0A0B5ASZ5|A0A0B5ASZ5_9BACL 6-carboxy-5,6,7,8-tetrahydropterin synthase; OS = Jeotgalibacillus malaysiensis OX=1508404 GN=JMA_18370; PE = 3 SV=1
MMQQIYPAPMHSFSYELNKDFHFSAAHAIPSDEAGKCRFVHGHTYYVNITVAGDDLDDAGFLINFKKIKQLVHDRFDHTLLNDDQLFSEDDSDRFPTTEVVARSIWEIIESHLRETDNQPTCLQVFLRETPTSYVLYRPKKEGNF

SEQ ID NO: 21379 - protein, 146 aa, Jeotgalibacillus marinus; identical to SEQ ID NO: 17871
  REGION 1..146: note = tr|A0A0M0L1S5|A0A0M0L1S5_9BACL 6-carboxy-5,6,7,8-tetrahydropterin synthase; OS = Jeotgalibacillus marinus OX=86667 GN=AMC98_02515 PE=3; SV = 1

SEQ ID NO: 21380 - protein, 145 aa, unidentified
  source 1..145: note = Jeotgalibacillus proteolyticus
  REGION 1..145: note = tr|A0A2S5GFV1|A0A2S5GFV1_9BACL 6-carboxy-5,6,7,8-tetrahydropterin synthase; OS = Jeotgalibacillus proteolyticus OX=2082395 GN=queD PE=3; SV = 1
MIQQIYPSPSHEFSYELNKDFQFAAAHYVPHEAAGKCQNIHGHTYFANITIAGDQLDESGFLVNFKTIKELLHDRFDHGILNEDELFSDKDETRFPTTEVVARIMYEVIQEYLNTTINKPQCLQVFLRETPTSYVIYRPKSGGLL

SEQ ID NO: 21381 - protein, 145 aa, Jeotgalibacillus salarius
  REGION 1..145: note = tr|A0A4Y8LIU8|A0A4Y8LIU8_9BACL 6-carboxy-5,6,7,8-tetrahydropterin synthase; OS = Jeotgalibacillus salarius OX=546023 GN=queD PE=3 SV=1
MMQQIYPAPMHNYSYELNKDFHFSAAHAIPTEDAGKCQFVHGHTYYVNITVAGDDLDHAGFLINFKKIKQLVHDRFDHTLLNDDDLFSKNDPDRFPTTEVVARSIWEIIEKHLQQTENNPTCLQVFLRETPTSYVLYRPKKAGNQ

SEQ ID NO: 21382 - protein, 146 aa, Jeotgalibacillus soli
  REGION 1..146: note = tr|A0A0C2R514|A0A0C2R514_9BACL 6-carboxy-5,6,7,8-tetrahydropterin synthase; OS = Jeotgalibacillus soli OX=889306 GN=KP78_28940 PE=3 SV=1
MIQQIYPAPFHNFSYELNKDFHFAAAHYIPHDAAGKCQQVHGHTYFANVTIAGDQLDDSGFLVNFKTIKELLHDRFDHGVLNDDKHFTNEDSNFFPTTEIVARVMCEIIQEYLDTTSNKPACLQVFLRETPTSYVVYRPKKERTSS

SEQ ID NO: 21383 - protein, 146 aa, Jeotgalibacillus sp.
  REGION 1..146: note = tr|A0A4Y8LR01|A0A4Y8LR01_9BACL 6-carboxy-5,6,7,8-tetrahydropterin synthase; OS = Jeotgalibacillus sp. R-1-5s-1 OX=2555897 GN=queD PE=3; SV = 1
MIQQIYPAPHHEYSYELNKDFHFSAAHSIPSEEAGKCQYVHGHTYFVNITIAGDELDHTGFLINFKTIKQLVHDRFDHKILNEDPAFSETDSDRFPTTEAAARIIWESIEAYLQTTENKPTCLQVFLRETPTSYVVYRPKKKGITS

SEQ ID NO: 21384 - protein, 145 aa, Jeotgalibacillus sp.
  REGION 1..145: note = tr|A0A4R5XTD0|A0A4R5XTD0_9BACL 6-carboxy-5,6,7,8-tetrahydropterin synthase; OS = Jeotgalibacillus sp. S-D1 OX=2552189 GN=queD PE=3 SV=1
MIQQIYPAPTHEYSYELNKDFHFAAAHSIPDDEAGKCRYVHGHTYYANITVAGDELNSSGFLVNFKTIKELLHDRFDHGVLNDDERFSHEESNRFPTTEVVARVMYEIIQEHLDLTANKPTCLQIFLRETPTSYVIYRPKNGGTS

SEQ ID NO: 21385 - protein, 136 aa, Jeotgalicoccus halophilus
  REGION 1..136: note = tr|A0A1G8XQU6|A0A1G8XQU6_9STAP 6-pyruvoyltetrahydropterin/6-carboxytetrahydropterin synthase OS=Jeotgalicoccus halophilus OX=586411; GN = SAMN05216187_103226 PE=4 SV=1
MDIQEVKPPHMFKYFNRPVTIHKHYTFTCDNRIFFSDTAFKDLKNHRYSFNLEIQSHVGDLGLATDFHLIDKIYNDYISVKLNNCLINQTLPDMNTTAENIAYWIFEQFNKHLPAEDVLQSVTLYETDNQGITVTK

SEQ ID NO: 21386 - protein, 136 aa, Jeotgalicoccus halotolerans
  REGION 1..136: note = tr|A0A3E0AYR3|A0A3E0AYR3_9STAP 6-pyruvoyltetrahydropterin/6-carboxytetrahydropterin synthase OS=Jeotgalicoccus halotolerans OX=157227; GN = DFR63_1197 PE=4 SV=1
MSLENVKPPEQFQYFNHQIVINKHFEFTCHNRIFFSSTAFKDLKNHRYTFQLEILSMVNGLGLATDFHLIDQIYREHIALKLDNCVLNETLPVMNTTAENIAYWIFEQFNSHLPKENTLLKVTLYETEKQGVSVTK

SEQ ID NO: 21387 - protein, 136 aa, Jeotgalicoccus nanhaiensis
  REGION 1..136: note = tr|A0A4Y9HLE9|A0A4Y9HLE9_9STAP 6-pyruvoyl tetrahydrobiopterin synthase OS=Jeotgalicoccus nanhaiensis; OX = 568603 GN=E4T89_05615 PE=4 SV=1
MSLENVKPPEQFQYFNHQIVINKHFEFTCHNRIFFSSTAFKDLKNHRYTFQLEILSMVNELGLATDFHLIDQIYREHIALKLDNCVLNETLPAMNTTAENIAYWIFEQFSSHLPKEDTLLKVTLYENDKQGISVTK

SEQ ID NO: 21388 - protein, 144 aa, unidentified
  source 1..144: note = Jeotgalicoccus saudimassiliensis
  REGION 1..144: note = tr|A0A078M318|A0A078M318_9STAP 6-pyruvoyl tetrahydropterin synthase OS=Jeotgalicoccus saudimassiliensis OX=1461582 GN=BN1048_01553 PE=4 SV=1
MNINDVKPPAEFKYFEEQVTIHKHFSFICDNRIFFSNTAFKDLKNHHYSFSIEISSPVNALGLATDFHLIDKIYDEEIGIKLDNCLLNETLPEMNTTAENISYWLFEELSARLPENDVLLKVTLYENPRQGVTITKQMTLHKFT

SEQ ID NO: 21389 - protein, 132 aa, unidentified
  source 1..132: note = Jiella sp.
  REGION 1..132: note = tr|A0A4Y8RLJ7|A0A4Y8RLJ7_9RHIZ 6-carboxytetrahydropterin synthase OS=Jiella sp. CBS5Q-3; OX = 2558362 GN=E3C22_11180 PE=4 SV=1
MYAVEVRDHMMIAHSLPRPVFGPAQGMHGATYVVDAAFFTNDLDADGLAVDIGLAIQLLKSVLEPLNYQNLDAVEAFQGKVTTTEFLARHLFDRLAERIAGGALGEGGGRIRRLKVSLEESHVARAWYEGEL

SEQ ID NO: 21390 - protein, 139 aa, Jishengella endophytica
  REGION 1..139: note = tr|A0A2W2CKH9|A0A2W2CKH9_9ACTN Uncharacterized protein OS=Jishengella endophytica OX=515350; GN = C1I93_04325 PE=4 SV=1
MFSVTVRDHIMIAHSFRGAVFGPAQRLHGATFVVDASFRRPDLDEDGIVVDIGLATEQLKAVLGELNYRNLDDEPAFAGTNTTTEVLARTIADRLADRVHAGDLGPGARGLTGITVTLHESHVAWASYERTLGAGGDAA

SEQ ID NO: 21391 - protein, 142 aa, Jishengella sp.
  REGION 1..142: note = tr|A0A2W2EIA0|A0A2W2EIA0_9ACTN Uncharacterized protein OS=Jishengella sp. NA12 OX=1655439 GN=C1I95_23850; PE = 4 SV=1
MFSVTVRDHIMVAHSFRGEVFGPAQRLHGATFVVDATFRRPDLDDDGIVVDIGLAIEQLKAVLGELNYRNLDDEPAFAGTNTTTEVLARTIADRLADRVHAGDFGAGAHGLAGITVTLHESHVAWASYERTLGPGGAGENLA

SEQ ID NO: 21392 - protein, 137 aa, unidentified
  source 1..137: note = Jiulongibacter sediminis
  REGION 1..137: note = tr|A0A0P7C4R2|A0A0P7C4R2_9BACT 6-carboxy-5,6,7,8-tetrahydropterin synthase; OS = Jiulongibacter sediminis OX=1605367 GN=AFM12_16955 PE=3; SV = 1
MIRITRREYFNAAHRLYNPKWSAEKNWEVFGPCSRMHGHNWELFVTVEGEVEEDTGFVMDLKKLKDLVREVIIDKVDHTYLNDDVDFLKGILPSCENFAIAVWNILEPVIKERYGVQLYEIKLQETENHFAQYFGKK

SEQ ID NO: 21393 - protein, 138 aa, unidentified
  source 1..138: note = Jiulongibacter sediminis
  REGION 1..138: note = tr|A0A0P7BYV9|A0A0P7BYV9_9BACT 6-pyruvoyl tetrahydrobiopterin synthase OS=Jiulongibacter sediminis; OX = 1605367 GN=AFM12_01895 PE=4 SV=1
MRKKVAVFRREHFNAAHRLHNPEWSDEKNQEVFGKCNNPNYHGHNYNLEVKLTGEIDPATGYVYDMKMLSDLINEHVCDRFDHKNLNLDVPEFKNLNPSAENIVVVIYEILEKAINNSELTLSVRLYETERNYVEYPA

SEQ ID NO: 21394 - protein, 158 aa, Jonquetella anthropi
  REGION 1..158: note = tr|C9M5H1|C9M5H1_9BACT Uncharacterized protein; OS = Jonquetella anthropi E3_33 E1 OX=645512; GN = GCWU000246_00184 PE=4 SV=1
MRSITKVSIQYAHRFLDYEGEAQYLHGHSGLLTIEVEGDVDKRTGFVYPCNSMKRIAWDYLKAFDHALIMQENDPLLPAILKVYEEQGIRNGAETNRTLGVAFDTPLAKSYPECRLVVVKKVATCENLIEIFYNLMKDQMNIKKMTFASGDNSASMDF

SEQ ID NO: 21395 - protein, 158 aa, Jonquetella anthropi; identical to SEQ ID NO: 21394
  REGION 1..158: note = tr|H0UJB9|H0UJB9_9BACT 6-pyruvoyl-tetrahydropterin synthase OS=Jonquetella anthropi DSM 22815 OX=885272; GN = JonanDRAFT_1526 PE=4 SV=1

SEQ ID NO: 21396 - protein, 157 aa, Joostella marina
  REGION 1..157: note = tr|I3C3K2|I3C3K2_9FLAO 6-pyruvoyl-tetrahydropterin synthase OS=Joostella marina DSM 19592 OX=926559; GN = JoomaDRAFT_1176 PE=4 SV=1
MHKEPKVMSNIRITKQFNFETGHALYGYDGKCRNVHGHSYKLSVTVIGTPITDTANVKLGMVIDFGDLKKIVKEDIVDVFDHATVFNKNTPHVELAQELSTRGHNVILVDYQPTSENMVIDFAEKIKKRLPEHIQLHSLKLQETETSFAEWYATDNN

SEQ ID NO: 21397 - protein, 135 aa, Joostella marina
  REGION 1..135: note = tr|I3C817|I3C817_9FLAO 6-carboxy-5,6,7,8-tetrahydropterin synthase OS=Joostella marina DSM 19592 OX=926559 GN=JoomaDRAFT_2799 PE=3 SV=1
MNLKVSRKAHFNAAHRLFRPDWDDDKNKAVFGKCSNPNYHGHNYDLIVSVKGEIDPETGFVIDLKILKELIEREVEDHLDHKNLNIEVPEFKTLNPTVENIAIVIYNRLKPFLEEFELEVVLYETPRNYVTYTGA

SEQ ID NO: 21398 - protein, 119 aa, unidentified
  source 1..119: note = Kalamiella piersonii
  REGION 1..119: note = tr|A0A3A9IN39|A0A3A9IN39_9GAMM 6-carboxy-5,6,7,8-tetrahydropterin synthase OS=Kalamiella piersonii OX=2364647 GN=queD PE=3 SV=1
MSTTLFKEFQFEAAHHLPNVPEGHKCGRLHGHSFLVRLEITGEVDAHTGWVMDFAELKAAFKPLYDRLDHHYLNEIPGLENPTSEVLAKWIWDEMKPLLPELSAVMIKETCTAGCVYKG

SEQ ID NO: 21399 - protein, 134 aa, Kandleria vitulina
  REGION 1..134: note = tr|A0A1H2QBI9|A0A1H2QBI9_9FIRM 6-carboxy-5,6,7,8-tetrahydropterin synthase OS=Kandleria vitulina OX=1630 GN=SAMN04487759_102124 PE=3 SV=1
MYRVSTQASFDAAHFLKDYPGKCHNLHGHRWKVVIEVSSPELDEGSMVIDFTDIKKELKKMADHFDHCLIIEEGSLKKETYEALLSEDFRIVTVNFRPTAECFAKYFFDQLSSSFPVNKVQVYETPNNVATYEV

SEQ ID NO: 21400 - protein, 134 aa, Kandleria vitulina
  REGION 1..134: note = tr|A0A0R2HAJ7|A0A0R2HAJ7_9FIRM 6-carboxy-5,6,7,8-tetrahydropterin synthase OS=Kandleria vitulina DSM 20405 OX=1410657 GN=IV49_GL000422 PE=3 SV=1
MYRVSTQASFDAAHFLKDYPGKCHNLHGHRWKVVIEVSSPELDEGSMVIDFTDIKKELKKMADHFDHCLIIEEGSLKKETYEALVSEDFRIVTVNFRPTAECFAKYFFDQLSSSFPVNKVQVYETPNNVATYEV

SEQ ID NO: 21401 - protein, 283 aa, Kangiella geojedonensis
  REGION 1..283: note = tr|A0A0F6TQ99|A0A0F6TQ99_9GAMM 6-pyruvoyl tetrahydropterin reductase OS=Kangiella geojedonensis; OX = 914150 GN=TQ33_0778 PE=4 SV=1
MPALFVDQLTVIDFAFFDIHRGIVGESWIVDLVLEGELDDQGMVFDFGDVKKRIKQAIDATVDHKFVVPANSKYVTTEHNDQGLKLTLSDTSGHRYYHQSPEQAVVLLDAEEVTMDDVIKVLNEACLEVVPANVAKINLKLSTEAITGNYYHYAHGLKKHLGDCQRIAHGHRSRIHIFDNGQRSQKLEAFWSEKWEDIYIGTEEDLVEPEVESSKDYYRFAYTSEQGYFSLEIPKARCHIMKNDSTVELIANHILKQLKVLEPNAKLEVKAFEGVNKGAIAHG

SEQ ID NO: 21402 - protein, 283 aa, Kangiella koreensis
  REGION 1..283: note = tr|C7RAS9|C7RAS9_KANKD Uncharacterized protein; OS = Kangiella koreensis (strain DSM 16069 / KCTC 12182 / SW-125) OX=523791 GN=Kkor_0951 PE=4 SV=1
MPALFVDQLTVIDFAFFDPARGIVGESWIVDLVLEGELDDQGMVFDFGDVKKRIKQAIDSTLDHKLAVPSQHSEMSIAEDSDSLTLDMRDKQGHFYRHQSPKQAVALVPAEIITRESVLPMLHEACSKVVPNNVKKIYLNLRTENISGDYYHYAHGLKKHLGDCQRIAHGHRSQIHIFENNQRHTDLETYWCELWRDIYIGTAEDLQKDFEDNGVQYFEFSYQSEQGEFSLIIPAERCHIMQQDSTVELIAQHIADQLKAKHPQSDIKVKAYEGVNKGAIAFA

SEQ ID NO: 21403 - protein, 283 aa, unidentified
  source 1..283: note = Kangiella profundi
  REGION 1..283: note = tr|A0A2K9A8W1|A0A2K9A8W1_9GAMM 6-pyruvoyl tetrahydropterin reductase OS=Kangiella profundi; OX = 1561924 GN=CW740_07865 PE=4 SV=1
MPALFVDQLTVIDFAFFDPVRGIVGESWIVDLVLEGDLDDQGMVFDFGDVKKRIKQAIDSTLDHKFAVPSQYAELSITEDGDKLTLDMRDKQGRFYQHKSPRQAVALIPTEIITRESALPLLHQACSEVVPDNVKKIFLNLRTEEISGDYYHYAHGLKKHLGDCQRIAHGHRSQIHIFENGQRNKDLEAYWCELWRDIYIGTAEDLQKDFEDDAIQYFEFAYRSEQGEFSLVIPAERCHIMEQDSTVELIAQHIADQLKEKHPKSEIEVRAFEGFNKGAIAFS

SEQ ID NO: 21404 - protein, 283 aa, unidentified
  source 1..283: note = Kangiella sediminilitoris
  REGION 1..283: note = tr|A0A1B3B9R8|A0A1B3B9R8_9GAMM 6-pyruvoyl tetrahydropterin reductase OS=Kangiella sediminilitoris; OX = 1144748 GN=KS2013_819 PE=4 SV=1
MPALFVDQLTVIDFAFFDTHRGIVGESWIVDLVLEGELDDQGMVFDFGDVKKRIKQAIDATVDHKFVVPAKSEHVSSTTNEKGIELRLTDTSDNRYYHQSPEQAVVMLDADKVTMKAVSKVLNQACLNVVPENVVKIHLHLSTESIEGDYYHYAHGLKKHLGDCQRIAHGHRSQIHVFKNGQRNRELEALWCEKWEDIYIGTEEDMVGTEHEDPNDYYRFAYTSEQGHFSLELPQHRCHIMKSDSTVELIANHIAKQLKSIEPNASIRVKAFEGVNKGAIANA

SEQ ID NO: 21405 - protein, 284 aa, Kangiella sp.
  REGION 1..284: note = tr|A0A2G2L8G7|A0A2G2L8G7_9GAMM 6-pyruvoyl tetrahydropterin reductase OS=Kangiella sp. OX=1920245; GN = COA86_05300 PE=4 SV=1
MPALFVNNLSVIDFAYFCPERGIVGESLILDVELLGELNEEGMLFDFSYVKKRIKSCVDSLVDHKLLVATNCEYSTVTKSPQQLELILKTKDERIYKHISPNQAVCLINASEVTKHSIAQLIKSEISKILPNNVTDTNINLRSEVIDGPFFHYAHGLKKHFGDCQRIAHGHRSKLEVFIDSTYSIEWSEHIAKLWKDIYLATEEDIKEEIKINGTDYWVFEYHANQGLFQLTIQKNCCHLIKTDTTVELIASYLAVYLKEKLPDSRIRIKAYEGVDKGAISEIN

SEQ ID NO: 21406 - protein, 283 aa, Kangiella spongicola
  REGION 1..283: note = tr|A0A318CZT6|A0A318CZT6_9GAMM 6-pyruvoyl tetrahydropterin reductase OS=Kangiella spongicola; OX = 796379 GN=DL796_09035 PE=4 SV=1
MPALFVDQLTVIDFALFDIHRGIVGESWIVDLVLEGELDDQGMVFDFGDVKKRIKQAIDATVDHKLVVPANSDYVATEHNDKGLKLTLKDTSGHRYHHQSPEQAVVLLDAEEVTMDAVIKVLNKACLEVVPNNVAKVHLTLNTEAIAGHYYHYAHGLKKHLGDCQRIAHGHRSQIHIFENGKRSEDLEAFWCQKWEDIYIGTEEDLVETEVEDATEYYRFAYTSEQGYFSLELPKARCHLMKSDSTVELIASHIVKQLKAIKPDSAIRVKAFEGVNKGAIANG

SEQ ID NO: 21407 - protein, 118 aa, unidentified
  source 1..118: note = Keratinibaculum paraultunense
  REGION 1..118: note = tr|A0A4V2UUF1|A0A4V2UUF1_9CLOT 6-carboxy-5,6,7,8-tetrahydropterin synthase; OS = Keratinibaculum paraultunense OX=1278232 GN=EDD65_10413; PE = 3 SV=1
MILVKEFEFDAAHNLVNYHGKCENLHGHTYKLVIKLEGKPDHEGMVYDFVELKKLVNEKIINIFDHSYLNNIIPQPTAENIAIYTWNNLKEHIDRNNCRLYEVQVWETKTSGIVYRGE

SEQ ID NO: 21408 - protein, 283 aa, unidentified
  source 1..283: note = Ketobacter alkanivorans
  REGION 1..283: note = tr|A0A2K9LMG3|A0A2K9LMG3_9GAMM 6-pyruvoyl tetrahydropterin reductase OS=Ketobacter alkanivorans; OX = 1917421 GN=Kalk_05970 PE=4 SV=1
MSALFVKHLTVLDFSYVHLTRGILGESWIVDVELYGELDHQGMVFDFGHVKKKVRDAVESLFDHKLVLPKGLPTLQTRSVDDGLEITWRDAQNRHYRHLSPLEAVEWVDTDEITADALIPLLEDAAMAAVPDNVSRVVIELRSEEISGAFYHYSHGLKKHDGNCQRIAHGHRSRVKILRNGKRDPLLEKAWALKWKDIYIGTEEDLMSRLTEDGVDYCQFGYDAPQGRFELTLPESQVYLIPTDSTVEYLADHMAACLKKDDPEHQFEVKAYEGVMKGAIAFK

SEQ ID NO: 21409 - protein, 283 aa, unidentified
  source 1..283: note = Ketobacter sp.
  REGION 1..283: note = tr|A0A3L8B9V2|A0A3L8B9V2_9GAMM 6-pyruvoyl tetrahydropterin reductase OS=Ketobacter sp. OX=2083498; GN = D9N14_18860 PE=4 SV=1
MAALFVNHLTVLDFSYVHHARGILGESWIVDVELYGELDHQGMVFDFGLVKKQVRDAVESLVDHKLVLPQDLPGLATRELDSGLEIRWRDAKGRAYRHLSPLEAVEWVAGDSITQEALIPLLEDAAMAAVPDNVSRVAIELRNEEISGAFYQYSHGLKKHDGNCQRIAHGHRSRIKILRNGKRDPLLEKAWSLKWKDIYLGTEEDLMDRLSDDGVDYCQFGYDAPQGRFELTLPASQVYLIPTDSTVEYLADYIAGCLKQDDPDHQFEVKAYEGVMKGAISQR

SEQ ID NO: 21410 - protein, 283 aa, unidentified; identical to SEQ ID NO: 17181
  source 1..283: note = Ketobacter sp.
  REGION 1..283: note = tr|A0A3L8BDQ4|A0A3L8BDQ4_9GAMM 6-pyruvoyl tetrahydropterin reductase OS=Ketobacter sp. OX=2083498; GN = D9N15_18510 PE=4 SV=1

SEQ ID NO: 21411 - protein, 132 aa, Kibdelosporangium aridum
  REGION 1..132: note = tr|A0A428Z051|A0A428Z051_KIBAR 6-carboxytetrahydropterin synthase OS=Kibdelosporangium aridum OX=2030 GN=DMH04_35185 PE=4 SV=1
MFSITVRDHVMVAHSFHGEVFGPAQRLHGATFLVDATFSRAELDDDNIVVDIGLATEQLKDVLGPLNYRNLDDEPDFKGINTSTEFLAKVIADRLVDRIGEGKLGDGARGLSEITVTLHESHVAWASYRRQL

SEQ ID NO: 21412 - protein, 132 aa, Kibdelosporangium aridum
  REGION 1..132: note = tr|A0A1W2F6S5|A0A1W2F6S5_KIBAR 6-pyruvoyl-tetrahydropterin synthase OS=Kibdelosporangium aridum OX=2030 GN=SAMN05661093_05584 PE=4 SV=1
MFSITVRDHVMVAHSFRGEVFGPAQRLHGATFLVDATFSRAELDDDNIVVDIGLATEQLGEVLAPLNYRNLDDEPDFKGINTSTEFLAKVIADRLAGRIGEGKLGDGARGLSEITVTLHESHVAWASYRRQL

SEQ ID NO: 21413 - protein, 150 aa, unidentified
  source 1..150: note = Kibdelosporangium phytohabitans
  REGION 1..150: note = tr|A0A0N9HWV1|A0A0N9HWV1_9PSEU 6-pyruvoyl tetrahydrobiopterin synthase OS=Kibdelosporangium phytohabitans OX=860235 GN=AOZ06_26045 PE=4 SV=1
MTQQTSVQVRHNFETAHRLPELGGKCVNLHGHSWWLEATVTAVAGDPGEVVCEFGALKIALREWVDVHLDHGAMLGIADPLLPTLADAGRVFVFGKDEPAADLPWPTVEATAHLLTRVTTAIASDLDPRLTVTHVRVTETHVNAAEVHTT

SEQ ID NO: 21414 - protein, 133 aa, unidentified
  source 1..133: note = Kibdelosporangium phytohabitans
  REGION 1..133: note = tr|A0A0N9I5S9|A0A0N9I5S9_9PSEU 6-pyruvoyl tetrahydropterin synthase OS=Kibdelosporangium phytohabitans OX=860235 GN=AOZ06_34325 PE=4 SV=1
MFSITVRDHVMVAHSFRGEVFGPAQRLHGATFLVDATFHRAELDDDNIVVDIGLATEQLKDVLAPLNYRNLDDEPEFDGVNTSTEFLAKVIADRLAGRIGDGRLGDGARGLSEITVTLHESHVAWASYRRAVG

SEQ ID NO: 21415 - protein, 136 aa, Kibdelosporangium sp.
  REGION 1..136: note = tr|A0A0K3AZF9|A0A0K3AZF9_9PSEU PTPS-like type 4; OS = Kibdelosporangium sp. MJ126-NF4 OX=703222 PE=4 SV=1
MFSITVRDHVMVAHSFRGEVFGPAQRLHGATFLVDATFHRADLDEDNIVVDIGLATEQLKEVLAPLNYRNLDDEPEFKGVNTSTEFLAKVIADRLVERIGDGKLGDGARGLSEITVTLHESHVAWASYRRAVGSSL

SEQ ID NO: 21416 - protein, 118 aa, unidentified
  source 1..118: note = Kiloniella litopenaei
  REGION 1..118: note = tr|A0A0M2REI0|A0A0M2REI0_9PROT 6-carboxy-5,6,7,8-tetrahydropterin synthase OS=Kiloniella litopenaei OX=1549748 GN=WH95_06100 PE=3 SV=1
MYRISKQFTFSASHQLMGVPEGHPCSRLHGHNYIVEIELSGEDLNSAGFVRDYLELSELKQYIDDVLDHRHLNEVLGDDNVTAERLSKHLFDWAFERWPEVTALRVSETPKTWAEYRP

SEQ ID NO: 21417 - protein, 118 aa, unidentified
  source 1..118: note = Kiloniella spongiae
  REGION 1..118: note = tr|A0A0H2MJ02|A0A0H2MJ02_9PROT 6-carboxy-5,6,7,8-tetrahydropterin synthase OS=Kiloniella spongiae OX=1489064 GN=WH96_03210 PE=3 SV=1
MYRISKQFTFSASHQLMGVPEGHPCSRLHGHNYIVEIELSGENLNSAGFVRDYLELSELKQYIDDVLDHRHLNEVLGDDNVTAERLSKYLFDWSFERWPEVTALRVSETPKTWAEYRP

SEQ ID NO: 21418 - protein, 123 aa, Kineococcus radiotolerans
  REGION 1..123: note = tr|A6WGA6|A6WGA6_KINRD 6-carboxy-5,6,7,8-tetrahydropterin synthase OS=Kineococcus radiotolerans (strain ATCC BAA-149 / DSM 14245 / SRS30216); OX = 266940 GN=Krad_4382 P E=3 SV=1
MEIFREFTFEAAHRLPHVPAGHKCARLHGHSYRVSVHVNGLPDPLLGWVMDFGDLKKLVAPVIERLDHYYLNEVEGLDNPTSEVLARWMWQQLSPTLALLSAVTVRETCTSGATYRGETDEHL

SEQ ID NO: 21419 - protein, 125 aa, Kineococcus rhizosphaerae
  REGION 1..125: note = tr|A0A2T0RAZ0|A0A2T0RAZ0_9ACTN 6-pyruvoyl-tetrahydropterin synthase OS=Kineococcus rhizosphaerae OX=559628 GN=CLV37_101568 PE=4 SV=1
MYSLTVRDRVMVAHSFTGEVFGPAQRLHGATFVVEATFRRSALDADGLVVDIGVASRVLREVLAQLDYRNLDDVPELAGRNTTTEFLCGWIAGRLAEALPATGLEQISVLLRESDVAWAAYDVTL

SEQ ID NO: 21420 - protein, 141 aa, Kingella kingae
  REGION 1..141: note = tr|F5S5X0|F5S5X0_9NEIS 6-carboxy-5,6,7,8-tetrahydropterin synthase OS=Kingella kingae ATCC 23330 OX=887327 GN=queD PE=3 SV=1
MFKTAKEFTFDMAHMLDGHDGKCQNLHGHTYILQVEISGNLHESGAKKGMVMDFADLKAVVKTHILDKMDHAFIYDTTSERECQVANLLNQLNSKTYGINTRTTAEEMTRHIFNVLTAEANLPVSLIRLWETPSSYCEYAA

SEQ ID NO: 21421 - protein, 141 aa, unidentified
  source 1..141: note = Kingella negevensis
  REGION 1..141: note = tr|A0A238HGR3|A0A238HGR3_9NEIS 6-carboxy-5,6,7,8-tetrahydropterin synthase OS=Kingella negevensis OX=1522312 GN=queD PE=3 SV=1
MFKTAKEFSFDMAHMLDGHDGKCQNLHGHTYILQVEITGSLHETGAKKGMVMDFADLKAQVKTHILDKMDHAFIYDTTSERESQVAQLLNQLNSKTYGIPTRTTAEEMTRHIYNVLKTQAQLPISLVRLWETPTSYCEYSE

SEQ ID NO: 21422 - protein, 142 aa, Kingella potus
  REGION 1..142: note = tr|A0A377QZB2|A0A377QZB2_9NEIS 6-carboxy-5,6,7,8-tetrahydropterin synthase OS=Kingella potus OX=265175 GN=NCTC13336_00276 PE=3 SV=1
MKITKIFSFDSSHLLDGHDGKCKNLHGHTYRLEITVSDGLIKGGAKDGMVMDFADLKAIAEREIIDPFDHAFLYHAGNARESQIAALLEGWQMKTLRLGCRTTAENMAAEIYGRLKKAGLNVCSVKLWETPTSCAEFEGAGQ

SEQ ID NO: 21423 - protein, 381 aa, Kinneretia asaccharophila
  REGION 1..381: note = tr|A0A4R6NBR1|A0A4R6NBR1_9BURK 6-pyruvoyltetrahydropterin/6-carboxytetrahydropterin synthase OS=Kinneretia asaccharophila OX=582607; GN = DFR39_101434 PE=4 SV=1
MAAHVTLPPLPMSQIHSTLHTASGGFESACRIPALPSSHRSHGLHGHSYFATVRALLPQGWASFPGAEVEELRRRLEACVAPLDHALLNDSLAQPTDENIARWIRQRLETEFGVPGIQQVGIQSTQHSGVDLDVSGQAHVWRRYRFQAAHQLPNVPAGHKCGRMHGHGFEVILHANQDLGERDLAVDYDHLDEVWAPFHMQLNYQCLNSIEGLANPTSEVISAWLWERLKPQLPELSWVTVYETGSCGANYDGSRYRIWKELTLDSAIQLKRAPAEHPLRGIHGHTYTLRLHLSAPLDEVQGWTVDFGDVKTLFDPIFKAIDHRPLYEIADLPDGDAASLAAWVLAKGRAVLPQIDRVDLYETRGSGAIVSVDRADELIPV

SEQ ID NO: 21424 - protein, 124 aa, unidentified
  source 1..124: note = Kiritimatiella glycovorans
  REGION 1..124: note = tr|A0A0G3EHS9|A0A0G3EHS9_9BACT 6-carboxy-5,6,7,8-tetrahydropterin synthase; OS = Kiritimatiella glycovorans OX=1307763 GN=queD PE=3 SV=1
MPTTELYCTFRFSAAHRLPSSGEEHKCRATHGHTFELVVTVAGEPDAEKGWVLDFADLRAAVDPVVAELDHKTLNDIPGLENPTSEHLCRWFWGRLIDALPGLAEIEVKESPECGCRYRGGGTG

SEQ ID NO: 21425 - protein, 118 aa, unidentified
  source 1..118: note = Kiritimatiellaceae bacterium
  REGION 1..118: note = tr|A0A2D7D638|A0A2D7D638_9BACT 6-carboxy-5,6,7,8-tetrahydropterin synthase; OS = Kiritimatiellaceae bacterium OX=2026752 GN=queD PE=3; SV = 1
  VARIANT 17: note = Xaa can be any naturally occurring amino acid
MKVEKTFSFDSAHFLPXVPADHKCRNLHGHTYTVKVEAEGELDEAMGWVVDFGEVKKVAGPLVKQLDHKLLNDIEGLENPTAENVALWFWHQMKPALPELSQVTVMENPTNVVRYRGD

SEQ ID NO: 21426 - protein, 150 aa, unidentified
  source 1..150: note = Kiritimatiellaceae bacterium
  REGION 1..150: note = tr|A0A1Z9TB80|A0A1Z9TB80_9BACT 6-carboxytetrahydropterin synthase QueD; OS = Kiritimatiellaceae bacterium TMED266 OX=1987167; GN = CBE26_01685 PE=4 SV=1
MTKIRVTKSFGFETGHALYGYDGLCKNVHGHSYKLYVTVIGSPIDDQNHVKNGMVIDFKDLKTIVKSEIVDVFDHATVFNQNTPHVDLAKTLSDSGHKVLLVDYQPTSEKMVVDFAHRIAARLPSHIKLHNVRLHETATAYAEWHASDQE

SEQ ID NO: 21427 - protein, 121 aa, unidentified
  source 1..121: note = Kitasatospora aureofaciens
  REGION 1..121: note = tr|A0A0L8P6Q9|A0A0L8P6Q9_KITAU 6-carboxy-5,6,7,8-tetrahydropterin synthase; OS = Kitasatospora aureofaciens OX=1894 GN=ADK78_27910 PE=3; SV = 1
MYAITKEFHFSASHQLGALPAGHQCARTHGHNYLVVLELRCDDTELTEPGFVRDYGELDEFKHWLDATFDHRHLNDAVPGMNPSAENLAWWVYHQWVERLPELSCVRVSETPRTWATYRGK

SEQ ID NO: 21428 - protein, 157 aa, Kitasatospora cineracea
  REGION 1..157: note = tr|A0A3N1YW53|A0A3N1YW53_9ACTN 6-pyruvoyltetrahydropterin/6-carboxytetrahydropterin synthase OS=Kitasatospora cineracea OX=88074 GN=EDD39_1065; PE = 4 SV=1
MTHTVTVRHNFETAHRLPHLSGKCENLHGHSWWAEITVTAPVLAAGTVVEFGAFKRALREWIDTFLDHGAMLGANDPLAPVLAGQGSKLFRFGADDPTEQEQHAAGLQWPSVEAVAELLSRVAAEALRTLPRAAGAYVSHVRVAETAVNAAAWVVTA

SEQ ID NO: 21429 - protein, 118 aa, Kitasatospora niigatensis
  REGION 1..118: note = tr|A0A3N4REH8|A0A3N4REH8_9ACTN 6-carboxy-5,6,7,8-tetrahydropterin synthase; OS = Kitasatospora niigatensis OX=88075 GN=EDD38_0044 PE=3; SV = 1
MEIFREFTFEAAHRLPRVPEGHKCARLHGHSYRVIVHVEAPVDNEAGWVMDFGDIKRAFKPIEDRLDHYYLNEIEGMENPTSEVLARWIWDRLKSGLPALSALTIRETCTSGCTYRGD

SEQ ID NO: 21430 - protein, 132 aa, Kitasatospora sp.
  REGION 1..132: note = tr|A0A2H5AVZ1|A0A2H5AVZ1_9ACTN 6-carboxy-5,6,7,8-tetrahydropterin synthase; OS = Kitasatospora sp. MMS16-BH015 OX=2018025 GN=CFP65_1396; PE = 3 SV=1
MSRRGSQRGTGLLSITKEFHFSASHILDVLPSWHQCARFHGHNYIVELELSATPDQLTEAGFVRDYRELDPFKKWLDETLDHRHLNEVVPPGLSPSSENLALWIFETWQGRFPELSAVSISETPKTWATYRP

SEQ ID NO: 21431 - protein, 131 aa, Kitasatospora sp.
  REGION 1..131: note = tr|A0A540W987|A0A540W987_9ACTN 6-carboxy-5,6,7,8-tetrahydropterin synthase; OS = Kitasatospora sp. MMS16-CNU292 OX=2567942; GN = E6W39_29115 PE=3 SV=1
MTALTGEHRIGKRFRFEAAHYLPGLPDGHQCARLHGHSYEVEFVLTADRLSGPGFVTDFGDLAPVKMMIDSALDHRVLNEALPELVPTSENLAAYLAGWFVEHVEPGLPGRLTAVRVSETASSWAQFEVAR

SEQ ID NO: 21432 - protein, 158 aa, unidentified
  source 1..158: note = Kitasatospora xanthocidica
  REGION 1..158: note = tr|A0A373A1W3|A0A373A1W3_9ACTN 6-carboxytetrahydropterin synthase OS=Kitasatospora xanthocidica OX=83382 GN=DR950_33750 PE=4 SV=1
MSHAVTVRHNFETAHRLPHLAGKCENLHGHSWVVEVTVTAPVLAAGTVVEFGAFKRALRTWIDSFLDHGAMLGASDPLAPVLAGQGSKLFRFGADDPTEQEQHAAGLGWPSVEAVAELLGRVATEALHTLPRAAGAYVSHVGVSETAVNAASWTAVAP

SEQ ID NO: 21433 - protein, 356 aa, unidentified
  source 1..356: note = Kitasatospora xanthocidica
  REGION 1..356: note = tr|A0A373A3M8|A0A373A3M8_9ACTN Uncharacterized protein OS=Kitasatospora xanthocidica OX=83382; GN = DR950_07105 PE=4 SV=1
MVNDLFPFSTLRRYAGVKLVAWENCAQDIPESRRACRRSFRSRSDIATLLGIWDRLWIGPSHCSRDAGGVCSVQHRLPLPPGRSWAPAPRCHALPRTPDLERCTMNSPCEADPAAGPLPNGWLPGLPAGGTYTIGKRANCDIARTVDGIDGSDLVTVELVLTATELTKPGFVCDFGDLSGFQQHVDQVLDHQDLDTILADPTGAGIVAHVRAWAQENLPDDVRQLLDDVRVFTGRLPDPAADEAVRFRARHWLCDLPDGHKCGRHHGHAYLVTLPDPDQPDNLLPVPGKLREVVLSRFHGQVLNTVFDFNPTSEHLAAVLTAWLVEQELTAVGGRPFTVRVSETASTWSQFTLEAA

SEQ ID NO: 21434 - protein, 121 aa, unidentified
  source 1..121: note = Klebsiella aerogenes
  REGION 1..121: note = tr|A0A377RJG2|A0A377RJG2_KLEAE 6-carboxy-5,6,7,8-tetrahydropterin synthase OS=Klebsiella aerogenes OX=548 GN=queD PE=3 SV=1
MMSTTLFKDFTFEAAHHLPHVPEGHKCGRLHGHSFMVRLEITGEVDPHTGWIMDFAELKAAFKPTYDRLDHYYLNDIPGLENPTSEVLAKWIWDEMKPRVPLLSAVMVKETCTAGCVYRGE

SEQ ID NO: 21435 - protein, 120 aa, unidentified
  source 1..120: note = Klebsiella aerogenes
  REGION 1..120: note = tr|A0A447WH51|A0A447WH51_KLEAE 6-carboxy-5,6,7,8-tetrahydropterin synthase OS=Klebsiella aerogenes OX=548 GN=queD_2 PE=3 SV=1
MKTTLYKDFTFEAAHRLPNVPDGHKCGRLHGHSFVVRLEITGEVDKHTGWIIDFAELKAIFKPTLDRLDHYYLNDIPGLENPTSEVLAQWIWNQVKPQLSILSAVIVKETCSAGCIYRGE

SEQ ID NO: 21436 - protein, 120 aa, unidentified
  source 1..120: note = Klebsiella grimontii
  REGION 1..120: note = tr|A0A285AXM9|A0A285AXM9_9ENTR 6-carboxy-5,6,7,8-tetrahydropterin synthase OS=Klebsiella grimontii OX=2058152 GN=ygcM PE=3 SV=1
MSTTLFKDFTFEAAHHLPHVPEGHKCGRLHGHSFMVRLEITGEVDPHTGWIMDFAELKAAFKPTYDRLDHYYLNDIPGLSNPTSEVLAKWIWEQMKPRVPLLSAVMIKETCTAGCVYRGE

SEQ ID NO: 21437 - protein, 120 aa, unidentified
  source 1..120: note = Klebsiella grimontii
  REGION 1..120: note = tr|A0A564KR30|A0A564KR30_9ENTR 6-carboxy-5,6,7,8-tetrahydropterin synthase OS=Klebsiella grimontii OX=2058152 GN=queD PE=3 SV=1
MSTTLFKDFTFEAAHHLPHVPEGHKCGRLHGHSFMVRLEITGEVDPHTGWIMDFAELKAAFKPIYDRLDHYYLNDIPGLSNPTSEVLAKWIWEQMKPRVPLLSAVMIKETCTAGCVYRGE

SEQ ID NO: 21438 - protein, 120 aa, unidentified; identical to SEQ ID NO: 20134
  source 1..120: note = Klebsiella michiganensis
  REGION 1..120: note = tr|A0A564LUD4|A0A564LUD4_9ENTR 6-carboxy-5,6,7,8-tetrahydropterin synthase OS=Klebsiella michiganensis OX=1134687 GN=queD PE=3 SV=1

SEQ ID NO: 21439 - protein, 120 aa, unidentified; identical to SEQ ID NO: 21437
  source 1..120: note = Klebsiella michiganensis
  REGION 1..120: note = tr|A0A249WKA2|A0A249WKA2_9ENTR 6-carboxy-5,6,7,8-tetrahydropterin synthase OS=Klebsiella michiganensis OX=1134687 GN=queD PE=3 SV=1

SEQ ID NO: 21440 - protein, 120 aa, Klebsiella oxytoca; identical to SEQ ID NO: 21437
  REGION 1..120: note = tr|A0A0G3S4K2|A0A0G3S4K2_KLEOX 6-carboxy-5,6,7,8-tetrahydropterin synthase OS=Klebsiella oxytoca OX=571 GN=queD PE=3 SV=1

SEQ ID NO: 21441 - protein, 120 aa, Klebsiella oxytoca
  REGION 1..120: note = tr|A0A168IHZ4|A0A168IHZ4_KLEOX 6-carboxy-5,6,7,8-tetrahydropterin synthase OS=Klebsiella oxytoca OX=571 GN=queD PE=3 SV=1
MSTTLFKDFTFEAAHRLPHVPEGHKCGRLHGHSFMVRLEITGEVDPHTGWIMDFAELKAAFKPTYDRLDHYYLNDIPGLSNPTSEVLAKWIWEQMKPLVPLLSAVMIKETCTAGCVYRGE

SEQ ID NO: 21442 - protein, 120 aa, Klebsiella pneumoniae
  REGION 1..120: note = tr|A0A485T846|A0A485T846_KLEPN 6-carboxy-5,6,7,8-tetrahydropterin synthase OS=Klebsiella pneumoniae OX=573 GN=queD_2 PE=3 SV=1
MKTTLYKDFTFEAAHRLPNVPEGHKCGRLHGHSFVVRLEITGEVDKHTGWIIDFAELKAIFKPTLDRLDHYYLNDIPGLENPTSEVLAKWIWNQVKTQLPILSAVMVKETCSAGCVYRGE

SEQ ID NO: 21443 - protein, 121 aa, Klebsiella pneumoniae; identical to SEQ ID NO: 21434
  REGION 1..121: note = tr|W8UFV3|W8UFV3_KLEPN 6-carboxy-5,6,7,8-tetrahydropterin synthase OS=Klebsiella pneumoniae 30684/NJST258_2 OX=1420013 GN=KPNJ2_01150 PE=3; SV = 1

SEQ ID NO: 21444 - protein, 120 aa, unidentified
  source 1..120: note = Klebsiella quasipneumoniae
  REGION 1..120: note = tr|A0A422X4Z3|A0A422X4Z3_9ENTR 6-carboxy-5,6,7,8-tetrahydropterin synthase OS=Klebsiella quasipneumoniae subsp. quasipneumoniae OX=1667327 GN=queD; PE = 3 SV=1
MSTTLFKDFTFEAAHHLPHVPEGHKCGRLHGHSFMVRLEITGEVDPHTGWIMDFAELKAAFKPTYDRLDHYYLNDIPGLENPTSEVLAKWIWDEMKPRVPLLSAVMVKETCTAGCVYRGE

SEQ ID NO: 21445 - protein, 120 aa, unidentified; identical to SEQ ID NO: 21444
  source 1..120: note = Klebsiella quasipneumoniae
  REGION 1..120: note = tr|A0A5C6IJV0|A0A5C6IJV0_9ENTR 6-carboxy-5,6,7,8-tetrahydropterin synthase OS=Klebsiella quasipneumoniae subsp. similipneumoniae OX=1463164 GN=queD; PE = 3 SV=1

SEQ ID NO: 21446 - protein, 121 aa, unidentified
  source 1..121: note = Klebsiella quasivariicola
  REGION 1..121: note = tr|A0A5E5W596|A0A5E5W596_9ENTR 6-carboxy-5,6,7,8-tetrahydropterin synthase OS=Klebsiella quasivariicola OX=2026240 GN=queD PE=3 SV=1
MMSTTLFKDFTFEAAHHLPHVPQGHKCGRLHGHSFMVRLEITGEVDPHTGWIMDFAELKAAFKPTYDRLDHYYLNDIPGLENPTSEVLAKWIWDQMKPQVPLLSAVMVKETCTAGCVYRGE

SEQ ID NO: 21447 - protein, 120 aa, unidentified
  source 1..120: note = Klebsiella quasivariicola
  REGION 1..120: note = tr|A0A223UIF7|A0A223UIF7_9ENTR 6-carboxy-5,6,7,8-tetrahydropterin synthase OS=Klebsiella quasivariicola OX=2026240 GN=queD PE=3 SV=1
MSTTLFKDFTFEAAHHLPHVPQGHKCGRLHGHSFMVRLEITGEVDPHTGWIMDFAELKAAFKPTYDRLDHYYLNDIPGLENPTSEVLAKWIWDQMKPQVPLLSAVMVKETCTAGCVYRGE

SEQ ID NO: 21448 - protein, 120 aa, Klebsiella sp.; identical to SEQ ID NO: 21437
  REGION 1..120: note = tr|J8W5W0|J8W5W0_9ENTR 6-carboxy-5,6,7,8-tetrahydropterin synthase OS=Klebsiella sp. OBRC7 OX=936565 GN=queD PE=3 SV=1

SEQ ID NO: 21449 - protein, 120 aa, Klebsiella sp.; identical to SEQ ID NO: 21444
  REGION 1..120: note = tr|A0A1F2M1E1|A0A1F2M1E1_9ENTR 6-carboxy-5,6,7,8-tetrahydropterin synthase OS=Klebsiella sp. HMSC16C06 OX=1581110 GN=HMPREF3142_14910 PE=3 SV=1

SEQ ID NO: 21450 - protein, 120 aa, Klebsiella variicola; identical to SEQ ID NO: 21444
  REGION 1..120: note = tr|A0A2V3KQ69|A0A2V3KQ69_KLEVA 6-carboxy-5,6,7,8-tetrahydropterin synthase OS=Klebsiella variicola OX=244366 GN=queD PE=3 SV=1

SEQ ID NO: 21451 - protein, 120 aa, Klebsiella variicola
  REGION 1..120: note = tr|A0A4U2WEA0|A0A4U2WEA0_KLEVA 6-carboxy-5,6,7,8-tetrahydropterin synthase OS=Klebsiella variicola OX=244366 GN=queD PE=3 SV=1
MSTTLFKDFTFEAAHHLPHVPEGHKCGRLHGHSFMVRLEITGEVDPHTGWIMDFAELKAAFKPTYDRLDHYYLNDIPGLENPTSEVLAKWIWDEMKPRVPLLSAVMVKETCTAGCIYRGE

SEQ ID NO: 21452 - protein, 121 aa, Kluyvera ascorbata
  REGION 1..121: note = tr|A0A378GJR2|A0A378GJR2_9ENTR 6-carboxy-5,6,7,8-tetrahydropterin synthase OS=Kluyvera ascorbata OX=51288 GN=queD PE=3 SV=1
MMSTTLFKDFTFEAAHHLPHVPEGHKCGRLHGHSFMVRLEITGEVDPHTGWIMDFAELKAAFKPTYDRLDHYYLNDIPGLENPTSEVLSRWIWEQVKPVVPLLSAVMVKETCTAGCVYRGE

SEQ ID NO: 21453 - protein, 120 aa, Kluyvera ascorbata; identical to SEQ ID NO: 19310
  REGION 1..120: note = tr|A0A3N2SAE1|A0A3N2SAE1_9ENTR 6-carboxy-5,6,7,8-tetrahydropterin synthase OS=Kluyvera ascorbata OX=51288 GN=queD PE=3 SV=1

SEQ ID NO: 21454 - protein, 121 aa, Kluyvera cryocrescens; identical to SEQ ID NO: 21452
  REGION 1..121: note = tr|A0A2X3EIX3|A0A2X3EIX3_KLUCR 6-carboxy-5,6,7,8-tetrahydropterin synthase OS=Kluyvera cryocrescens OX=580 GN=queD PE=3 SV=1

SEQ ID NO: 21455 - protein, 121 aa, Kluyvera georgiana; identical to SEQ ID NO: 21452
  REGION 1..121: note = tr|A0A1B7K5H4|A0A1B7K5H4_9ENTR 6-carboxy-5,6,7,8-tetrahydropterin synthase OS=Kluyvera georgiana ATCC 51603 OX=1354264 GN=M989_01075 PE=3 SV=1

SEQ ID NO: 21456 - protein, 120 aa, Kluyvera georgiana; identical to SEQ ID NO: 19310
  REGION 1..120: note = tr|A0A248KKX1|A0A248KKX1_9ENTR 6-carboxy-5,6,7,8-tetrahydropterin synthase OS=Kluyvera georgiana OX=73098 GN=queD PE=3 SV=1

SEQ ID NO: 21457 - protein, 121 aa, Kluyvera intermedia
  REGION 1..121: note = tr|A0A3S5DAN0|A0A3S5DAN0_KLUIN 6-carboxy-5,6,7,8-tetrahydropterin synthase OS=Kluyvera intermedia OX=61648 GN=queD PE=3 SV=1
MMSTTLFKDFTFEAAHHLPHVPEGHKCGRLHGHSFMVRLEITGDVDPHTGWIMDFAELKAAFKPTYDRLDHYYLNDIPGLENPTSEVLSRWIWEQIKPVVPLLSAVMIKETCTAGCVYRGE

SEQ ID NO: 21458 - protein, 120 aa, Kluyvera intermedia
  REGION 1..120: note = tr|A0A1X0X741|A0A1X0X741_KLUIN 6-carboxy-5,6,7,8-tetrahydropterin synthase OS=Kluyvera intermedia OX=61648 GN=B2M27_18945 PE=3 SV=1
MSTTLFKDFMFEAAHRLPHVPAGHKCGRLHGHSFMVRLEITGEVDPHTGWIMDFAELKAAFKPTYDRLDHYYLNDIPGLENPTSEVLAKWIWDQVKPVVPLLSAVMIKETCTAGCIYRGE

SEQ ID NO: 21459 - protein, 120 aa, Kluyvera sp.; identical to SEQ ID NO: 20906
  REGION 1..120: note = tr|A0A2T3XA41|A0A2T3XA41_9ENTR 6-carboxy-5,6,7,8-tetrahydropterin synthase OS=Kluyvera sp. Nf5 OX=2116543 GN=queD PE=3 SV=1

SEQ ID NO: 21460 - protein, 132 aa, Knoellia sinensis
  REGION 1..132: note = tr|A0A0A0J2Q1|A0A0A0J2Q1_9MICO 6-pyruvoyl tetrahydropterin synthase OS=Knoellia sinensis KCTC 19936; OX = 1385520 GN=N802_03075 PE=4 SV=1
MYSVTVRDHMMIAHSLPGEVFGPAQKLHGATYLVDATFRAQALDDDGLVVDIGRASEALGGVLGELTYRNLDDDPTLEGVTTTTERLAEVVADRLAARLRAGELGASAEQISTIAVTLHESHIAWASYERAP

SEQ ID NO: 21461 - protein, 132 aa, Knoellia sp.
  REGION 1..132: note = tr|A0A0Q9KS27|A0A0Q9KS27_9MICO 6-pyruvoyl tetrahydropterin synthase OS=Knoellia sp. Soil729; OX = 1736394 GN=ASG74_09360 PE=4 SV=1
MFSVTVRDSMMVAHSLRGEVFGPAQRLHGATYVVDVTFRVAELDADGLVVDIGRASQALRAVMGGLSYRNLDEDPSLSGVNTTTERLAQVVADRMADRLTSGELGVAAGRVSAIAVTLRESHVAWASYERAP

SEQ ID NO: 21462 - protein, 136 aa, Kocuria flava
  REGION 1..136: note = tr|A0A2N4SYX0|A0A2N4SYX0_9MICC 6-pyruvoyl tetrahydrobiopterin synthase OS=Kocuria flava OX=446860; GN = AUQ48_01610 PE=4 SV=1
MFTLTVRDHIMIAHSLPDPFFGPAQRLHGATYEVETTWARPVLDEHGVVMDIGMASGLLGQVLDGLRHRNLDEHPDFAGRLSTTEVIAQHVGERLAAAAAGIEGLERLTVTLRENPDAWASYTLELPVLGGGSGRG

SEQ ID NO: 21463 - protein, 136 aa, Kocuria flava
  REGION 1..136: note = tr|A0A0U3G7X7|A0A0U3G7X7_9MICC 6-pyruvoyl tetrahydrobiopterin synthase OS=Kocuria flava OX=446860; GN = AS188_04855 PE=4 SV=1
MFTLTVRDHIMIAHSLPDPFFGPAQRLHGATYEVETTWARPVLDEHGVVMDIGMASGLLGQVLDGLRHRNLDEHPDFAGRLSTTEVIAQHVGERLAAAAAGTEGLERLTVTLRENPDAWASYTLELPVLGGGSGRG

SEQ ID NO: 21464 - protein, 126 aa, Kocuria marina
  REGION 1..126: note = tr|A0A0B0DFY8|A0A0B0DFY8_9MICC 6-pyruvoyl tetrahydrobiopterin synthase OS=Kocuria marina OX=223184; GN = AS25_08455 PE=4 SV=1
MYRLTVRDHVMIAHSLPDPFFGPAQALHGATLVVEVTWRRRELGPQSVVMDIGAATSMLSEVLEPLRYTNLDEHPAFAGRLSTTEAIAGHISDELRRHFDTTEFAGMEVLLREHPDAWAAHDVDFA

SEQ ID NO: 21465 - protein, 139 aa, Kocuria polaris
  REGION 1..139: note = tr|A0A0A6VVM2|A0A0A6VVM2_9MICC 6-pyruvoyl tetrahydrobiopterin synthase OS=Kocuria polaris OX=136273; GN = GY22_00620 PE=4 SV=1
MFTLTVRDHMMIAHSLPDPFFGPAQNLHGATYVVETTWSRPVLDEHGVVMDIGVANDLLAGVLDGLRYRNLDEHPDFAGRLSTTEVLAQYVAERLAAGAAFVEGLERLTVTLRETPDAWASYTLELPVLSERGGPAPAR

SEQ ID NO: 21466 - protein, 139 aa, Kocuria polaris
  REGION 1..139: note = tr|A0A0W8IP02|A0A0W8IP02_9MICC 6-pyruvoyl tetrahydrobiopterin synthase OS=Kocuria polaris OX=136273; GN = AVL61_02010 PE=4 SV=1
MFTLTVRDHMMIAHSLPDPFFGPAQNLHGATYEVEATWSRPVLDEHGVVMDIGLAGDLLTGVLDGLRYRNLDEHPDLAGRLTTTEVLAQYVAERLAAGAASVEGLERLAVTLRENPDAWASYTLELPVLSERGGPVPAR

SEQ ID NO: 21467 - protein, 139 aa, Kocuria rosea; identical to SEQ ID NO: 21465
  REGION 1..139: note = tr|A0A2V1M9Z6|A0A2V1M9Z6_KOCRO 6-carboxy-5,6,7,8-tetrahydropterin synthase OS=Kocuria rosea OX=1275 GN=queD PE=4 SV=1

SEQ ID NO: 21468 - protein, 127 aa, Kocuria sp.
  REGION 1..127: note = tr|A0A2A3ADW0|A0A2A3ADW0_9MICC 6-pyruvoyl tetrahydrobiopterin synthase OS=Kocuria sp. WRN011; OX = 2029858 GN=CKW39_11110 PE=4 SV=1
MYSLTVNDHVMIAHSLPDEFFGPAQGMHGATLTVEATFTRAELDEHAVVLDIGQAMEMLDDALSPLRYANLDEHPDFAGKLSTTEATAHYIGQRLADSLSDQPDVGITVTLTENPRAKVAYTVPERP

SEQ ID NO: 21469 - protein, 138 aa, Kocuria sp.
  REGION 1..138: note = tr|A0A1Q9SCJ2|A0A1Q9SCJ2_9MICC 6-pyruvoyl tetrahydrobiopterin synthase OS=Kocuria sp. CNJ-770; OX = 1904964 GN=BJF77_01940 PE=4 SV=1
MFTLTVRDHIMIAHSLPDPFFGPAQNLHGATFTVETTWARPVLDEHGVVLDIGVASQLLSGVLDGLRYRNLDDHPDFTGRLSTTEVLAQYIAERLAAGAAGIAGLDRLTVTLRENPDAWASYTLELPVLTERGGPTSR

SEQ ID NO: 21470 - protein, 138 aa, Kocuria turfanensis
  REGION 1..138: note = tr|A0A512IF69|A0A512IF69_9MICC Uncharacterized protein OS=Kocuria turfanensis OX=388357 GN=KTU01_24300; PE = 4 SV=1
MFTLTVRDHIMIAHSLPDPFFGPAQALHGATFAVETTWARPVLDEHGVVMDIGVASELLSGVLDGLRYRNLDEHPDFTGRLSTMEVVAQHIAEWLAAGAAGIAGLERLTVTLRENPDAWASYTLELPVLSERGGPSPR

SEQ ID NO: 21471 - protein, 177 aa, unidentified
  source 1..177: note = Komagataeibacter cocois
  REGION 1..177: note = tr|A0A365Z1U5|A0A365Z1U5_9PROT 6-pyruvoyl tetrahydropterin synthase OS=Komagataeibacter cocois; OX = 1747507 GN=NJLHNGOC_01845 PE=4 SV=1
MLELVFTRRFCMAHRLLSGESERCALPHGHNEYVRVTLRPTHPGHLDGTQNMVVPFHRAKGTWHDFVDNCLDHALQLGEDDPLLSWFRTHEPERAERIIVTPGDPTTELMACLMMAKLNAFLHADGNVLTCAAIALEETPTNTVRYEGDPLLMLPAPRPARQCWWRRADMSISDTGH

SEQ ID NO: 21472 - protein, 175 aa, unidentified
  source 1..175: note = Komagataeibacter europaeus
  REGION 1..175: note = tr|A0A0M0EMF6|A0A0M0EMF6_KOMEU 6-pyruvoyl tetrahydropterin synthase OS=Komagataeibacter europaeus; OX = 33995 GN=KOEU_00830 PE=4 SV=1
MFELVFTRRFSMAHRLLAGESERCALPHGHNEYIRAHLRATNPTVLDGRTNMVMPFQRAKGVWHGFIDNHVDHALQLAEDDPLLAWFALNEPQRARRILVTPGDPTTELLACLLMAKLNAFLAADGGALTCASIEIEETPTNTVRYSGDPLAVLPRPRPAPHCWWRRADTTISDT

SEQ ID NO: 21473 - protein, 175 aa, unidentified
  source 1..175: note = Komagataeibacter europaeus
  REGION 1..175: note = tr|A0A0D6PXS2|A0A0D6PXS2_KOMEU Uncharacterized protein OS=Komagataeibacter europaeus NBRC 3261 OX=1234669; GN = Geu3261_0018_030 PE=4 SV=1
MFELVFTRRFSMAHRLLAGESERCALPHGHNEYIRAHLRATNPTVLDGRTNMVMPFQRAKGVWHGFIDNHVDHALQLAEDDPLLAWFALNEPQRARRILVTPGDPTTELLACLLMAKLNTFLAADGGALTCASIEIEETPTNTVRYSGDPLAVLPRPRPAPRCWWRRADMTISDT

SEQ ID NO: 21474 - protein, 175 aa, unidentified
  source 1..175: note = Komagataeibacter hansenii
  REGION 1..175: note = tr|D5QDE1|D5QDE1_KOMHA Uncharacterized protein; OS = Komagataeibacter hansenii ATCC 23769 OX=714995; GN = GXY_05738 PE=4 SV=1
MLELVFTRRFCMAHRLLSGESERCTLPHGHNEYVRVTLRPTRPDRLDGTQNMVVPFHRAKGTWHAFVDNSLDHAFQLGEGDPLLSWFRAHEPERAGRIVVTPGDPTTELMACLMMAKLNAFLHADGDLLTCAEIVLEETPTNTVRYAGDPLLMLPTPRPPQECWWRRADMSIADT

SEQ ID NO: 21475 - protein, 175 aa, unidentified
  source 1..175: note = Komagataeibacter hansenii
  REGION 1..175: note = tr|A0A318Q2X3|A0A318Q2X3_KOMHA 6-pyruvoyl tetrahydropterin synthase OS=Komagataeibacter hansenii; OX = 436 GN=CFR74_14550 PE=4 SV=1
MLELVFTRRFCMAHRLLSGESERCTLPHGHNEYVRVTLRPTRPDRLDGTQNMVVPFHRAKGTWHAFVDNSLDHAFQLGEGDPLLSWFRAHEPERAGRIVVTPGDPTTELMACLMMAKLNAFLHADGDLLTCAEIVLEETPTNTVRYTGDPLLMLPTPRPPQECWWRRADMSIADT

SEQ ID NO: 21476 - protein, 175 aa, unidentified
  source 1..175: note = Komagataeibacter intermedius
  REGION 1..175: note = tr|A0A0N1FL96|A0A0N1FL96_9PROT 6-pyruvoyl tetrahydropterin synthase OS=Komagataeibacter intermedius AF2 OX=1458464 GN=GLUCOINTEAF2_0202306 PE=4 SV=1
MFELVFTRRFSMAHRLLSGDSERCALPHGHNEYIRAHLRATNPTALDGHANMVMPFQRAKGVWHGFIDNHVDHALQLAENDPLLAWFAGNEPQRARRILVTPGDPTTELLACLLMAKLNAFLAADGGALTCASIEIEETPTNTVRYSGDPLAVLPQPRTAPHCWWRRADTTISDT

SEQ ID NO: 21477 - protein, 175 aa, unidentified
  source 1..175: note = Komagataeibacter maltaceti
  REGION 1..175: note = tr|A0A2S3W546|A0A2S3W546_9PROT Uncharacterized protein OS=Komagataeibacter maltaceti OX=1203393; GN = KMAL_02560 PE=4 SV=1
MLELVFTRRFCMAHRLLSGESERCALPHGHNEYVRVTLRPTNPVRLDGTQNMVVPFHRAKGTWHDFVDNSLDHAFQLGEGDPLLSWFRAHEPERAARIIVTPGDPTTELMACLMMAKLNAFLHADGDILTCAEIVLEETPTNTVRYAGDPLLMLPAPRPPHECWWRRADMSISDS

SEQ ID NO: 21478 - protein, 175 aa, unidentified
  source 1..175: note = Komagataeibacter medellinensis
  REGION 1..175: note = tr|G2I224|G2I224_KOMMN Uncharacterized protein; OS = Komagataeibacter medellinensis (strain NBRC 3288 / BCRC 11682 / LMG 1693 / Kondo 51) OX=634177 GN=GLX_00280 PE=4; SV = 1
MFELVFTRRFSMAHRLLAGESERCALPHGHNEYVRVSLRATQPGALDGRTNMVLPFQRAKSVWHQFIDNHVDHALQLAQDDPLLGWFMQHEPQRARRILVTPGDPTTELLACLLMAKLNAFLAADGGVLTCALIEIDETPTNTIRYSGDPLAMLPQPRPAGQCWWRRADMTITDT

SEQ ID NO: 21479 - protein, 175 aa, unidentified
  source 1..175: note = Komagataeibacter nataicola
  REGION 1..175: note = tr|A0A1U9RNR3|A0A1U9RNR3_9PROT 6-pyruvoyl tetrahydropterin synthase OS=Komagataeibacter nataicola; OX = 265960 GN=B0W47_14790 PE=4 SV=1
MFELVFSRRFSMAHRLLAGSSERCALPHGHNEYVRVHLRATTPAPLDGGTNMVMPFERAKGVWHGFIDNHVDHALQLAEGDPLLAWFRTHEPGRAARIMVTPGDPTTELLACLLMAKLNAFLAADGGALSCAAIEIEETPTNTVRYTGDPLAVLPQPRAAPHCWWRRADMTLADT

SEQ ID NO: 21480 - protein, 175 aa, unidentified
  source 1..175: note = Komagataeibacter oboediens
  REGION 1..175: note = tr|A0A318R7Y4|A0A318R7Y4_9PROT 6-pyruvoyl tetrahydropterin synthase OS=Komagataeibacter oboediens; OX = 65958 GN=CFR80_06520 PE=4 SV=1
MFELVFTRRFSMAHRLLAGESERCALPHGHNEYIRAYLRATAPTALDGYANMVMPFQRAKGVWHGFIDDHVDHALQLAEDDPLLAWFTHNEPQRAQRILVTPGDPTTELLACLLMAKLNAFLAADGGALTCASIEIEETPTNTVRYSGDPLAVLPCPRPAPQCWWRRPDMTLSDT

SEQ ID NO: 21481 - protein, 177 aa, unidentified
  source 1..177: note = Komagataeibacter pomaceti
  REGION 1..177: note = tr|A0A318QCJ6|A0A318QCJ6_9PROT 6-pyruvoyl tetrahydropterin synthase OS=Komagataeibacter pomaceti; OX = 2021998 GN=CFR71_04135 PE=4 SV=1
MLELVFTRRFCMAHRLLSGESERCALPHGHNEYVRATLRPTHPGRLDGTQNMVVPFHRAKGTWHAFVDNCLDHALQLGEDDPLLSWFRAHEPERAQRIIVTPGDPTTELMACLMMAKLNAFLHADGNVLTCAAIALEETPTNTVRYEGDPLLMLPAPRPARQCWWRRADMSISDMGH

SEQ ID NO: 21482 - protein, 178 aa, unidentified; identical to SEQ ID NO: 20835
  source 1..178: note = Komagataeibacter rhaeticus
  REGION 1..178: note = tr|A0A181C953|A0A181C953_9PROT 6-pyruvoyl tetrahydropterin synthase OS=Komagataeibacter rhaeticus; OX = 215221 GN=KRIGEM_01028 PE=4 SV=1

SEQ ID NO: 21483 - protein, 178 aa, unidentified
  source 1..178: note = Komagataeibacter rhaeticus
  REGION 1..178: note = tr|A0A070A9K5|A0A070A9K5_9PROT 6-pyruvoyl tetrahydropterin synthase OS=Komagataeibacter rhaeticus AF1 OX=1432055 GN=GLUCORHAEAF1_15955 PE=4 SV=1
MFELVFTRRFSMAHRLLAGGSERCALPHGHNEYVRVSLRATAPTALDGHANMVLPFQRAKGIWHQFIDNHVDHALQLAQDDPLLGWFAQHEPQRAQRILVTPGDPTTELLACLLMAKLNAFLAADGGILSCASIEIDETPTNTIRYSGDPLAVLPQPRPAAQCWWRRADMTIADTGLS

SEQ ID NO: 21484 - protein, 175 aa, unidentified
  source 1..175: note = Komagataeibacter saccharivorans
  REGION 1..175: note = tr|A0A347W804|A0A347W804_9PROT 6-pyruvoyl tetrahydropterin synthase OS=Komagataeibacter saccharivorans OX=265959 GN=CD178_00167 PE=4 SV=1
MFELVFTRRFSMAHRLLAGESERCALPHGHNEYVRVSLRATNPGVLDGHTNMVLPFQRAKETWHRFIDEQVDHALQLSEHDPLLDWFGRNEPQRARRILVTPGDPTTELLACLLMAKLNAFLADDGGLLTCASIEIEETPTNTVRYTGNPFAVLPQPRPAPKCWWRRADMTIADT

SEQ ID NO: 21485 - protein, 175 aa, unidentified
  source 1..175: note = Komagataeibacter sp.
  REGION 1..175: note = tr|A0A4P5NY78|A0A4P5NY78_9PROT Uncharacterized protein OS=Komagataeibacter sp. MSKU15 OX=1932664; GN = MSKU15_0052 PE=4 SV=1
MFELVFTRRFSMAHRLLAGESERCALPHGHNEYIRVHLRATNPTALDGRTNMVMPFQRAKGIWHGFIDNHVDHALQLSEDDPLRAWFARHEPQRAQRILVTPGDPTTELLACLLMAKLNAFLAADNGTLTCASIEIEETPTNTVRYSGDPLAVLPQPRPAPHCWWRRADTTISDT

SEQ ID NO: 21486 - protein, 175 aa, unidentified; identical to SEQ ID NO: 21485
  source 1..175: note = Komagataeibacter sp.
  REGION 1..175: note = tr|A0A4P5NN68|A0A4P5NN68_9PROT Uncharacterized protein OS=Komagataeibacter sp. MSKU9 OX=1932662; GN = MSKU9_0058 PE=4 SV=1

SEQ ID NO: 21487 - protein, 175 aa, unidentified
  source 1..175: note = Komagataeibacter sucrofermentans
  REGION 1..175: note = tr|A0A318QHK4|A0A318QHK4_9PROT 6-pyruvoyl tetrahydropterin synthase OS=Komagataeibacter sucrofermentans OX=1053551 GN=CFR77_08175 PE=4 SV=1
MFELVFSRRFSMAHRLLAGSSERCALPHGHNEYVRVHLRATTPAPLDGGTNMVVPFERAKGVWHGFIDNHVDHALQLGEGDPLLDWFRVHEPGRAARIMITPGDPTTELLACLLMAKLNAFLAADGGALRCAAIEIEETPTNTVRYAGDPLAALPQPRAAAHCWWRRADMTIADT

SEQ ID NO: 21488 - protein, 175 aa, unidentified
  source 1..175: note = Komagataeibacter swingsii
  REGION 1..175: note = tr|A0A2V4R463|A0A2V4R463_9PROT 6-pyruvoyl tetrahydropterin synthase OS=Komagataeibacter swingsii; OX = 215220 GN=CFR76_09470 PE=4 SV=1
MFELVFTRRFSMAHRLLAGESERCALPHGHNEYIRAHLRATNPTALDGRTNMVMPFQRAKGVWHGFIDNHVDHALQLAEDDPLLAWFASNEPRRARRILVTPGDPTTELLACLLMAKLNAFLAADGGALTCASIEIEETPTNTVRYSGDPLAVLPRPRAAPQCWWRRADTSISDT

SEQ ID NO: 21489 - protein, 178 aa, unidentified; identical to SEQ ID NO: 20835
  source 1..178: note = Komagataeibacter xylinus
  REGION 1..178: note = tr|A0A2D3HC93|A0A2D3HC93_KOMXY 6-pyruvoyl tetrahydropterin synthase OS=Komagataeibacter xylinus; OX = 28448 GN=CT154_04670 PE=4 SV=1

SEQ ID NO: 21490 - protein, 175 aa, unidentified
  source 1..175: note = Komagataeibacter xylinus
  REGION 1..175: note = tr|A0A143WGU0|A0A143WGU0_KOMXY 6-pyruvoyl tetrahydropterin synthase OS=Komagataeibacter xylinus; OX = 28448 GN=ATCC53582_00886 PE=4 SV=1
MLELVFTRRFCMAHRLLSGESERCTLPHGHNEYVRVTLRPTRPDRLDGTQNMVVPFHRAKGTWHAFVDNSLDHAFQLGEGDPLLSWFRTHEPERAGRIVVTPGDPTTELMACLMMAKLNAFLHADGDLLTCAEIVLEETPTNTVRYAGDPLLMLPTPRPPQECWWRRADMSIADT

SEQ ID NO: 21491 - protein, 155 aa, Kordia algicida
  REGION 1..155: note = tr|A9DSL9|A9DSL9_9FLAO Uncharacterized protein; OS = Kordia algicida OT-1 OX=391587 GN=KAOT1_17358 PE=4 SV=1
MKMKMSKIRITKQFNFETGHALYGYDGKCKNVHGHSYKLSVTVIGTPITDNTNVKWGMVIDFSDLKKIVKEEVVDVFDHAIVFNKNTPHINLAMNMREEGHNVILADYQPTSENMVIDFAEKIKKRLPKTIKLFSLRLQETDSSCAEWFASDNEA

SEQ ID NO: 21492 - protein, 136 aa, Kordia algicida
  REGION 1..136: note = tr|A9E217|A9E217_9FLAO 6-carboxy-5,6,7,8-tetrahydropterin synthase OS=Kordia algicida OT-1 OX=391587 GN=KAOT1_22661 PE=3 SV=1
MNVTVSRRAHFNAAHRLYRPDWDDAKNNEIFGKCNNPNYHGHNYELIVSVTGPINPETGFVMDVKVLKDLIRSEVEDAFDHKNLNLDVPEFKNLNPTAENIVVVIWNKLRTHISTSLDLEVVLYETPRNFVKYTGE

SEQ ID NO: 21493 - protein, 136 aa, Kordia periserrulae
  REGION 1..136: note = tr|A0A2T6BSI6|A0A2T6BSI6_9FLAO 6-carboxy-5,6,7,8-tetrahydropterin synthase OS=Kordia periserrulae OX=701523 GN=C8N46_111118 PE=3 SV=1
MKVTVSRRAHFNAAHRLYRPDWDDAKNDAVFGKCNNPNYHGHNYEMIVSVTGPINPETGFVMDVKVLKDLIKAEVEDAFDHKNLNLDVPEFKNLNPTAENIVVVIWNKLRKHIAASLALEVVLYETPRNFVKYAGE

SEQ ID NO: 21494 - protein, 150 aa, Kordia periserrulae
  REGION 1..150: note = tr|A0A2T6BWX1|A0A2T6BWX1_9FLAO 6-pyruvoyltetrahydropterin/6-carboxytetrahydropterin synthase OS=Kordia periserrulae OX=701523 GN=C8N46_106220; PE = 4 SV=1
MSKIRITKQFNFETGHALYGYDGKCKNVHGHSYKLSVTVIGTPITDNSNVKWGMVIDFSDLKKIVKEEVVDVFDHAIVFNKNTPHLSLALTMREEGHNVILADYQPTSENMVIDFAEKIKNRLPKEIQLFSLRLQETDSSCAEWFASDNE

SEQ ID NO: 21495 - protein, 150 aa, Kordia sp.
  REGION 1..150: note = tr|A0A501I4U0|A0A501I4U0_9FLAO 6-carboxytetrahydropterin synthase OS=Kordia sp. TARA_039_SRF OX=2530203 GN=EZY14_00555 PE=4 SV=1
MSKIRITKQFNFETGHALYGYDGKCKNVHGHSYKLSVTVIGTPITDNSNVKWGMVIDFSDLKKIVKEEVVDVFDHAIVFNKNTPHLSLAMTMREEGHNVILADYQPTSENMVIDFAEKIKNRLPREIQLFSLRLQETDSSCAEWFASDNE

SEQ ID NO: 21496 - protein, 150 aa, Kordia sp.
  REGION 1..150: note = tr|A0A2G2KAN0|A0A2G2KAN0_9FLAO 6-carboxytetrahydropterin synthase QueD OS=Kordia sp.; OX = 1965332 GN=COA88_08560 PE=4 SV=1
MSKIRITKLFTFETGHALYGYDGKCKNVHGHSYKLSVTVIGSPITKLGAVKLGMVIDFGDLKKVVKEEIVDGFDHATVFNKNTPHLELAKELQDRGHNVILVDYQPTSENMVIDFAAKIKDRLPENIQLHSLKLSETDTSFAEWYASDNE

SEQ ID NO: 21497 - protein, 130 aa, Kordiimonas sp.
  REGION 1..130: note = tr|A0A2E1CW65|A0A2E1CW65_9PROT 6-carboxy-5,6,7,8-tetrahydropterin synthase OS=Kordiimonas sp. OX=1970157 GN=CMF31_07520 PE=3 SV=1
MEIYKIFNFDAAHHLACNVPDGHPYSRLHGHSFQAEVFLRGEPDIDTGWIVDFAQIDTALQQLRNELDHNYLNEIPGLELPTVENIACWIWNRLSPDFPQLCRIIIRRGSFGEGCIYEGPAKEPAARHHG

SEQ ID NO: 21498 - protein, 135 aa, unidentified
  source 1..135: note = Koribacter versatilis
  REGION 1..135: note = tr|Q1IPJ0|Q1IPJ0_KORVE 6-pyruvoyl tetrahydropterin synthase OS=Koribacter versatilis (strain Ellin345); OX = 204669 GN=Acid345_2209 PE=4 SV=1
MKAHLTRRYWFVASHRLHTPRLSEAENREVYGKCNNPFGHGHNYALEVTVGGQVAPDTGMVYNLADVDRVVRKHILERYDHQNLNCLKEFQELVPTTENLCLAIFEILKRNLAEIHLDKVRLEETSQNSFEVVNE

SEQ ID NO: 21499 - protein, 137 aa, unidentified
  source 1..137: note = Koribacter versatilis
  REGION 1..137: note = tr|Q1IPI9|Q1IPI9_KORVE 6-carboxy-5,6,7,8-tetrahydropterin synthase OS=Koribacter versatilis (strain Ellin345) OX=204669 GN=Acid345_2210; PE = 3 SV=1
MVVYLTRKSEFSASHHYHNPDFTAEENLRVFGKCNNSNGHGHNYTLEVTVKGTVDATTGFVVDLKQLKEIMNREVVDAMDHRYLNHEVPEFKSQIPTTENIAIAIWKRLEGKLHVAKLHRVRLYEMHDLWVDYLGEA

SEQ ID NO: 21500 - protein, 120 aa, unidentified
  source 1..120: note = Kosakonia arachidis
  REGION 1..120: note = tr|A0A1I6XL41|A0A1I6XL41_9ENTR 6-carboxy-5,6,7,8-tetrahydropterin synthase OS=Kosakonia arachidis OX=551989 GN=SAMN05192562_10139 PE=3 SV=1
MPTTLFKDFTFEAAHHLPHVPQGHKCGRLHGHSFLVRLEITGEVDPYTGWIMDFAELKAAFKPLYDRLDHYYLNEIPGLENPTSEVLAKWIWDQMKPVVPLLSAVMVKETCTAGCVYRGE

SEQ ID NO: 21501 - protein, 119 aa, unidentified
  source 1..119: note = Kosakonia cowanii
  REGION 1..119: note = tr|A0A3R5YHJ9|A0A3R5YHJ9_9ENTR 6-carboxy-5,6,7,8-tetrahydropterin synthase OS=Kosakonia cowanii OX=208223 GN=queD PE=3 SV=1
MSTTLFKDFTFEAAHHLPHVPEGHKCGRLHGHSFMVRLEITGEVDPYTGWIMDFAELKAAFKPLYDRLDHYYLNEIPGLENPTSEVLAKWIWDQMKPVVPLLSAVMVKETCTAGCVYRG

SEQ ID NO: 21502 - protein, 120 aa, unidentified
  source 1..120: note = Kosakonia oryzae
  REGION 1..120: note = tr|A0A1T5G1X4|A0A1T5G1X4_9ENTR 6-carboxy-5,6,7,8-tetrahydropterin synthase OS=Kosakonia oryzae OX=497725 GN=SAMN05216168_0323 PE=3 SV=1
MSTTLFKDFTFEAAHHLPHVPQGHKCGRLHGHSFMVRLEITGEVDPYTGWIMDFAELKAAFKPLYDRLDHYYLNEIPGLENPTSEVLAKWIWDQMKPVVPLLSAVMVKETCTAGCVYRGE

SEQ ID NO: 21503 - protein, 119 aa, unidentified
  source 1..119: note = Kosakonia oryzendophytica
  REGION 1..119: note = tr|A0A1C4AUS6|A0A1C4AUS6_9ENTR 6-carboxy-5,6,7,8-tetrahydropterin synthase OS=Kosakonia oryzendophytica OX=1005665 GN=GA0061071_103354 PE=3 SV=1
MSTTLFKDFTFEAAHHLPHVPQGHKCGRLHGHSFMVRLEITGEVDPYTGWIMDFAELKAAFKPLYDRLDHYYLNEIPGLENPTSEVLAKWIWDQMKPVVPLLSAVMVKETCTAGCVYRG

SEQ ID NO: 21504 - protein, 120 aa, unidentified
  source 1..120: note = Kosakonia oryziphila
  REGION 1..120: note = tr|A0A1C4DTJ6|A0A1C4DTJ6_9ENTR 6-carboxy-5,6,7,8-tetrahydropterin synthase OS=Kosakonia oryziphila OX=1005667 GN=GA0061070_101850 PE=3 SV=1
MSTTLFKDFTFEAAHHLPHVPQGHKCGRLHGHSFMVRLEITGEVDPYTGWIMDFAELKAAFKPLYNRLDHYYLNEIPGLENPTSEVLAKWIWDQMKPVVPLLSAVMVQETCTAGCVYRGE

SEQ ID NO: 21505 - protein, 120 aa, unidentified; identical to SEQ ID NO: 21502
  source 1..120: note = Kosakonia radicincitans
  REGION 1..120: note = tr|A0A1V0LIG9|A0A1V0LIG9_9ENTR 6-carboxy-5,6,7,8-tetrahydropterin synthase OS=Kosakonia radicincitans DSM 16656 OX=1177180 GN=Y71_21530 PE=3 SV=1

SEQ ID NO: 21506 - protein, 120 aa, unidentified; identical to SEQ ID NO: 21502
  source 1..120: note = Kosakonia radicincitans
  REGION 1..120: note = tr|A0A5E8B7Z7|A0A5E8B7Z7_9ENTR 6-carboxy-5,6,7,8-tetrahydropterin synthase OS=Kosakonia radicincitans OX=283686 GN=queD PE=3 SV=1

SEQ ID NO: 21507 - protein, 120 aa, unidentified
  source 1..120: note = Kosakonia sp.
  REGION 1..120: note = tr|A0A1I2GUN4|A0A1I2GUN4_9ENTR 6-carboxy-5,6,7,8-tetrahydropterin synthase OS=Kosakonia sp. S29 OX=1855371 GN=SAMN05216563_11611 PE=3 SV=1
MSTTLFKDFMFEAAHRLPHVPAGHKCGRLHGHSFMVRLEITGEVDPHTGWIMDFAELKAAFKPTYDRLDHYYLNDIPGLENPTSEVLAKWIWEQLKPVVPLLSAVMIKETCTAGCIYRGE

SEQ ID NO: 21508 - protein, 120 aa, unidentified
  source 1..120: note = Kosakonia sp.
  REGION 1..120: note = tr|A0A4V6N3K3|A0A4V6N3K3_9ENTR 6-carboxy-5,6,7,8-tetrahydropterin synthase OS=Kosakonia sp. WCHEs120001 OX=2529380 GN=queD PE=3 SV=1
MSTTLFKDFTFEAAHHLPHVPLGHKCGRLHGHSFMVRLEITGEVDPYTGWIMDFAELKAAFKPLYERLDHYYLNEIPGLENPTSEVLAQWIWDQMKPVVPLLSAVMVKETCTAGCVYRGE

SEQ ID NO: 21509 - protein, 120 aa, Kosmotoga arenicorallina
  REGION 1..120: note = tr|A0A176K069|A0A176K069_9BACT 6-carboxy-5,6,7,8-tetrahydropterin synthase OS=Kosmotoga arenicorallina S304 OX=1453497 GN=AT15_00530 PE=3 SV=1
MYYVTKEFSFDAAHNLIRYHGKCEKLHGHTYKLRVTVAGKPDSEGMVIDFIELKEVVRNEILRHLDHSYINEIIEQPTAENIAKWIFDRLKHLINDEHRKLHEITLWETPTSFVRYLEEE

SEQ ID NO: 21510 - protein, 119 aa, Kosmotoga olearia
  REGION 1..119: note = tr|C5CGV8|C5CGV8_KOSOT 6-carboxy-5,6,7,8-tetrahydropterin synthase OS=Kosmotoga olearia (strain ATCC BAA-1733 / DSM 21960 / TBF 19.5.1); OX = 521045 GN=Kole_1946 PE=3 S V=1
MFYITKEVTFDAAHNLTSYHGKCEKLHGHTYRLQVTIKGEPDEEGMVIDFAELKKVIKEKILDKLDHSYINDLIPQPTAEYIARWIFDELEPLVKTDKRKLFEIVLWETPTSFVRYRKE

SEQ ID NO: 21511 - protein, 120 aa, unidentified
  source 1..120: note = Kosmotoga pacifica
  REGION 1..120: note = tr|A0A0G2ZD75|A0A0G2ZD75_9BACT 6-carboxy-5,6,7,8-tetrahydropterin synthase OS=Kosmotoga pacifica OX=1330330 GN=IX53_09470 PE=3 SV=1
MFYITKEFTFDAAHNLVKYHGKCEKLHGHTYRLRVTVVGEPNDEGMVIDFLELKEVVKENVLKHLDHAYINEIIEQPTAEYIAKWIYDRLKKLINNERRKLHEVVLWETPTSFVRYLEEK

SEQ ID NO: 21512 - protein, 121 aa, Kosmotoga sp.
  REGION 1..121: note = tr|A0A5D0SFJ6|A0A5D0SFJ6_9BACT 6-carboxy-5,6,7,8-tetrahydropterin synthase OS=Kosmotoga sp. OX=1955248 GN=queD PE=3 SV=1
MFYVTKEFTFDAAHKLLSYHGKCENLHGHTYKLRVTVYGKPDDEGMVIDFIELKKMVKNNVLNKLDHSYINEFIEQPSAENISKWIYDRLKPVIDNDRRELHEITLWETPTSFVCYKGENK

SEQ ID NO: 21513 - protein, 120 aa, unidentified
  source 1..120: note = Kosmotogaceae bacterium
  REGION 1..120: note = tr|A0A3B8N8Q2|A0A3B8N8Q2_9BACT 6-carboxy-5,6,7,8-tetrahydropterin synthase; OS = Kosmotogaceae bacterium OX=2053567 GN=queD PE=3 SV=1
MFLVTKEFTFDAAHRLERYHGKCEELHGHTYRLSISVKGELDDEGMVIDFLELKALIKEHVLSHLDHKYLNEVIEQPTAENIAKWVFDAVKPLIDSEKRKLHEVRVWETVTSSATYRESQ

SEQ ID NO: 21514 - protein, 164 aa, unidentified
  source 1..164: note = Kouleothrix aurantiaca
  REGION 1..164: note = tr|A0A0P9CZX9|A0A0P9CZX9_9CHLR Uncharacterized protein OS=Kouleothrix aurantiaca OX=186479 GN=SE17_17170; PE = 4 SV=1
MSAYRIHVSRDNLMFAAGHFASYDGTIVEPLHGHNYRLGVTLEGPTEENAYVFNFVTLKRIMKRLTDELDHHMLLPLHNALIAIEECDDGGVIVRTADRWYRFPRQDVVLLDLPNTTVEMMARYLCGRLREDLAARPEAAHLTAVEIALEESFGQTAFYREELA

SEQ ID NO: 21515 - protein, 270 aa, unidentified
  source 1..270: note = Kouleothrix aurantiaca
  REGION 1..270: note = tr|A0A0P9DHW4|A0A0P9DHW4_9CHLR 6-pyruvoyl tetrahydropterin synthase OS=Kouleothrix aurantiaca; OX = 186479 GN=SE17_12280 PE=4 SV=1
MVGASRRFDFSASHRYWRDEWSQQENERVFGKCTSPYGHGHNYTLDVTIRGTPDPATGMIMNMVDLKALVNEVLDAFDHKHLNEDTPYFKDLIPTTENIVRVLWRLIAPRLPAGVALAHLRLYEMRDLWADYDGSDEASFSRSYVFSAAHRLHSAQLSDAENQQLYGKCNNPNGHGHNYTLEVTVDGAVDPQTGMVIDMVALDGQVRGVIDTLDHKHIDREVPWFAARASTGEHIVLYLWELLAARLEGQLRHLRLWETQNNVFEYSGER

SEQ ID NO: 21516 - protein, 177 aa, Kozakia baliensis
  REGION 1..177: note = tr|A0A1D8UV74|A0A1D8UV74_9PROT 6-pyruvoyl tetrahydropterin synthase OS=Kozakia baliensis OX=153496; GN = A0U89_10770 PE=4 SV=1
MSDIELTFTRRFSMGHRLIAGASERCAIPHGHNEFVTVRLRATQPRLLDGRQNMVVPFAQAKQRWHDFIDTSLDHALQLSESDPLLGWFRSHEPLRAERIVVTPGDPTTELMAALMLAKLRAILRDEGELLQCDNIELQETPTNTVRLTGDPMDYIPIVGRSGVECWWHRPDLSIAD

SEQ ID NO: 21517 - protein, 147 aa, Krasilnikovia cinnamomea
  REGION 1..147: note = tr|A0A4V2G701|A0A4V2G701_9ACTN 6-pyruvoyltetrahydropterin/6-carboxytetrahydropterin synthase OS=Krasilnikovia cinnamomea OX=349313; GN = EV385_2475 PE=4 SV=1
MASIRQMFELATPVFFDAAHQLPDSVDLVSKKCARLHGHTYHALIRVEVIDNSRHGMTIDFKELKDAIGGRLDHRYVNEVFDDHYGANAKEATAENIALFIVELISGVLHTRQVPCTSITVALAEGYKGPDNTVYVTVRGNDGNDQV

SEQ ID NO: 21518 - protein, 132 aa, Krasilnikovia cinnamomea
  REGION 1..132: note = tr|A0A4Q7ZCC8|A0A4Q7ZCC8_9ACTN 6-pyruvoyl-tetrahydropterin synthase OS=Krasilnikovia cinnamomea OX=349313 GN=EV385_0020 PE=4 SV=1
MFSVTVRDHIMVAHSFTGEVFGPAQRLHGATFVVDATFRRAELDADNIVVDIGRALEQLHAICGALSYRNLDDEPDFAGVNTSTEFLAKVIADRLADQARAGGLGAGARDLTGIAVTLHESHIAWASYERTL

SEQ ID NO: 21519 - protein, 120 aa, unidentified
  source 1..120: note = Krasilnikoviella flava
  REGION 1..120: note = tr|A0A1T5KS33|A0A1T5KS33_9MICO 6-carboxy-5,6,7,8-tetrahydropterin synthase; OS = Krasilnikoviella flava OX=526729 GN=SAMN04324258_2317; PE = 3 SV=1
MELFKEFTFEAAHRLPNVPPGHKCSRLHGHSYKVQVEVTGPVDTDLGWVIDFGDIKAAWGDLDDALDHRYLNEVPGLENPTSELLAVWIWDRLSAALPNLLSAVTVKETCTSGSTYRGTA

SEQ ID NO: 21520 - protein, 121 aa, Kribbella sp.
  REGION 1..121: note = tr|A0A4R0IS14|A0A4R0IS14_9ACTN 6-carboxy-5,6,7,8-tetrahydropterin synthase OS=Kribbella sp. YM55 OX=1572660 GN=queD PE=3 SV=1
MEIYREFTFEAAHRLPTVPAGHKCGRLHGHSYRVEVHVSGEVDASTGWLIDFGDIKKAFRPLEDQLDHHYLNDVEGLDNPTSENLAQWIWARLVGVLPLSEIHVRETCTSGCVYRGREDAR

SEQ ID NO: 21521 - protein, 122 aa, Kribbella sp.
  REGION 1..122: note = tr|A0A4R7ZM92|A0A4R7ZM92_9ACTN 6-carboxy-5,6,7,8-tetrahydropterin synthase OS=Kribbella sp. VKM Ac-2570 OX=2512221 GN=EV650_5566 PE=3 SV=1
MTYTAEIYREFTFEAAHLLPNVPTGHKCGRLHGHSYRVEVHLVGSVGDDTGWVQDFGDLKAAFKPLEAQLDHNFLNEVEGLKNPTSEVLAKWIWDRLVTELPNLSEIRVRETCTSGCVYRGA

SEQ ID NO: 21522 - protein, 137 aa, Kriegella aquimaris
  REGION 1..137: note = tr|A0A1G9WIH7|A0A1G9WIH7_9FLAO 6-carboxy-5,6,7,8-tetrahydropterin synthase OS=Kriegella aquimaris OX=192904 GN=SAMN04488514_115125 PE=3 SV=1
MGMKVKVSRKAHFNAAHRLYSPEWDNAKNAEVFGKCSNPNFHGHNYELIVSVSGEIDEQTGFVMDMKILKELIKDKVEDALDHKNLNVEVPEFKEVNPTAENIAVVIWNKLRPHIASNKELEVVLYETPRNFVTYAG

SEQ ID NO: 21523 - protein, 149 aa, Kriegella aquimaris
  REGION 1..149: note = tr|A0A1G9LMU3|A0A1G9LMU3_9FLAO 6-carboxy-5,6,7,8-tetrahydropterin synthase OS=Kriegella aquimaris OX=192904 GN=SAMN04488514_102120 PE=3 SV=1
MSKIRITKQFTFETGHALYGYDGKCKNVHGHSYKLSVTVIGKPITDPEAVKLGMVIDFGDLKTIVKEEVINPFDHATVFNKNTPHKELAQELIDRGHKVILADYQPTSENMVIDFAAKIRARIPAGLKLHSLRLRETETAYAEWFAEDN

SEQ ID NO: 21524 - protein, 161 aa, Kroppenstedtia eburnea; identical to SEQ ID NO: 19729
  REGION 1..161: note = tr|A0A1N7Q3K1|A0A1N7Q3K1_9BACL PreQ(0) biosynthesis protein QueD OS=Kroppenstedtia eburnea OX=714067; GN = SAMN05421790_11727 PE=4 SV=1

SEQ ID NO: 21525 - protein, 136 aa, Ktedonobacter racemifer
  REGION 1..136: note = tr|D6TG00|D6TG00_9CHLR 6-carboxy-5,6,7,8-tetrahydropterin synthase; OS = Ktedonobacter racemifer DSM 44963 OX=485913; GN = Krac_12260 PE=3 SV=1
MVYLTRRVTFSAAHRLWSEYLSEDENYNVYDKCANPHGHGHNYILEVTVRGEPEPTTGMVLNLTDMKRIINELVVDGVDHKHLNYDVAWLEGVIPTAEMLVIKFWERLAPAFEGRLYEITLHETENNYASYRGLEA

SEQ ID NO: 21526 - protein, 166 aa, Ktedonobacter racemifer
  REGION 1..166: note = tr|D6TII7|D6TII7_9CHLR Uncharacterized protein; OS = Ktedonobacter racemifer DSM 44963 OX=485913; GN = Krac_10788 PE=4 SV=1
MSGERIARKVKIEGGYLNFSSAHFITYGGKCERLHGHNYGVLVEVEGTLGEDMLVFDFTVLKRLTKEICKRLDHHFLLPLHNPHLQLASTENEWEVHFVGKRYIFPRADVAELPIDNSTAERLAEYICNELCHELQAFNTSNLSSIMVGVEEAPTQMAYYKLSLNE

SEQ ID NO: 21527 - protein, 130 aa, Ktedonobacter sp.
  REGION 1..130: note = tr|A0A1Q6YXQ9|A0A1Q6YXQ9_9CHLR 6-carboxy-5,6,7,8-tetrahydropterin synthase; OS = Ktedonobacter sp. 13_2_20CM_53_11 OX=1805233; GN = AUH05_06740 PE=3 SV=1
MRYAIVTKIFHFESAHHLPGHRGKCAHLHGHSYRLEVTIRGPIKDAPGESDHGMVMDFDDLSRTVKNSVIERLDHRDLNEVTGLQTTAENLAHWIWNELMNQGLLQALLHRIRLWETESGYVEITQAERD

SEQ ID NO: 21528 - protein, 130 aa, Ktedonobacter sp.
  REGION 1..130: note = tr|A0A1Q7UR53|A0A1Q7UR53_9CHLR 6-carboxy-5,6,7,8-tetrahydropterin synthase; OS = Ktedonobacter sp. 13_1_20CM_4_53_11 OX=1805225; GN = AUG82_04875 PE=3 SV=1
MRYAIVTKIFHFESAHHLPGHRGKCAHLHGHSYRLEVTIRGPIKDAPGESDHGMVMDFDDLSRTVKNSVIERLDHRDLNEVTGLQTTAENLAHWIWNELMNHGLLQALLHRIRLWETESGYVEITQAERD

SEQ ID NO: 21529 - protein, 167 aa, unidentified
  source 1..167: note = Ktedonobacterales bacterium
  REGION 1..167: note = tr|A0A4P6JT39|A0A4P6JT39_9CHLR 6-pyruvoyl tetrahydropterin synthase family protein; OS = Ktedonobacterales bacterium SCAWS-G2 OX=2509675; GN = EPA93_19420 PE=4 SV=1
MSSKQVLRKVKIEGGYLDFNAAHFITYGGKCERLHGHNYCVMVEIEGELGEDKLVFDFTVLKRITKDICRTLNHRFLLPLHNTHLELIPTSREWEIRFRDKRYIFPRADVVELPIDNSSAERLAEYICHELSTILSREYDISRLHTIMVGVSEAPTQMAYYQRSLLG

SEQ ID NO: 21530 - protein, 153 aa, unidentified
  source 1..153: note = Ktedonobacterales bacterium
  REGION 1..153: note = tr|A0A4P6K5D4|A0A4P6K5D4_9CHLR 6-carboxytetrahydropterin synthase OS=Ktedonobacterales bacterium SCAWS-G2 OX=2509675 GN=EPA93_47270 PE=4 SV=1
MPRYAIITRLFPFEACHHLPGHQGKCRRPHGHSYQLEVSLRGPIKETQGLSDEGMVLDFAELKALVNRTILEQLDPRVPRGPEAGMIEQGGMDHNDLNVLTGIRTTAENLVHWIWEALVAGGVPEEFLYRIRLWETEKGYVEITQAERGQEGR

SEQ ID NO: 21531 - protein, 121 aa, unidentified
  source 1..121: note = Kuenenia stuttgartiensis
  REGION 1..121: note = tr|Q1Q1D3|Q1Q1D3_KUEST 6-carboxy-5,6,7,8-tetrahydropterin synthase OS=Kuenenia stuttgartiensis OX=174633 GN=KSMBR1_1056 PE=3 SV=1
MFELIIDTDFAAAHNLRGYKGQCENLHGHNWKVQVVLKSEKLDNLGMVIDFREAKKLIGDVTKKFDHTYLNDMEHFKAENPTTENISRMIYRELTSAMPSGIKVEKVTTWESDRCGATYFE

SEQ ID NO: 21532 - protein, 143 aa, Kurthia sp.
  REGION 1..143: note = tr|A0A433RYI8|A0A433RYI8_9BACL 6-carboxy-5,6,7,8-tetrahydropterin synthase OS=Kurthia sp. 3B1D OX=1562256 GN=QI30_01155 PE=3 SV=1
MLMQYYPHPQHDYSYELNKDMNFSAAHFIPDEQAGKCANMHGHTYVVNITIAGDTLDDTGFLVNFQKLKELVHKRYDHRILNDLEEFSGVNFPTTEVIAQVIWQRIENYLKTVPNQPSCLQILVRETPTSYVLYRPKKDENHG

SEQ ID NO: 21533 - protein, 132 aa, Kushneria avicenniae
  REGION 1..132: note = tr|A0A1I1GIG0|A0A1I1GIG0_9GAMM 6-pyruvoyl-tetrahydropterin synthase OS=Kushneria avicenniae OX=402385 GN=SAMN05421848_0591 PE=4 SV=1
MYSLTVRDHVMIAHSFNGQIFGPAQKLHGATYIVDVTFKRPELDQDDLIVDIGLASQTLSDVLSDINMQNLDEIEEFKGRNTTTEFMARVIFDRMAASIEADQLGDTGKGLTALSVTLHESHIAWASYEGSL

SEQ ID NO: 21534 - protein, 282 aa, Kushneria avicenniae
  REGION 1..282: note = tr|A0A1I1FQD7|A0A1I1FQD7_9GAMM 6-pyruvoyl tetrahydropterin synthase OS=Kushneria avicenniae; OX = 402385 GN=SAMN05421848_0232 PE=4 SV=1
MMLFVNALSALDVSIWCPQRGLIGASYHVDVELEGPLGEDGMLFDFGEVKPWIKSRIDNSVDHTLLVPAKAHDISVNECPEGLRLQTRHPWSMELRAPRQAYTLLPWQQITPERLGDYLSTELSRRPPAQVEKIRVTLREESHEIGGYTYSHGLRRHKGNCQRIAHGHRSRLAIWHNGQRSEVLEAQWSQRLEDIYLIDQADLISEENDICHVGYESAQGRFSIRLPRERAEILPTPTTVEQIANWMAGEIASLHGGSVRVQAFEGIDKGAVATAWGDRMPT

SEQ ID NO: 21535 - protein, 282 aa, Kushneria indalinina
  REGION 1..282: note = tr|A0A3D9DZE6|A0A3D9DZE6_9GAMM 6-pyruvoyl tetrahydropterin synthase-like protein OS=Kushneria indalinina DSM 14324 OX=1122140 GN=C8D72_0821 PE=4 SV=1
MILFVNALSALDVSIWCPERGLIGASYHIDVELEGPLGEDGMLFDFGDVKPWIKSRIDATVDHTLLVPTKAHDIKVDECSEGLRLQTRHPWPMELRAPRQAYTLLPWQRITPERLGDYLSAELSRRPPAQVEKIRVSLREEPHASGGYTYSHGLRRHKGNCQRIAHGHRSRLAIWHNGQRSEALEAQWSHRLEDSYLIDRADLIDADNEIYHVGYESAQGRFSIRLPQERAEILPTPTTVEQIAHWMAKEIASLHGGSVRVQAFEGIDKGAVATAHGVREPA

SEQ ID NO: 21536 - protein, 132 aa, Kushneria indalinina
  REGION 1..132: note = tr|A0A3D9DYG6|A0A3D9DYG6_9GAMM 6-pyruvoyl-tetrahydropterin synthase OS=Kushneria indalinina DSM 14324 OX=1122140 GN=C8D72_0497 PE=4 SV=1
MYSLTVRDHVMIAHSFNGQIFGPAQKLHGATYIVDVTFKRPDLDQDDLIVDIGLASQTLSEVLSDINMQNLDEIEEFKGRNTTTEFMARVIFDRMAASIEADQLGETGKGLTALSVTLHESHIACASYEGSL

SEQ ID NO: 21537 - protein, 282 aa, unidentified
  source 1..282: note = Kushneria konosiri
  REGION 1..282: note = tr|A0A2Z2HEL5|A0A2Z2HEL5_9GAMM 6-pyruvoyl tetrahydropterin synthase-related protein OS=Kushneria konosiri OX=698828 GN=B9G99_14345 PE=4 SV=1
MILFVNALSALDVSIWCPQRGLVGASFHIDVELEGQLGEDGMLFDFGEVKPWIKSRIDASVDHTLLVPTKAHDITVSECVEGLRLQTRHPWPMELRAPRQAYTLLPWQQITPERLGEYLSAELSRRPPAQVEKIRVTLREEAHDAGGYTYSHGLRRHQGNCQRIAHGHRSRLAIWHNGQRSETLETQWSQRLEDIYLIDQADLIGTDNETCHVGYESAQGRFSIRLPRERTEILPTPTTVEQIANWMAQEIASLHGGSVRVQAFEGIDKGAVATAHGARDSA

SEQ ID NO: 21538 - protein, 132 aa, unidentified
  source 1..132: note = Kushneria konosiri
  REGION 1..132: note = tr|A0A2Z2H8D4|A0A2Z2H8D4_9GAMM Uncharacterized protein OS=Kushneria konosiri OX=698828 GN=B9G99_12735; PE = 4 SV=1
MYSLTVRDHVMIAHSFNGQIFGPAQKLHGATYIVDVTFKRPDLDQDDLIVDIGLASQTLSEVLSDINMQNLDEVEEFKGRNTTTEFMARVIFDRMAASIEADQLGETGKGLTAMSVTLHESHIAWASYEGSL

SEQ ID NO: 21539 - protein, 282 aa, Kushneria marisflavi
  REGION 1..282: note = tr|A0A240UL00|A0A240UL00_9GAMM 6-pyruvoyl tetrahydropterin synthase-related protein OS=Kushneria marisflavi OX=157779 GN=B9H00_00645 PE=4 SV=1
MILFVNALSALDVSIWCPQRGLVGASYHIDVELEGQLGDDGMLFDFGEVKPWIKSRIDAGVDHTLLVPTKAHDISVSECSEGLRLQTRHPWPMELRAPRQAYTLLPWQQITPERLGDYLSAELSRRPPAQVEKIRVTLREESHDAGGYTYSHGLRRHSGNCQRIAHGHRSRLAIWHNGQRSETLETQWSQRLEDIYLIDQADLIGTDNETCHVGYESAQGRFSIRLPRDRAEILPTPTTVEQIANWMAQEIASLHGGSVRVQAFEGIDKGAVATAQGARDSA

SEQ ID NO: 21540 - protein, 132 aa, Kushneria marisflavi
  REGION 1..132: note = tr|A0A240ULZ0|A0A240ULZ0_9GAMM Uncharacterized protein OS=Kushneria marisflavi OX=157779 GN=B9H00_02260; PE = 4 SV=1
MYSLTVRDHVMIAHSFNGQIFGPAQKLHGATYIVDVTFKRPDLDQDDLIVDIGLASQTLSDVLSDINMQNLDEIEEFKGRNTTTEFMARVIFDRMAASIEADQLGETGKGLTALSVTLHESHIAWASYEGSL

SEQ ID NO: 21541 - protein, 132 aa, unidentified
  source 1..132: note = Kushneria phyllosphaerae
  REGION 1..132: note = tr|A0A2R8CKS3|A0A2R8CKS3_9GAMM Uncharacterized protein OS=Kushneria phyllosphaerae OX=2100822; GN = KSP9073_01484 PE=4 SV=1
MYSLTVRDHVMIAHSFNGQIFGPAQKLHGATYIVDVTFKRPDLDQDDLIVDIGLASQTLSDVLSDINMQNLDEIEEFKGRNTTTEFMARVIFDRMAASIEADQLGETGKGLTALNVTLHESHIAWASYEGTL

SEQ ID NO: 21542 - protein, 282 aa, unidentified
  source 1..282: note = Kushneria phyllosphaerae
  REGION 1..282: note = tr|A0A2R8CP87|A0A2R8CP87_9GAMM Uncharacterized protein OS=Kushneria phyllosphaerae OX=2100822; GN = KSP9073_02724 PE=4 SV=1
MILFVNALSALDVSIWCPQRGLVGASYHIDVELEGSLGEDGMLFDFGDVKPWIKSRIDSTMDHTLLVPTKAHDITVIECNEGLRLQTRHPWPMELRAPRQAYTLLPWQQITPERLGDHLSAELSRRPPAQVEKIRVTLREEPHEAGGYTYSHGLRRHKGNCQRIAHGHRSRLAIWHNGQRSEALETQWSQRLEDIYLIDRADLMDTDNDMYHVGYESAQGRFAIRLPQERAEILPTPTTVEQIAHWMAKEIASLHGGSVRVQAFEGIDKGAVATAHGARDPA

SEQ ID NO: 21543 - protein, 132 aa, Kushneria sinocarnis
  REGION 1..132: note = tr|A0A420WV58|A0A420WV58_9GAMM 6-pyruvoyl-tetrahydropterin synthase OS=Kushneria sinocarnis OX=595502 GN=C7446_2128 PE=4 SV=1
MFSLTIRDHMMIAHSFHGEIFGPAQRLHGATYVVDVTFKRPELDQDDLIVDIALAGQVLGEVLAEFNMRNLDEIDAFRGRNTTTEFMASVVFKRMSQAIGDGRLGETGRGLTTLSVTLHESHLAWASYEGAL

SEQ ID NO: 21544 - protein, 278 aa, Kushneria sinocarnis
  REGION 1..278: note = tr|A0A420WYR9|A0A420WYR9_9GAMM 6-pyruvoyl-tetrahydropterin synthase OS=Kushneria sinocarnis OX=595502 GN=C7446_1224 PE=4 SV=1
MTLFVNDLTNLDVSLLCPQRGMMGASWQVNLTLDGELGDDGMLFDFGEVKPWVKSRIDSESDHTLLVPSRADWVSVTECAEGLCVRTSKPWGMEIRAPRQAFTLLPWDTITLERLNERLSLELMKRPPARVSDIRVELDEEWIDGAAFTYSHGLRRHAGNCQRIAHGHRSRLLVWRNGQLDEPLAEAWANRLQHIYLADRNDRMSTASADECAFGYEAPQGRFRIQLPAERVMTLPTTTTVELIARWLAETIAREAGGHIRVQAFEGIGKGAVAEAHG

SEQ ID NO: 21545 - protein, 278 aa, Kushneria sp.
  REGION 1..278: note = tr|A0A1S1P050|A0A1S1P050_9GAMM 6-pyruvoyl tetrahydropterin synthase-related protein OS=Kushneria sp. YCWA18 OX=657387 GN=BH688_03980 PE=4 SV=1
MTLFVNDLTNLDVSLLCPQRGLVGASWQVNLELEGELGEDGMLFDFGEVKPWAKSRLDGEVDHTLLVPAQADWISVTECAEGLCVRTSSPWEMEIRAPRQAFTLLPWTTVTPEQLEQRLSQDLMKRPPARVSDIRVTLDEEWIEGAAYTYSHGLRRHAGNCQRIAHGHRSRLFVWRNGHLDEPLAEAWANRLQHIYLADQHDQVATADNERCAFAYESPQGRFRIQLPARRVMMLPSPTTVELIARWLAEVIAREAGGHVRVQAFEGIGKGAMAEARH

SEQ ID NO: 21546 - protein, 132 aa, Kushneria sp.
  REGION 1..132: note = tr|A0A1S1NSD4|A0A1S1NSD4_9GAMM Uncharacterized protein OS=Kushneria sp. YCWA18 OX=657387 GN=BH688_05770; PE = 4 SV=1
MFSLTIRDHMMIAHSFHGEIFGPAQRLHGATYVVDVTFKRPELDQDDLIVDIAQAGQVLSEVLGEFNMRNLDEIDAFRGRNTTTEFMASIIFKRLARAIGEGQLGETGRGLTAMSVTLHESHLAWASYEGAL

SEQ ID NO: 21547 - protein, 121 aa, Kutzneria albida
  REGION 1..121: note = tr|W5WGZ3|W5WGZ3_9PSEU 6-carboxy-5,6,7,8-tetrahydropterin synthase OS=Kutzneria albida DSM 43870 OX=1449976 GN=KALB_4070 PE=3 SV=1
MAYRISKEFHFSASHRLDGLPQEHPCGRLHGHNYVVELELSAAADGLDGVGFVRDYGDLAPFRRWLDEEVDHRHLNDLLADRNPSAENLARWLYERWLPRFPELSSVRVSETAKTWAEYRP

SEQ ID NO: 21548 - protein, 132 aa, unidentified
  source 1..132: note = Kutzneria buriramensis
  REGION 1..132: note = tr|A0A3E0HDJ3|A0A3E0HDJ3_9PSEU 6-pyruvoyl-tetrahydropterin synthase OS=Kutzneria buriramensis OX=1045776 GN=BCF44_110376 PE=4 SV=1
MFSITVRDHIMVAHSFRGEVFGPAQRLHGATFVVDATFRRTELDDDNIVVDIGLASQQLSELLGELNYRNLDEEPAFAGVNTSTEFLAKVIADRLADRVHAGALGPSASGLSGISVALHESHNAWANYERSL

SEQ ID NO: 21549 - protein, 120 aa, unidentified
  source 1..120: note = Kutzneria buriramensis
  REGION 1..120: note = tr|A0A3E0HK69|A0A3E0HK69_9PSEU 6-carboxy-5,6,7,8-tetrahydropterin synthase OS=Kutzneria buriramensis OX=1045776 GN=BCF44_10627 PE=3 SV=1
MTFRITKKFEFSASHQLAGLAPEHQCARMHGHNYVIELELGAEDAALSPVGFVRDYGELSTIKAWIDKQLDHRHLNDVMDNNPTAENMAAWVYRTWSMEFPELTCVRVSETPKTWAEYRP

SEQ ID NO: 21550 - protein, 132 aa, Kutzneria sp.
  REGION 1..132: note = tr|W7SZL7|W7SZL7_9PSEU 6-pyruvoyl tetrahydropterin synthase OS=Kutzneria sp. 744 OX=345341 GN=KUTG_03510 PE=4; SV = 1
MFSITVRDHIMVAHSFKGEVFGPAQRLHGATFVVDATFKRAELDDDNIVVDIGLAGQQLGELLGELNYRNLDEEPAFAGINTSTEYLAKVIADRLADRVKAGALGPSASGLSGIAVALHESHNAWASYERSL

SEQ ID NO: 21551 - protein, 151 aa, unidentified
  source 1..151: note = Kyrpidia spormannii
  REGION 1..151: note = tr|A0A2K8N5V6|A0A2K8N5V6_9BACL 6-carboxytetrahydropterin synthase QueD OS=Kyrpidia spormannii OX=2055160 GN=queD PE=4 SV=1
MEREVGIVVAQNPLRYRALPVSVVKQFTFDAAHRLEAYEGKCAQLHGHTYRLEVEIKGHPDPRGLVIDFNEIKALVERVVLERFDHRYLNDEVPFNTTAENLVVFLYEELAKALRQTPLATDVNLERVRLWETPTSYAEVQREDIIRRETE

SEQ ID NO: 21552 - protein, 144 aa, unidentified
  source 1..144: note = Kyrpidia tusciae
  REGION 1..144: note = tr|D5WTQ7|D5WTQ7_KYRT2 6-carboxy-5,6,7,8-tetrahydropterin synthase OS=Kyrpidia tusciae (strain DSM 2912 / NBRC 15312 / T2) OX=562970; GN = Btus_0459 PE=3 SV=1
MVAQNPLRYRALPVSVVKQFTFDAAHRLEAYEGKCAQLHGHTYRLEVEIKGHPDPRGLVIDFNEIKALVERVVLERFDHRYLNDEVPFNTTAENLVVFLYEELAKALRQTPRATDVNLERVRLWETPTSYAEVQREDIIRRETE

SEQ ID NO: 21553 - protein, 132 aa, unidentified
  source 1..132: note = Labedaea rhizosphaerae
  REGION 1..132: note = tr|A0A4V3CXP0|A0A4V3CXP0_9PSEU 6-pyruvoyl-tetrahydropterin synthase OS=Labedaea rhizosphaerae OX=598644 GN=EV186_10910 PE=4 SV=1
MFSITVRDHVMIAHSFRGDVFGPAQRLHGATYVVDAEFHRAELDADNVVVDIGLATDQLSAVLADLNYRNLDEEPAFSGINTTTEYLAKVIADRLADRIHGGALGESARGIAELVVTLKESHVASATYRRTL

SEQ ID NO: 21554 - protein, 148 aa, unidentified
  source 1..148: note = Labilibaculum antarcticum
  REGION 1..148: note = tr|A0A1Y1CIG3|A0A1Y1CIG3_9BACT 6-carboxy-5,6,7,8-tetrahydropterin synthase; OS = Labilibaculum antarcticum OX=1717717 GN=ALGA_1773 PE=3; SV = 1
MTKVRLTKEFCFEMAHALWNYDGLCKNIHGHSYILFVTVIGEPITDANNSKLGMVMDFGDLKKIVSEEVVDKLDHSLVLSKATPNLEKLNIEQMFDRYFITDYQPTCENMIVDFAEKIGRRLPVDVKLHSLKLHETATSFAEWYAEDN

SEQ ID NO: 21555 - protein, 149 aa, unidentified
  source 1..149: note = Labilibaculum filiforme
  REGION 1..149: note = tr|A0A2N3HZN5|A0A2N3HZN5_9BACT 6-carboxy-5,6,7,8-tetrahydropterin synthase; OS = Labilibaculum filiforme OX=1940526 GN=BZG02_09125 PE=3; SV = 1
MAKVRLTKEFRFEMAHALWNYDGLCKNIHGHSYILFVTVIGEPITDTNNSKLGMVMDFGDLKKIVAEEIVDQLDHSVVLSKATPNLEQLNIEQMFDRFFITDYQPTCENMIVDFAEKIRIRLPLEVKLHSLKLHETATSFAEWYADDNE

SEQ ID NO: 21556 - protein, 148 aa, unidentified
  source 1..148: note = Labilibaculum manganireducens
  REGION 1..148: note = tr|A0A2N3HR11|A0A2N3HR11_9BACT 6-carboxy-5,6,7,8-tetrahydropterin synthase; OS = Labilibaculum manganireducens OX=1940525 GN=BZG01_20940; PE = 3 SV=1
MAKVRLTKEFHFEMAHALWNYDGLCKNIHGHSYILFVTVIGEPITDVNSSKLGMVMDFGDLKKIVNEEIVDQLDHSVVLSKATPNLEQLDIEQMFERFFITDYQPTCENMIVDFAEKIKMRLPLDVKLHSLKLHETATSFAEWYAEDN

SEQ ID NO: 21557 - protein, 120 aa, unidentified
  source 1..120: note = Labilithrix luteola
  REGION 1..120: note = tr|A0A0K1PU51|A0A0K1PU51_9DELT 6-carboxy-5,6,7,8-tetrahydropterin synthase OS=Labilithrix luteola OX=1391654 GN=AKJ09_03724 PE=3 SV=1
MNVRLVKEFRFEAAHRLPLVPEGHKCRRLHGHSFKIELTVAGPVDPKTGWFIDYDIIHDIWQPIWNKLDHNYLNEIPGLENPTSEILAKWIWDQMKPTLPSLTQVTVFETCDARCEYTGD

SEQ ID NO: 21558 - protein, 132 aa, unidentified
  source 1..132: note = Labilithrix luteola
  REGION 1..132: note = tr|A0A0K1PRS6|A0A0K1PRS6_9DELT PTPS-like type 4; OS = Labilithrix luteola OX=1391654 GN=AKJ09_02760 PE=4 SV=1
MFSVGVSDHVMIAHSFADPTFGPAQKLHGATYGVEVEIRAPALNPHHVVMDIGALRTLLREVLNGLDYSCLDDHPAFPGRTSTTERVAEFVANELVKACASLPADARPVGKASMRVMLRESPVAFAAFEREM

SEQ ID NO: 21559 - protein, 132 aa, Labrenzia aggregata
  REGION 1..132: note = tr|A0A0M6Y7V2|A0A0M6Y7V2_9RHOB Queuosine biosynthesis protein QueD OS=Labrenzia aggregata OX=187304; GN = LAL4801_03787 PE=4 SV=1
MFAVEVRDHVMIAHSFKGELFGPAQALHGATFVIDAAFLADSLDANGVVIDIGRAHDALKEVLQPLNYKNLDEVPEFAGINTTTEFLTKHIHDHLAKAARADKLGRPGSELKAIRVTISESHVARAWYEAGI

SEQ ID NO: 21560 - protein, 127 aa, Labrenzia aggregata
  REGION 1..127: note = tr|A0A0M6Y7S6|A0A0M6Y7S6_9RHOB 6-carboxy-5,6,7,8-tetrahydropterin synthase OS=Labrenzia aggregata OX=187304 GN=queD PE=3 SV=1
MFRITKEFHFSASHQILGLGEDHPCARLHGHNYVVEVELMSEELNGIGFVRDYRELSEFKRFIDDTLDHRHLNDVLGNDCVTAETMARYFYNWCRQRWPETSAVRVKETPKTCAEFRPLVYPGARAA

SEQ ID NO: 21561 - protein, 128 aa, Labrenzia alba
  REGION 1..128: note = tr|A0A0M6Z3R4|A0A0M6Z3R4_9RHOB 6-carboxy-5,6,7,8-tetrahydropterin synthase OS=Labrenzia alba OX=311410 GN=queD PE=3 SV=1
MYRITKEFHFSASHQLKGLGDDHPCSRFHGHNYVVEVELASETLNSIGFVRDYNELKTLKAYIDETLDHRHLNDVLGDDCVTAERLAKHLFDWCWAEWPETVAVRIKETPKTCAEYRPLSQLGIEARP

SEQ ID NO: 21562 - protein, 132 aa, Labrenzia alba
  REGION 1..132: note = tr|A0A0M6YXN7|A0A0M6YXN7_9RHOB Queuosine biosynthesis protein QueD OS=Labrenzia alba OX=311410; GN = LP7551_03235 PE=4 SV=1
MFAVEVRDHVMIAHSFKGALFGPAQALHGATFVIDAAFLAETLDENGVVIDIGRAHEALKEVLEPLNYKNLDDVPEFAGKNTTTEFLTKHVHDHLAKAARENRLGRKGGELGAIRVTISESHVARAWYEDKI

SEQ ID NO: 21563 - protein, 132 aa, Labrenzia alexandrii
  REGION 1..132: note = tr|A0A0M7AH79|A0A0M7AH79_9RHOB Queuosine biosynthesis protein QueD OS=Labrenzia alexandrii; OX = 388408 GN=LAX5112_03647 PE=4 SV=1
MFAVEVRDHVMIAHSFKGELFGPAQALHGATFVIDAAFLSEELDENGVVIDIGRAHEALKEVLAPLNYKNLDEVPEFAGINTTTEFLTKHIHDHLAEAARQDRLGRKGGELAAIRVTISESHVARAWYEAKI

SEQ ID NO: 21564 - protein, 132 aa, Labrenzia alexandrii
  REGION 1..132: note = tr|A0A5E8GXP4|A0A5E8GXP4_LABAD 6-pyruvoyl-tetrahydropterin synthase OS=Labrenzia alexandrii (strain DSM 17067 / NCIMB 14079 / DFL-11); OX = 244592 GN=SADFL11_2026 PE=4SV=1
MFAVEVRDHVMIAHSFKGELFGPAQALHGATFVIDASFLSEDLDENGVVIDIGRAHEALKEVLAPLNYKNLDEVPEFAGINTTTEFLTKHIHGYLAEAARQDRLGRKGGELAAIRVTISESHVARAWHEAKI

SEQ ID NO: 21565 - protein, 132 aa, Labrenzia marina
  REGION 1..132: note = tr|A0A2S3V2T8|A0A2S3V2T8_9RHOB 6-pyruvoyl-tetrahydropterin synthase OS=Labrenzia marina; OX = 281252 GN=CLV41_101756 PE=4 SV=1
MYAVEVRDHVMIAHSFKGELFGPAQALHGATFVIDAAFLAETLDANGVVIDIGRAHDALKEVLQPLNYKNLDEVPAFAGINTTTEFLTRHIHDHLAKAARDNRLGRPGSELGAIRVTISESHVARAWYEAAI

SEQ ID NO: 21566 - protein, 128 aa, Labrenzia sp.
  REGION 1..128: note = tr|A0A222F818|A0A222F818_9RHOB 6-carboxy-5,6,7,8-tetrahydropterin synthase OS=Labrenzia sp. VG12 OX=2021862 GN=queD PE=3 SV=1
MYRITKEFHFSASHQLKGLGDDHPCARFHGHNYVVEVELAAEELDAIGFVRDYNELKLLKTYIDDTLDHRHLNDVLGDDCVTAERIAKHLFDWCKAAWPETAAVRVKETPKTCAEYRPLVYLPVEARP

SEQ ID NO: 21567 - protein, 117 aa, Labrenzia sp.
  REGION 1..117: note = tr|A0A163TZ03|A0A163TZ03_9RHOB 6-carboxy-5,6,7,8-tetrahydropterin synthase OS=Labrenzia sp. OB1 OX=1561204 GN=OA90_23350 PE=3 SV=1
MFRIRKEFHFSASHQLSHLPDDHQCAWLHGHNYIVVVELASETLNTEGFVRDYHDLKPLKTYIDATFDHRHLNDVLEVPSTAENMAKHFHDWCAARWPETSAVLVSETPKTWAEYRP

SEQ ID NO: 21568 - protein, 132 aa, unidentified
  source 1..132: note = Labrenzia suaedae
  REGION 1..132: note = tr|A0A1M7I044|A0A1M7I044_9RHOB 6-pyruvoyl-tetrahydropterin synthase OS=Labrenzia suaedae; OX = 735517 GN=SAMN05444272_2385 PE=4 SV=1
MFAVEVRDHIMIAHSLPRPVFGPAQGMHGATFVVDAAFFTKDVDEDGLAVDIGAATEVLGEVLKPLNYQNLDEVPVFQGKVTTTEVIAKHIFDRLAEAVRDKKLGEGSHRICRLKVTLHESHAARGWYEADL

SEQ ID NO: 21569 - protein, 118 aa, unidentified
  source 1..118: note = Labrenzia suaedae
  REGION 1..118: note = tr|A0A1M7N3J6|A0A1M7N3J6_9RHOB 6-carboxy-5,6,7,8-tetrahydropterin synthase OS=Labrenzia suaedae OX=735517 GN=SAMN05444272_3683 PE=3 SV=1
MFRIFKEFHFSASHQLHGLAEDHPCARLHGHNYVVEVELQSETLDSTGFVRDYRELAPFKAYVDDQLDHRHLNDVLGDDCVTAERMARHFYNWCKARWPEVSAVRVKETPKTCAEYRP

SEQ ID NO: 21570 - protein, 117 aa, Labrys neptuniae
  REGION 1..117: note = tr|A0A5C1WFX4|A0A5C1WFX4_9RHIZ 6-carboxy-5,6,7,8-tetrahydropterin synthase OS=Labrys neptuniae OX=376174 GN=queD PE=3 SV=1
MKITQAFTFEAAHRLPNVPQTHRCHRMHGHSYRVELGLEGPVDPHTGFVVDFFDVEAAFGPLLQRLDHYCLNEIEGLENPTAENIAIWIWDRVKPLLPLVASVKVYETPQCWAEYEG

SEQ ID NO: 21571 - protein, 131 aa, Laceyella sacchari
  REGION 1..131: note = tr|A0A4R4AI03|A0A4R4AI03_LACSH 6-carboxy-5,6,7,8-tetrahydropterin synthase OS=Laceyella sacchari OX=37482 GN=EDC32_10221 PE=3 SV=1
MRIMPGKYTLVKHFWISCAHRVPGAGKCDRLHGHNYKITFCVEGTQLDEQQMLIDFRQVKHAIEKKYDHNLLNEFPEFDPAQGGHAPTTEKVAEVFFLTIEELCEQKSNRPIVKWVEVEETNEAFARYERV

SEQ ID NO: 21572 - protein, 128 aa, Laceyella sacchari
  REGION 1..128: note = tr|A0A2I7SV46|A0A2I7SV46_LACSH 6-carboxy-5,6,7,8-tetrahydropterin synthase OS=Laceyella sacchari OX=37482 GN=C1X05_13715 PE=3 SV=1
MPGKYTLVKHFWISCAHRVPGAGKCDRLHGHNYKITFCVEGTQLDEQQMLIDFRQVKHAIEKKYDHHLLNEFPEFDPAQGGHAPTTEKVAEVFFLAIEELCEQKSNRPIVKWVEVEETNEAFARYERV

SEQ ID NO: 21573 - protein, 131 aa, Laceyella sediminis
  REGION 1..131: note = tr|A0A2T0YHU6|A0A2T0YHU6_9BACL 6-carboxy-5,6,7,8-tetrahydropterin synthase OS=Laceyella sediminis OX=573074 GN=CLV36_10522 PE=3 SV=1
MRIMPGKYTLVKHFWISCAHRVPGAGKCDRLHGHNYKITFCVEGTQLDEQQMLIDFRQVKHAIEKKYDHHLLNEFPEFDPAQGGHAPTTEKVAEVFFLAIEELCEQKSNRPIVKWVEVEETNEAFARYERV

SEQ ID NO: 21574 - protein, 133 aa, Lachnobacterium bovis
  REGION 1..133: note = tr|A0A1H9UMG6|A0A1H9UMG6_9FIRM 6-carboxy-5,6,7,8-tetrahydropterin synthase; OS = Lachnobacterium bovis OX=140626 GN=SAMN02910429_02178; PE = 3 SV=1
MYSVSTEGSFDAAHFLANYQGKCRNLHGHRWRVVIEVKSETLKEGMVIDFTDIKKDLKDMLENYDHSLIIEENTASEKLLEALKEDDYKINIVKFRPTAENFAYFFFTELKKKYNISKVKVYETPNNCATYEE

SEQ ID NO: 21575 - protein, 133 aa, Lachnobacterium bovis
  REGION 1..133: note = tr|A0A1H3LS64|A0A1H3LS64_9FIRM 6-carboxy-5,6,7,8-tetrahydropterin synthase; OS = Lachnobacterium bovis DSM 14045 OX=1122142; GN = SAMN02910414_02093 PE=3 SV=1
MYSVRTEGSFDAAHFLANYQGKCRNLHGHRWRVIIEVKSETLENGMVIDFTEIKKDLKDMLEQYDHSLIIEENTASEKLLEALNEDDYKINIVKFRPTAENFAHFFFSELKKKYNISKVKVYETPNNCAIYEE

SEQ ID NO: 21576 - protein, 158 aa, unidentified
  source 1..158: note = Lachnoclostridium sp.
  REGION 1..158: note = tr|A0A3D1FRB9|A0A3D1FRB9_9FIRM Rubredoxin; OS = Lachnoclostridium sp. OX=2028282 GN=DEQ64_18260 PE=4; SV = 1
MRSITKLNIQYSHRFLNYEGEAQYLHGHTGLLTIEVDGDVDGRTGFVYPCNSIKRIAWDYLKNFDHALILQKEDPILPEILKVYEAQGIRNGAETNTMIGEPFDTALAKAYPECRLVVVEKVATCENLIEVFYSLLKDKLNIKKMTFASGDNCASAEF

SEQ ID NO: 21577 - protein, 151 aa, unidentified
  source 1..151: note = Lachnoclostridium sp.
  REGION 1..151: note = tr|A0A3B9K4F2|A0A3B9K4F2_9FIRM 6-carboxytetrahydropterin synthase QueD; OS = Lachnoclostridium sp. OX=2028282 GN=DCG70_00535 PE=4; SV = 1
MYRIRNEQSFDSAHFLKDYIGKCHNLHGHRWRVVVEAAGERLSRETQTRGMLFDFGDMKAALKELCDALDHCFIYEEGSLRESTVKALREEDFRLVEVPFRPTAENFARYFFEEMRKKGFSMSRVEVYETPNNCAVYEETETGTDTGVFGE

SEQ ID NO: 21578 - protein, 135 aa, Lachnospira multipara
  REGION 1..135: note = tr|A0A1H5UE47|A0A1H5UE47_9FIRM 6-carboxy-5,6,7,8-tetrahydropterin synthase OS=Lachnospira multipara OX=28051 GN=SAMN05216537_10737 PE=3 SV=1
MYSVTTKAEFDAAHFLAGYPGKCKNLHGHRWSIEATLKGEELDELGMLVDFTDIKRDLKEICDNFDHSLIMKKDSLKPATLEALMDEGFKINIMDFMPTAEGFAKFFFEELEKKNYPIVEIKVYETPKNYAIYTK

SEQ ID NO: 21579 - protein, 140 aa, Lachnospira pectinoschiza
  REGION 1..140: note = tr|A0A174G5E5|A0A174G5E5_9FIRM 6-carboxy-5,6,7,8-tetrahydropterin synthase OS=Lachnospira pectinoschiza OX=28052 GN=ERS852499_00011 PE=3 SV=1
MYTLKTEHSFDAAHFLYGYEGKCSNIHGHRWRVVAEVSSDELETTGQNRGMYVDFGDLKKDLKEIVDYLDHCLIIETGSLKETTLKALQDENFRIIQFAFRPTAENMAKYFYDKMIGRGYRVKQITVYETPNNAASYTQD

SEQ ID NO: 21580 - protein, 154 aa, Lachnospira pectinoschiza
  REGION 1..154: note = tr|A0A174MS35|A0A174MS35_9FIRM 6-pyruvoyl tetrahydropterin synthase-related domain OS=Lachnospira pectinoschiza OX=28052 GN=ERS852499_01989 PE=4 SV=1
MAVKLYREYRIKFYLNMRHYIIIDGKKGEIHPHTWEFALDIKFGRSSFVEFNIFEKGIANFLEKYQNKVLNDEEPFDSIMPTLENVTDYFSSEFYRIIHDIGGMMTRLEASETPTRSYIVNMAEQEGNAQINADTENIILSEVMDAVLDDLTEG

SEQ ID NO: 21581 - protein, 139 aa, unidentified; identical to SEQ ID NO: 17474
  source 1..139: note = Lachnospiraceae bacterium
  REGION 1..139: note = tr|R5Z0T1|R5Z0T1_9FIRM 6-carboxy-5,6,7,8-tetrahydropterin synthase; OS = Lachnospiraceae bacterium CAG:25 OX=1262984; GN = BN562_02042 PE=3 SV=1

SEQ ID NO: 21582 - protein, 187 aa, unidentified
  source 1..187: note = Lachnospiraceae bacterium
  REGION 1..187: note = tr|A0A350V7X3|A0A350V7X3_9FIRM Rubredoxin; OS = Lachnospiraceae bacterium OX=1898203 GN=DCX82_02960; PE = 4 SV=1
MRSITTLNLQYAHRFYGFKGEAQYLHGHTGTLTIEVEDSVNSGVNMVFPCNEIQKTAWGVLKNFDHALILREDDPLLPAILGVYEQQGIKDGAPNNQMKGPAFKTALATAYPECRLVVTKETMTVEGMIKIVYDLLKDKLNIAKLTFTSGDNAASEEFQTNNKIDRCPLCGIALDANGVCPKCGYRK

SEQ ID NO: 21583 - protein, 146 aa, unidentified
  source 1..146: note = Lachnotalea glycerini
  REGION 1..146: note = tr|A0A255IR36|A0A255IR36_9FIRM 6-carboxy-5,6,7,8-tetrahydropterin synthase OS=Lachnotalea glycerini OX=1763509 GN=queD PE=3 SV=1
MYYLKSEQCFDSAHFLADYEGKCKNIHGHRWRVVVEVMSLVLQDEKQLKGMVVDFAKLKQDIKKEVDYLDHALLIEKNSLKITTLQALREEGFRIIELDFRPTAELFARYFYNKMVKKGYQMKRATIYETPNNCASYEEDSCLSIR

SEQ ID NO: 21584 - protein, 151 aa, Lacibacter cauensis
  REGION 1..151: note = tr|A0A562SQA3|A0A562SQA3_9BACT 6-pyruvoyltetrahydropterin/6-carboxytetrahydropterin synthase OS=Lacibacter cauensis OX=510947 GN=IQ13_1514; PE = 4 SV=1
MLLLTKIFDFETAHAIDGYNGLCKNIHGHSYELHVTVGSIVNENAFLPAPGFLLDFKDLKTIVQKAVVDLFDHKLVLSHNYIAQHPEVLEQENLVSWDAEPTAENLLLFIKWAIQDELPTDMKLVELRLYETKNSYATWKEEVEVYQGDIW

SEQ ID NO: 21585 - protein, 136 aa, Lacibacter cauensis
  REGION 1..136: note = tr|A0A562SFE3|A0A562SFE3_9BACT 6-pyruvoyltetrahydropterin/6-carboxytetrahydropterin synthase OS=Lacibacter cauensis OX=510947 GN=IQ13_3869; PE = 4 SV=1
MVYLTRLEHFNAAHKLYNPNWTPEKNEAMFGKCANENWHGHNYDLFVTIKGHVNEDTGFLFDVKKLSEIIKEHILEKLDHKNLNIDVDFMRGKMCSTENLAKAIWQQLAPHLPEEVKLHCIKLYETPRIYVEYFGE

SEQ ID NO: 21586 - protein, 137 aa, Lacibacter sp.
  REGION 1..137: note = tr|A0A4Q1CPY8|A0A4Q1CPY8_9BACT 6-carboxytetrahydropterin synthase OS=Lacibacter sp. TTM-7; OX = 2508719 GN=ESA94_07330 PE=4 SV=1
MQKKVSVFRHEHFNAAHRLYNPAWTDEKNDAVFGKCNNPSFHGHNYELVVKVTGVPDAATGYVMDLKMLSDLIHREVHDRFDHKNLNLDTEEFKNINPTAENIAIVIYELLRPHIDADKEMQIRLYETPRNFVEYPA

SEQ ID NO: 21587 - protein, 151 aa, Lacibacter sp.
  REGION 1..151: note = tr|A0A4Q1CHD3|A0A4Q1CHD3_9BACT 6-carboxytetrahydropterin synthase OS=Lacibacter sp. TTM-7; OX = 2508719 GN=ESA94_11745 PE=4 SV=1
MLLLTKIFDFETAHAIDGYNGMCRNIHGHSYELHVTVGSLVNENMFLPAPGFLLDFKDLKQIVQKAVVDLFDHKLVLSHNYIAQHPEVMDQENLVAWDAEPTAENLLLFIKWAIQDELPDDMKLVELRLYETKNSYATWKEEVEVYQGDIW

SEQ ID NO: 21588 - protein, 190 aa, unidentified
  source 1..190: note = Lacimicrobium alkaliphilum
  REGION 1..190: note = tr|A0A0U3AH35|A0A0U3AH35_9ALTE QueD like protein; OS = Lacimicrobium alkaliphilum OX=1526571 GN=AT746_03115; PE = 4 SV=1
MELTLILLMILIVIGVAAVKLNGETLAFPFKKRTNLFTPVERSFLDMLEKAIGDQYRVICRVKLSDVVALRQGTDKKTARSAMSRAGSRHLDFVLCDREDLSPVVAIDLVSPKGKEGYKGQRDWFVSSTLDAARIPHLRIKIKSGYSKEEIRNCIEAKLAPVRYKEPAKPLIQGTNKSQDKPGMRRPVTA

SEQ ID NO: 21589 - protein, 293 aa, unidentified
  source 1..293: note = Lacimicrobium alkaliphilum
  REGION 1..293: note = tr|A0A0U2ZHX2|A0A0U2ZHX2_9ALTE 6-pyruvoyl tetrahydropterin synthase OS=Lacimicrobium alkaliphilum; OX = 1526571 GN=AT746_10105 PE=4 SV=1
MQLFVNDLTVMDFSYLCPERGMVGESWIVDVILDGGLNEESMVLDFAKVKKQLKRLIDDHVDHKLLIPAEHPYSQITHEQQSDQVWVDFMRSHGRSIHLYCPAEAYAFIYAAQISMDSVSSYLKEVIATHLPQNVEGLTLMLRCEEINEPYYHYTHGLKKHEGNCQRIAHGHRSRVKVFADGAPETDAQQYWARRWRDIYIGTREDLVSETSLHLSQLARAQDLNEHCLFSYESSQGLFELAIAESECDLIDTDSTVECLAQFMADELKALQPEKSFTVRAYEGVGKGAIASA

SEQ ID NO: 21590 - protein, 136 aa, Lacinutrix sp.
  REGION 1..136: note = tr|A0A4U0EX20|A0A4U0EX20_9FLAO 6-carboxy-5,6,7,8-tetrahydropterin synthase OS=Lacinutrix sp. CAU 1491 OX=2565367 GN=E5167_06740 PE=3 SV=1
MKVTVSRKAHFNAAHRLYRKDWSHEKNDEVFGKCNNPNFHGHNYELIVSVTGDIDQETGYVIDMKVLKDIIKEEVEDAFDHKNLNIEVPEFKDLNPTAENIVVVIYNKIKPKLKASFDLEITLYETPRNFVTYPGN

SEQ ID NO: 21591 - protein, 135 aa, Lacinutrix sp.
  REGION 1..135: note = tr|F6GE76|F6GE76_LACS5 6-carboxy-5,6,7,8-tetrahydropterin synthase OS=Lacinutrix sp. (strain 5H-3-7-4) OX=983544 GN=Lacal_1837 PE=3 SV=1
MKVTVSRRAHFNAAHRLYRKDWSETKNNAVFGKCNNPNYHGHNYELIASVTGNIDQETGYVIDMKVLKQIIKTEIEDAFDHKNLNLDVPEFKTLNPTAENIVVIIYNKIKAKLESHLDLEITLYETPRNFVTYSG

SEQ ID NO: 21592 - protein, 149 aa, unidentified
  source 1..149: note = Lacinutrix venerupis
  REGION 1..149: note = tr|A0A420ZGQ2|A0A420ZGQ2_9FLAO 6-carboxy-5,6,7,8-tetrahydropterin synthase OS=Lacinutrix venerupis OX=1486034 GN=CLV86_1742 PE=3 SV=1
MGNIRITKLFTFETGHALYGYDGKCKNVHGHSYKLSVTVFGQPISDNTNVKFGMVIDFSDLKKIVKEEIVDVFDHATVFNKNTPHVDLARELQNRGHNVLLVDYQPTSEMMVIDFAKKIKKRLPENIQLHSLKLQETESSYAEWYASEN

SEQ ID NO: 21593 - protein, 135 aa, unidentified
  source 1..135: note = Lacinutrix venerupis
  REGION 1..135: note = tr|A0A420ZIB6|A0A420ZIB6_9FLAO 6-carboxy-5,6,7,8-tetrahydropterin synthase OS=Lacinutrix venerupis OX=1486034 GN=CLV86_1664 PE=3 SV=1
MRVTVSRKAHFNAAHRLYRKDWSDEKNDLIFGKCNNPNYHGHNYDLIVSVTGEIDTETGYVIDLKLLKEIIESEVEIAFDHKNLNLDVPEFKALNPTAENIAIVIYNKIKPKLPSHLDLEITLYETPRNFVSYSG

SEQ ID NO: 21594 - protein, 121 aa, Lactobacillus acidophilus
  REGION 1..121: note = tr|A0A3A9YA85|A0A3A9YA85_LACAI 6-pyruvoyl tetrahydropterin synthase OS=Lactobacillus acidophilus; OX = 1579 GN=D7H66_09845 PE=4 SV=1
MVKIKKNYKITSFLNASFTINYKRETDHKRANTFEIVCFISTNEKFIPFSDFENAIEKVIKPLSNKYLNDLPQFESKFFSTEMLSEYLATEISKELKIIKSKLHRIEVSEDPIRTVCLEVK

SEQ ID NO: 21595 - protein, 121 aa, Lactobacillus acidophilus; identical to SEQ ID NO: 21594
  REGION 1..121: note = tr|Q5FMK3|Q5FMK3_LACAC Putative 6-pyruvoyl-tetrahydropterin synthase OS=Lactobacillus acidophilus (strain ATCC 700396 / NCK56 / N2 / NCFM); OX = 272621 GN=LBA0170 PE=4SV=1

SEQ ID NO: 21596 - protein, 123 aa, Lactobacillus alimentarius
  REGION 1..123: note = tr|A0A2K9HPS5|A0A2K9HPS5_9LACO 6-pyruvoyl tetrahydropterin synthase OS=Lactobacillus alimentarius DSM 20249 OX=1423720 GN=LA20249_10155 PE=4 SV=1
MNKYYHTYKIKYYVNASHAMRWKDGEGKQHNHTWEIICEIHSKGDHMIVFNDIEDEMKSIFNTFSGKFLNKLPYFKKVNPTTENVTVWLFNRLTPVLEKLDAELVRIEVGESPTRSYCIDIRH

SEQ ID NO: 21597 - protein, 121 aa, Lactobacillus amylovorus
  REGION 1..121: note = tr|E4SK51|E4SK51_LACAR Putative 6-pyruvoyl-tetrahydropterin synthase OS=Lactobacillus amylovorus (strain GRL 1112) OX=695560 GN=LA2_00990 PE=4; SV = 1
MEKGRGSYKIISFLNAFTTFRMGNHIGSRNANTFEITCYIQTTKNFVTFSELEDAVNNVVRSLTDKDLNMLPKFANKDFSVEILTEYLAVMINNELFVNGNRLVKIEVAQSPTKIFCLDFE

SEQ ID NO: 21598 - protein, 124 aa, Lactobacillus apodemi
  REGION 1..124: note = tr|A0A0R1U5J5|A0A0R1U5J5_9LACO Uncharacterized protein OS=Lactobacillus apodemi DSM 16634 = JCM 16172; OX = 1423724 GN=FC32_GL001854 PE=4 SV=1
MIKKHHLKITSYLNAGHAIRWKDTTGKIHIHTWQIICMIGTLDALTFPQYKFTTIEKVLDEVLEPFSQSTLNHIPPFDQLNPTIENFTDYLFDRFNEALKKLDCQLLSLEVSESPTRTCVITAL

SEQ ID NO: 21599 - protein, 76 aa, Lactobacillus aquaticus
  REGION 1..76: note = tr|A0A0R2D4I0|A0A0R2D4I0_9LACO Uncharacterized protein OS=Lactobacillus aquaticus DSM 21051 OX=1423725; GN = FC19_GL002160 PE=4 SV=1
MIFSDIEKALNGVFENISGGFLNTLEDFKERNPTVENVTLWLYRLITHALEQLDVQLTRLEVSESPTRTYCITISD

SEQ ID NO: 21600 - protein, 148 aa, Lactobacillus brevis
  REGION 1..148: note = tr|A0A3B8F0R0|A0A3B8F0R0_LACBR 6-pyruvoyl tetrahydropterin synthase OS=Lactobacillus brevis OX=1580; GN = D8911_04525 PE=4 SV=1
MPKQRSYKIKSYVNASHAVRWKSGTGKKHNHTWEIVCELHVFEGMVSFFDIEKSLNKAIDALSGKYLNDLPEFKVINPTVENVTEYLFNQIDGILRQNNAVLLRIEVSDSPTRSYCIDITERQFPTKEAVLAQEDAAGKPATQADDHA

SEQ ID NO: 21601 - protein, 142 aa, Lactobacillus brevis
  REGION 1..142: note = tr|U2PK36|U2PK36_LACBR 6-pyruvoyl tetrahydropterin synthase domain protein OS=Lactobacillus brevis ATCC 14869 = DSM 20054 OX=649758 GN=HMPREF0495_01153 PE=4 SV=1
MKQRSYKIKSYVNASHAVRWESGTGKKHNHTWEIVCELHVFEGMVSFFEIEKSLNKAINALSGQYLNDLPEFQVINPTVENVTEYLFNEIDSILRQNNAVLLRIEVSDSPTRSYCIDITERQFPTEAEVLPDQSASQDDIDA

SEQ ID NO: 21602 - protein, 123 aa, Lactobacillus capillatus
  REGION 1..123: note = tr|A0A0R1M9Y8|A0A0R1M9Y8_9LACO Uncharacterized protein OS=Lactobacillus capillatus DSM 19910 OX=1423731; GN = FC81_GL001589 PE=4 SV=1
MAQLNYSYRIKTFFNAGHAVRWEKGTGKRHSHTWEVVCELRSQSEQTVIFSDIEETLNSIFEKISGSFLNTLDEFKEVNPTVENITLWLYRLMTPVLEPLGVSLIRLEVSESPTRSYCITVSD

SEQ ID NO: 21603 - protein, 127 aa, Lactobacillus collinoides
  REGION 1..127: note = tr|A0A0R2B5D9|A0A0R2B5D9_LACCL 6-pyruvoyl-tetrahydropterin synthase OS=Lactobacillus collinoides DSM 20515 = JCM 1123 OX=1423733; GN = FC82_GL000157 PE=4 SV=1
MPEEEQYHTYKIKSYVNASHAMRWKDGEGKEHNHTWEITCEIHSLNDHMIIFNDLENTIKDILNSFAGKFLNQLPYFKEINPTVENVTIWLFNLISPALREEQAKLIRIEVSESPTRAYCISVRDDE

SEQ ID NO: 21604 - protein, 127 aa, Lactobacillus collinoides; identical to SEQ ID NO: 21603
  REGION 1..127: note = tr|A0A166GPF7|A0A166GPF7_LACCL 6-pyruvoyl tetrahydropterin synthase OS=Lactobacillus collinoides; OX = 33960 GN=TY91_09800 PE=4 SV=1

SEQ ID NO: 21605 - protein, 56 aa, Lactobacillus concavus
  REGION 1..56: note = tr|A0A0R1VTI4|A0A0R1VTI4_9LACO Uncharacterized protein OS=Lactobacillus concavus DSM 17758 OX=1423735; GN = FC15_GL001852 PE=4 SV=1
MNELPYFKTINPTVENVTEWLFDLITPKLEELSARLIRIEVSESPTRSYCISVEDD

SEQ ID NO: 21606 - protein, 122 aa, Lactobacillus crispatus
  REGION 1..122: note = tr|E3R437|E3R437_9LACO 6-pyruvoyl tetrahydropterin synthase-related domain protein OS=Lactobacillus crispatus CTV-05 OX=440496 GN=LBKG_01062 PE=4 SV=1
MTTKYHTYIFTTYLNASHAIRWSKGIGQAHSHTYEIRYSFHINNGKLIRFNEIENKIAEIIKKFNNQFLNEVEPFTKVNPTLENLTDYLFNRFGEELNKLNCSLDEISVSESPMRTYQISIR

SEQ ID NO: 21607 - protein, 122 aa, Lactobacillus crispatus; identical to SEQ ID NO: 21606
  REGION 1..122: note = tr|D0DEI7|D0DEI7_9LACO 6-pyruvoyl tetrahydropterin synthase-related domain protein OS=Lactobacillus crispatus MV-3A-US OX=575597 GN=HMPREF0508_00076 PE=4 SV=1

SEQ ID NO: 21608 - protein, 127 aa, Lactobacillus crustorum
  REGION 1..127: note = tr|A0A512GUP5|A0A512GUP5_9LACO 6-pyruvoyltetrahydropterin synthase OS=Lactobacillus crustorum OX=392416 GN=LCR01_13180 PE=4 SV=1
MNIEGYQTYNTYKLTSYINASHAVRWEGGMGKEHMHTWAVVCEIHVNNDLMVPFNEIENQLKEVSSRVSGKFLNEVPPFDHVNPTLENLTTYFFQVINDLLRKNNAVLTRLEIGESPTRFYCIEMKH

SEQ ID NO: 21609 - protein, 98 aa, Lactobacillus crustorum
  REGION 1..98: note = tr|A0A1L7IE15|A0A1L7IE15_9LACO Uncharacterized protein OS=Lactobacillus crustorum OX=392416 GN=BI355_1475; PE = 4 SV=1
MGKEHMHTWAVVCEIHVNNDLMVPFNEIENQLKEVSSRVSGKFLNEVPPFDHVNPTLENLTTYFFQVINDLLRKNNAVLTRLEIGESPTRFYCIEMKH

SEQ ID NO: 21610 - protein, 123 aa, Lactobacillus fabifermentans
  REGION 1..123: note = tr|W6TCP2|W6TCP2_9LACO 6-pyruvoyl-tetrahydropterin synthase OS=Lactobacillus fabifermentans T30PCM01; OX = 1400520 GN=LFAB_05810 PE=4 SV=1
MPQVHTYKIISYINASHAVRWAGGTGKPHNHTWEVISEIQLDQEQLIPFNDIEALINSVFEPYTNQYLNEVPPFDQTNPTLENITKLVFKKLSAVMAANQSRLVRLEVGESPTRFYCISLKGD

SEQ ID NO: 21611 - protein, 89 aa, Lactobacillus fabifermentans
  REGION 1..89: note = tr|A0A0R2NHX4|A0A0R2NHX4_9LACO Uncharacterized protein OS=Lactobacillus fabifermentans DSM 21115; OX = 1413187 GN=DY78_GL001248 PE=4 SV=1
MISEIQLDQEQLIPFNDIEALINSVFEPYTNQYLNEVPPFDQTNPTLENITKLVFKKLSAVMAANQSRLVRLEVGESPTRFYCISLKGD

SEQ ID NO: 21612 - protein, 103 aa, Lactobacillus farciminis
  REGION 1..103: note = tr|A0A4R5NHS6|A0A4R5NHS6_9LACO Uncharacterized protein OS=Lactobacillus farciminis OX=1612; GN = C5L30_001252 PE=4 SV=1
MRWENGEGKQHNHTWEIVCEIHSKNDQMIVFNDIEKKLKEVCDTFEGKFLNKLPAFQYVNPTTENVAMWLFNLFTPRLEELNAELVRLEVGESPTRSYCKSSA

SEQ ID NO: 21613 - protein, 123 aa, Lactobacillus farciminis
  REGION 1..123: note = tr|A0A0H4LBN1|A0A0H4LBN1_9LACO 6-pyruvoyl tetrahydropterin synthase OS=Lactobacillus farciminis; OX = 1612 GN=ABB44_05960 PE=4 SV=1
MMRYQYHTYKIKYYVNASHAMRWENGEGQQHNHTWEIVCEIHSKNDQMIVFNDIEKKIKEVCDTFEGKFLNKLPAFQYVNPTTENVTMWLFNLFTPRLEELNAELVRLEVGESPTRSYCISLY

SEQ ID NO: 21614 - protein, 129 aa, unidentified
  source 1..129: note = Lactobacillus formosensis
  REGION 1..129: note = tr|A0A2P4R786|A0A2P4R786_9LACO 6-pyruvoyl tetrahydropterin synthase OS=Lactobacillus formosensis; OX = 1617889 GN=C2R26_04780 PE=4 SV=1
MKLNIEGYQTYNTYKLTSYINASHAVRWEGGMGKEHMHTWAVVCEIHVNNDLMVPFNEIENQLKEVSSRVSGKFLNEVPPFDHVNPTLENLTTYFFQVINDLLRKNNAVLTRLEIGESPTRFYCIEMKH

SEQ ID NO: 21615 - protein, 73 aa, Lactobacillus futsaii
  REGION 1..73: note = tr|A0A5B7T114|A0A5B7T114_9LACO 6-pyruvoyl tetrahydropterin synthase OS=Lactobacillus futsaii; OX = 938155 GN=FG051_01890 PE=4 SV=1
MCHIEKKLKEVCDTFEGKFLNKLPAFQYVNPTTENVTMWLFNLFTPRLEELNAELVRLEVGESPTRSYCISLY

SEQ ID NO: 21616 - protein, 142 aa, Lactobacillus hammesii
  REGION 1..142: note = tr|A0A0R1UJ44|A0A0R1UJ44_9LACO Uncharacterized protein OS=Lactobacillus hammesii DSM 16381 OX=1423753; GN = FD28_GL001150 PE=4 SV=1
MQKQRSYKIKSYVNASHAVRWKSGTGKKHNHTWEIVCELHVFEGMVSFFDIEKSLNTAIDELSGKYLNDLPEFKVINPTVENVTEYLFNEIDGILRKNNAVLLRIEVSDSPTRSFCIDITERQFPTQAEVMADQAKQEDDHA

SEQ ID NO: 21617 - protein, 126 aa, unidentified
  source 1..126: note = Lactobacillus heilongjiangensis
  REGION 1..126: note = tr|A0A0K2LF17|A0A0K2LF17_9LACO 6-pyruvoyl tetrahydropterin synthase OS=Lactobacillus heilongjiangensis OX=1074467 GN=JP39_11150 PE=4 SV=1
MNIDGYETYSTYKLTSYINASHAVRWEGGMGKEHMHTWAVICEIHVNNNQMVPFNQIENELKEVSSRVSGKFLNEVPPFDHVNPTLENLTTYFFQVITELLRRNNAVLTRLEIGESPTRFYCITLK

SEQ ID NO: 21618 - protein, 110 aa, Lactobacillus hordei
  REGION 1..110: note = tr|A0A0R1MSV9|A0A0R1MSV9_9LACO 6-pyruvoyl-tetrahydropterin synthase OS=Lactobacillus hordei DSM 19519 OX=1423759 GN=FC92_GL001856 PE=4 SV=1
MRWENGTGEKHNHTWELICEIGINDEKMIIFNDIDKVIDGVTSYFSGKFLNDLPEFEDKNPSLENLTEILFKLFEAPLHEINASLIKLEVGESPTRFYAITSSLFFGEKQ

SEQ ID NO: 21619 - protein, 129 aa, Lactobacillus hordei
  REGION 1..129: note = tr|A0A3S6QPC4|A0A3S6QPC4_9LACO 6-pyruvoyl tetrahydropterin synthase OS=Lactobacillus hordei; OX = 468911 GN=BSQ49_04455 PE=4 SV=1
MSKLYRTYRIRSYVNASHAMRWENGTGEKHNHTWELICEIGINDEKMIIFNDIDKVIDGVTSYFSGKFLNDLPEFEDKNPSLENLTEILFKLFEAPLHEINASLIKLEVGESPTRFYAITSSLFFGEKQ

SEQ ID NO: 21620 - protein, 125 aa, Lactobacillus ingluviei
  REGION 1..125: note = tr|A0A0R2H3K6|A0A0R2H3K6_9LACO 6-pyruvoyl tetrahydropterin synthase OS=Lactobacillus ingluviei; OX = 148604 GN=IV41_GL000452 PE=4 SV=1
MKKMEKRYSYRLHFYLNASHAMRWNNQLGEEHPHTWELICQVARGSDEHFIRFNEIEEQIQTIIDPLQGQFLNLVPPFDQENPSLEQLGEYFFDQIDHQLATVHCFLTQLEIGESPTRFFLVKRG

SEQ ID NO: 21621 - protein, 125 aa, Lactobacillus ingluviei
  REGION 1..125: note = tr|A0A0R1U582|A0A0R1U582_9LACO 6-pyruvoyl tetrahydropterin synthase OS=Lactobacillus ingluviei DSM 15946 OX=1423760 GN=FC43_GL000343 PE=4 SV=1
MKKMEKRYSYRLHFYLNASHAMRWNNQMGEEHPHTWELICQVARGSDEHFIRFNEIEEQIQTIIDPLQGQFLNLVPPFDQENPSLEKLGEYFFDQIDHQLATVHCFLTQLEIGESPTRFFLVKRG

SEQ ID NO: 21622 - protein, 121 aa, Lactobacillus kalixensis
  REGION 1..121: note = tr|A0A0R1UI10|A0A0R1UI10_9LACO 6-pyruvoyl-tetrahydropterin synthase OS=Lactobacillus kalixensis DSM 16043 OX=1423763 GN=FC46_GL001750 PE=4 SV=1
MTKYHTYIFTTYLNASHAIRWIKGTGQAHPHTYEIRYSFHLNKDKLIQFNEIEEAIEKILKPFNNQFLNEVKPFDKTNPTLENLTNFLCDSFSEELEKANCSLDEISVSESPMRTYKITLN

SEQ ID NO: 21623 - protein, 113 aa, unidentified
  source 1..113: note = Lactobacillus kimchiensis
  REGION 1..113: note = tr|A0A0R2LJL6|A0A0R2LJL6_9LACO 6-pyruvoyl-tetrahydropterin synthase OS=Lactobacillus kimchiensis OX=993692 GN=IV57_GL002107 PE=4 SV=1
MTSYINASHAVRWEGGMGKEHMHTWAVICEIHVNNDRMVRFDAIEEELKEVSANVSGKFLNTVPPFDRINPTLENLTTYFFQVITDILRKSNAVLTRLEIGESPTRFYCITLR

SEQ ID NO: 21624 - protein, 123 aa, Lactobacillus koreensis
  REGION 1..123: note = tr|A0A0R1L1Q2|A0A0R1L1Q2_9LACO 6-pyruvoyl-tetrahydropterin synthase OS=Lactobacillus koreensis JCM 16448 OX=1423819 GN=FC99_GL001343 PE=4 SV=1
MGEVHTYKIKSYINASHAMRWESGTGQKHNHTWEVITEIQLDTEHLVRFNDIEDDLKGVSARYSGQFLNEIPPFDKINPSLENITRYFYKELTAVLAKSQAKLMRLEVGESPTRFYCIQHTDD

SEQ ID NO: 21625 - protein, 79 aa, Lactobacillus malefermentans
  REGION 1..79: note = tr|A0A4R5NL65|A0A4R5NL65_9LACO Uncharacterized protein OS=Lactobacillus malefermentans OX=176292; GN = C5L31_000314 PE=4 SV=1
MVIFNDMEKSVNEVLSLINGKFLNDLAYFETVNPSVENVTVYLFNLIRKELKKIHARLSRIEVGESPTRFYCLSVDEDE

SEQ ID NO: 21626 - protein, 110 aa, Lactobacillus mali
  REGION 1..110: note = tr|A0A0R2FXL2|A0A0R2FXL2_9LACO 6-pyruvoyl-tetrahydropterin synthase OS=Lactobacillus mali; OX = 1618 GN=IV36_GL000852 PE=4 SV=1
MKWKDGVGEKHTHTWELICEIGSNDGEMIIFNDIDKAINRVTTYFSGEFLNDLPEFAKKNPSLENLTEILFNLLENSLHEINASLMRLEVGESPTHFYALTSSLFFGRDE

SEQ ID NO: 21627 - protein, 126 aa, Lactobacillus manihotivorans
  REGION 1..126: note = tr|A0A0R1RF74|A0A0R1RF74_9LACO 6-pyruvoyl tetrahydropterin synthase OS=Lactobacillus manihotivorans DSM 13343 = JCM 12514 OX=1423769 GN=FD01_GL002615 PE=4 SV=1
MSKVYSYKLKSYLNASHAVRWKGGTGQVHNHTWEIVCELHTIQDMVAFDRLEQALHGVLDNLSGKFLNDLPEFETVNPSVENVASYLFDQIDTVLRAEGARLVRIEVSDSPTRAYCIDIRDTPLPD

SEQ ID NO: 21628 - protein, 97 aa, Lactobacillus mindensis
  REGION 1..97: note = tr|A0A0R1QE71|A0A0R1QE71_9LACO Uncharacterized protein OS=Lactobacillus mindensis DSM 14500 OX=1423770; GN = FD29_GL001208 PE=4 SV=1
MHTWAVICEIHVNNDCMVPFNAIEAELKEVSARVSGKFLNEVPPFDRINPTLENLTTYFFEVISNILRKSNAVLTRLEIGESPTRFYCMTLDQWSGQ

SEQ ID NO: 21629 - protein, 122 aa, Lactobacillus nagelii
  REGION 1..122: note = tr|A0A0R1QND5|A0A0R1QND5_9LACO 6-pyruvoyl-tetrahydropterin synthase OS=Lactobacillus nagelii DSM 13675 OX=1122150 GN=FD45_GL002276 PE=4 SV=1
MTLKYSYKIRSFFNASHAVRWENGIGQQHTHTWEVVCELSSSADKTVIFKEIEDTIHKVFQTFSGKFLNNLPYFKETNPTVENVTVWLYQLLTEAFLALGIQLIRIEVGESPTRSYCISVAD

SEQ ID NO: 21630 - protein, 126 aa, Lactobacillus nantensis
  REGION 1..126: note = tr|A0A0R1WNN5|A0A0R1WNN5_9LACO 6-pyruvoyl-tetrahydropterin synthase OS=Lactobacillus nantensis DSM 16982 OX=1423774 GN=FD31_GL002364 PE=4 SV=1
MNINGFETYSTYKLTSYINASHAVRWEGGMGKEHMHTWAVICEIHVNDNQMVPFNQIENELKEVSSRISGKFLNEVPPFDHVNPTLENLTTYFFQVITELLRKNNAILTRLEIGESPTRFYCITLK

SEQ ID NO: 21631 - protein, 142 aa, Lactobacillus nodensis
  REGION 1..142: note = tr|A0A0R1K9K4|A0A0R1K9K4_9LACO 6-pyruvoyl tetrahydropterin synthase OS=Lactobacillus nodensis DSM 19682 = JCM 14932 = NBRC 107160 OX=1423775; GN = FD03_GL000057 PE=4 SV =1
MEKQRSYKIKSYVNASHAVRWKSGTGKKHNHTWEITCELHAFEGMVSFFDIEKSLHRAIDALSGKYLNDLPEFKTVNPTVENVTEYLFDEIDSILRANGAMLMRIEVSDSPTRAYCIDVTERQLPTEAEIKSEQNKQDESDA

SEQ ID NO: 21632 - protein, 79 aa, Lactobacillus paracollinoides
  REGION 1..79: note = tr|A0A0R1T485|A0A0R1T485_9LACO Uncharacterized protein OS=Lactobacillus paracollinoides DSM 15502 = JCM 11969 OX=1423785 GN=FC17_GL002607 PE=4 SV=1
MIIFNDLENTIKDILNSFAGKFLNTLPYFKDINPTVENVTVWLFDLISPALREEQAKLIRIEVSESPTRAYCISVRDDE

SEQ ID NO: 21633 - protein, 127 aa, Lactobacillus paracollinoides
  REGION 1..127: note = tr|A0A1B2IUH0|A0A1B2IUH0_9LACO 6-pyruvoyl tetrahydropterin synthase OS=Lactobacillus paracollinoides; OX = 240427 GN=AYR63_00120 PE=4 SV=1
MGEERQYHTYKIKSYVNASHAMRWEDGEGKEHNHTWEIVCEIHSLNDHMIIFNDLENTIKDILNSFAGKFLNTLPYFKDINPTVENVTVWLFDLISPALREEQAKLIRIEVSESPTRAYCISVRDDE

SEQ ID NO: 21634 - protein, 122 aa, Lactobacillus paraplantarum
  REGION 1..122: note = tr|A0A370AC98|A0A370AC98_9LACO 6-pyruvoyl tetrahydropterin synthase OS=Lactobacillus paraplantarum; OX = 60520 GN=DQM08_06390 PE=4 SV=1
MTTKQRTYKIKSYVNASHAVRWATGSGKKHTHTWEIVCELHTVDAMVAFYDIEKNLHQALDELSGKFLNDLPEFKTVNPTVENVTEYLFTKIDKTLRDNGAQLMRIEVSDSPTRAYCISVTE

SEQ ID NO: 21635 - protein, 122 aa, Lactobacillus paraplantarum
  REGION 1..122: note = tr|A0A512FG22|A0A512FG22_9LACO 6-pyruvoyltetrahydropterin synthase OS=Lactobacillus paraplantarum OX=60520 GN=LPA07_01920 PE=4 SV=1
MTTKQRTYKIKSYVNASHAVRWATGSGKKHTHTWEIVCELHTVDAMVAFYDIEKNLHQALDELSGKFLNGLPEFKTVNPTVENVTEYLFTKIDKTLRDNGAQLMRIEVSDSPTRAYCISVTE

SEQ ID NO: 21636 - protein, 122 aa, Lactobacillus pentosus
  REGION 1..122: note = tr|A0A2S9VU01|A0A2S9VU01_LACPE 6-pyruvoyl tetrahydropterin synthase OS=Lactobacillus pentosus; OX = 1589 GN=C6Y09_02565 PE=4 SV=1
MTTKQRSYKIKSYVNASHAIRWATGSGKKHTHTWEIVCELHTVDAMVAFYDIEKNLHQALDELSGKFLNDLPEFKTVNPTVENVTEYLFKKIDNTLRENGAQLMRIEVSDSPTRAYCISVTD

SEQ ID NO: 21637 - protein, 122 aa, Lactobacillus pentosus; identical to SEQ ID NO: 21636
  REGION 1..122: note = tr|I9L4H3|I9L4H3_LACPE 6-pyruvoyl-tetrahydropterin synthase family protein OS=Lactobacillus pentosus KCA1; OX = 1136177 GN=KCA1_0042 PE=4 SV=1

SEQ ID NO: 21638 - protein, 122 aa, Lactobacillus plantarum
  REGION 1..122: note = tr|A0A494RWI2|A0A494RWI2_LACPN 6-pyruvoyltetrahydropterin synthase OS=Lactobacillus plantarum subsp. argentoratensis OX=271881 GN=LPL03_24240; PE = 4 SV=1
MPTKQRTYKIKSYVNASHAVRWATGSGKKHTHTWEIVCELHTVDAMVAFYDIEKNLHQALDELSGKFLNDLPEFKTVNPTVENVTEYLFTKIDKTLRDNGAQLLRIEVSDSPTRAYCISVTE

SEQ ID NO: 21639 - protein, 122 aa, Lactobacillus plantarum; identical to SEQ ID NO: 21638
  REGION 1..122: note = tr|A0A151G617|A0A151G617_LACPN 6-pyruvoyl tetrahydropterin synthase OS=Lactobacillus plantarum; OX = 1590 GN=queD PE=4 SV=1

SEQ ID NO: 21640 - protein, 124 aa, Lactobacillus saerimneri
  REGION 1..124: note = tr|A0A0R1T3P4|A0A0R1T3P4_9LACO 6-pyruvoyl tetrahydropterin synthase OS=Lactobacillus saerimneri DSM 16049 OX=1122153 GN=FC54_GL000615 PE=4 SV=1
MKKTYGYRLRTYLNATHAMRWENSDGATHPHTWEIICKVRQNNDDEFLRFNEIEAAIQEVVTPLQGRLLNNVAPFTEINPSLENLGDYFFDEIDAHLQKLDCYLEQLEIGESPTRFFRVTRGEQ

SEQ ID NO: 21641 - protein, 124 aa, Lactobacillus saerimneri; identical to SEQ ID NO: 21640
  REGION 1..124: note = tr|M5J4M1|M5J4M1_9LACO 6-pyruvoyl-tetrahydropterin synthase OS=Lactobacillus saerimneri 30a OX=1227363; GN = D271_02844 PE=4 SV=1

SEQ ID NO: 21642 - protein, 122 aa, Lactobacillus salivarius
  REGION 1..122: note = tr|C2EFI5|C2EFI5_9LACO 6-pyruvoyl tetrahydropterin synthase-related domain protein OS=Lactobacillus salivarius DSM 20555 = ATCC 11741 OX=1423799; GN = HMPREF0545_0407 P E=4 SV=1
MGKIYSYRLKFYLNATHAMRWSDQIGEEHPHTWEIICQVMKKEQNHFIRFNDIEDQIQKIIEPLQNQFLNTLAPFDKTNPSLENLGDYFFDEINLQLHEINCYLHQLEIGESPTRFYVVNNE

SEQ ID NO: 21643 - protein, 122 aa, Lactobacillus salivarius; identical to SEQ ID NO: 21642
  REGION 1..122: note = tr|A0A089QCX1|A0A089QCX1_9LACO 6-pyruvoyl tetrahydropterin synthase OS=Lactobacillus salivarius; OX = 1624 GN=A8C48_09020 PE=4 SV=1

SEQ ID NO: 21644 - protein, 125 aa, Lactobacillus selangorensis
  REGION 1..125: note = tr|A0A0R2FPL4|A0A0R2FPL4_9LACO Uncharacterized protein OS=Lactobacillus selangorensis OX=81857; GN = IV38_GL000693 PE=4 SV=1
MATKYRTYKIRAFFNASHSLATTTVKRDKKTHNHTWEVVCEVHLNDPEKADADQANRLISNTLNTLSGHKLNHLEPFRKLEPTLENVTEYLADELDVDLAAKKVQLLRIEVGISPLRYYCITMMR

SEQ ID NO: 21645 - protein, 112 aa, Lactobacillus similis
  REGION 1..112: note = tr|A0A0R2EY73|A0A0R2EY73_9LACO 6-pyruvoyl-tetrahydropterin synthase OS=Lactobacillus similis DSM 23365 = JCM 2765 OX=1423804 GN=FD14_GL001101; PE = 4 SV=1
MNASHAMRWADGQGKQHNHTWEIISEFKSAGDHMIIFNDIERTLNDIFQTFSGKFLNELPAFQKINPTVENVTIWLFKLITDALDGLHADLIRLEVGESPTRSYCITVEDDE

SEQ ID NO: 21646 - protein, 125 aa, Lactobacillus sp.
  REGION 1..125: note = tr|A0A3D1DSQ2|A0A3D1DSQ2_9LACO 6-pyruvoyl tetrahydropterin synthase OS=Lactobacillus sp. OX=1591; GN = DEQ50_02085 PE=4 SV=1
MEGYQTYNTYKLTSYINASHAVRWEGGMGKEHMHTWAVVCEIHVNNDLMVPFNEIENQLKEVSSRVSGKFLNEVPPFDHVNPTLENLTTYFFQVINDLLRKNNAVLTRLEIGESPTRFYCIEMKH

SEQ ID NO: 21647 - protein, 122 aa, Lactobacillus sp.; identical to SEQ ID NO: 21638
  REGION 1..122: note = tr|A0A5D0DD72|A0A5D0DD72_9LACO 6-pyruvoyl tetrahydropterin synthase OS=Lactobacillus sp. LSI2-1; OX = 2604481 GN=FXE14_02090 PE=4 SV=1

SEQ ID NO: 21648 - protein, 87 aa, Lactobacillus sucicola
  REGION 1..87: note = tr|A0A0R2DTS0|A0A0R2DTS0_9LACO Uncharacterized protein OS=Lactobacillus sucicola DSM 21376 = JCM 15457; OX = 1423806 GN=FD15_GL002307 PE=4 SV=1
MCELSSQSEQTVIFSDIEKALNGVLGDISGVFLNTLSAFKETNPTVENVTLWLYQLIVPVLKPLAVRLTRLEVSESPTRTYCITVSD

SEQ ID NO: 21649 - protein, 128 aa, Lactobacillus tucceti
  REGION 1..128: note = tr|A0A0R1IYF5|A0A0R1IYF5_9LACO 6-pyruvoyl tetrahydropterin synthase OS=Lactobacillus tucceti DSM 20183 OX=1423811 GN=FC72_GL000582 PE=4 SV=1
MRWKSGTGKKHNHTWEITCELHVFEGMVSFFDIEKSLHRAIDALSGKFLNDLPEFKVVNPTVENVTEYLFNEIDAILRANGAMLMRIEVSDSPTRAYCIDITERTLPTEAEVEAETKSEQKQQEKPDA

SEQ ID NO: 21650 - protein, 93 aa, Lactobacillus uvarum
  REGION 1..93: note = tr|A0A0R1Q3Q9|A0A0R1Q3Q9_9LACO Uncharacterized protein OS=Lactobacillus uvarum DSM 19971 OX=1423812; GN = FD20_GL001023 PE=4 SV=1
MHTWEVVCELSSQSKQTVIFSDIEKALNGVFENISGTFLNTLDDFKELNPTVENVTLWLYHLIIPALNQLDVHLTRLEVSESPTRTYCITSSN

SEQ ID NO: 21651 - protein, 127 aa, Lactobacillus vaccinostercus
  REGION 1..127: note = tr|A0A0R2A2E6|A0A0R2A2E6_9LACO 6-pyruvoyl-tetrahydropterin synthase OS=Lactobacillus vaccinostercus DSM 20634 OX=1423813 GN=FC26_GL001498 PE=4; SV = 1
MSEMMPEEYHTYKIKSYVNASHAMRWEDGEGKQHNHTWEIICEIHTSNDHMIIFNDLEKAVNRVLAGISGQFLNQLAYFEKVNPTLENVTIYLFHLIGPELEKMQANLIRIEVGESPTRFYCISATE

SEQ ID NO: 21652 - protein, 123 aa, Lactobacillus vini
  REGION 1..123: note = tr|A0A0R2C9Z7|A0A0R2C9Z7_9LACO 6-pyruvoyl-tetrahydropterin synthase OS=Lactobacillus vini DSM 20605 OX=1133569 GN=FD21_GL002032 PE=4 SV=1
MANLVFSYRIKSFFNASHAIRWDSGIGQRHSHTWEVNCEFRSQQGQTVVFKDLEDKLNNIFQKFSGSFLNQLEYFQEINPTVENVAVWLYKLVTPAVETLKVRLIRLEVAESPTRSYCISVVD

SEQ ID NO: 21653 - protein, 122 aa, Lactococcus garvieae
  REGION 1..122: note = tr|K2NY66|K2NY66_9LACT 6-pyruvoyl-tetrahydropterin synthase-like protein OS=Lactococcus garvieae DCC43; OX = 1231377 GN=C426_0093 PE=4 SV=1
MKRIYRLKFYINASHAIRWEKGIGQKHNHTWEIVCEFKGLNDKFISFFEAEKVVRNILDKFEGTYLNETPTFQNINPTLENVTEVFFERLSQDIKKVDGQLVQVEIAEKPTHIFRIEAEDDL

SEQ ID NO: 21654 - protein, 122 aa, Lactococcus lactis
  REGION 1..122: note = tr|A0A0V8ASH7|A0A0V8ASH7_LACLL 6-pyruvoyl tetrahydropterin synthase OS=Lactococcus lactis subsp. lactis OX=1360 GN=E34_0707 PE=4 SV=1
MNNMRKNYKLKFYVNASHAIRWEKGEGKQHNHTWEIICEITTKNDHMIVFSDIEKAIELYFHKFLGVFLNEVYPFDELNPTLENFADFLFKEISKLVESFAAELIRIEVGETPVRFYCITKI

SEQ ID NO: 21655 - protein, 151 aa, unidentified
  source 1..151: note = Lacunisphaera limnophila
  REGION 1..151: note = tr|A0A1D8AUQ8|A0A1D8AUQ8_9BACT 6-carboxy-5,6,7,8-tetrahydropterin synthase; OS = Lacunisphaera limnophila OX=1838286 GN=queD_2 PE=4 SV=1
MPYRIAKTLTIESGHLLTKHRGRCRFPHGHSRTVEVVIAADQLDANDMVCDFKALKHALNEFLDRWDHAFCLNTADPQFAFFQQTYAERVIPFVATDPTSEVMARTIFDTLQRTLQEQAQDPTREYPIPTGVRLERVRVTETATSWAEYSA

SEQ ID NO: 21656 - protein, 159 aa, unidentified
  source 1..159: note = Lacunisphaera limnophila
  REGION 1..159: note = tr|A0A1D8ARI8|A0A1D8ARI8_9BACT 6-carboxy-5,6,7,8-tetrahydropterin synthase; OS = Lacunisphaera limnophila OX=1838286 GN=queD_1 PE=4 SV=1
MPKKSSPQKSREPSVRALAGTVFITRQVHFNSAHRLYNPTKSLAWNQKQYGMCTNPHWHGHNYVLEVTLKGQPDPVTGYIMDLARLKKVLHTAVVDKCDHRNLNDEVDFLRGIIPSTENLVIAFWHEIAPRIHLPARLHCVRLYETPRNFAEFFGPAHH

SEQ ID NO: 21657 - protein, 159 aa, unidentified
  source 1..159: note = Lacunisphaera sp.
  REGION 1..159: note = tr|A0A4Q1C8G4|A0A4Q1C8G4_9BACT 6-carboxytetrahydropterin synthase OS=Lacunisphaera sp. TWA-58 OX=2508720 GN=ESB00_04355 PE=4 SV=1
MPKKTNTRKNREPSVRALAGTVFITRQVHFNSAHRLYNPTKSLAWNQKQYGLCTNPHWHGHNYVLEVTVKGQPDPVTGYIIDLARLKKILHRAVVDKCDHRNLNDEVDFLRGIIPSTENLVIAFWHEIVSHIPLPARLHCVRLYETPRNYAEFFGPAHH

SEQ ID NO: 21658 - protein, 151 aa, unidentified
  source 1..151: note = Lacunisphaera sp.
  REGION 1..151: note = tr|A0A4Q1C868|A0A4Q1C868_9BACT 6-carboxytetrahydropterin synthase OS=Lacunisphaera sp. TWA-58 OX=2508720 GN=ESB00_03830 PE=4 SV=1
MPYRIAKTLTFESGHILSKHKGRCRFPHGHSRTVEVVLAAEQLDANDMVCDFKAVKRSLESLLDRWDHALCLNTADPGFIDLQRTYGERVVAFAGTDPTTEVMARTIFEALQQRLHEATKESAAEFPISPGVRLERVRVTETATSWAEYSA

SEQ ID NO: 21659 - protein, 121 aa, Lampropedia sp.
  REGION 1..121: note = tr|A0A4V3YX97|A0A4V3YX97_9BURK 6-carboxy-5,6,7,8-tetrahydropterin synthase OS=Lampropedia sp. YIM MLB12 OX=2562762 GN=E8K88_06920 PE=3 SV=1
MQYELSQRFFFDAAHTLHRAIEVESSRRIHGHTYEAEVTVRGLPDPKSGMLIDLGFLRSEIARLRDKLDHRLLDEVEGIGPATLENLCTYIRTQLEPAVPNLCAVMVERRTSGDRCVLRWK

SEQ ID NO: 21660 - protein, 132 aa, Lapillicoccus jejuensis
  REGION 1..132: note = tr|A0A542DZX4|A0A542DZX4_9MICO 6-pyruvoyl-tetrahydropterin synthase OS=Lapillicoccus jejuensis OX=402171 GN=FB458_1574 PE=4 SV=1
MFGVTLRDHMMIAHSLPGEAFGPAQRLHGATYVVDATISAAELDDLGVVVDIARAADVLHDVLAGLTMRNLDDEPSLAGVLTTTERLAQVVADRLVERAHGGDLGTDPARLAGVRVVLHESHVASASYERPL

SEQ ID NO: 21661 - protein, 334 aa, Laribacter hongkongensis
  REGION 1..334: note = tr|A0A248LI65|A0A248LI65_9NEIS Putative 6-pyruvoyltetrahydrobiopterin synthase OS=Laribacter hongkongensis OX=168471 GN=LHGZ1_1245 PE=4 SV=1
MPCLHQACCGFEAARSLPLANGINQRHGHSFRLHARADMPLPDLRAQLARIAAPLNYADLDHYLGHADDQSLLEWLASQLPTPAALSLRSAPGLESELDPDGQRRICISGHFDAAHWLPHVPDGHQCGRLHGHGFGVRLVADAGQHDAAALYSAWQPLHATLHHRLLNDIAGLSNPTSEMLACWIWQQLQPSLSGLQAVEVFETASAGSRYDGQEFRIWKEQRFEAAVPFDHAGRYTGHSYLVRLVLTGIMSNHTGWVRDFGEIKARFKPVYAQLDHHPLDRLPAIDATDCAGIARWIAREFAESVPELCRIDLLENPDEGAVLFLPAAKGQQS

SEQ ID NO: 21662 - protein, 331 aa, Laribacter hongkongensis
  REGION 1..331: note = tr|C1D6K9|C1D6K9_LARHH Probable 6-pyruvoyltetrahydrobiopterin synthase OS=Laribacter hongkongensis (strain HLHK9) OX=557598 GN=LHK_01124 PE=4; SV = 1
MPCLHQACCGFEAARSLPLANGINQRHGHSFRLHARADMPLPDLREQLARIAAPLNYADLDHYLGHADDQSLLEWLASQLPTPAALSLRSAPGLESELDPDGQRRICISGHFDAAHWLPHVPDGHQCGRLHGHGFGVRLVADAGQHDAAALYSAWQPLHATLHHRLLNDIAGLSNPTSEMLACWIWQQLQPSLSGLQAVEVFETASAGSRYDGQEFRIWKEQRFEAAVPFDHAGHYTGHSYLVRLVLTGIMSNHTGWVRDFGEIKARFKPVYAQLDHHPLDRLPAIDATDCAGIARWIAREFAESVPELCRIDLLENPDEGAVLFLPAANG

SEQ ID NO: 21663 - protein, 138 aa, Larkinella arboricola
  REGION 1..138: note = tr|A0A327X2Q0|A0A327X2Q0_9BACT 6-pyruvoyltetrahydropterin/6-carboxytetrahydropterin synthase OS=Larkinella arboricola OX=643671 GN=LX87_01540; PE = 4 SV=1
MVYVSRKEHFNAAHRLFNPAWSDEKNKEVFGACANVNGHGHNFELIVTVKGQPHPDTGFVIDLKVLGDLVKEEIIDKVDHKNLNVDVDFMQGKMASCEVFIVQIWNILERALARISDARLHQVRLYETPKNYVDYYGE

SEQ ID NO: 21664 - protein, 138 aa, Larkinella arboricola
  REGION 1..138: note = tr|A0A327X225|A0A327X225_9BACT 6-carboxy-5,6,7,8-tetrahydropterin synthase OS=Larkinella arboricola OX=643671 GN=LX87_02138 PE=3 SV=1
MDKKRVAVFRKEHFNAAHRLHNPEWSEEENQRVFGKCNNPHFHGHNYELIVQVIGEVNPVTGYVMDMKVLSDLIKSQVTDRFDHKNLNLDTEEFKSLNPSAENIAIVIYDSLRSQLDSSLDLKIRLYETERNFVEYPV

SEQ ID NO: 21665 - protein, 138 aa, unidentified
  source 1..138: note = Larkinella knui
  REGION 1..138: note = tr|A0A3P1CVN0|A0A3P1CVN0_9BACT 6-carboxytetrahydropterin synthase OS=Larkinella knui; OX = 2025310 GN=EHT87_03560 PE=4 SV=1
MVYISRKEHFNAAHRLFNPTWSDEKNKEVFGPCANVNGHGHNFELIVTVKGEPNPDTGFVIDLKVLGDLVKEEIIDKVDHKNLNLDVDFMRGKMASCEIFIVEIWKILDRALEKITEARLHRIRLYETPKNYVDYYGE

SEQ ID NO: 21666 - protein, 138 aa, unidentified
  source 1..138: note = Larkinella knui
  REGION 1..138: note = tr|A0A3P1CY73|A0A3P1CY73_9BACT 6-carboxytetrahydropterin synthase OS=Larkinella knui; OX = 2025310 GN=EHT87_05965 PE=4 SV=1
MDKKRVAVFRKEHFNAAHRLHNPEWSDEENQRVFGKCNNPHYHGHNYELFVQVTGEVDPVTGFVMDMKLLSDLIKARVTDKFDHKNLNLDTEEFKNLNPSAEHIAIVIYDSLRSQLDSSLDLKIRLYETERNFVEYPV

SEQ ID NO: 21667 - protein, 138 aa, unidentified
  source 1..138: note = Larkinella rosea
  REGION 1..138: note = tr|A0A3P1C1G8|A0A3P1C1G8_9BACT 6-carboxytetrahydropterin synthase OS=Larkinella rosea; OX = 2025312 GN=EHT25_04065 PE=4 SV=1
MDKKRVAVFRKEHFNAAHRLHNPEWSDEENQRIFGKCNNPHFHGHNYEVIVQVIGEVDPVTGFVVDLKVLSDLIKTQVTDKFDHKNLNLDTEEFKNLNPSAENIAIVIYDSLRSQLAASLDLKIRLYETERNFVEYPV

SEQ ID NO: 21668 - protein, 138 aa, unidentified
  source 1..138: note = Larkinella rosea
  REGION 1..138: note = tr|A0A3P1C267|A0A3P1C267_9BACT 6-carboxytetrahydropterin synthase OS=Larkinella rosea; OX = 2025312 GN=EHT25_06060 PE=4 SV=1
MVYISRKEHFNAAHRLFNPAWSDEKNKEVFGPCANVNGHGHNFELIVTVKGEPNPDTGFVIDLKVLAELVKEHIIDRVDHKNLNLDVDFMRGKMASCEIFIVEIWKILDRALARITEARLHRIRLYETPKNYVDYYGE

SEQ ID NO: 21669 - protein, 138 aa, Larkinella sp.
  REGION 1..138: note = tr|A0A4R8D0D1|A0A4R8D0D1_9BACT 6-carboxy-5,6,7,8-tetrahydropterin synthase OS=Larkinella sp. BK230 OX=2512173 GN=EV590_2668 PE=3 SV=1
MDKKRVAVFRKEHFNAAHRLHNPAWSEEENQWVFGKCNNPHYHGHNYELIVQVIGEVNPVTGYVMDMKVLSDLIKAQVTDKFDHKNLNLDTEEFKNLNPSAEHIAIVIYDSLRSQLDSSLDLKIRLYETERNFVEYPV

SEQ ID NO: 21670 - protein, 138 aa, Larkinella sp.
  REGION 1..138: note = tr|A0A368JMM7|A0A368JMM7_9BACT 6-carboxy-5,6,7,8-tetrahydropterin synthase OS=Larkinella sp. ZZJ9 OX=2315727 GN=DUE52_13620 PE=3 SV=1
MDKKRVAVFRKEHFNAAHRLHIPEWSDEENKRVFGKCNNPHYHGHNYELIVQVTGEVDPVTGFVMDMKLLSDLIKDRVTDRFDHKNLNLDTEEFKTLNPSAEHIAIVIYDSLRSQLDSSLDLKIRLYETERNFVEYPV

SEQ ID NO: 21671 - protein, 140 aa, Lautropia mirabilis
  REGION 1..140: note = tr|E7S061|E7S061_9BURK 6-carboxy-5,6,7,8-tetrahydropterin synthase OS=Lautropia mirabilis ATCC 51599 OX=887898 GN=queD PE=3 SV=1
MLKIAKEFSFDIAHMLDGHDGKCRNLHGHTYRLQVEVGGPLHASGPKAGMVMDYADLKDIVKRHVVDPMDHAFLYDTGSPRECRVATLLQELDSKVHGLPMRTTAENISAHIFHVLQDQGLPVSLIRLWETPTSYCEYSG

SEQ ID NO: 21672 - protein, 140 aa, Lautropia sp.
  REGION 1..140: note = tr|A0A3R8MSB1|A0A3R8MSB1_9BURK 6-carboxy-5,6,7,8-tetrahydropterin synthase OS=Lautropia sp. KCOM 2505 OX=2490857 GN=queD PE=3 SV=1
MIRIAKEFSFDIAHMLDGHDGKCKNLHGHTYRLQVEVTGELHATGPKAGMVMDYGDLKAMVNRHIIEPMDHAFIYDTTSARECRLAATLRELDSKQYGLPLRTTAENIAQHIYRTLRGHGLPVSLIRLWETPTSYAEYAE

SEQ ID NO: 21673 - protein, 374 aa, Lautropia sp.
  REGION 1..374: note = tr|A0A1D2TNP0|A0A1D2TNP0_9BURK 6-pyruvoyl tetrahydropterin synthase OS=Lautropia sp. SCN 70-15; OX = 1660105 GN=ABS55_00885 PE=4 SV=1
MPDHLLHVAAAGFESACRIDVLPEGHRSRRLHGHSFLAKVRARLPQGWASFPGGEVDDLRARLSEAIAPLDYALLNEQVAHPTDENLARWIRARLEASGSGGSGAGVPGLEQVGIQSTLHSGVDLDARDHAHVWRRYVFEAAHQLTGVPAGHKCGRMHGHGFEVILHADQDLGARDLGIDYDHLDACWAPIHAQFHHACLNDIPGLENPTSEIIGAWIWERLKPQLPELSWVTVYETATCGAHYDGRHYRIWKELSLDSSLRLRRAPEGDARRRIHGHTYNLRLHLCAPLDEVRGWTVDFGDVKALFDPIFRDLDHQPLHELPGVEDNDPASLAQWIRDRALPVLPALDRIDLYETRGSGAILSWGEEGPALPV

SEQ ID NO: 21674 - protein, 126 aa, Lawsonia intracellularis
  REGION 1..126: note = tr|Q1MRR2|Q1MRR2_LAWIP 6-carboxy-5,6,7,8-tetrahydropterin synthase OS=Lawsonia intracellularis (strain PHE/MN1-00) OX=363253 GN=LI0258; PE = 3 SV=1
MSKPTWHLTVRSEFCAAHALRHYKGKCERLHGHNYGIKIIVGGHELTSDTELLIDFTELKAILKDVLEPLDHRYLNNIPPFDQINPSAENLARYIWQNVKKRLPPNVYMVQATVAERNVQSATYME

SEQ ID NO: 21675 - protein, 136 aa, Leadbetterella byssophila
  REGION 1..136: note = tr|E4RQ78|E4RQ78_LEAB4 6-carboxy-5,6,7,8-tetrahydropterin synthase; OS = Leadbetterella byssophila (strain DSM 17132 / KACC 11308 / 4M15) OX=649349 GN=Lbys_1746 PE=3 SV =1
MIQITRRETFNAAHRLFNPKWSEEKNYEVFGPCSKVHGHNWELFVTVIGEVAEDTGFVVDLKALSRTMREEVISKVDHTYLNEDVAFLAGKLPTTENFAIAIWDILKPAIKQKHGVDLYKIKLTETANHYVEYFGH

SEQ ID NO: 21676 - protein, 145 aa, Leadbetterella byssophila
  REGION 1..145: note = tr|E4RZB4|E4RZB4_LEAB4 Uncharacterized protein; OS = Leadbetterella byssophila (strain DSM 17132 / KACC 11308 / 4M15) OX=649349 GN=Lbys_0691 PE=4 SV=1
MCSTQTLYMTRVSVFRKEHFNAAHRLHCEEWDQETNARIFGKCNNPNYHGHNYELHVKVTGEVDPKSGFVFDLKILSDLIREHVLEVFDHKNLNLDLPYFKDINPTAENICVVIYDILRPKIEEKYDIKIRLFETERNYVEYPEN

SEQ ID NO: 21677 - protein, 194 aa, unidentified
  source 1..194: note = Lebetimonas natsushimae
  REGION 1..194: note = tr|A0A292YEI5|A0A292YEI5_9PROT 6-pyruvoyltetrahydropterin/6-carboxytetrahydropterin synthase OS=Lebetimonas natsushimae OX=1936991; GN = LNAT_P1033 PE=4 SV=1
MIIRKLFKFENAHIVRNCTSRRCSRSIHGHSYKIEILLESNFLDNGQMVYDFGLMKTTIKELIDSFDHAITLWSEDNSEYLEFAKKFSERWVMLPVNPSAEQFSRVFFLMVERVLNLTVFQNNEKNIKVNSVIVHETDTGYAQCFREDAYNFENMGKIELKNIIFSEQIKREWSDYNMWDKILNGERFINPKSL

SEQ ID NO: 21678 - protein, 126 aa, Lechevalieria deserti
  REGION 1..126: note = tr|A0A316HYP5|A0A316HYP5_9PSEU 6-pyruvoyl tetrahydropterin synthase-like protein OS=Lechevalieria deserti OX=531939 GN=C8D88_111209 PE=4 SV=1
MIAHSFRGEVFGPAQRLHGATFLVDATFKRAELDSDNIVVDIGLATQELNKVLAAFNYRNLDEEPQFAGINTSTEWLAKHIADQLAEKISEGALGEGAHGIDAIAVTLHESHVAWASYERALRTAG

SEQ ID NO: 21679 - protein, 229 aa, Lechevalieria deserti
  REGION 1..229: note = tr|A0A316I2C6|A0A316I2C6_9PSEU 6-pyruvoyl-tetrahydropterin synthase OS=Lechevalieria deserti OX=531939 GN=C8D88_108160 PE=4 SV=1
MKAAEDKRVADGQTTISQSFDFSASHELRLLPTSHKCSRNHGHNYTVTASALVHDDAPGDLSTLGEYLTATFDHRLLNEQVTFHPTSELLAAHLAEWFRDNVESATSITLVAMIVSETESTSARCDGVTGEVTISKTFTTSHGDVTLVLGADGLDEVGFITDFGDLKPFEAYLQAPGADEGLRATGPALVAHLAGWFVDNVEPEIRGRLVSLRVDSRTTTGLWERGDAS

SEQ ID NO: 21680 - protein, 126 aa, Lechevalieria fradiae
  REGION 1..126: note = tr|A0A1G7SRV5|A0A1G7SRV5_9PSEU 6-pyruvoyl tetrahydropterin synthase OS=Lechevalieria fradiae; OX = 200378 GN=SAMN05216553_106397 PE=4 SV=1
MIAHSFRGEVFGPAQRLHGATFLVDATFKRAELDSDNIVVDIGLATQELNKVLAAFNYRNLDEEPQFAGINTSTEWLAKHIADQLAEKISEGALGEGAHGIDGISVTLHESHVAWASYERALRPSG

SEQ ID NO: 21681 - protein, 126 aa, Lechevalieria xinjiangensis
  REGION 1..126: note = tr|A0A1H9ULX7|A0A1H9ULX7_9PSEU 6-pyruvoyl tetrahydropterin synthase OS=Lechevalieria xinjiangensis; OX = 402600 GN=SAMN05216188_12212 PE=4 SV=1
MIAHSFRGEVFGPAQRLHGATFLVDATFKRAELDSDNIVVDIGLATQELGKVLAAFNYRNLDEEPQFAGINTSTEWLAKHIADQLADKIAEGALGEGAHGINAITVTLHESHVAWASYERALRPSG

SEQ ID NO: 21682 - protein, 120 aa, Leclercia adecarboxylata
  REGION 1..120: note = tr|A0A5B7XK77|A0A5B7XK77_9ENTR 6-carboxy-5,6,7,8-tetrahydropterin synthase OS=Leclercia adecarboxylata OX=83655 GN=queD PE=3 SV=1
MSTTLFKDFMFEAAHHLPHVPEGHKCGRLHGHSFMVRLEITGEVDPHTGWIMDFSELKAAFKPTYDRLDHYYLNDIPGLENPTSEVLAKWIWNEMKPLVPLLSAVMIKETCTAGCIYRGE

SEQ ID NO: 21683 - protein, 120 aa, Leclercia adecarboxylata
  REGION 1..120: note = tr|A0A352U3L5|A0A352U3L5_9ENTR 6-carboxy-5,6,7,8-tetrahydropterin synthase OS=Leclercia adecarboxylata OX=83655 GN=queD PE=3 SV=1
MSTTLFKDFIFEAAHHLPHVPEGHKCGRLHGHSFMVRLEITGEVDPHTGWIMDFAELKAAFKPTYDRLDHYYLNDIPGLENPTSEVLAKWIWDEIKPLVPLLSAVMIKETCTAGCVYRGE

SEQ ID NO: 21684 - protein, 120 aa, Leclercia sp.
  REGION 1..120: note = tr|A0A345C6U2|A0A345C6U2_9ENTR 6-carboxy-5,6,7,8-tetrahydropterin synthase OS=Leclercia sp. W17 OX=2282309 GN=queD PE=3 SV=1
MSTTLFKDFIFEAAHHLPHVPEGHKCGRLHGHSFMVRLEITGEVDPHTGWIMDFAELKAAFKPTYDRLDHYYLNDIPGLENPTSEVLAKWIWNEIKPLVPLLSAVMIKETCTAGCVYRGE

SEQ ID NO: 21685 - protein, 120 aa, Leclercia sp.; identical to SEQ ID NO: 20153
  REGION 1..120: note = tr|A0A0J6QAG7|A0A0J6QAG7_9ENTR 6-carboxy-5,6,7,8-tetrahydropterin synthase OS=Leclercia sp. LK8 OX=1628210 GN=VK95_13410 PE=3 SV=1

SEQ ID NO: 21686 - protein, 136 aa, Leeuwenhoekiella aequorea
  REGION 1..136: note = tr|A0A4Q0P1X0|A0A4Q0P1X0_9FLAO 6-carboxy-5,6,7,8-tetrahydropterin synthase; OS = Leeuwenhoekiella aequorea OX=283736 GN=DSM00_3063 PE=3; SV = 1
MKVTVKRKAHFNAAHRLFRKEWDADKNLDVFGKCSLPNYHGHNYDLIVAVTGEIDQETGFVIDLKILKDLIKTEIEEPFDHRNLNLDVPEFKHLNPTAENICVVIYDKLRKKLEAKFDIEITLYETARNFVTYSGN

SEQ ID NO: 21687 - protein, 151 aa, Leeuwenhoekiella aequorea
  REGION 1..151: note = tr|A0A4Q0PC00|A0A4Q0PC00_9FLAO 6-pyruvoyltetrahydropterin/6-carboxytetrahydropterin synthase OS=Leeuwenhoekiella aequorea OX=283736; GN = DSM00_52 PE=4 SV=1
MSNIRITKQFSFETGHALYGYDGKCRNVHGHSYKLSVTVIGTPISQSDNVKFGMVIDFGDLKKIVKAEIVDVFDHATVFNKNTPHVELAKELSDRGHNVLLVDYQPTSEMMVIDFAEKIKKHLPSNITLFSLKLQETDSSFAEWYASDNKE

SEQ ID NO: 21688 - protein, 150 aa, Leeuwenhoekiella blandensis
  REGION 1..150: note = tr|A3XRB5|A3XRB5_LEEBM Uncharacterized protein; OS = Leeuwenhoekiella blandensis (strain CECT 7118 / CCUG 51940 / MED217) OX=398720 GN=MED217_18726 PE=4 SV=1
MSNIRITKQFSFETGHALYGYDGKCRNVHGHSYKLSVTVIGTPISDSNNVKFGMVIDFGDLKRIVKSEIVDVFDHATVFNKNTPHVELAKELSDRGHNVLLVDYQPTSEMMVIDFAEKIKKHLPENINLFSLKLQETDTSFAEWYAADNA

SEQ ID NO: 21689 - protein, 137 aa, Leeuwenhoekiella blandensis
  REGION 1..137: note = tr|A3XR13|A3XR13_LEEBM 6-carboxy-5,6,7,8-tetrahydropterin synthase; OS = Leeuwenhoekiella blandensis (strain CECT 7118 / CCUG 51940 / MED217) OX=398720 GN=MED217_14001PE=3 SV=1
MKTVTVKRKAHFNAAHRLYRADWDDAKNLEVFGKCSYPNYHGHNYELIVAVTGEIDPKTGFVIDLKVLKDLIKSEVEEPFDHKNLNLDVAEFSQLNPTAENICVVIYDRLKAKLDAKFAIEVTLYETPRNSVTYSGN

SEQ ID NO: 21690 - protein, 151 aa, Leeuwenhoekiella marinoflava
  REGION 1..151: note = tr|A0A4Q0PQY4|A0A4Q0PQY4_9FLAO 6-pyruvoyltetrahydropterin/6-carboxytetrahydropterin synthase OS=Leeuwenhoekiella marinoflava OX=988; GN = DSL99_132 PE=4 SV=1
MSNIRITKQFSFETGHALYGYDGKCRNVHGHSYKLSVTVIGTPISDSENVKFGMVIDFGDLKKIVKDEIVDVFDHATVFNKNTPHVELAKELSDRGHNVLLVDYQPTSEMMVIDFAEKIQKHLPQNIKLFSLKLQETDSSFAEWYASDNTN

SEQ ID NO: 21691 - protein, 136 aa, Leeuwenhoekiella marinoflava
  REGION 1..136: note = tr|A0A4Q0PI38|A0A4Q0PI38_9FLAO 6-carboxy-5,6,7,8-tetrahydropterin synthase; OS = Leeuwenhoekiella marinoflava OX=988 GN=DSL99_3334 PE=3; SV = 1
MKVTVSRKAHFNAAHRLYRSEWDDAKNLEVFGKCSYPNYHGHNYELIVAVTGEIDPETGFVIDLKILKDIIKSEVEDPFDHKNLNLDVSEFAELNPTAENICVVIYNKMRKKLEAEFEIEVTLYETPRNFVSYNGK

SEQ ID NO: 21692 - protein, 154 aa, unidentified
  source 1..154: note = Leeuwenhoekiella nanhaiensis
  REGION 1..154: note = tr|A0A2G1VV90|A0A2G1VV90_9FLAO 6-carboxytetrahydropterin synthase QueD; OS = Leeuwenhoekiella nanhaiensis OX=1655491 GN=CJ305_00200; PE = 4 SV=1
MSNIRITKQFSFETGHALYGYDGKCRNVHGHSYKLSVTVIGTPISQSENVKFGMVIDFGDLKKIVKNEIVDVFDHATVFNKNTPHVELAKELSDRGHNVLLVDYQPTSEMMVIDFARKIQKHLPQNIKLFSLKLQETDTSFAEWYASDNEADLS

SEQ ID NO: 21693 - protein, 137 aa, unidentified
  source 1..137: note = Leeuwenhoekiella nanhaiensis
  REGION 1..137: note = tr|A0A2G1VNC3|A0A2G1VNC3_9FLAO 6-carboxy-5,6,7,8-tetrahydropterin synthase; OS = Leeuwenhoekiella nanhaiensis OX=1655491 GN=CJ305_16035; PE = 3 SV=1
MTRVTVKRKAHFNAAHRLFRADWDDQKNLEVFGKCSYPNYHGHNYDLIVSVTGAIDPETGFVIDLKVLKDLIKEEIEDHFDHKNLNEDLPEFKNLNPTAENICVVIYNKLKSRLDTKFDLEITLYETARNFVTYSGT

SEQ ID NO: 21694 - protein, 137 aa, Leeuwenhoekiella palythoae
  REGION 1..137: note = tr|A0A1M5UKC1|A0A1M5UKC1_9FLAO 6-carboxy-5,6,7,8-tetrahydropterin synthase; OS = Leeuwenhoekiella palythoae OX=573501; GN = SAMN04487999_0703 PE=3 SV=1
MKQVTVKRKAHFNAAHRLYRVDWDDAKNLEVFGKCSYPNYHGHNYELIVAVTGPIDPETGFVIDLKVLKDLIKAEVEEPFDHKNLNLDVPEFSTINPTAENICVVIYDRLKRHLSETFKIEVTLYETPRNSVTYSGE

SEQ ID NO: 21695 - protein, 150 aa, Leeuwenhoekiella palythoae
  REGION 1..150: note = tr|A0A1M5W117|A0A1M5W117_9FLAO 6-pyruvoyltetrahydropterin/6-carboxytetrahydropterin synthase OS=Leeuwenhoekiella palythoae OX=573501; GN = SAMN04487999_0995 PE=4 SV=1
MSNIRITKQFSFETGHALYGYDGKCRNVHGHSYKLSVTVIGTPISDNNNVKFGMVIDFGDLKKIVKSEIVDVFDHATVFNKNTPHVELAKELSDRGHNVLLVDYQPTSEMMVIDFAEKIKKHLPENITLFSLKLQETDTSFAEWYAADNA

SEQ ID NO: 21696 - protein, 150 aa, unidentified
  source 1..150: note = Leeuwenhoekiella polynyae
  REGION 1..150: note = tr|A0A4Q0P924|A0A4Q0P924_9FLAO 6-pyruvoyltetrahydropterin/6-carboxytetrahydropterin synthase OS=Leeuwenhoekiella polynyae OX=1550906; GN = DSM02_1604 PE=4 SV=1
MSNIRITKQFSFETGHALYGYDGKCRNVHGHSYKLSVTVIGTPISDTKNVKFGMVIDFGDLKKIVKGEIVDVFDHATVFNKNTPHVELAKELSDRGHNVLLVDYQPTSEMMVIDFAEKIQKHLPQNIKLFSLKLQETDSSFAEWYASDNV

SEQ ID NO: 21697 - protein, 136 aa, unidentified
  source 1..136: note = Leeuwenhoekiella polynyae
  REGION 1..136: note = tr|A0A4Q0NUI8|A0A4Q0NUI8_9FLAO 6-carboxy-5,6,7,8-tetrahydropterin synthase; OS = Leeuwenhoekiella polynyae OX=1550906 GN=DSM02_3525 PE=3; SV = 1
MRVTVSRKAHFNAAHRLYRSDWNDAKNLDVFGKCSYPNYHGHNYELIVAVTGEIDMETGFVIDLKILKDIIKSEVEDPFDHKNLNLDVPEFAELNPTAENICVVIYTKMRKKIGAEFDIEVTLYETPRNFVSYSGQ

SEQ ID NO: 21698 - protein, 150 aa, Leeuwenhoekiella sp.; identical to SEQ ID NO: 21688
  REGION 1..150: note = tr|A0A2D9E4H9|A0A2D9E4H9_9FLAO 6-carboxytetrahydropterin synthase OS=Leeuwenhoekiella sp.; OX = 1977054 GN=CMF32_11765 PE=4 SV=1

SEQ ID NO: 21699 - protein, 136 aa, Leeuwenhoekiella sp.
  REGION 1..136: note = tr|A0A4Q0NT88|A0A4Q0NT88_9FLAO 6-carboxy-5,6,7,8-tetrahydropterin synthase; OS = Leeuwenhoekiella sp. R-50232 OX=2249425 GN=DSM04_1055; PE = 3 SV=1
MRVTVSRKAHFNAAHRLYRSDWDDAKNLDVFGKCSYPNYHGHNYELIVAVTGEIDIETGFVIDLKILKDIIKSEVEDPFDHKNLNLDVPEFAELNPTAENICVVIYTKMRKKIGAEFDIEVTLYETPRNFVSYSGQ

SEQ ID NO: 21700 - protein, 165 aa, Legionella adelaidensis
  REGION 1..165: note = tr|A0A0W0R153|A0A0W0R153_9GAMM 6-pyruvoyl tetrahydropterin synthase OS=Legionella adelaidensis; OX = 45056 GN=Lade_2122 PE=4 SV=1
MAKYLTTVELQKESMKFSAGHTTIFSATEREPLHGHLYGVYLALTTWVEENGMTFDYRYYKERIHKLCRKLNQTFLMPQYSPFLEYAEDDEYFYFTFNGKKIPFLKEDVTLMPLSNITVEELSRWFVNELIKDKNELERHRLEKIVVKVFSAPGQSASHCWEKEQ

SEQ ID NO: 21701 - protein, 127 aa, Legionella anisa
  REGION 1..127: note = tr|A0A2Z3KSA0|A0A2Z3KSA0_9GAMM 6-carboxytetrahydropterin synthase OS=Legionella anisa; OX = 28082 GN=DLD14_05595 PE=4 SV=1
MHHLMLRKNFIAQHFLIGKDFGAENLRHSHHYSFELEIENTKLDQFNFLIDIVEVRAHIEHLISYFQDKILNDLPEFKNQNPSLELFSKILWQKFNNHIELPIDSQITIRLWEDDIAQASYREPKCA

SEQ ID NO: 21702 - protein, 168 aa, Legionella anisa
  REGION 1..168: note = tr|A0A2Z3KJ54|A0A2Z3KJ54_9GAMM 6-pyruvoyl tetrahydrobiopterin synthase OS=Legionella anisa OX=28082; GN = DLD14_02250 PE=4 SV=1
MNRKKYLTTVELQKESMKFSAGHTTIFSATEREPLHGHMYGVYLALTTWVEENGMTFDYRYYKERIHKLCRYLNQTFLMPQFSPFLEYAEDEEYYYFTFNHKKIPFLKEDVTLLPVTNITVEELSRWFVQELIKDKAELERHRIEKVVVKVFSAPGQSASHQWQRENE

SEQ ID NO: 21703 - protein, 165 aa, Legionella beliardensis
  REGION 1..165: note = tr|A0A378I4Q0|A0A378I4Q0_9GAMM 6-pyruvoyl tetrahydrobiopterin synthase OS=Legionella beliardensis; OX = 91822 GN=NCTC13315_02752 PE=4 SV=1
MTKYLTTVELQKESMKFSAGHTTIFSATEREPLHGHMYAVYLALTTWVEENGMTFDYRYYKERIHTLCRFLNQTFLMPQYSPFLTMSEDETYYYFTFNHKKIPFLKEDVTLLPLTNITVEELSRWFVSELIKDREELVRHRIEKVVVKVFSAPGQSASHEWSRQK

SEQ ID NO: 21704 - protein, 169 aa, Legionella birminghamensis
  REGION 1..169: note = tr|A0A378IDH1|A0A378IDH1_9GAMM 6-pyruvoyl tetrahydrobiopterin synthase OS=Legionella birminghamensis; OX = 28083 GN=NCTC12437_00087 PE=4 SV=1
MSKYLTTVELQKESMKFSAGHTTIFSATEREPLHGHMYGVYLALTTWVEDNGMTFDYRYYKHRVHHLCRFLNQTFLMPQYSPFLEFSEDEEYYYFVFNKKKIPFLKEDVTLMPLTNITVEELSRWFVEELIKEKEELDKHRIEKVVVKVFSAPGQSASHQWQRHAKASQ

SEQ ID NO: 21705 - protein, 152 aa, Legionella birminghamensis
  REGION 1..152: note = tr|A0A378IB01|A0A378IB01_9GAMM Queuosine biosynthesis protein QueD OS=Legionella birminghamensis; OX = 28083 GN=NCTC12437_01737 PE=4 SV=1
MYISTKKFIGYPCAHRQWKDTGHCRLVHGYSREFTFWFKATSLDDKSWVMDFGAFKEFKTFLDDYFDHSCLINSNDPELPLFRELDKKGIIRLRVLENVGMEGTSEFLHQKMNEYLDQKTDGRVYCFRVETRENEKNSGIFELEKENLQQYR

SEQ ID NO: 21706 - protein, 165 aa, Legionella brunensis
  REGION 1..165: note = tr|A0A0W0SUU0|A0A0W0SUU0_9GAMM 6-pyruvoyl tetrahydropterin synthase OS=Legionella brunensis OX=29422; GN = Lbru_0186 PE=4 SV=1
MMKKYLTTVELQKESMKFSAGHTTIFSATEREPLHGHMYAVYLALTTWVEENGMTFDYRYYKERIHKLCRYLNQTFLMPQFSPFLQMAEDDEYYYFTFNKKKIPFLKEDVTLMPLTNITVEELSRWFVQELIKDTQELDKHRIEKVVVKVFSAPGQSASHEWQRR

SEQ ID NO: 21707 - protein, 166 aa, Legionella busanensis
  REGION 1..166: note = tr|A0A378JSX0|A0A378JSX0_9GAMM 6-pyruvoyl tetrahydrobiopterin synthase OS=Legionella busanensis; OX = 190655 GN=NCTC13316_02996 PE=4 SV=1
MTKYLTTVELQKESMKFSAGHTTIFSATEREPLHGHMYGVYLALTTWVEENGMTFDYRYYKDRIHKLCRFLNQTFLMPTYSPFLTMSEDEEYYYFIFNKKKIPFLKEDVTLLPLTNITVEELSRWFVNELIKDSEELIKHRIEKVVVKVFSAPGQSASHEWVKQSN

SEQ ID NO: 21708 - protein, 168 aa, Legionella cherrii
  REGION 1..168: note = tr|A0A0W0SCM3|A0A0W0SCM3_9GAMM 6-pyruvoyl tetrahydropterin synthase OS=Legionella cherrii OX=28084; GN = Lche_2792 PE=4 SV=1
MKIKKYLTTVELQKESMKFSAGHTTIFSATEREPLHGHMYGVYLALTTWVEENGMTFDYRYYKERIHKLCRYLNQTFLMPQFSPFLEYAEDKEYYYFTFNHKKIPFLKEDVTLLPVTNITVEELSRWFVNELIKDKAELDRHRIEQVVVKVFSAPGQSASHQWQRVHE

SEQ ID NO: 21709 - protein, 168 aa, Legionella cincinnatiensis
  REGION 1..168: note = tr|A0A378IGG1|A0A378IGG1_9GAMM 6-pyruvoyl tetrahydrobiopterin synthase OS=Legionella cincinnatiensis; OX = 28085 GN=NCTC12438_00162 PE=4 SV=1
MNEKKYLTTVELQKESMKFSAGHTTIFSATEREPLHGHMYGVYLALTTWVEENGMTFDYRYYKERIHKLCRYLNQTFLMPQFSPFLEYAEDEAYYYFTFNHKKIPFLKEDVTLLPVTNITVEELSKWFVHELIQDKEELERHRIEKVIVKVFSAPGQSASHEWQRADE

SEQ ID NO: 21710 - protein, 166 aa, unidentified
  source 1..166: note = Legionella clemsonensis
  REGION 1..166: note = tr|A0A222P697|A0A222P697_9GAMM 6-pyruvoyl tetrahydropterin synthase OS=Legionella clemsonensis; OX = 1867846 GN=clem_14165 PE=4 SV=1
MMKKYLTTVELQKESMKFSAGHTTIFSATEREPLHGHMYGVYLALTTWVEENGLTFDYRYYKERIHKLCRYLNQTFLMPQFSPFLQFAEDEDYYYFTFNNKKIPFLKEDVTLMPLTNITVEELSRWFVQELIKDTAELNKHRIEKVVVKVFSAPGQSASHEWYRQQ

SEQ ID NO: 21711 - protein, 164 aa, unidentified
  source 1..164: note = Legionella donaldsonii
  REGION 1..164: note = tr|A0A378IZ84|A0A378IZ84_9GAMM 6-pyruvoyl tetrahydrobiopterin synthase OS=Legionella donaldsonii; OX = 45060 GN=NCTC13292_00164 PE=4 SV=1
MKKYLTTVELQKESMKFSAGHTTIFSATEREPLHGHMYTVYLALTTWVEENGMTFDYRYYKERIYKLCHHLNQTFLMPQFSPFLQFSEDNEHYYFTFNHKRIPFLKEDVTLMPLTNITVEELSRWFVEELIKDKTELDRHRIEKIVVKVFSAPGQSASHEWQRS

SEQ ID NO: 21712 - protein, 163 aa, unidentified
  source 1..163: note = Legionella donaldsonii
  REGION 1..163: note = tr|A0A378J8B9|A0A378J8B9_9GAMM 6-pyruvoyl tetrahydropterin synthase/QueD family protein; OS = Legionella donaldsonii OX=45060 GN=NCTC13292_01989 PE=4; SV = 1
MTYIITKTFKIDVAERNWKKGRAQTRGKDHYDLNDMCPEFQIHGHTLHFDISLKGHELDETGFILDTDILKNLMKEKIKALDHSFLLHKLDPLYADIEVLVEKHRIKIYATEYVISYENIAKDIFLYCAKQLKQHGLEDSVSVDSVCVYSKTISGTYTESQAN

SEQ ID NO: 21713 - protein, 167 aa, Legionella drancourtii
  REGION 1..167: note = tr|G9EJJ7|G9EJJ7_9GAMM 6-pyruvoyl tetrahydropterin synthase OS=Legionella drancourtii LLAP12 OX=658187; GN = LDG_5363 PE=4 SV=1
MKIKKYLTTVELQKEAMKFSAGHTTIFSATEREPLHGHLYGVYLALTTWVEENGMTFDYRYYKERIHKLCRHLNQTFLMPEFSPFLEYAEDETYYYFTFNHKKIPFLKEDVTILPVTNITVEELSRWFVNELIKDTAELDRHRIDKVVVKVFSAPGQSASHDWQRPA

SEQ ID NO: 21714 - protein, 127 aa, Legionella drozanskii
  REGION 1..127: note = tr|A0A0W0SMZ8|A0A0W0SMZ8_9GAMM 6-pyruvoyl tetrahydropterin synthase OS=Legionella drozanskii LLAP-1; OX = 1212489 GN=Ldro_2922 PE=4 SV=1
MHCLMLRKNFIAQHFLIGKDFGCENLTHSHHYRFELEIENKHLDQYNFLIDIVEVRAYIDQLISYFQDKILNDLPEFINQNPSLELFSKILWQKFDNHFEFPANSQIIVRLWEDEIAQASYREAIYA

SEQ ID NO: 21715 - protein, 165 aa, Legionella drozanskii
  REGION 1..165: note = tr|A0A0W0SYP5|A0A0W0SYP5_9GAMM 6-pyruvoyl tetrahydropterin synthase OS=Legionella drozanskii LLAP-1; OX = 1212489 GN=Ldro_1672 PE=4 SV=1
MIKKYLTTVELQKESMKFSAGHTTIFSATEREPLHGHMYAVYLALTTWVEENGMTFDYRYYKERIHKLCRYLNQTFLMPQFSPFLEYAEDENYYYFTFNHKKIPFLKEDVTLMPVTNITVEELSRWFVEELIKDKAELDRHRIEKVVIKVFSAPGQSASHEWQRS

SEQ ID NO: 21716 - protein, 165 aa, Legionella erythra
  REGION 1..165: note = tr|A0A0W0TV72|A0A0W0TV72_LEGER 6-pyruvoyl tetrahydropterin synthase OS=Legionella erythra OX=448; GN = Lery_0221 PE=4 SV=1
MSKYLTTVELQKESMKFSAGHTTIFSATEREPLHGHMYSVYLALTTWVEENGMTFDYRYYKERIHKLCRQLNQTFLMPQFSPFLKYAEDENYLYFTFNHKKIPFLKEDVTLMPLTNITVEELSRWFVQELIKDTAELNRHRIDKVVVKVFSAPGQSASHEWQRAS

SEQ ID NO: 21717 - protein, 164 aa, Legionella fallonii
  REGION 1..164: note = tr|A0A098GA82|A0A098GA82_9GAMM 6-pyruvoyl tetrahydrobiopterin synthase OS=Legionella fallonii LLAP-10 OX=1212491 GN=LFA_3596 PE=4 SV=1
MIKRYLTTVELQKESMKFSAGHTTIFSATEREPLHGHMYNVYLALTTWVEENGMTFDYRYYKERIHKLCRQLNQTFLMPQYSPFLEYGEDKEYYYFTFNHKKIPFLKEDVTLMPLTNITVEELSRWFVNELIKEHEELDRHRIEKVVVKVFSAPGQSASHEWLR

SEQ ID NO: 21718 - protein, 163 aa, Legionella feeleii
  REGION 1..163: note = tr|A0A378ISZ0|A0A378ISZ0_9GAMM 6-pyruvoyl tetrahydropterin synthase/QueD family protein; OS = Legionella feeleii OX=453 GN=NCTC11978_01170 PE=4 SV=1
MTYIITKTFKIDVAERNWKKGRAQTRGKDHYDLNDMCPEFQIHGHTLHFDISLKGHELDETGFILDTDILKNLMKEKIKALDHSFLLHKLDPLYADIEVLVEKHRIKIYATDYVISYENIAKDIFLYCAKQLKQKGLEDSVSVDSVCVYSKTISGTYTESQAN

SEQ ID NO: 21719 - protein, 166 aa, Legionella feeleii
  REGION 1..166: note = tr|A0A0W0U804|A0A0W0U804_9GAMM 6-pyruvoyl tetrahydrobiopterin synthase OS=Legionella feeleii OX=453; GN = Lfee_0320 PE=4 SV=1
MIMKKYLTTVELQKESMKFSAGHTTIFSATEREPLHGHMYTVYLALTTWVEENGMTFDYRYYKERIYKLCNHLNQTFLMPQFSPFLQFSEDNEHYYFTFNHKRIPFLKEDVTLMPLTNITVEELSRWFVEELIKDKTELDRHRIEKIVVKVFSAPGQSASHEWQRS

SEQ ID NO: 21720 - protein, 164 aa, Legionella geestiana
  REGION 1..164: note = tr|A0A0W0TNW0|A0A0W0TNW0_9GAMM 6-pyruvoyl tetrahydrobiopterin synthase OS=Legionella geestiana; OX = 45065 GN=E4T54_06415 PE=4 SV=1
MKRYLTTVELQKESMKFAAGHTTIFSATEREPLHGHQYNVYLALTTWVEDNGMTFDYRYYKERIHTLCRRVNQTFLMPQFSPYLSHREDEEYHYFTFNGKTMPFLKEDVTLMPLCNITVEELSRWFVQELIADAAELERHRIEELVIKVFSAPGQCASHRWKRG

SEQ ID NO: 21721 - protein, 168 aa, Legionella gratiana
  REGION 1..168: note = tr|A0A378J0J2|A0A378J0J2_9GAMM 6-pyruvoyl tetrahydrobiopterin synthase OS=Legionella gratiana; OX = 45066 GN=NCTC12388_00138 PE=4 SV=1
MNEKKYLTTVELQKESMKFSAGHTTLFSATEREPLHGHMYGVYLALTTWVEENGMTFDYRYYKERIHKLCRYLNQTFLMPQFSPFLEYAEDEAYYYFTFNHKKIPFLKEDVTLLPLTNITVEELSRWFVYELVQDKDELDRHRIEKIVVKVFSAPGQSASHEWQRVDE

SEQ ID NO: 21722 - protein, 165 aa, Legionella hackeliae
  REGION 1..165: note = tr|A0A0A8UKB8|A0A0A8UKB8_LEGHA Uncharacterized protein OS=Legionella hackeliae OX=449 GN=LHA_0207 PE=4; SV = 1
MKKYLTTVELQKESMKFSAGHTTIFSATEREPLHGHMYGVYLALTTWVEENGMTFDYRYYKERIHKLCRHLNQTFLMPEYSPFLQFAEDEEYYYFTFNHKKIPFLKEDVTLMPLTNITVEELSRWFVQELIKDKEELDKHRIEKVVVKVFSAPGQSANHEWQRPR

SEQ ID NO: 21723 - protein, 164 aa, Legionella israelensis
  REGION 1..164: note = tr|A0A0W0WQI0|A0A0W0WQI0_9GAMM 6-pyruvoyl tetrahydrobiopterin synthase OS=Legionella israelensis; OX = 454 GN=FOG18_03275 PE=4 SV=1
MKKYLTTVELQKESMKFSAGHTTIFSATEREPLHGHQYGVYLALTTWVEENGLTFDYRYYKEKIHTLCKYLNQTFLMPQYSPFLSIEEDEDYYYFTFNRKKMPFLKEDVTLLPLTNITVEELSRWFVNELIKNKEELEKHRIEQITVKIFSAPGQSASHQWSRS

SEQ ID NO: 21724 - protein, 173 aa, Legionella israelensis
  REGION 1..173: note = tr|A0A516MY02|A0A516MY02_9GAMM 6-carboxy-5,6,7,8-tetrahydropterin synthase OS=Legionella israelensis OX=454 GN=FOG18_02680 PE=4 SV=1
MSYRITKLFKLDMGHRTWSQDMRKGRGKEFYMADSPYPYNKCANIHGHSLIISITLGSNTLDQQNFVMDTDLFKIPFQKRIIDQMDHSFVIDKNDPLFNDFKTIASKDNLRLYVVDFSPSFEALAEFFFNCMNDIIKEVSLEKEINIIEAKVTGEHMTVEAVYNKTSHDLKRM

SEQ ID NO: 21725 - protein, 171 aa, Legionella jamestowniensis
  REGION 1..171: note = tr|A0A0W0UIX9|A0A0W0UIX9_9GAMM 6-pyruvoyl tetrahydropterin synthase OS=Legionella jamestowniensis; OX = 455 GN=Ljam_2053 PE=4 SV=1
MMKKYLTTVELQKESMKFSAGHTTIFSATEREPLHGHMYGVYLALTTWVEENGLTFDYRYYKERIHKLCRYLNQTFLMPQFSPFLQFAEDEEYYYFTFNHKKIPFLKEDVTLMPVTNITVEELSRWFVQELISDPVELDKHRIEKVVVKVFSAPGQSASHEWQRPRESAIA

SEQ ID NO: 21726 - protein, 166 aa, Legionella jordanis
  REGION 1..166: note = tr|A0A0W0VCD2|A0A0W0VCD2_9GAMM 6-pyruvoyl tetrahydropterin synthase OS=Legionella jordanis OX=456; GN = Ljor_2099 PE=4 SV=1
MMKRYLTTVELQKESMKFSAGHTTIFSATEREPLHGHMYAVYLALSTWVEENGLTFDYRYYKERIHKLCRSLNQTFLMPQYSPFLQYAEDDDYYYFTFNHKKIPFLKEDVTLMPLTNITVEELSRWFVQELIKDKEELDKHRIEKVVVKVFSAPGQSASHDWQRQA

SEQ ID NO: 21727 - protein, 166 aa, Legionella lansingensis
  REGION 1..166: note = tr|A0A0W0VLD0|A0A0W0VLD0_9GAMM 6-pyruvoyl tetrahydropterin synthase OS=Legionella lansingensis; OX = 45067 GN=Llan_1630 PE=4 SV=1
MMKKYLTTVELQKESMKFSAGHTTIFSATEREPLHGHMYGVYLALTTWVEENGMTFDYRYYKERIHKLCRSLNQTFLMPKFSPFLQLIEDEDYYYFTFNQKKIPFLKEDVTLMPLTNITVEELSRWFVQELIKDTKELDKHRIEKVVVKVYSAPGQSASHEWQRQQ

SEQ ID NO: 21728 - protein, 165 aa, Legionella londiniensis
  REGION 1..165: note = tr|A0A0W0VIF0|A0A0W0VIF0_9GAMM 6-pyruvoyl tetrahydropterin synthase OS=Legionella londiniensis; OX = 45068 GN=Llon_2065 PE=4 SV=1
MMAKYLTTVELQKESMQFSAGHTTIFSATEREPLHGHHYGVYLALTTWVEDNGLTFDYRYYKKRIHSLCRALNQTFLMPKFSPFLQFEEDETYYYFTFNHKKMPFLKEDVTLMPLSNITVEELSRWFVNELIKDEEELKRHRIERIVVKVFSAPGQSASHTWQRP

SEQ ID NO: 21729 - protein, 163 aa, Legionella longbeachae
  REGION 1..163: note = tr|A0A378L6W0|A0A378L6W0_LEGLO 6-pyruvoyl tetrahydrobiopterin synthase OS=Legionella longbeachae; OX = 450 GN=NCTC11477_02606 PE=4 SV=1
MAKYLTTVELQKESMKFSAGHTTIFSATEREPLHGHQYGVYLALTTWVEDNGMTFDYRYYKERIHTLCRHLNQTFLMPQYSPFLQYDEDDIYYYFTFNHKKIPFLKEDVTLMPLTNITVEELSRWFVNELIKDETELKRHRIERIVVKVFSAPGQSASHIWQR

SEQ ID NO: 21730 - protein, 168 aa, Legionella longbeachae
  REGION 1..168: note = tr|D3HNN9|D3HNN9_LEGLN Uncharacterized protein; OS = Legionella longbeachae serogroup 1 (strain NSW150); OX = 661367 GN=LLO_0174 PE=4 SV=1
MNEKKYLTTVELQKESMKFSAGHTTIFSATEREPLHGHMYGVYLALTTWVEENGMTFDYRYYKERIHKLCRYLNQTFLMPQYSPFLEYAEDEAYYYFTFNHKKIPFLKEDVTLLPVTNITVEELSKWFVHELIQDKDELDRHRIEKVVVKVFSAPGQSASHEWQRADE

SEQ ID NO: 21731 - protein, 165 aa, unidentified
  source 1..165: note = Legionella maceachernii
  REGION 1..165: note = tr|A0A0W0W1V9|A0A0W0W1V9_9GAMM 6-pyruvoyl tetrahydropterin synthase OS=Legionella maceachernii; OX = 466 GN=Lmac_1481 PE=4 SV=1
MMKKYLTTVELQKESMKFSAGHTTIFSATEREPLHGHMYAVYLALTTWVEENGMTFDYRYYKERIHNLCRSLNQTFLMPQFSPFLEFAEDEAYYYFTFNHKKIPFLKEDVTLMPLTNITVEELSRWFVNELIKNKTELERHRIEKVVVKVFSAPGQSASHEWQRS

SEQ ID NO: 21732 - protein, 165 aa, unidentified
  source 1..165: note = Legionella massiliensis
  REGION 1..165: note = tr|A0A078KWF6|A0A078KWF6_9GAMM Queuosine biosynthesis protein QueD OS=Legionella massiliensis; OX = 1034943 GN=BN59_00277 PE=4 SV=1
MKKYLTTVELQKESMKFSAGHTTIFSSTEREPLHGHMYGVYLALTTWVEENGMTFDYRYYKERIHKLCRHLNQTFLMPQFSPFLQFAEDDSYYYFTFNHKKIPFLKEDVTLMPLTNITVEELSRWFVEELVKDKAELIRHRLEKVVVKVFSAPGQSASHEWQRSE

SEQ ID NO: 21733 - protein, 164 aa, Legionella moravica
  REGION 1..164: note = tr|A0A378JZB2|A0A378JZB2_9GAMM 6-pyruvoyl tetrahydrobiopterin synthase OS=Legionella moravica; OX = 39962 GN=NCTC12239_03016 PE=4 SV=1
MKKYLTTVELQKESMKFSAGHTTIFSATEREPLHGHMYGVYLALSTWVEENGMTFDYRYYKERIHKLCRQLNQTFLMPQFSPFLEYAEDAEYYYFTFNGKKIPFLKEDVTLMPLTNITVEELSRWFVNELIKEHEELDKHRIDKVVVKVFSAPGQSASHEWHRD

SEQ ID NO: 21734 - protein, 165 aa, Legionella nautarum
  REGION 1..165: note = tr|A0A0W0WP18|A0A0W0WP18_9GAMM 6-pyruvoyl tetrahydropterin synthase OS=Legionella nautarum OX=45070; GN = Lnau_2054 PE=4 SV=1
MIKKYLTTVELQKESMKFSAGHTTIFSATEREPLHGHMYAVYLALTTWVEENGMTFDYRYYKERVHKLCRYLNQTFLMPQFSPFLEYAEDEAYYYFTFNHKKIPFLKEDVTLMPVTNITVEELSRWFVEELIKDKGELDRHRIEKVLIKVFSAPGQSASHEWQRS

SEQ ID NO: 21735 - protein, 164 aa, unidentified
  source 1..164: note = Legionella norrlandica
  REGION 1..164: note = tr|A0A0A2TA30|A0A0A2TA30_9GAMM 6-pyruvoyl tetrahydrobiopterin synthase OS=Legionella norrlandica; OX = 1498499 GN=EP47_00065 PE=4 SV=1
MKKYLTTVELQKESMKFSAGHTTIFSATEREPLHGHLYSVYLALTTWVEENGMTFDYRYYKERIHKLCRYLNQTFLMPQFSPFLEYSEDKEYYYFTFNKKKIPFLKEDVTLMPLTNITVEELSRWFINELIKEKEELDKHRIEKIVVKVFSAPGQSASHEWLRS

SEQ ID NO: 21736 - protein, 163 aa, Legionella oakridgensis; identical to SEQ ID NO: 21729
  REGION 1..163: note = tr|A0A0W0X1F0|A0A0W0X1F0_9GAMM 6-pyruvoyl tetrahydropterin synthase OS=Legionella oakridgensis; OX = 29423 GN=Loak_1330 PE=4 SV=1

SEQ ID NO: 21737 - protein, 163 aa, Legionella oakridgensis; identical to SEQ ID NO: 21729
  REGION 1..163: note = tr|W0BID2|W0BID2_9GAMM 6-pyruvoyl-tetrahydropterin synthase OS=Legionella oakridgensis ATCC 33761 = DSM 21215; OX = 1268635 GN=Loa_02933 PE=4 SV=1

SEQ ID NO: 21738 - protein, 168 aa, Legionella parisiensis
  REGION 1..168: note = tr|A0A1E5JM02|A0A1E5JM02_9GAMM Uncharacterized protein OS=Legionella parisiensis OX=45071 GN=lpari_03314; PE = 4 SV=1
MNRKKYLTTVELQKESMKFSAGHTTIFSATEREPLHGHMYGVYLALTTWVEENGMTFDYRYYKERIHKLCRYLNQTFLMPQFSPFLEYAEDEEYYYFTFNHKRIPFLKEDVTLLPVTNITVEELSRWFVHELIRDKAELDRHRIEKVVVKVFSAPGQSASHQWQREND

SEQ ID NO: 21739 - protein, 127 aa, Legionella parisiensis
  REGION 1..127: note = tr|A0A1E5JUF3|A0A1E5JUF3_9GAMM Uncharacterized protein OS=Legionella parisiensis OX=45071 GN=lpari_00799; PE = 4 SV=1
MHHLMLRKNFIAQHFLIGKDFGAENLRHSHHYSFELEIENTKLDPLNFLIDIVEIRAHIDQLISYFQDKILNELPEFKNQNPSLELFSKILWQKFNNHIELPVDSQITVRLWEDDIAQASYRENKCA

SEQ ID NO: 21740 - protein, 164 aa, Legionella pneumophila
  REGION 1..164: note = tr|A0A140IZG0|A0A140IZG0_LEGPN 6-pyruvoyl tetrahydrobiopterin synthase OS=Legionella pneumophila subsp. pascullei OX=91890 GN=AXF37_14310 PE=4 SV=1
MKKYLTTVELQKESMKFSAGHTTIFSATEREPLHGHMYSVYLALTTWVEENGMTFDYRYYKERIHKLCRYLNQTFLMPQFSPFLEYSEDEEYYYFIFNKKKIPFLKEDVTLMPLTNITVEELSRWFVNELIKEKEELDKHRIEKVVVKVFSAPGQSASHEWLRS

SEQ ID NO: 21741 - protein, 164 aa, Legionella pneumophila
  REGION 1..164: note = tr|Q5ZRL6|Q5ZRL6_LEGPH 6-pyruvoyl tetrahydropterin synthase, putative OS=Legionella pneumophila subsp. pneumophila (strain Philadelphia 1 / ATCC 33152 / DSM 7513) OX =272624 GN=lpg2865 PE=4 SV=1
MKKYLTTVELQKESMKFSAGHTTIFSATEREPLHGHMYSVYLALTTWVEENGMTFDYRYYKERIHKLCRYLNQTFLMPQFSPFLEYSEDEEYYYFIFNKKKIPFLKEDITLMPLTNITVEELSRWFVNELIKEKEELDNHRIEKVVVKVFSAPGQSASHEWLRS

SEQ ID NO: 21742 - protein, 164 aa, Legionella quateirensis
  REGION 1..164: note = tr|A0A378L0P7|A0A378L0P7_9GAMM 6-pyruvoyl tetrahydrobiopterin synthase OS=Legionella quateirensis; OX = 45072 GN=NCTC12376_03206 PE=4 SV=1
MKKYLTTVELQKESMKFSAGHTTIFSATEREPLHGHMYGVYLALSTWVEENGMTFDYRYYKERIHKLCRQLNQTFLMPQFSPFLEYAEDTEYYYFTFNGKKIPFLKEDVTLMPLTNITVEELSRWFVNELIKEHQELDKHRIDKVVVKVFSAPGQSASHEWQRD

SEQ ID NO: 21743 - protein, 169 aa, Legionella quinlivanii
  REGION 1..169: note = tr|A0A0W0Y580|A0A0W0Y580_9GAMM 6-pyruvoyl tetrahydropterin synthase OS=Legionella quinlivanii; OX = 45073 GN=Lqui_0948 PE=4 SV=1
MNKYLTTVELQKESMKFSAGHTTIFSATEREPLHGHMYGVYLALTTWVEENGMTFDYRYYKQRIHNLCRFLNQTFLMPQYSPFLTFSEDEEYYYFVFNKKKIPFLKEDVTLMPLTNITVEELSRWFVEELIKEKEELDRHRIEKVLVKVFSAPGQSASHEWQRQPQAGK

SEQ ID NO: 21744 - protein, 170 aa, Legionella quinlivanii
  REGION 1..170: note = tr|A0A364LKQ1|A0A364LKQ1_9GAMM 6-pyruvoyl tetrahydrobiopterin synthase OS=Legionella quinlivanii; OX = 45073 GN=B1207_03825 PE=4 SV=1
MSKYLTTVELQKESMKFSAGHTTIFSATEREPLHGHMYGVYLALTTWVEENGMTFDYRYYKQRIHNLCRFLNQTFLMPQYSPFLQFSEDEEYYYFVFNKKKIPFLKEDVTLMPLTNITVEELSRWFVEELIKEKEELDRHRIEKVVVKVFSAPGQSASHGWQRQHRQAND

SEQ ID NO: 21745 - protein, 164 aa, Legionella rubrilucens
  REGION 1..164: note = tr|A0A0W0XMC8|A0A0W0XMC8_9GAMM 6-pyruvoyl tetrahydropterin synthase OS=Legionella rubrilucens OX=458; GN = Lrub_2556 PE=4 SV=1
MSKYLTTVELQKESMKFSAGHTTLFSATEREPLHGHMYNVYLALTTWVEENGMTFDYRYYKERIHKLCRQLNQTFLMPQFSPFLQYAEDETYLYFTFNHKKIPFLKEDVTLMPLTNITVEELSRWFVQELIKDTAELDRHRIEKVVVKVFSAPGQSASHEWQRT

SEQ ID NO: 21746 - protein, 90 aa, Legionella sainthelensi
  REGION 1..90: note = tr|A0A3S4L5N4|A0A3S4L5N4_9GAMM 6-pyruvoyl tetrahydrobiopterin synthase OS=Legionella sainthelensi; OX = 28087 GN=NCTC12450_00123 PE=4 SV=1
MTFDYRYYKERIHKLCRYLNQTFLMPQFSPFLEYAEDEAYYYFTFNYKKIPFLKEDVTLLPVTNITVEELSKWFVHELIQDKDELDRPSH

SEQ ID NO: 21747 - protein, 168 aa, Legionella sainthelensi
  REGION 1..168: note = tr|A0A2H5FIU2|A0A2H5FIU2_9GAMM 6-pyruvoyl tetrahydrobiopterin synthase OS=Legionella sainthelensi; OX = 28087 GN=CAB17_04895 PE=4 SV=1
MNEKKYLTTVELQKESMKFSAGHTTIFSATEREPLHGHMYGVYLALTTWVEENGMTFDYRYYKERIHKLCRYLNQTFLMPQFSPFLEYAEDEAYYYFTFNYKKIPFLKEDVTLLPVTNITVEELSKWFVHELIQDKDELDRHRIEKVVVKVFSAPGQSASHEWQRADE

SEQ ID NO: 21748 - protein, 168 aa, Legionella santicrucis
  REGION 1..168: note = tr|A0A0W0Y9G4|A0A0W0Y9G4_9GAMM 6-pyruvoyl tetrahydropterin synthase OS=Legionella santicrucis; OX = 45074 GN=Lsan_3613 PE=4 SV=1
MNEKKYLTTVELQKESMKFSAGHTTIFSATEREPLHGHMYGVYLALTTWVEENGMTFDYRYYKERIHKLCRYLNQTFLMPQFSPFLEYAEDEAYYYFTFNHKKIPFLKEDVTLLPVTNITVEELSKWFVHELIQDKDELDRHRIERVVVKIFSAPGQSASHEWQRADE

SEQ ID NO: 21749 - protein, 165 aa, Legionella shakespearei
  REGION 1..165: note = tr|A0A0W0YKW2|A0A0W0YKW2_9GAMM 6-pyruvoyl tetrahydropterin synthase OS=Legionella shakespearei DSM 23087 OX=1122169 GN=Lsha_2347 PE=4 SV=1
MKRYLTTVELQKESMKFSAGHTTIFSATEREPLHGHMYCVYLALTTWVEENGMTFDYRYYKERIHVLCHQLNQTFLMPQFSPFLQYAEDDEYYYFTFNHKKIPFLKEDVTLMPLSNITVEELSRWFVNELIKDTEELDRHRIEKVVVKVFSAPGQSANHEWHRVK

SEQ ID NO: 21750 - protein, 163 aa, Legionella sp.
  REGION 1..163: note = tr|A0A3S0XTJ0|A0A3S0XTJ0_9GAMM 6-pyruvoyl tetrahydrobiopterin synthase OS=Legionella sp. km714; OX = 2498110 GN=EKM59_04485 PE=4 SV=1
MGKYLTTVELQKESMKFSAGHTTIFSATEREPLHGHMYGVYLALTTWVEDNGMTFDYRYYKKRIHELCRQLNQTFLMPQFSPFLQYAEDDEYYYFTFNHKKIPFLKEDVTLMPLANITVEELSRWFINELIKDTAELERHRIERIVVKVFSAPGQSASHSWER

SEQ ID NO: 21751 - protein, 168 aa, Legionella sp.
  REGION 1..168: note = tr|A0A1Q3TWN2|A0A1Q3TWN2_9GAMM 6-pyruvoyl tetrahydrobiopterin synthase OS=Legionella sp. 39-23; OX = 1895902 GN=BGO44_16850 PE=4 SV=1
MNIKKYLTTVELQKESMKFSAGHTTIFSATEREPLHGHMYGVYLALTTWVEENGMTFDYRYYKERIHKLCRHLNQTFLMPQFSPFLEYAEDKEYYYFTFNHKKIPFLKEDVTLLPVTNITVEELSRWFVNELIKDKAELDRHRIEQVLVKVFSAPGQSASHQWQRVHE

SEQ ID NO: 21752 - protein, 172 aa, Legionella spiritensis
  REGION 1..172: note = tr|A0A0W0ZAU7|A0A0W0ZAU7_LEGSP 6-pyruvoyl tetrahydropterin synthase OS=Legionella spiritensis OX=452; GN = Lspi_0040 PE=4 SV=1
MTMSRYLTTVELQKESMKFSAGHTTLFSATEREPLHGHMYTVYLALTTWVEENGMTFDYRYYKDRIHQLCRHLNQTFLMPKFSPFLTFAEDDTYYYFTFNHKKIPFLKEDVTIMPLTNITVEELSRWFVEELIKDREELIRHRIEKIVIKVFSAPGQSASHQWLRPQESGQE

SEQ ID NO: 21753 - protein, 168 aa, unidentified
  source 1..168: note = Legionella steelei
  REGION 1..168: note = tr|A0A0W0ZK87|A0A0W0ZK87_9GAMM 6-pyruvoyl tetrahydropterin synthase OS=Legionella steelei OX=947033; GN = Lste_2753 PE=4 SV=1
MNIKKYLTTVELQKESMKFSAGHTTIFSATEREPLHGHMYGVYLALTTWVEENGMTFDYRYYKERIHKLCRHLNQTFLMPQFSPFLEYAEDKEYYYFTFNHKRIPFLKEDVTLLPVTNITVEELSRWFVNELIKDKAELDRHRIEQVLVKVFSAPGQSASHQWQRMHE

SEQ ID NO: 21754 - protein, 168 aa, Legionella steigerwaltii
  REGION 1..168: note = tr|A0A378L7B4|A0A378L7B4_9GAMM 6-pyruvoyl tetrahydrobiopterin synthase OS=Legionella steigerwaltii; OX = 460 GN=NCTC11991_00137 PE=4 SV=1
MNKKKYLTTVELQKESMKFSAGHTTIFSATEREPLHGHMYGVYLALTTWVEENGMTFDYRYYKERIHKLCRYLNQTFLMPQFSPFLEYAEDEEYYYFTFNHKKIPFLKEDVTLLPVTNITVEELSRWFVNELIKDRAELDRHRIENVLVKVFSAPGQSASHQWQRVHE

SEQ ID NO: 21755 - protein, 164 aa, Legionella taurinensis
  REGION 1..164: note = tr|A0A3A5LGL1|A0A3A5LGL1_9GAMM 6-pyruvoyl tetrahydrobiopterin synthase OS=Legionella taurinensis; OX = 70611 GN=D6J04_09875 PE=4 SV=1
MSKYLTTVELQKESMKFSAGHTTIFSATEREPLHGHMYNVYLALTTWVEENGMTFDYRYYKERIHKLCRQLNQTFLMPQFSPFLQYAEDETYLYFTFNHKKIPFLKEDVTLMPLTNITVEELSRWFVQELIKDTAELDRHRIEKVVVKVFSAPGQSASHEWQRT

SEQ ID NO: 21756 - protein, 168 aa, Legionella tucsonensis
  REGION 1..168: note = tr|A0A0W0ZSX7|A0A0W0ZSX7_9GAMM 6-pyruvoyl tetrahydropterin synthase OS=Legionella tucsonensis; OX = 40335 GN=Ltuc_0140 PE=4 SV=1
MNRKKYLTTVELQKESMKFSAGHTTIFSATEREPLHGHMYGVYLALTTWVEENGMTFDYRYYKERIHKLCRYLNQTFLMPQFSPFLEYAEDEEYYYFTFNHKKIPFLKEDVTLLPVTNITVEELSRWFVHELIKDTAELDRHRIEKVVVKVFSAPGQSASHQWQRANE

SEQ ID NO: 21757 - protein, 127 aa, Legionella tucsonensis
  REGION 1..127: note = tr|A0A0W0ZXK2|A0A0W0ZXK2_9GAMM 6-pyruvoyl tetrahydropterin synthase OS=Legionella tucsonensis; OX = 40335 GN=Ltuc_1732 PE=4 SV=1
MHHLMLRKNFIAQHFLIGKDFGAENLRHSHHYSFELEIENTKLDPFNFLIDIVEVRTHIDQLISYFQDKILNELPEFKNQNPSLELFSKILWQKFNNHIELPVDSQITVRLWEDDIAQASYRENKCA

SEQ ID NO: 21758 - protein, 125 aa, Legionella wadsworthii
  REGION 1..125: note = tr|A0A378LUL8|A0A378LUL8_9GAMM Queuosine biosynthesis protein QueD OS=Legionella wadsworthii; OX = 28088 GN=NCTC11532_01706 PE=4 SV=1
MHSLIIRKDFIAQHFLIGKDFGFESSIHSHNYGFELEIENALLNQYNFLVDVEDINKQINTLIDYFQDRILNDLPEFKDQNPSLEFFSKILWKKFNEDFFIPANSLVTVRLSEDRIAQAAYREIR

SEQ ID NO: 21759 - protein, 168 aa, Legionella wadsworthii
  REGION 1..168: note = tr|A0A378LQ38|A0A378LQ38_9GAMM 6-pyruvoyl tetrahydrobiopterin synthase OS=Legionella wadsworthii; OX = 28088 GN=NCTC11532_00119 PE=4 SV=1
MNKKKYLTTVELQKESMKFSAGHTTIFSATEREPLHGHMYGVYLALTTWVEENGMTFDYRYYKERTHKLCRYLNQTFLMPQFSPFLEYAEDDEYYYFTFNHKKIPFLKEDVTLLPVSNITVEELSRWFVQELIKDKEELDRHRIEKIIVKVFSAPGQSASHQWQRENE

SEQ ID NO: 21760 - protein, 165 aa, Legionella waltersii
  REGION 1..165: note = tr|A0A0W1A571|A0A0W1A571_9GAMM 6-pyruvoyl tetrahydropterin synthase OS=Legionella waltersii OX=66969; GN = Lwal_2090 PE=4 SV=1
MSKYLTTVELQKETMKFSAGHTTIFSATEREPLHGHMYTVYLALSTWVEENGMTFDYRYYKERIHKLCRYLNQTFLMPEFSPFLEYDEDKEYYYFTFNKKKMPFLKEDVTILPVTNITVEELSRWFVNELIKDEVELERHRIERVVVKVFSAPGQSASHEWQKSK

SEQ ID NO: 21761 - protein, 164 aa, Legionella worsleiensis
  REGION 1..164: note = tr|A0A0W1AEP1|A0A0W1AEP1_9GAMM 6-pyruvoyl tetrahydropterin synthase OS=Legionella worsleiensis; OX = 45076 GN=Lwor_1328 PE=4 SV=1
MKKYLTTVELQKESMKFSAGHTTIFSATEREPLHGHMYGVYLALSTWVEENGMTFDYRYYKERIHKLCRQLNQTFLMPQFSPFLQYAEDEEYYYFTFNGKKIPFLKEDVTLMPLTNITVEELSRWFVNELIKEHEELDKHRIDKVVVKVFSAPGQSASHEWHRD

SEQ ID NO: 21762 - protein, 167 aa, unidentified
  source 1..167: note = Legionellales bacterium
  REGION 1..167: note = tr|A0A1G0WVR7|A0A1G0WVR7_9GAMM 6-pyruvoyl tetrahydrobiopterin synthase OS=Legionellales bacterium RIFCSPHIGHO2_12_FULL_37_14 OX=1798568 GN=A3F18_04570 PE=4; SV = 1
MTKRYVSTIELQKESMKFAAGHTTIFSATEREPLHGHHYTVYFALTTWVFENGMTFDYRYYKAKLKELCSKLHQTFLMPMNSPYLTFSEDEEYYYFVFNNKKIPFLKEDVTLMPLTNITVEELAKWFIDNLLKDKRELDKHRVEKMVIKVFSAPGQSGSHTWEKEAK

SEQ ID NO: 21763 - protein, 118 aa, unidentified
  source 1..118: note = Legionellales bacterium
  REGION 1..118: note = tr|A0A2E6KSL6|A0A2E6KSL6_9GAMM 6-carboxy-5,6,7,8-tetrahydropterin synthase; OS = Legionellales bacterium OX=2026754 GN=queD PE=3 SV=1
MEIYKSFRIEAAHRLPNLPSHHKCSRLHGHSFVIEVHLSGEIDKKHGWVMDFADISGAFQSVYKRLDHHYLNDIDGLENPTSENLAKWIWNELIINLPSLHSVVVKETCNSGCVYKGE

SEQ ID NO: 21764 - protein, 120 aa, Leifsonia aquatica
  REGION 1..120: note = tr|U2RXJ8|U2RXJ8_LEIAQ 6-carboxy-5,6,7,8-tetrahydropterin synthase OS=Leifsonia aquatica ATCC 14665 OX=1358026 GN=N136_00380 PE=3 SV=1
MQPLRTEISFEFTFQAAHTLPWHSGKCRNMHGHSYRCELFFAGQLTDEGIVVDFDAVDSFVAGELMPVLDHTYLNDSMPNPTAELIAARIFLIADAAGLPISGVRLWETATSSAIVRPTP

SEQ ID NO: 21765 - protein, 127 aa, unidentified
  source 1..127: note = Leifsonia flava
  REGION 1..127: note = tr|A0A4Y9QUN4|A0A4Y9QUN4_9MICO 6-carboxy-5,6,7,8-tetrahydropterin synthase OS=Leifsonia flava OX=2561933 GN=queD PE=3 SV=1
MTFYAELARTFSFESAHYLPNVPDGHKCGRMHGHSYTVEVQVAGNVGDKSGFVQDFGDLSVAFAPVQEQLDHHLLNEIEGLENPTSEHLARWIWLRLVDELPLLSAIVVSETLRSTCTYRGEPNGAK

SEQ ID NO: 21766 - protein, 131 aa, Leifsonia sp.
  REGION 1..131: note = tr|A0A3D8N878|A0A3D8N878_9MICO 6-carboxytetrahydropterin synthase OS=Leifsonia sp. ku-ls; OX = 2220072 GN=DOE76_07675 PE=4 SV=1
MPYTVTVRDHMMVAHSFTGEAFGPAQRLHGATLVVDATFGADELDADGVVVDIGRASAALAEVTGALTYRNLDELPDFAGRNTTTEVLCRTIADRLAERVSASELGGGAVTSITVTLHESHIAWASYSRTL

SEQ ID NO: 21767 - protein, 131 aa, Leifsonia sp.
  REGION 1..131: note = tr|A0A0Q8V2M1|A0A0Q8V2M1_9MICO 6-pyruvoyl tetrahydropterin synthase OS=Leifsonia sp. Root227; OX = 1736496 GN=ASE16_00975 PE=4 SV=1
MPYTVTVRDHMMVAHSFTGEVFGPAQRLHGATFIVDATFGADDVDADGIVVDIGLVTAVLGEITGSLTYRNLDDEPEFAGTNTTTEVLCRVIADRLAARAADGGLGTNSIASVSVTLHESHIAWASYSRPL

SEQ ID NO: 21768 - protein, 193 aa, Leifsonia xyli
  REGION 1..193: note = tr|A0A2W5RKF9|A0A2W5RKF9_9MICO 6-pyruvoyl tetrahydrobiopterin synthase OS=Leifsonia xyli OX=1575; GN = DI534_14840 PE=4 SV=1
MSYKVIRTHEICAGHRVVGHESKCRHLHGHNYMFHFHVAPKMKTVAVATGKARHVEGQGFKQTYRDMTVNDRTKLDAVGRVIDFSVVKSTLCEWLELNWDHKFLHWEKDDLINGLAALAKNDQTFDEDQRDVGQKDFHHFTDSLVALPFNPTAENLAAYMVNVIGPRLLDEHDVELVQCVIEETSKCHVEYTK

SEQ ID NO: 21769 - protein, 128 aa, Leifsonia xyli
  REGION 1..128: note = tr|A0A172X5H5|A0A172X5H5_9MICO 6-pyruvoyl tetrahydropterin synthase OS=Leifsonia xyli OX=1575; GN = A0130_09595 PE=4 SV=1
MPYTVTVRDHLMVAHSFRGEVFGPAQRLHGATFVVDASFGADELDADGVVVDIGRASAALADITGALTYRNLDEDPDFAGVNTTTEVLCRTIADRLAERAGDLGGALTSITVTLHESHIAWASYSRSL

SEQ ID NO: 21770 - protein, 117 aa, unidentified
  source 1..117: note = Leisingera aquaemixtae
  REGION 1..117: note = tr|A0A0P1HEG5|A0A0P1HEG5_9RHOB 6-carboxy-5,6,7,8-tetrahydropterin synthase OS=Leisingera aquaemixtae OX=1396826 GN=queD PE=3 SV=1
MFRITKEFHFSASHQLTHLPPDHQCARLHGHNYVVVVELAAKELNSDGFVRDYHELKPLKDYIDGTFDHRHLNDVLDGYSTAENMAKHFYDWCNARWPEVAAVKVSETPKTWAEYRP

SEQ ID NO: 21771 - protein, 117 aa, Leisingera methylohalidivorans
  REGION 1..117: note = tr|V9VP58|V9VP58_9RHOB 6-carboxy-5,6,7,8-tetrahydropterin synthase OS=Leisingera methylohalidivorans DSM 14336 OX=999552 GN=METH_07025 PE=3; SV = 1
MFRITKEFHFSASHQLTHLPSDHQCARLHGHNYVVVVELAAQELNSDGFVRDYHELKPLKEYIDSTFDHRHLNDVLEGHSTAENMAKHFYDWCHIRWPEVAAVKISETPKTWAEYRP

SEQ ID NO: 21772 - protein, 117 aa, Leisingera sp.
  REGION 1..117: note = tr|A0A0B4FI63|A0A0B4FI63_9RHOB 6-carboxy-5,6,7,8-tetrahydropterin synthase OS=Leisingera sp. ANG1 OX=1002340 GN=GC1_04230 PE=3 SV=1
MFRITKEFHFSASHQLTHLPSDHQCARLHGHNYVVVVELAAKELNSDGFVRDYHELKPLKDYIDGTFDHRHLNDVLDGHSTAENMARHFYDWCHARWPEVSAVKVSETPKTWAEYRP

SEQ ID NO: 21773 - protein, 117 aa, Leisingera sp.
  REGION 1..117: note = tr|A0A481PJE7|A0A481PJE7_9RHOB 6-carboxy-5,6,7,8-tetrahydropterin synthase OS=Leisingera sp. NJS204 OX=2508307 GN=queD PE=3 SV=1
MFRITKEFHFSASHQLTHLPTDHQCARLHGHNYVVVVELTAKELNADGFVRDYHELKPLKEYIDGTFDHRHLNDVLEGHSTAENMAKHFYDWCHARWPEVAAVKVSETPKTWAEYRP

SEQ ID NO: 21774 - protein, 120 aa, unidentified
  source 1..120: note = Lelliottia amnigena
  REGION 1..120: note = tr|A0A1A9FI57|A0A1A9FI57_LELAM 6-carboxy-5,6,7,8-tetrahydropterin synthase OS=Lelliottia amnigena OX=61646 GN=A8A57_16735 PE=3 SV=1
MSTTLFKDFTFEAAHHLPHVPAGHKCGRLHGHSFMVRLEITGEVDPHTGWIMDFSELKAAFKPTYDRLDHYYLNDIPGLENPTSEVLAKWIWDVMKPLVPLLSAVMIKETCTAGCVYRGE

SEQ ID NO: 21775 - protein, 121 aa, unidentified
  source 1..121: note = Lelliottia amnigena
  REGION 1..121: note = tr|A0A3S5XT95|A0A3S5XT95_LELAM 6-carboxy-5,6,7,8-tetrahydropterin synthase OS=Lelliottia amnigena OX=61646 GN=queD PE=3 SV=1
MMSTTLFKDFIFEAAHHLPHVPQGHKCGRLHGHSFMVRLEITGEVDPHTGWIMDFSELKAAFKPTYDRLDHYYLNDIPGLENPTSEVLAKWIWDQMKPRVPLLSSVMIKETCTAGCVYRGE

SEQ ID NO: 21776 - protein, 120 aa, unidentified; identical to SEQ ID NO: 20131
  source 1..120: note = Lelliottia nimipressuralis
  REGION 1..120: note = tr|A0A4Y8IU64|A0A4Y8IU64_9ENTR 6-carboxy-5,6,7,8-tetrahydropterin synthase OS=Lelliottia nimipressuralis OX=69220 GN=queD PE=3 SV=1

SEQ ID NO: 21777 - protein, 120 aa, unidentified; identical to SEQ ID NO: 20154
  source 1..120: note = Lelliottia nimipressuralis
  REGION 1..120: note = tr|A0A1J5VMF8|A0A1J5VMF8_9ENTR 6-carboxy-5,6,7,8-tetrahydropterin synthase OS=Lelliottia nimipressuralis OX=69220 GN=queD PE=3 SV=1

SEQ ID NO: 21778 - protein, 121 aa, unidentified
  source 1..121: note = Lelliottia sp.
  REGION 1..121: note = tr|A0A2S5C9N2|A0A2S5C9N2_9ENTR 6-carboxy-5,6,7,8-tetrahydropterin synthase OS=Lelliottia sp. 7254-16 OX=2080842 GN=queD PE=3 SV=1
MMSTTLFKDFMFEAAHHLPHVPEGHKCGRLHGHSFMVRLEITGEVDPHTGWIMDFSELKAAFKPTYNRLDHYYLNDIPGLENPTSEVLAKWIWDQMKPLVPLLSAVTIKETCTAGCVYRGE

SEQ ID NO: 21779 - protein, 157 aa, Lentibacillus sp.
  REGION 1..157: note = tr|A0A4Q3X944|A0A4Q3X944_9BACI 6-carboxytetrahydropterin synthase QueD OS=Lentibacillus sp. SSKP1-9 OX=2510307 GN=queD PE=4 SV=1
MHGFRIVDKLQKIDEDIGRNQLKYHSKRVMVSKEFTFDAAHHLHEYEGKCMNLHGHTYKVIFGISGFVDDRGLVIDFGDVKEIWTNEIKNFLDHKYLNETLPPMNTTAENMVVWIYEKMKDALEREEQHQGARVEFVRLYETPTSYGEARREWMESE

SEQ ID NO: 21780 - protein, 150 aa, unidentified
  source 1..150: note = Lentimicrobiaceae bacterium
  REGION 1..150: note = tr|A0A2E2XYW0|A0A2E2XYW0_9BACT 6-carboxytetrahydropterin synthase QueD; OS = Lentimicrobiaceae bacterium OX=2026756 GN=CMF58_04660; PE = 4 SV=1
MKQSTIRITKEFKFEMAHALKGYDGPCKNIHGHSYELSVTISGKPINDENNPKLGMVMDFGELKQIIKREVVDLFDHALVLNNSMDTDLLKSLSKNFEKVILTDYQPTSEMMIIDFASRISSELPSHVTLKYLLLRETVTSFAEWYADEN

SEQ ID NO: 21781 - protein, 136 aa, unidentified
  source 1..136: note = Lentimicrobiaceae bacterium
  REGION 1..136: note = tr|A0A2E2XZQ6|A0A2E2XZQ6_9BACT 6-pyruvoyl tetrahydrobiopterin synthase OS=Lentimicrobiaceae bacterium OX=2026756 GN=CMF58_05855 PE=4 SV=1
MIHITRRERFNAAHRLFRADYSDEKNNEVFGKCSNPNWHGHNYELFVTVKGDINNETGFLINLKVLSKIIKTNVINKLDHKNINLEVDFMKGKLASTENLAASIWNELEGSVNVLGAELHCVKVVESENNFVEYYG

SEQ ID NO: 21782 - protein, 148 aa, unidentified
  source 1..148: note = Lentimicrobium saccharophilum
  REGION 1..148: note = tr|A0A0S7BXF2|A0A0S7BXF2_9BACT 6-carboxy-5,6,7,8-tetrahydropterin synthase; OS = Lentimicrobium saccharophilum OX=1678841 GN=TBC1_1151; PE = 3 SV=1
MSVIRLTKEFKFEMAHALPGYDGPCRHIHGHSYELYVTIKGEPIRDPASPHYGMVMDFRQLKEIVRGKIVDEFDHSLVLHRATAPEEFSGMKDFVGRLILVDYQPTSENLLSDFADRLKNSLPEGVNLHSLRLRETVTSYAEWVAGDN

SEQ ID NO: 21783 - protein, 137 aa, unidentified
  source 1..137: note = Lentimicrobium saccharophilum
  REGION 1..137: note = tr|A0A0S7BRI4|A0A0S7BRI4_9BACT 6-pyruvoyl-tetrahydropterin synthase OS=Lentimicrobium saccharophilum OX=1678841 GN=TBC1_111614 PE=4 SV=1
MIFITRKEHFNAAHRLFKAEYSDEKNLEVFGKCSNPNWHGHNYELFVTVKGPVDPETGFLINLKDLSKIINQFVVDKLDHKNVNLEVDFMSGKLASTENLAIAIWEQLEQPISETGARLHCVKLFETERNFVEYFGN

SEQ ID NO: 21784 - protein, 144 aa, Lentisphaera araneosa
  REGION 1..144: note = tr|A6DNS1|A6DNS1_9BACT Uncharacterized protein; OS = Lentisphaera araneosa HTCC2155 OX=313628 GN=LNTAR_18825; PE = 4 SV=1
MYRSTKSFFYLPCAHRQWRDDGDCQLVHGYDRSIHFTFESDGLDDKCWVMDFGGLKHIKAWLEDKFDHTLLINEDDPEMAFFEEMDRKGLCRLRVLPNIGMEGSAKYIFDYVDPWVQEQTDGRVRVFSVECRENEKNSAIYYRD

SEQ ID NO: 21785 - protein, 154 aa, unidentified
  source 1..154: note = Lentisphaerae bacterium
  REGION 1..154: note = tr|A0A1G0W942|A0A1G0W942_9BACT Uncharacterized protein OS=Lentisphaerae bacterium GWF2_38_69 OX=1798570; GN = A2X47_07735 PE=4 SV=1
MYRICKIMWIETGHFLSSSKNSSNCRMPHGHSRKVEIVLASKKLDENSMVCDFQIIKSAFGEFIDSFDHAMLINKNSKHYSYFKENFERVIPFDTDPTSEIISEYFFKHIESQLIREKVYTNKDGVTYAIGDYVFLERVRVWETSSCWAEYSGE

SEQ ID NO: 21786 - protein, 122 aa, unidentified
  source 1..122: note = Lentisphaerae bacterium
  REGION 1..122: note = tr|A0A1V5V742|A0A1V5V742_9BACT 6-carboxy-5,6,7,8-tetrahydropterin synthase; OS = Lentisphaerae bacterium ADurb.Bin242 OX=1852900 GN=queD; PE = 3 SV=1
MFELDIRREFSAAHSLRGYNGNCSNLHGHNWVVQIFIRSEKLDEVGIAMDFKILKRELDVILEGLDHKNLNEHPAFKEKNPTSEHLAMYIFRELASKINTENIHVSKVRVCESSNSGASYCE

SEQ ID NO: 21787 - protein, 122 aa, unidentified
  source 1..122: note = Lentisphaerales bacterium
  REGION 1..122: note = tr|A0A524MSQ7|A0A524MSQ7_9BACT 6-carboxy-5,6,7,8-tetrahydropterin synthase; OS = Lentisphaerales bacterium OX=2448604 GN=queD PE=3 SV=1
MHEISIRTHFSAAHRLAGYEGTCANLHGHNWEVEVVVCGEELDETGMLVDFRKLKSAVREATSGLDHADLNALAAFKSSNPTSENIARHLFERLRETLAGHGCRLDHVTVRETPDSSATYRA

SEQ ID NO: 21788 - protein, 151 aa, unidentified
  source 1..151: note = Lentisphaeria bacterium
  REGION 1..151: note = tr|A0A348XHG0|A0A348XHG0_9BACT 6-carboxytetrahydropterin synthase QueD OS=Lentisphaeria bacterium OX=2053569 GN=DCR55_08430 PE=4 SV=1
MNGTTQITRIIEWDMGHRVPNHKSKCRNPHGHRYRLELTVRGAVIATQGDSSEGMVHDFGDLKTALTKHIHDVLDHGFMLAESDTTMRAFYESCDEEFRVVVVPFIPTAENIACWCYEQLNGVIPRSLKIARLRLFETPNSWADYLPENAE

SEQ ID NO: 21789 - protein, 187 aa, unidentified
  source 1..187: note = Lentisphaeria bacterium
  REGION 1..187: note = tr|A0A356JQ79|A0A356JQ79_9BACT Rubredoxin; OS = Lentisphaeria bacterium OX=2053569 GN=DD673_06940 PE=4; SV = 1
MRSITKFELQYAHRFYKFQGEAQYLHGHTGVLTIEVEDAIEPGVNMVYPCNEIQKVAWNVLKNFDHALVLREDDPLLPAILDVYEKQGIRNGAPANKMKGEAFRTGLATAYPDCRLVVTKETMTVEGMIKIVYDLLKDKLNIAKITFTSGVNAAAQEYAPGKTIDRCPLCGVALIDGVCPKCGYRKH

SEQ ID NO: 21790 - protein, 162 aa, unidentified
  source 1..162: note = Lentzea aerocolonigenes
  REGION 1..162: note = tr|A0A0F0H3P4|A0A0F0H3P4_LENAE 6-pyruvoyl tetrahydrobiopterin synthase OS=Lentzea aerocolonigenes; OX = 68170 GN=UK23_11200 PE=4 SV=1
MSAHSVSVRHNFETAHRLPHLAGKCVNLHGHSWWMEAEVSAPALHAGAVVEFGALKARVREWIDVHLDHGAMLGADDPLVNVLAEHKSKVYRFGAQDPEPAEQLAHGLAHPTVEAVAELLARVVEDALRSLPAAPGARVAEVTVRETHVNSASWRSTEKDSS

SEQ ID NO: 21791 - protein, 136 aa, unidentified
  source 1..136: note = Lentzea aerocolonigenes
  REGION 1..136: note = tr|A0A0F0H4A9|A0A0F0H4A9_LENAE 6-pyruvoyl tetrahydropterin synthase OS=Lentzea aerocolonigenes; OX = 68170 GN=UK23_11100 PE=4 SV=1
MFSITVRDHVMIAHSFRGEVFGPAQRLHGATFLVDATFKRLELDSDNIVVDIGLATQELNKVLAAFNYRNLDEEPQFAGINTSTEWLAKHIADQLAEKISEGALGEGAHGIDAIAVTLHESHVAWAGYERALRTAG

SEQ ID NO: 21792 - protein, 103 aa, Lentzea albida
  REGION 1..103: note = tr|A0A1H9TQS5|A0A1H9TQS5_9PSEU 6-pyruvoyl tetrahydropterin synthase OS=Lentzea albida OX=65499; GN = SAMN04488000_114130 PE=4 SV=1
MDATFKRTELDSDNIVVDIGLATQELSGVLAEFNYRNLDEEPQFAGINTSTEWLAKHIADQLADKISAGALGEGAHGIDAIAVTLHESHVAWASYERALRPSG

SEQ ID NO: 21793 - protein, 103 aa, Lentzea albidocapillata
  REGION 1..103: note = tr|A0A1W2FE66|A0A1W2FE66_9PSEU 6-pyruvoyl tetrahydropterin synthase OS=Lentzea albidocapillata; OX = 40571 GN=SAMN05660733_05691 PE=4 SV=1
MDATFKRAELDSDNIVVDIGLATQELNKVLAAFNYRNLDEEPQFAGINTSTEWLAKHIADQLADRISEGALGEGAHGIDAIAVTLHESHVAWAGYERALRPSG

SEQ ID NO: 21794 - protein, 104 aa, Lentzea flaviverrucosa
  REGION 1..104: note = tr|A0A1H9VJS6|A0A1H9VJS6_9PSEU 6-pyruvoyl tetrahydropterin synthase OS=Lentzea flaviverrucosa; OX = 200379 GN=SAMN05216195_110117 PE=4 SV=1
MVDATFKRAELDSDNIVVDIGLATQELNKVLAAFNYRNLDEEPQFAGINTSTEWLAKHIADQLADKISEGALGEGAHGIDAIAVTLHESHVAWAGYERALRPSG

SEQ ID NO: 21795 - protein, 136 aa, unidentified
  source 1..136: note = Lentzea guizhouensis
  REGION 1..136: note = tr|A0A1B2HDL9|A0A1B2HDL9_9PSEU Uncharacterized protein OS=Lentzea guizhouensis OX=1586287 GN=BBK82_06695; PE = 4 SV=1
MFSITVRDHVMIAHSFRGEVFGPAQRLHGATFVVDATFKRAELDQDNIVVDIGLATQELGKVLAAFNYRNLDEEPQFAGINTSTEWLAKHIADQLADAIVAGALGEGAHGIDGITVTLHESHVAWASYERALRTAG

SEQ ID NO: 21796 - protein, 229 aa, unidentified
  source 1..229: note = Lentzea guizhouensis
  REGION 1..229: note = tr|A0A1B2HE43|A0A1B2HE43_9PSEU Uncharacterized protein OS=Lentzea guizhouensis OX=1586287 GN=BBK82_07920; PE = 4 SV=1
MKTTEEKCVADGQITISQSFGFSASHELRLLPASHKCRRNHGHNYTVTASALVRGDASGDLLPLGDYLAATFDHRLLNEQVPFHPTSELLAAHLAEWFRDNMESAMPITLVAMVVSETATTSARCDGVIGEVTISKTFTTSHGDVTLVLGADGLDKVGFITDFGDLKPFGAYLQASDADAGLRAAGPALVAHLAGWFVDSVEPGIRGRLVSVRVESGTTTGLWERGDAS

SEQ ID NO: 21797 - protein, 103 aa, unidentified
  source 1..103: note = Lentzea jiangxiensis
  REGION 1..103: note = tr|A0A1H0R7G1|A0A1H0R7G1_9PSEU 6-pyruvoyl tetrahydropterin synthase OS=Lentzea jiangxiensis; OX = 641025 GN=SAMN05421507_106192 PE=4 SV=1
MDATFKRAELDSDNIVVDIGLATQELGKVLAVFNYRNLDEEPQFAGINTSTEWLAKHIADQLAEKISEGALGEGAHGIDAIAVTLHESHVAWASYERALRPTG

SEQ ID NO: 21798 - protein, 130 aa, Lentzea sp.
  REGION 1..130: note = tr|A0A563EY42|A0A563EY42_9PSEU 6-carboxytetrahydropterin synthase QueD OS=Lentzea sp. FXJ1.1311 OX=2591470 GN=FKR81_08675 PE=4 SV=1
MYEISEHYTFVATHEILGLQSTHPCHGVHMHQWSVEVVLFAASLLPTDGPAETAALEPLRRYVTTELEARHLNDVLVGDPTPARLAGHLVRWCRSHLGGYVTETLHSVAVSAGRASRARCLAIRGRDGVR

SEQ ID NO: 21799 - protein, 132 aa, Lentzea sp.
  REGION 1..132: note = tr|A0A563EPU4|A0A563EPU4_9PSEU 6-carboxytetrahydropterin synthase OS=Lentzea sp. FXJ1.1311 OX=2591470 GN=FKR81_24520 PE=4 SV=1
MFSITVRDHVMIAHSFRGEVFGPAQRLHGATFVVDARFKRAELDADNIVVDIGLATQELHSVLADLNYRNLDEVPEFEGINTSTEFLAKHIADRLVALVHAGALGEGARGLTGIEVTLAESHVAWASYERSL

SEQ ID NO: 21800 - protein, 126 aa, Lentzea violacea
  REGION 1..126: note = tr|A0A1G9IXM1|A0A1G9IXM1_9PSEU 6-pyruvoyl tetrahydropterin synthase OS=Lentzea violacea OX=128104; GN = SAMN04488074_11079 PE=4 SV=1
MIAHSFRGEVFGPAQRLHGATFLVDATFKRAELDSDNIVVDIGLATQELNKVLAAFNYRNLDEEPQFAGINTSTEWLAKHIADQLADKISEGALGEGAHGIDAIAVTLHESHVAWAGYERALRPSG

SEQ ID NO: 21801 - protein, 103 aa, Lentzea waywayandensis
  REGION 1..103: note = tr|A0A1I6EXH9|A0A1I6EXH9_9PSEU 6-pyruvoyl tetrahydropterin synthase OS=Lentzea waywayandensis; OX = 84724 GN=SAMN04488564_106163 PE=4 SV=1
MDATFKRAELDSDNIVVDIGLATQELNKVLAAFNYRNLDEEPQFAGINTSTEWLAKHIADQLADKISEGSLGEGAHGIDAIAVTLHESHVAWAGYERALRPSR

SEQ ID NO: 21802 - protein, 288 aa, unidentified
  source 1..288: note = Leptolyngbya antarctica
  REGION 1..288: note = tr|A0A2W4W960|A0A2W4W960_9CYAN 6-pyruvoyl tetrahydropterin synthase OS=Leptolyngbya antarctica; OX = 268115 GN=DCF17_11260 PE=4 SV=1
MKCIINRRAQFSASHRYWLSELSDAENARRFGPCINFPGHGHNYVLYVAMAGDLDEYGMVLNLSDVKHVIKKEVTSQLDFSYLNDVWPEFQATLPTTEFIAKVIWDRLAPHLPIVNIQLFEHPELWSDYSGNAMEAFLTVSTHFSAAHRLASPRLSFEENCEIYGKCARPNGHGHNYHLEVTVKGQIDPRTGMLVDLPALQAAIDDHVVEPFDHTFLNKDISYFAEVVPTAENIAVHIRDLLQGPIAALGASLHKVKLIESPNNSAEVYAAVPQIEAVATAQPELAAV

SEQ ID NO: 21803 - protein, 129 aa, unidentified
  source 1..129: note = Leptolyngbya boryana
  REGION 1..129: note = tr|A0A1Z4JPU1|A0A1Z4JPU1_LEPBY 6-carboxy-5,6,7,8-tetrahydropterin synthase; OS = Leptolyngbya boryana NIES-2135 OX=1973484; GN = NIES2135_56080 PE=3 SV=1
MPKWTVTTEFTFNAAHWIRDYDGPCGRMHGHTYTVRISAITSQLHASEFCPHPVMVADFRTLKWAKKDVLKGGLDHCVLNEVLPEGYETTAEMIAKYIYDKTKKDLPAEIKLKVAVSETPNSWAEYEDD

SEQ ID NO: 21804 - protein, 289 aa, unidentified
  source 1..289: note = Leptolyngbya boryana
  REGION 1..289: note = tr|A0A1Z4JM70|A0A1Z4JM70_LEPBY Uncharacterized protein OS=Leptolyngbya boryana NIES-2135 OX=1973484; GN = NIES2135_46670 PE=4 SV=1
MKCIIDRRAQFSASHRYYLPELSEAENIERFGACTRFPGHGHNYVLYVSMLGDLDEYGMVLNLSDVKHVIRQEVTSQLDFSYLNDAWPEFQQTLPTTENIARSIWKRLESHLPIVNIRLYEHPELWADYLGNNMEAYLTISTHFSAAHRLARPDLSFEKNCEIYGKCARPNGHGHNYHLEVTIKGEIDPRTGMIADLVAFQKAVDDYVVEPFDHTFLNKDIPYFEKVVPTAENIAVHIRDLLEDPIQQIGARLYKVKLIESPNNSCEVFGASVSDVMPLLMREPAFAGA

SEQ ID NO: 21805 - protein, 294 aa, unidentified
  source 1..294: note = Leptolyngbya foveolarum
  REGION 1..294: note = tr|A0A2W4U2G9|A0A2W4U2G9_9CYAN 6-pyruvoyl tetrahydropterin synthase OS=Leptolyngbya foveolarum; OX = 47253 GN=DCF25_14260 PE=4 SV=1
MTCLPLTCVINRRSQFSASHRYWLDELSELENIRRFGKCTRVPGHGHNYVLNVSIASELDPYGMVLNLTEAKRIIQQQIIESLDFSYLNDVWPEFQQTLPTTEHIAQAIWQRLTPHLPLVNIQLFETPELWADYKGNGMEAYLTVSAHFSAAHRLALSHLSDEENSKIYGKCARSNGHGHNYQVEVTVKGEVDARTGMIVDLVALNQVVDQYVIEPFDHTFLNKDVPYFSQVVPTAENIVVRVCNLLHDPVKEIGATLYKVKISESPNNSAEVFAQSCVDDSLLKIQTQALATV

SEQ ID NO: 21806 - protein, 129 aa, unidentified
  source 1..129: note = Leptolyngbya foveolarum
  REGION 1..129: note = tr|A0A2W4URG5|A0A2W4URG5_9CYAN 6-carboxy-5,6,7,8-tetrahydropterin synthase; OS = Leptolyngbya foveolarum OX=47253 GN=DCF25_01970 PE=3; SV = 1
MPKWKLSTEFTFSAAHFIRDYDGPCGRMHGHTYHVRVEATADRLQASEFCPHPAMVADFRTLKWAKKDVMKGGLDHCVLNDVMPPEYETTAEMIAQYIHEKTCDRLPKAVKLKVSVSETPNSWAEYESD

SEQ ID NO: 21807 - protein, 289 aa, unidentified
  source 1..289: note = Leptolyngbya frigida
  REGION 1..289: note = tr|A0A2T1DUW1|A0A2T1DUW1_9CYAN 6-pyruvoyl tetrahydropterin synthase OS=Leptolyngbya frigida ULC18; OX = 2107698 GN=C7B82_27605 PE=4 SV=1
MKCIIDRRAQFSASHRYWLPEVSEAENFERFGACARSPGHGHNYVLFVSMAGELDEYGMVLNLSDVKQVIKREVTSQLDFSFLNDAWSEFQETLPTTEAIARTIWQRLAPHLPIVRIQLFEQPELWADYYGNNMEAYLTISTHFSAAHRLARPDLSYEKNCEIYGKCARPNGHGHNYHLEVTIKGEIDPRTGMIADLVVFQKAVDDYVVEPFDHTFLNKDIPYFAEVVPTAENIAVHIRSLLEQPIRNIGAQLHKIKLIESPNNSCEVYSTEAEAAVTSMSVREAAMVK

SEQ ID NO: 21808 - protein, 295 aa, Leptolyngbya sp.
  REGION 1..295: note = tr|K9FLA6|K9FLA6_9CYAN 6-pyruvoyl-tetrahydropterin synthase OS=Leptolyngbya sp. PCC 7375 OX=102129; GN = Lepto7375DRAFT_4171 PE=4 SV=1
MKCTINRRAQFSASHRYWLPELSDAENQTRFGLCTRAPGHGHNYELFVSMEGDLDEYGMVLNLSDVKQVIKREVTSQLDFSYLNDVWPEFQIDKPEAGLTTTENIARVIWQRLVPHLPITNVQLFETSTLWADYKGNAMEAYLTISTHFSAAHRLALPTLTLEQNSEIYGLCARVNGHGHNYHLEVTIKGEMDPRTGMIADLVEFQNAVKTHVVKPFDHTFLNKDIPYFAEVVPTAENIAVHIRDLLRGPIKEIGASLHKVKLIESPNNSAEVYCEATAETTTPKQSATPELAAV

SEQ ID NO: 21809 - protein, 129 aa, Leptolyngbya sp.
  REGION 1..129: note = tr|A0A0S3U9Y4|A0A0S3U9Y4_9CYAN 6-carboxy-5,6,7,8-tetrahydropterin synthase; OS = Leptolyngbya sp. NIES-3755 OX=1752064 GN=LEP3755_48150; PE = 3 SV=1
MPKWTLSTEFTFSAAHWIRDYNGPCGRMHGHTYTVRISAIASQLHTSEYCPHPVMVADFRTLRWAKKDVFKGGLDHCVLNEVLPEGYETTAEMIAKYIYDKTKKELPADIKLKVAVSETPNSWAEYEDD

SEQ ID NO: 21810 - protein, 130 aa, unidentified
  source 1..130: note = Leptolyngbya valderiana
  REGION 1..130: note = tr|A0A168W324|A0A168W324_9CYAN Uncharacterized protein OS=Leptolyngbya valderiana BDU 20041 OX=322866; GN = AY599_20020 PE=4 SV=1
MFEITAEASFNAQHAILIHGDREPVHGHDWVVRATIAGPALDREGLLCDFHAVESALRGITDPWNHDDLNHSEAFRGRKLEPTAENVAMVVAVELARALKDILPEGARVARVSVTEAPRCVATYLLPRED

SEQ ID NO: 21811 - protein, 124 aa, unidentified
  source 1..124: note = Leptolyngbya valderiana
  REGION 1..124: note = tr|A0A168SZR8|A0A168SZR8_9CYAN 6-carboxy-5,6,7,8-tetrahydropterin synthase; OS = Leptolyngbya valderiana BDU 20041 OX=322866; GN = AY599_13645 PE=3 SV=1
MSDLTLTISKDFTFDAAHHFAHKDADHPFSRLHGHSFQGTVTLTGAREADSGMVRDFWEIEAELSKIRDQLDHRLLNEVDGLENPSLENIAHWVFERLDAVLPGLVSVEIRRPSWGEKALVKRG

SEQ ID NO: 21812 - protein, 117 aa, Leptonema illini
  REGION 1..117: note = tr|H2CLA3|H2CLA3_9LEPT 6-carboxy-5,6,7,8-tetrahydropterin synthase OS=Leptonema illini DSM 21528 OX=929563 GN=Lepil_3699 PE=3 SV=1
MEIIKSFRFEAAHYLPKLPETHKCRRMHGHSFKFDVHVEGPLDPELGWVMDFGDISRLVKPLVEELDHYLLNEISGLENPTSEVIAVWIWNRLKPGLPGLSRIVVYETCTARCEYRG

SEQ ID NO: 21813 - protein, 126 aa, unidentified
  source 1..126: note = Leptospira adleri
  REGION 1..126: note = tr|A0A2M9YK26|A0A2M9YK26_9LEPT 6-carboxy-5,6,7,8-tetrahydropterin synthase OS=Leptospira adleri OX=2023186 GN=queD PE=3 SV=1
MEEIELTKEFRFDAAHLLPNVPDGHKCKRLHGHSFRFKLHLKGRIDPHTGWLIDYAEVSKIVKPLIENHLDHYYLNDVPGLENPTSENISVWLWNHLKPLLPLLYKITLNETCTSACIYEGPKNSH

SEQ ID NO: 21814 - protein, 133 aa, unidentified
  source 1..133: note = Leptospira adleri
  REGION 1..133: note = tr|A0A2M9YMF8|A0A2M9YMF8_9LEPT 6-carboxy-5,6,7,8-tetrahydropterin synthase OS=Leptospira adleri OX=2023186 GN=CH380_13270 PE=3 SV=1
MFFEETGRFYIRIEERFESSHYLYRYFPDGSDEPIHGHSWKVELFLSGTKNIGEDGISFDFLTSKQKLKELVGKLDHILINDLEEFKKINPTSENIARWFYHYLKESVRSAGGKVDRIVIHEGPENLAYFEPA

SEQ ID NO: 21815 - protein, 61 aa, Leptospira alexanderi
  REGION 1..61: note = tr|V6I7J0|V6I7J0_9LEPT 6-pyruvoyl tetrahydropterin synthase domain protein OS=Leptospira alexanderi serovar Manhao 3 str. L 60 OX=1049759 GN=LEP1GSC062_3349 PE=4 SV= 1
MFFEESGRFYIRIEERFESSHFLYKYFPDGSDEPIHGHSWKVELYLSGKKISVRTESVLIF

SEQ ID NO: 21816 - protein, 62 aa, Leptospira alexanderi
  REGION 1..62: note = tr|V6I011|V6I011_9LEPT 6-pyruvoyl tetrahydropterin synthase domain protein OS=Leptospira alexanderi serovar Manhao 3 str. L 60 OX=1049759 GN=LEP1GSC062_3350 PE=4 SV= 1
MDHILINELEEFKKINPTSENIARWFYHYLKESVHSAGGRVDKIVIHEGPENLAFFEPTSLP

SEQ ID NO: 21817 - protein, 130 aa, unidentified
  source 1..130: note = Leptospira alstonii
  REGION 1..130: note = tr|M6D772|M6D772_9LEPT 6-carboxy-5,6,7,8-tetrahydropterin synthase OS=Leptospira alstonii serovar Sichuan str. 79601 OX=1218565 GN=queD; PE = 3 SV=1
MEEIELTKEFRFDAAHLLPNVPDGHKCKRLHGHSFRFKLHLRGKIDSKTGWLIDYAEVSKIVKPLIENHLDHYYLNDVPGLENPTSENISIWLWNHLKPLLPLLYKITLNETCTSACIYEGPKGSVSRHF

SEQ ID NO: 21818 - protein, 130 aa, unidentified; identical to SEQ ID NO: 21817
  source 1..130: note = Leptospira alstonii
  REGION 1..130: note = tr|T0HAA9|T0HAA9_9LEPT 6-carboxy-5,6,7,8-tetrahydropterin synthase OS=Leptospira alstonii serovar Pingchang str. 80-412 OX=1218564 GN=queD; PE = 3 SV=1

SEQ ID NO: 21819 - protein, 133 aa, unidentified
  source 1..133: note = Leptospira andrefontaineae
  REGION 1..133: note = tr|A0A4R9H995|A0A4R9H995_9LEPT 6-carboxy-5,6,7,8-tetrahydropterin synthase OS=Leptospira andrefontaineae OX=2484976 GN=EHO65_04710 PE=3 SV=1
MFFQETGKFYIRIEERFESSHYLYKYFPDGSDEPIHGHSFKVEVYLSGQKNIGEDGISFDFLTSKRKLKELVAELDHILINDHADFKKTNPTSENMARWFYYGLKDSVAEAKGKVDRIVIHEGPENLAYYEPN

SEQ ID NO: 21820 - protein, 125 aa, unidentified
  source 1..125: note = Leptospira andrefontaineae
  REGION 1..125: note = tr|A0A4V3JFL4|A0A4V3JFL4_9LEPT 6-carboxy-5,6,7,8-tetrahydropterin synthase OS=Leptospira andrefontaineae OX=2484976 GN=queD PE=3 SV=1
MEEIELTKEFRFDAAHFLPNVPEGHKCRRMHGHSFRFKLHLKGKVDEKTGWLMDFAEVSKVVKPLLENYLDHYLLNEIEGLENPTSENISIWLWKKLKPQLSLLYKITLNETCTSACVYNGPSEK

SEQ ID NO: 21821 - protein, 124 aa, unidentified
  source 1..124: note = Leptospira bandrabouensis
  REGION 1..124: note = tr|A0A4Z1AL54|A0A4Z1AL54_9LEPT 6-carboxy-5,6,7,8-tetrahydropterin synthase OS=Leptospira bandrabouensis OX=2484903 GN=queD PE=3 SV=1
MEELELSKTFGFEAAHFLPNVPEGHKCKRMHGHSFRFAVYLKGEIDPHTGWIMDFGELKSIVKPILDEHLDHYVLNDVPGLENPTSENIAVWLWNQLKPKLPLLDKITLYETCSSSCVYRGPKK

SEQ ID NO: 21822 - protein, 132 aa, unidentified
  source 1..132: note = Leptospira bandrabouensis
  REGION 1..132: note = tr|A0A4Z1ARN4|A0A4Z1ARN4_9LEPT 6-carboxy-5,6,7,8-tetrahydropterin synthase OS=Leptospira bandrabouensis OX=2484903 GN=EHR07_13195 PE=3 SV=1
MFTQENGKFYVRIEGRFESAHFLYQYFADGSDEPIHGHSWKVEVFLEGNTNIRPDGISYDFLTARTKLMELVHSIDHILINDHPDFKGINPTSENVARWFYSGLKEDVKSSEGRIRRIVIHEGPENLAYFEP

SEQ ID NO: 21823 - protein, 128 aa, unidentified
  source 1..128: note = Leptospira barantonii
  REGION 1..128: note = tr|A0A5F2AYW5|A0A5F2AYW5_9LEPT 6-carboxy-5,6,7,8-tetrahydropterin synthase OS=Leptospira barantonii OX=2023184 GN=queD PE=3 SV=1
MEEIELTKEFRFDAAHLLPNVPDGHKCKRLHGHSFRFKLHLKGKIDPKTGWLIDYAEVSKIVKPLIENHLDHYYLNDVPGLENPTSENISIWLWNHIKPLLPLLYKITLNETCTSASIYEGPKNSFQG

SEQ ID NO: 21824 - protein, 128 aa, unidentified
  source 1..128: note = Leptospira barantonii
  REGION 1..128: note = tr|A0A2M9Z436|A0A2M9Z436_9LEPT 6-carboxy-5,6,7,8-tetrahydropterin synthase OS=Leptospira barantonii OX=2023184 GN=queD PE=3 SV=1
MEEIELTKEFRFDAAHLLPNVPDGHKCKRLHGHSFRFKLHLKGKIDPKTGWLIDYAEVSKIVKPLIENHLDHYYLNEVPGLENPTSENISIWLWNHIKPLLPLLYKITLNETCTSASIYEGPKNSSQG

SEQ ID NO: 21825 - protein, 134 aa, Leptospira biflexa
  REGION 1..134: note = tr|B0SQ26|B0SQ26_LEPBP 6-carboxy-5,6,7,8-tetrahydropterin synthase OS=Leptospira biflexa serovar Patoc (strain Patoc 1 / ATCC 23582 / Paris) OX=456481 GN=LEPBI_I3112PE=3 SV=1
MFTQENGKFYVRIEGRFESAHFLYQYFADGTDEPIHGHSWKVEVYLEGKTNIRPDGISYDFLTARNKLLALVHSIDHILINDHPDFKGINPTSENVARWFYSGLKEEVKASDGKIQRIVIHEGPENLAFFEPET

SEQ ID NO: 21826 - protein, 134 aa, Leptospira biflexa
  REGION 1..134: note = tr|A0A5F2CHA8|A0A5F2CHA8_LEPBI 6-carboxytetrahydropterin synthase OS=Leptospira biflexa; OX = 172 GN=EHQ88_11195 PE=4 SV=1
MFTQENGKFYVRIEGRFESAHFLYQYFADGTDEPIHGHSWKVEVYLEGKTNIRPDGISYDFLTARNKLLVLVHSIDHILINDHPDFKGINPTSENVARWFYSGLKEEVKASEGKIQRIVIHEGPENLAFFEPET

SEQ ID NO: 21827 - protein, 136 aa, Leptospira borgpetersenii
  REGION 1..136: note = tr|A0A2U9XHK0|A0A2U9XHK0_LEPBO 6-carboxy-5,6,7,8-tetrahydropterin synthase OS=Leptospira borgpetersenii serovar Hardjo-bovis OX=338217; GN = B9T54_11110 PE=3 SV=1
MFFEESGRFYIRIEERFESSHFLYKYFPDGSDEPIHGHSWKVELYLSGRKNIGEDGISFDFLTSKQRLKELVGKLDHILINELEEFKKINPTSENIARWFYHYLKESVHSAGGRVDKIVIHEGPENLAFFEPTSLP

SEQ ID NO: 21828 - protein, 61 aa, Leptospira borgpetersenii
  REGION 1..61: note = tr|M6VZW9|M6VZW9_LEPBO 6-pyruvoyl tetrahydropterin synthase domain protein OS=Leptospira borgpetersenii serovar Pomona str. 200901868 OX=1192866; GN = LEP1GSC133_1130 P E=4 SV=1
MFFEESGRFYIRIEERFESSHFLYKYFPDGSDEPIHGHSWKVELYLSGKKISARTGSVLIF

SEQ ID NO: 21829 - protein, 124 aa, unidentified
  source 1..124: note = Leptospira bourretii
  REGION 1..124: note = tr|A0A4V3JLK7|A0A4V3JLK7_9LEPT 6-carboxy-5,6,7,8-tetrahydropterin synthase OS=Leptospira bourretii OX=2484962 GN=queD PE=3 SV=1
MEELELSKTFGFEAAHFLPNVPEGHKCKRMHGHSFRFAVYLKGEIDPHTGWIMDFGELKSIVKPILDEHLDHYVLNNVPGLENPTSENIAVWLWNQLKPKLPLLDKITLYETCTSSCVYRGPKK

SEQ ID NO: 21830 - protein, 139 aa, unidentified
  source 1..139: note = Leptospira bourretii
  REGION 1..139: note = tr|A0A4R9IQ01|A0A4R9IQ01_9LEPT 6-carboxytetrahydropterin synthase OS=Leptospira bourretii; OX = 2484962 GN=EHQ23_03100 PE=4 SV=1
MFTQENGKFYVRIEGRFESAHFLYQYFADGSDEPIHGHSWKVEVFLEGNTNIRPDGISYDFLTARTRLSELVHSIDHILINDHPDFKGVNPTSENVARWFYAGLKSDVKSSDGRIRRIVIHEGPENLAFFEPDENSDLS

SEQ ID NO: 21831 - protein, 134 aa, unidentified
  source 1..134: note = Leptospira bouyouniensis
  REGION 1..134: note = tr|A0A4R9HUH7|A0A4R9HUH7_9LEPT 6-carboxytetrahydropterin synthase OS=Leptospira bouyouniensis OX=2484911 GN=EHQ10_04500 PE=4 SV=1
MFTQENGKFYVRIEGRFESAHFLYQYFADGTDEPIHGHSWKVEVFLEGKTNIRPDGISYDFLTARNKLLELVHSIDHILINDHPDFKGINPTSENVARWFYYGLKEEVKASEGKIRRIVIHEGPENLAFFEPEA

SEQ ID NO: 21832 - protein, 124 aa, unidentified
  source 1..124: note = Leptospira bouyouniensis
  REGION 1..124: note = tr|A0A4R9HRY7|A0A4R9HRY7_9LEPT 6-carboxy-5,6,7,8-tetrahydropterin synthase OS=Leptospira bouyouniensis OX=2484911 GN=queD PE=3 SV=1
MEEIELSKTFGFEAAHFLPNVPEGHKCKRMHGHSFRFAVYLKGEIDPHTGWIMDFGELKSIVKPILDEHLDHYVLNDVPGLENPTSENIAVWLWNQLKPKLPLLDKITLYETCTSSCVYRGPKK

SEQ ID NO: 21833 - protein, 124 aa, unidentified
  source 1..124: note = Leptospira brenneri
  REGION 1..124: note = tr|A0A2M9Y3S5|A0A2M9Y3S5_9LEPT 6-carboxy-5,6,7,8-tetrahydropterin synthase OS=Leptospira brenneri OX=2023182 GN=queD PE=3 SV=1
MEELELSKTFGFEAAHFLPNVPEGHKCKRMHGHSFRFAVYLKGEIDPHTGWIMDFGELKSIVKPILDEHLDHFVLNDVPGLENPTSENIAVWLWNQLKPKLPLLDKITLHETCTSSCVYRGPKK

SEQ ID NO: 21834 - protein, 134 aa, unidentified
  source 1..134: note = Leptospira brenneri
  REGION 1..134: note = tr|A0A2M9Y7L1|A0A2M9Y7L1_9LEPT 6-carboxytetrahydropterin synthase OS=Leptospira brenneri; OX = 2023182 GN=CH361_02490 PE=4 SV=1
MFTQEKGKFYVRIEGRFESAHFLYQYFADGSDEPIHGHSWKVEVFLEGNTNIRPDGISYDFLTARTKLMDLVHSIDHILINDHPDFKGVNPTSENVARWFYSGLKADVKSSAGKIRRIVIHEGPENLAFFEPEN

SEQ ID NO: 21835 - protein, 126 aa, Leptospira broomii
  REGION 1..126: note = tr|T0F2Y1|T0F2Y1_9LEPT 6-carboxy-5,6,7,8-tetrahydropterin synthase OS=Leptospira broomii serovar Hurstbridge str. 5399 OX=1049789 GN=queD; PE = 3 SV=1
MEEIELTKEFRFDAAHFLPNVPQGHKCRRMHGHSFRFKLHLKGTIDPVTGWLMDFAEVSKFVKPLLDNYLDHYLLNEIEGLENPTSENICVWLWEKLRPRLPLLTKITLHETCTSACIYEGPRHIA

SEQ ID NO: 21836 - protein, 135 aa, Leptospira broomii
  REGION 1..135: note = tr|T0GCW8|T0GCW8_9LEPT 6-carboxy-5,6,7,8-tetrahydropterin synthase OS=Leptospira broomii serovar Hurstbridge str. 5399 OX=1049789; GN = LEP1GSC050_2294 PE=3 SV=1
MFFQEAGKFYIRIEERFESSHFLYKYFPDGSDEPIHGHSFKVEVYLSGRKNIGKDGISFDFLTSKKKLRELVSELDHILINEHIDFRKINPTSENMARWFYSGLKESVSAADGRVERIVIHEGPENLAFFEPLQG

SEQ ID NO: 21837 - protein, 132 aa, unidentified
  source 1..132: note = Leptospira congkakensis
  REGION 1..132: note = tr|A0A4Z1A464|A0A4Z1A464_9LEPT 6-carboxytetrahydropterin synthase OS=Leptospira congkakensis OX=2484932 GN=EHQ70_08950 PE=4 SV=1
MFTQENGKFYVRIEGRFESAHFLYQYFADGSDEPIHGHSWKVEVFLEGNTNIRPDGISYDFLTARTKLMELVHSIDHILINDHPDFKGINPTSENVARWFYSGLKADVKSSEGKIRRIVIHEGPENLAFFEP

SEQ ID NO: 21838 - protein, 124 aa, unidentified
  source 1..124: note = Leptospira congkakensis
  REGION 1..124: note = tr|A0A4Z0ZZL5|A0A4Z0ZZL5_9LEPT 6-carboxy-5,6,7,8-tetrahydropterin synthase OS=Leptospira congkakensis OX=2484932 GN=queD PE=3 SV=1
MEELELSKTFGFEAAHFLPNVPEGHKCKRMHGHSFRFAVYLKGEIDPHTGWIMDFGELKSIVKPILDEHLDHYVLNDVPGLENPTSENIAVWLWNQLKPKLPLLDKITLYETCTSSCVYRGPKK

SEQ ID NO: 21839 - protein, 136 aa, unidentified
  source 1..136: note = Leptospira dzianensis
  REGION 1..136: note = tr|A0A5F2APF7|A0A5F2APF7_9LEPT 6-carboxy-5,6,7,8-tetrahydropterin synthase OS=Leptospira dzianensis OX=2484905 GN=EHQ72_11675 PE=3 SV=1
MFFEESGRFYIRIEERFESSHFLYRYFPDGSDEPIHGHSWKVELYLSGRKNIGEDGISFDFLTSKQKLKELVGKLDHILINDLAEFKTINPTSENIARWFYHYLKESVHSAGGKVDRIVIHEGPENLAYFEPTSFP

SEQ ID NO: 21840 - protein, 126 aa, unidentified
  source 1..126: note = Leptospira dzianensis
  REGION 1..126: note = tr|A0A5F2ATE2|A0A5F2ATE2_9LEPT 6-carboxy-5,6,7,8-tetrahydropterin synthase OS=Leptospira dzianensis OX=2484905 GN=queD PE=3 SV=1
MEEIELTKEFRFDAAHLLPNVPDGHKCKRLHGHSFRFKLHLKGKIDSKTGWLIDYAEVSKIVKPLIENHLDHYYLNDVPGLENPTSENISIWLWNHLKPLLPLLYKITLNETCTSACIYEGPKGSV

SEQ ID NO: 21841 - protein, 134 aa, unidentified
  source 1..134: note = Leptospira dzoumogneensis
  REGION 1..134: note = tr|A0A4Z1AR88|A0A4Z1AR88_9LEPT 6-carboxy-5,6,7,8-tetrahydropterin synthase OS=Leptospira dzoumogneensis OX=2484904 GN=EHR06_05485 PE=3 SV=1
MFFQETGKFYIRIEERFESSHYLYKYFPDGSDEPIHGHSFKVEVYLSGQKNIGEDGISFDFLTSKRKLKELVAELDHILINDHADFQKTNPTSENMARWFYHGLKDSVAEAQGKVDRIVIHEGPENLAYYEPIS

SEQ ID NO: 21842 - protein, 125 aa, unidentified
  source 1..125: note = Leptospira dzoumogneensis
  REGION 1..125: note = tr|A0A4Z1AX88|A0A4Z1AX88_9LEPT 6-carboxy-5,6,7,8-tetrahydropterin synthase OS=Leptospira dzoumogneensis OX=2484904 GN=queD PE=3 SV=1
MEEIELTKEFRFDAAHFLPNVPEGHKCRRMHGHSFRFKLHLKGKVDEKTGWLMDFAEVSKVVKPLLENYLDHYLLNEIEGLENPTSENISIWLWKKLKPQLSLLHKITLNETCTSACVYNGPSEK

SEQ ID NO: 21843 - protein, 134 aa, unidentified
  source 1..134: note = Leptospira ellinghausenii
  REGION 1..134: note = tr|A0A2P2DGM0|A0A2P2DGM0_9LEPT 6-carboxy-5,6,7,8-tetrahydropterin synthase OS=Leptospira ellinghausenii OX=1917822 GN=LPTSP2_30770 PE=3 SV=1
MFTQENGKFYVRIEGRFESAHFLYQYFADGTDEPIHGHSWKVEVFLEGKTNIRPDGISFDFLTARNKLMELVHSIDHLLINDHPDFKGINPTSENVARWFYSGLKKEVKESEGKIRRIVIHEGPENLAFFEPET

SEQ ID NO: 21844 - protein, 124 aa, unidentified; identical to SEQ ID NO: 21832
  source 1..124: note = Leptospira ellinghausenii
  REGION 1..124: note = tr|A0A2P2DF56|A0A2P2DF56_9LEPT 6-carboxy-5,6,7,8-tetrahydropterin synthase OS=Leptospira ellinghausenii OX=1917822 GN=LPTSP2_25640 PE=3 SV=1

SEQ ID NO: 21845 - protein, 133 aa, unidentified
  source 1..133: note = Leptospira elllisii
  REGION 1..133: note = tr|A0A2N0BMT0|A0A2N0BMT0_9LEPT 6-carboxy-5,6,7,8-tetrahydropterin synthase OS=Leptospira elllisii OX=2023197 GN=CH375_05930 PE=3 SV=1
MFFEESGRFYIRIEERFESSHFLYKYFPDGSDEPIHGHSWKVELYLSGKKNIGEDGISFDFLTSKRRLKELVGKLDHILINDLEEFKTINPTSENIARWFYHYLKESVHSAGGKVDRIVIHEGPENLAFFEPA

SEQ ID NO: 21846 - protein, 128 aa, unidentified
  source 1..128: note = Leptospira elllisii
  REGION 1..128: note = tr|A0A2N0B2Z0|A0A2N0B2Z0_9LEPT 6-carboxy-5,6,7,8-tetrahydropterin synthase OS=Leptospira elllisii OX=2023197 GN=queD PE=3 SV=1
MEEIELTKEFRFDAAHLLPNVPDGHKCKRLHGHSFRFKLHLKGTIDPTTGWLIDYAEVSKIVKPLIENHLDHYYLNDVPGLENPTSENISIWLWNHLKPLLPLLYKITLNETCTSACIYEGPKDSSQR

SEQ ID NO: 21847 - protein, 135 aa, Leptospira fainei
  REGION 1..135: note = tr|S3UUH1|S3UUH1_9LEPT 6-carboxy-5,6,7,8-tetrahydropterin synthase OS=Leptospira fainei serovar Hurstbridge str. BUT 6 OX=1193011; GN = LEP1GSC058_2359 PE=3 SV=1
MFFREAGKFYIRIEERFESSHFLYKYFPDGSDEPIHGHSFKVEVYLSGKKNIGEDGISFDFLTSKKRLRALVAELDHILINEHSDFKKTNPTSENLARWFYSGLKESVHGAEGKVERIVIHEGPENLAFFEPAQG

SEQ ID NO: 21848 - protein, 135 aa, unidentified
  source 1..135: note = Leptospira fletcheri
  REGION 1..135: note = tr|A0A4R9GJB3|A0A4R9GJB3_9LEPT 6-carboxy-5,6,7,8-tetrahydropterin synthase OS=Leptospira fletcheri OX=2484981 GN=EHO60_09770 PE=3 SV=1
MFFQETGKFYIRIEERFESSHFLYKYFQDGSDEPIHGHSFKVEVYLSGKRNIGEDGISFDFLTSKKRLRELVSELDHILINQHADFIRTNPTSENMARWFYHHIKDSVHASSGRVDRIVIHEGPENLAFFEPSEG

SEQ ID NO: 21849 - protein, 126 aa, unidentified
  source 1..126: note = Leptospira fletcheri
  REGION 1..126: note = tr|A0A4R9GIH3|A0A4R9GIH3_9LEPT 6-carboxy-5,6,7,8-tetrahydropterin synthase OS=Leptospira fletcheri OX=2484981 GN=queD PE=3 SV=1
MEEIELTKEFRFDAAHFLPNVPEGHKCRRMHGHSFRFKLHLKGKIDPGTGWLMDFAEVSKSVKPLLENHLDHYLLNDVAGLENPTSENICLWLWKRLKPQLPLLRKITLHETCTSACIYEGPKDIV

SEQ ID NO: 21850 - protein, 126 aa, unidentified
  source 1..126: note = Leptospira fluminis
  REGION 1..126: note = tr|A0A4R9GRX2|A0A4R9GRX2_9LEPT 6-carboxy-5,6,7,8-tetrahydropterin synthase OS=Leptospira fluminis OX=2484979 GN=queD PE=3 SV=1
MEEIELTKEFRFDAAHFLPNVPEGHKCRRMHGHSFRFKLHLKGKIDPGTGWLMDFAEVSKSVKPLLENHLDHYLLNDVEGLENPTSENICLWLWKRLKPHLPLLRKITLHETCTSACIYEGPKDIV

SEQ ID NO: 21851 - protein, 135 aa, unidentified
  source 1..135: note = Leptospira fluminis
  REGION 1..135: note = tr|A0A4R9GMJ9|A0A4R9GMJ9_9LEPT 6-carboxy-5,6,7,8-tetrahydropterin synthase OS=Leptospira fluminis OX=2484979 GN=EHO61_15625 PE=3 SV=1
MFFQETGKFYIRIEERFESSHFLYKYFPDGSDEPIHGHSFKVEVYLSGKRNIGEDGISFDFLTSKKRLRELVSELDHILINQHADFTRTNPTSENMARWFYHHIKDSVHASSGKVDRIVIHEGPENLAFFEPSEG

SEQ ID NO: 21852 - protein, 133 aa, unidentified
  source 1..133: note = Leptospira gomenensis
  REGION 1..133: note = tr|A0A5F1Z1K0|A0A5F1Z1K0_9LEPT 6-carboxy-5,6,7,8-tetrahydropterin synthase OS=Leptospira gomenensis OX=2484974 GN=EHQ13_02655 PE=3 SV=1
MFFEESGRFYIRIEERFESSHFLYKYFPDGSDEPIHGHSWKVELFLSGSKNIGEDGISFDFLTSKRKLKELVGKLDHILINDLEDFQSVNPTSENIARWFYHFLKESVHASGGKVDRIVIHEGPENLAFFEPA

SEQ ID NO: 21853 - protein, 128 aa, unidentified
  source 1..128: note = Leptospira gomenensis
  REGION 1..128: note = tr|A0A5F1YEF2|A0A5F1YEF2_9LEPT 6-carboxy-5,6,7,8-tetrahydropterin synthase OS=Leptospira gomenensis OX=2484974 GN=queD PE=3 SV=1
MEEIELTKEFRFDAAHLLPNVPDGHKCKRLHGHSFRFKLHLKGTIDPATGWLIDYAEVSKIVKPLIENHLDHYYLNDVPGLDNPTSENISIWLWNHLKPLLPLLYKITLNETCTSACIYEGPKTSSRT

SEQ ID NO: 21854 - protein, 134 aa, unidentified
  source 1..134: note = Leptospira haakeii
  REGION 1..134: note = tr|A0A2N0BSA9|A0A2N0BSA9_9LEPT 6-carboxy-5,6,7,8-tetrahydropterin synthase OS=Leptospira haakeii OX=2023198 GN=CH377_16870 PE=3 SV=1
MFFQETGKFYIRIEERFESSHYLYKYFPDGSDEPIHGHSFKVEVYLSGQKNIGEDGISFDFLTSKRKLKELVAELDHILINDHADFKKTNPTSENMARWFYYGLKDSVSEAKGKVDRIVIHEGPENLAYYEPIS

SEQ ID NO: 21855 - protein, 125 aa, unidentified
  source 1..125: note = Leptospira haakeii
  REGION 1..125: note = tr|A0A2N0BZM3|A0A2N0BZM3_9LEPT 6-carboxy-5,6,7,8-tetrahydropterin synthase OS=Leptospira haakeii OX=2023198 GN=queD PE=3 SV=1
MEEIELTKEFRFDAAHFLPNVPEGHKCRRMHGHSFRFKLHLKGRVDEKTGWLMDFAEVSKVVKPLLENYLDHYLLNEIEGLENPTSENISIWLWKKLKPELSLLYKITLNETCTSACVYNGPSEK

SEQ ID NO: 21856 - protein, 124 aa, unidentified; identical to SEQ ID NO: 21838
  source 1..124: note = Leptospira harrisiae
  REGION 1..124: note = tr|A0A2N0AHD8|A0A2N0AHD8_9LEPT 6-carboxy-5,6,7,8-tetrahydropterin synthase OS=Leptospira harrisiae OX=2023189 GN=queD PE=3 SV=1

SEQ ID NO: 21857 - protein, 133 aa, unidentified
  source 1..133: note = Leptospira harrisiae
  REGION 1..133: note = tr|A0A2N0AK90|A0A2N0AK90_9LEPT 6-carboxytetrahydropterin synthase QueD OS=Leptospira harrisiae OX=2023189 GN=CH364_11210 PE=4 SV=1
MFTQENGKFYVRIEGRFESAHFLYQYFADGSDEPIHGHSWKVEVFLEGNTNIRPDGISYDFLTARTRLTELVHSIDHILINDHPDFKGTNPTSENVARWFYAGLKSEVNSSEGKIRRIVIHEGPENLAFFEPE

SEQ ID NO: 21858 - protein, 133 aa, unidentified
  source 1..133: note = Leptospira hartskeerlii
  REGION 1..133: note = tr|A0A2M9X934|A0A2M9X934_9LEPT 6-carboxy-5,6,7,8-tetrahydropterin synthase OS=Leptospira hartskeerlii OX=2023177 GN=CH357_18110 PE=3 SV=1
MFFQETGKFYIRIEERFESSHYLYKYFPDGSDEPIHGHSFKVEVYLSGQKNIGEDGISFDFLTSKRKLKELVAELDHILINDHADFKKTNPTSENMARWFYHGLKDSVAEAKGKVDRIVIHEGPENLAYYEPA

SEQ ID NO: 21859 - protein, 125 aa, unidentified
  source 1..125: note = Leptospira hartskeerlii
  REGION 1..125: note = tr|A0A2M9XI77|A0A2M9XI77_9LEPT 6-carboxy-5,6,7,8-tetrahydropterin synthase OS=Leptospira hartskeerlii OX=2023177 GN=queD PE=3 SV=1
MEEIELTKEFRFDAAHFLPNVPEGHKCRRMHGHSFRFKLHLKGKVDEKTGWLMDFAEVSKVVKPLLENYLDHYLLNDIEGLENPTSENISIWLWKKLKPQLSLLYKITLNETCTSACVYNGPSEK

SEQ ID NO: 21860 - protein, 140 aa, unidentified
  source 1..140: note = Leptospira idonii
  REGION 1..140: note = tr|A0A4R9LUD5|A0A4R9LUD5_9LEPT 6-carboxy-5,6,7,8-tetrahydropterin synthase OS=Leptospira idonii OX=1193500 GN=EHS15_17840 PE=3 SV=1
MFTSEFGKFYVRIEGRFESAHFLYDYFPDGSDEPIHGHSWKVEVFLSGNENIRPDGISYDFLTARNRLQELVHSIDHILINDHPDFKGVNPTSENVARWFFSGLKDEVAKTKGQIKRIVIHEGPENLAFFEPDPSGSESK

SEQ ID NO: 21861 - protein, 124 aa, unidentified
  source 1..124: note = Leptospira idonii
  REGION 1..124: note = tr|A0A4R9M175|A0A4R9M175_9LEPT 6-carboxy-5,6,7,8-tetrahydropterin synthase OS=Leptospira idonii OX=1193500 GN=queD PE=3 SV=1
MEEIELSKTFGFEAAHFLPNVPEGHKCKRMHGHSFRFSVTLKGEIDPHTGWVMDFGELKSIVKPIIDEHLDHYILNDVKGLENPTSENVAVWIWNKIKPQLPLLDQITVYETCTSSCVYRGPKR

SEQ ID NO: 21862 - protein, 124 aa, unidentified
  source 1..124: note = Leptospira ilyithenensis
  REGION 1..124: note = tr|A0A4R9LPS9|A0A4R9LPS9_9LEPT 6-carboxy-5,6,7,8-tetrahydropterin synthase OS=Leptospira ilyithenensis OX=2484901 GN=queD PE=3 SV=1
MEEIELSKTFGFEAAHFLPNVPEGHKCKRMHGHSFRFSVSLKGKIDPHTGWIMDFGELKGIVKPIITESLDHYVLNDVPGLENPTSENLAVWLWNHLKPNLPLLDKITVYETCSSSCVYSGPKK

SEQ ID NO: 21863 - protein, 132 aa, unidentified
  source 1..132: note = Leptospira ilyithenensis
  REGION 1..132: note = tr|A0A4R9LRF6|A0A4R9LRF6_9LEPT 6-carboxy-5,6,7,8-tetrahydropterin synthase OS=Leptospira ilyithenensis OX=2484901 GN=EHS11_04760 PE=3 SV=1
MFTEESGKFYVRIEGRFESAHYLYDYFPDGSDEPIHGHSWKVEVFLSGKENIRPDGISYDFLTARNRLQELVHSIDHLLINEHPDFKGINPTSENVARWFFVGLKEEVAKTNGKIIRIVIHEGPENLAFFEP

SEQ ID NO: 21864 - protein, 135 aa, Leptospira inadai
  REGION 1..135: note = tr|V6HAU8|V6HAU8_9LEPT 6-carboxy-5,6,7,8-tetrahydropterin synthase OS=Leptospira inadai serovar Lyme str. 10 OX=1049790 GN=LEP1GSC047_3087; PE = 3 SV=1
MFFQEAGKFYIRIEERFESSHFLYKYFSDGSDEPIHGHSFKVEVYLSGRKNIGEDGISFDFLTSKKKLRELVSELDHILINEHIDFKKTNPTSENMARWFYNGLKESVHAAEGRVERIVIHEGPENLAFFEPLQG

SEQ ID NO: 21865 - protein, 76 aa, Leptospira inadai
  REGION 1..76: note = tr|V6H9Y5|V6H9Y5_9LEPT 6-pyruvoyl tetrahydropterin synthase OS=Leptospira inadai serovar Lyme str. 10; OX = 1049790 GN=LEP1GSC047_1158 PE=4 SV=1
MDFAEVSKFVKPLLDNYLDHYLLNEIEGLENPTSENICIWLWEKLKPQLPLLRKITLHETCTSACIYEGPRHVASK

SEQ ID NO: 21866 - protein, 136 aa, Leptospira interrogans
  REGION 1..136: note = tr|M3ETV1|M3ETV1_LEPIR 6-carboxy-5,6,7,8-tetrahydropterin synthase OS=Leptospira interrogans serovar Lora str. TE 1992 OX=1193028; GN = LEP1GSC067_0732 PE=3 SV=1
MFFQESGRFYIRIEERFESSHYLYKYFPDGSDEPIHGHSWKVELYLSGKKIIGDDGISFDFLTSKQKLKELVGRLDHILINDLEEFKKINPTSENIARWFYHYLKESVHTAGGKVDRIVIHEGPENLAFFEPTSLS

SEQ ID NO: 21867 - protein, 128 aa, Leptospira interrogans
  REGION 1..128: note = tr|N1UGM9|N1UGM9_LEPIR 6-carboxy-5,6,7,8-tetrahydropterin synthase OS=Leptospira interrogans serovar Australis str. 200703203 OX=1085541; GN = queD PE=3 SV=1
MEEIELTKEFRFDAAHLLPNVPDGHKCKRLHGHSFRFKLHLKGTIDPKTGWLIDYAAVSKIVKPLIENHLDHYYLNDVPGLENPTSENLSIWLWNHLKPLLPLLYKITLNETCTSACIYEGPNKNSSV

SEQ ID NO: 21868 - protein, 135 aa, unidentified
  source 1..135: note = Leptospira jelokensis
  REGION 1..135: note = tr|A0A5F2BB29|A0A5F2BB29_9LEPT 6-carboxy-5,6,7,8-tetrahydropterin synthase OS=Leptospira jelokensis OX=2484931 GN=EHQ79_13460 PE=3 SV=1
MFTQENGKFYVRIEGRFESAHFLYQYFADGTDEPIHGHSWKVEVFLEGKTNIRPDGISYDFLTARNKLLELVHSIDHILINDHPDFKGTNPTSENIARWFYFGLKDEVKSSEGKIKRIVIHEGPENLAFFEPEDF

SEQ ID NO: 21869 - protein, 124 aa, unidentified; identical to SEQ ID NO: 21832
  source 1..124: note = Leptospira jelokensis
  REGION 1..124: note = tr|A0A4Z0ZRG3|A0A4Z0ZRG3_9LEPT 6-carboxy-5,6,7,8-tetrahydropterin synthase OS=Leptospira jelokensis OX=2484931 GN=queD PE=3 SV=1

SEQ ID NO: 21870 - protein, 134 aa, unidentified
  source 1..134: note = Leptospira johnsonii
  REGION 1..134: note = tr|A0A2P2D291|A0A2P2D291_9LEPT 6-carboxy-5,6,7,8-tetrahydropterin synthase OS=Leptospira johnsonii OX=1917820 GN=LPTSP1_17470 PE=3 SV=1
MFFQETGKFYIRIEERFESSHYLYKYFPDGSDEPIHGHSFKVEVYLSGQKNIGDDGISFDFLTSKRRLKELVAELDHILINDHADFKKTNPTSENMARWFYYGLKDSVSAAQGKVDRIVIHEGPENLAYYEPFY

SEQ ID NO: 21871 - protein, 125 aa, unidentified
  source 1..125: note = Leptospira johnsonii
  REGION 1..125: note = tr|A0A2P2D474|A0A2P2D474_9LEPT 6-carboxy-5,6,7,8-tetrahydropterin synthase OS=Leptospira johnsonii OX=1917820 GN=ptpS PE=3 SV=1
MEEIELTKEFRFDAAHFLPNVPEGHKCRRMHGHSFRFKLHLKGKVDEKTGWLMDFAEVSKVVKPLLENYLDHYLLNEIEDLENPTSENISIWLWKKLKPQLPLLYKITLNETCTSACVYSGPSEK

SEQ ID NO: 21872 - protein, 132 aa, unidentified; identical to SEQ ID NO: 21837
  source 1..132: note = Leptospira kanakyensis
  REGION 1..132: note = tr|A0A4R9HPV3|A0A4R9HPV3_9LEPT 6-carboxytetrahydropterin synthase OS=Leptospira kanakyensis OX=2484968 GN=EHQ11_09685 PE=4 SV=1

SEQ ID NO: 21873 - protein, 124 aa, unidentified; identical to SEQ ID NO: 21838
  source 1..124: note = Leptospira kanakyensis
  REGION 1..124: note = tr|A0A4R9HP31|A0A4R9HP31_9LEPT 6-carboxy-5,6,7,8-tetrahydropterin synthase OS=Leptospira kanakyensis OX=2484968 GN=queD PE=3 SV=1

SEQ ID NO: 21874 - protein, 124 aa, unidentified; identical to SEQ ID NO: 21832
  source 1..124: note = Leptospira kemamanensis
  REGION 1..124: note = tr|A0A4R9JLB1|A0A4R9JLB1_9LEPT 6-carboxy-5,6,7,8-tetrahydropterin synthase OS=Leptospira kemamanensis OX=2484942 GN=queD PE=3 SV=1

SEQ ID NO: 21875 - protein, 135 aa, unidentified
  source 1..135: note = Leptospira kemamanensis
  REGION 1..135: note = tr|A0A4R9JQ73|A0A4R9JQ73_9LEPT 6-carboxytetrahydropterin synthase OS=Leptospira kemamanensis OX=2484942 GN=EHQ59_11490 PE=4 SV=1
MFTQENGKFYVRIEGRFESAHFLYQYFADGTDEPIHGHSWKVEVFLEGKTNIRPDGISFDFLTARNKLMALVHSIDHILINDHPDFKGINPTSENIARWFYFGLKEEVKSSEGRIRRIIIHEGPENLAFFEPELD

SEQ ID NO: 21876 - protein, 133 aa, Leptospira kirschneri
  REGION 1..133: note = tr|M6I6Z1|M6I6Z1_9LEPT 6-carboxy-5,6,7,8-tetrahydropterin synthase OS=Leptospira kirschneri serovar Bim str. 1051 OX=1049941 GN=queD PE=3; SV = 1
MIIPEGTMEEIELTKEFRFDAAHLLPNVPDGHKCKRLHGHSFRFKLHLKGTIDPKTGWLIDYAEVSKIVKPLTENHLDHYYLNDVPGLENPTSENISIWLWNHLKPLLPLLYKITLHETCTSACVYEGPKTIR

SEQ ID NO: 21877 - protein, 135 aa, Leptospira kirschneri
  REGION 1..135: note = tr|M6I2P7|M6I2P7_9LEPT 6-carboxy-5,6,7,8-tetrahydropterin synthase OS=Leptospira kirschneri serovar Bim str. 1051 OX=1049941; GN = LEP1GSC046_0612 PE=3 SV=1
MFFEESGRFYIRIEERFESSHYLYKYFPDGSDEPIHGHSWKVEIYLSGKKNIGDDGISFDFLTSKLKLKELVGKLDHILINDLEEFKKVNPTSENIARWFYHYIKESVHTVGGRVDRIVIHEGPENLAFFEPTSL

SEQ ID NO: 21878 - protein, 136 aa, Leptospira kmetyi
  REGION 1..136: note = tr|A0A2M9XK26|A0A2M9XK26_9LEPT 6-carboxy-5,6,7,8-tetrahydropterin synthase OS=Leptospira kmetyi OX=408139 GN=CH370_20270 PE=3 SV=1
MFFEESGRFYIRIEERFESSHFLYRYFPDGSDEPIHGHSWKVELYLSGKKNIGEDGISFDFLTSKQKLKELVAKLDHILINDLEEFKTINPTSENIARWFYHYLKESVHTAGGKVDRIVIHEGPENLAYFEPTSFP

SEQ ID NO: 21879 - protein, 128 aa, Leptospira kmetyi
  REGION 1..128: note = tr|A0A2M9XNT0|A0A2M9XNT0_9LEPT 6-carboxy-5,6,7,8-tetrahydropterin synthase OS=Leptospira kmetyi OX=408139 GN=queD PE=3 SV=1
MEEIELTKEFRFDAAHLLPNVPDGHKCKRLHGHSFRFKLHLKGKIDSKTGWLIDYAEVSKIVKPLIENHLDHYYLNDVPGLENPTSENISIWLWNHLKPLLPLLYKITLNETCTSACIYEGPKNSSQG

SEQ ID NO: 21880 - protein, 125 aa, unidentified
  source 1..125: note = Leptospira kobayashii
  REGION 1..125: note = tr|A0A2P2DT73|A0A2P2DT73_9LEPT 6-carboxy-5,6,7,8-tetrahydropterin synthase OS=Leptospira kobayashii OX=1917830 GN=ptpS PE=3 SV=1
MEEIELSKTFGFEAAHFLPNVPEGHKCKRMHGHSFRFSVSLKGAIDPHTGWIMDFGELKGIVKPIITESLDHYVLNEVPGLENPTSENLAVWLWNHLKPNLPLLDKITVYETCSSSCVYSGPKNK

SEQ ID NO: 21881 - protein, 132 aa, unidentified
  source 1..132: note = Leptospira kobayashii
  REGION 1..132: note = tr|A0A2P2DTT0|A0A2P2DTT0_9LEPT 6-carboxy-5,6,7,8-tetrahydropterin synthase OS=Leptospira kobayashii OX=1917830 GN=LPTSP3_33610 PE=3 SV=1
MFTEESGKFYVRIEGRFESAHYLYDYFPDGSDEPIHGHSWKVEVFLSGKENIRPDGISYDFLTARNRLQELVHSIDHLLINEHPDFKGVNPTSENVARWFFAGLKEEVAKTNGKVMRIVIHEGPENLAFFEP

SEQ ID NO: 21882 - protein, 133 aa, unidentified
  source 1..133: note = Leptospira koniamboensis
  REGION 1..133: note = tr|A0A4R9J8Z8|A0A4R9J8Z8_9LEPT 6-carboxy-5,6,7,8-tetrahydropterin synthase OS=Leptospira koniamboensis OX=2484950 GN=EHQ52_12655 PE=3 SV=1
MFFQETGKFYIRIEERFESSHYLYKYFPDGSDEPIHGHSFKVEVYLSGQKNIGEDGISFDFLTSKRKLKELVAELDHILINDHSDFKKTNPTSENMARWFYYGLKDSVAEAKGKVDRIVIHEGPENLAYYEPN

SEQ ID NO: 21883 - protein, 125 aa, unidentified
  source 1..125: note = Leptospira koniamboensis
  REGION 1..125: note = tr|A0A4R9J8R9|A0A4R9J8R9_9LEPT 6-carboxy-5,6,7,8-tetrahydropterin synthase OS=Leptospira koniamboensis OX=2484950 GN=queD PE=3 SV=1
MEEIELTKEFRFDAAHFLPNVPEGHKCRRMHGHSFRFKLHLKGTVDEKTGWLMDFAEVSKVVKPLLENYLDHYLLNEIEGLENPTSENISIWLWKKLKPQLSLLYKITLNETCTSACVYNGPSEK

SEQ ID NO: 21884 - protein, 133 aa, unidentified
  source 1..133: note = Leptospira langatensis
  REGION 1..133: note = tr|A0A5F1ZRL3|A0A5F1ZRL3_9LEPT 6-carboxy-5,6,7,8-tetrahydropterin synthase OS=Leptospira langatensis OX=2484983 GN=EHQ53_10480 PE=3 SV=1
MFFKETGKFYIRIEERFESSHYLYKYFPDGSDEPIHGHSFKVEVYLSGKDNIGEDGISFDFLTSKRRLKELVAELDHILINEHSDFKTINPTSENMARWFYHGLKDSVIAANGKVDRIVIHEGPENLAYYEPL

SEQ ID NO: 21885 - protein, 124 aa, unidentified
  source 1..124: note = Leptospira langatensis
  REGION 1..124: note = tr|A0A5F1ZX20|A0A5F1ZX20_9LEPT 6-carboxy-5,6,7,8-tetrahydropterin synthase OS=Leptospira langatensis OX=2484983 GN=queD PE=3 SV=1
MEEIELTKEFRFDAAHFLPNVPEGHKCRRMHGHSFRFKIHLKGQIDKHTGWLMDFAEVSKVVKPLLENHLDHYLLNEVQGLENPTSENISVWLWKKLKPELPLLHRITLHETCTSACVYDGPAE

SEQ ID NO: 21886 - protein, 134 aa, unidentified
  source 1..134: note = Leptospira levettii
  REGION 1..134: note = tr|A0A2N0AT60|A0A2N0AT60_9LEPT 6-carboxy-5,6,7,8-tetrahydropterin synthase OS=Leptospira levettii OX=2023178 GN=CH368_17030 PE=3 SV=1
MFTQENGKFYVRIEGRFESAHFLYQYFADGSDEPIHGHSWKVEVFLEGKTNIRPDGISYDFLTARNKLMELVHSIDHLLINDHPDFKGINPTSENVARWFYSGLKNEVKESEGKIRRIVIHEGPENLAFFEPET

SEQ ID NO: 21887 - protein, 124 aa, unidentified; identical to SEQ ID NO: 21832
  source 1..124: note = Leptospira levettii
  REGION 1..124: note = tr|A0A2N0AX80|A0A2N0AX80_9LEPT 6-carboxy-5,6,7,8-tetrahydropterin synthase OS=Leptospira levettii OX=2023178 GN=queD PE=3 SV=1

SEQ ID NO: 21888 - protein, 125 aa, Leptospira licerasiae
  REGION 1..125: note = tr|I0XW66|I0XW66_9LEPT 6-carboxy-5,6,7,8-tetrahydropterin synthase OS=Leptospira licerasiae serovar Varillal str. VAR 010 OX=1049972; GN = queD PE=3 SV=1
MEEIELTKEFRFDAAHFLPNVPEGHKCRRMHGHSFRFKLHLKGKVDQKTGWLMDFAEVSKVVKPLLENYLDHYLLNEIEGLENPTSENISIWLWKKLKPQLSLLYKITLNETCTSACVYNGPSEK

SEQ ID NO: 21889 - protein, 134 aa, Leptospira licerasiae
  REGION 1..134: note = tr|I0XUJ7|I0XUJ7_9LEPT 6-carboxy-5,6,7,8-tetrahydropterin synthase OS=Leptospira licerasiae serovar Varillal str. VAR 010 OX=1049972; GN = LEP1GSC185_2296 PE=3 SV=1
MFFQETGKFYIRIEERFESSHYLYKYFPDGSDEPIHGHSFKVEVYLSGQKNIGEDGISFDFLTSKRKLKELVAELDHILINDHTDFKKTNPTSENMARWFYHGLKDSVAEAKGKVDRIVIHEGPENLAYYEPSP

SEQ ID NO: 21890 - protein, 124 aa, unidentified
  source 1..124: note = Leptospira macculloughii
  REGION 1..124: note = tr|A0A2N0C524|A0A2N0C524_9LEPT 6-carboxy-5,6,7,8-tetrahydropterin synthase OS=Leptospira macculloughii OX=2023202 GN=queD PE=3 SV=1
MEELELSKTFGFEAAHFLPNVPEGHKCKRMHGHSFRFAVYLKGEIDPHTGWIMDFGELKSIVKPILDEHLDHYVLNDVPGLENPTSENIAVWLWNQLKPKLPLLDKITLYETCTSSCVYRGPKN

SEQ ID NO: 21891 - protein, 124 aa, unidentified; identical to SEQ ID NO: 21832
  source 1..124: note = Leptospira macculloughii
  REGION 1..124: note = tr|A0A2N0C6S1|A0A2N0C6S1_9LEPT 6-carboxy-5,6,7,8-tetrahydropterin synthase OS=Leptospira macculloughii OX=2023202 GN=queD PE=3 SV=1

SEQ ID NO: 21892 - protein, 126 aa, unidentified
  source 1..126: note = Leptospira mayottensis
  REGION 1..126: note = tr|A0A3S9KNJ2|A0A3S9KNJ2_9LEPT 6-carboxy-5,6,7,8-tetrahydropterin synthase OS=Leptospira mayottensis 200901116 OX=1192864 GN=queD PE=3 SV=1
MEEIELTKEFRFDAAHLLPNVPDGHKCKRLHGHSFRFKLHLKGRIDSNTGWLIDYAEVSRIVKPLIEDHLDHYYLNEVPGLENPTSENTAIWLWKHLKPLLPLLYKITLNETCTSACIYEGPKGSV

SEQ ID NO: 21893 - protein, 136 aa, unidentified
  source 1..136: note = Leptospira mayottensis
  REGION 1..136: note = tr|A0A5F2EKG9|A0A5F2EKG9_9LEPT 6-carboxy-5,6,7,8-tetrahydropterin synthase OS=Leptospira mayottensis OX=1137606 GN=EHR03_01710 PE=3 SV=1
MFFEESGRFYIRIEERFESSHFLYRYFPDGSDEPIHGHSWKVELYLSGEKNIDENGISFDFLTSKRKLKELVGKLDHILINELEEFKKINPTSENIARWFYHYLKESVHSAGGRVEKIVIHEGPENLAFFEPTSLP

SEQ ID NO: 21894 - protein, 139 aa, Leptospira meyeri
  REGION 1..139: note = tr|A0A5F1ZLV2|A0A5F1ZLV2_LEPME 6-carboxytetrahydropterin synthase OS=Leptospira meyeri; OX = 29508 GN=EHQ50_06070 PE=4 SV=1
MFTQENGKFYVRIEGRFESAHFLYQYFADGSDEPIHGHSWKVEVFLEGNTNIRPDGISYDFLTARTRLSELVHSIDHILINDHPDFKGVNPTSENVARWFYAGLKFDVKSSDGKIRRIVIHEGPENLAFFEPDENASMT

SEQ ID NO: 21895 - protein, 124 aa, Leptospira meyeri; identical to SEQ ID NO: 21890
  REGION 1..124: note = tr|A0A4R8MU32|A0A4R8MU32_LEPME 6-carboxy-5,6,7,8-tetrahydropterin synthase OS=Leptospira meyeri OX=29508 GN=queD PE=3 SV=1

SEQ ID NO: 21896 - protein, 124 aa, unidentified; identical to SEQ ID NO: 21838
  source 1..124: note = Leptospira montravelensis
  REGION 1..124: note = tr|A0A4Z0ZM46|A0A4Z0ZM46_9LEPT 6-carboxy-5,6,7,8-tetrahydropterin synthase OS=Leptospira montravelensis OX=2484961 GN=queD PE=3 SV=1

SEQ ID NO: 21897 - protein, 132 aa, unidentified
  source 1..132: note = Leptospira montravelensis
  REGION 1..132: note = tr|A0A4Z0ZT59|A0A4Z0ZT59_9LEPT 6-carboxytetrahydropterin synthase OS=Leptospira montravelensis OX=2484961 GN=EHQ31_12105 PE=4 SV=1
MFTQENGKFYVRIEGRFESAHFLYQYFADGSDEPIHGHSWKVEVFLEGNKNIRPDGISYDFLTARTKLMELVHSIDHILINDHPDFKGVNPTSENVARWFYFGMKEDVKSSEGRIRRIIIHEGPENLAYFEP

SEQ ID NO: 21898 - protein, 132 aa, unidentified
  source 1..132: note = Leptospira mtsangambouensis
  REGION 1..132: note = tr|A0A5F2DDK4|A0A5F2DDK4_9LEPT 6-carboxytetrahydropterin synthase OS=Leptospira mtsangambouensis OX=2484912 GN=EHR01_12915 PE=4 SV=1
MFTQENGKFYVRIEGRFESAHFLYQYFADGSDEPIHGHSWKVEVFLEGNTNIRPDGISYDFLTARTKLLELVHSIDHILINDHPDFKGINPTSENVARWFYYGLKEDVKSSDGKIRRIVIHEGPENLAFFEP

SEQ ID NO: 21899 - protein, 124 aa, unidentified; identical to SEQ ID NO: 21829
  source 1..124: note = Leptospira mtsangambouensis
  REGION 1..124: note = tr|A0A5F2DGR9|A0A5F2DGR9_9LEPT 6-carboxy-5,6,7,8-tetrahydropterin synthase OS=Leptospira mtsangambouensis OX=2484912 GN=queD PE=3 SV=1

SEQ ID NO: 21900 - protein, 125 aa, unidentified
  source 1..125: note = Leptospira neocaledonica
  REGION 1..125: note = tr|A0A2N0A267|A0A2N0A267_9LEPT 6-carboxy-5,6,7,8-tetrahydropterin synthase OS=Leptospira neocaledonica OX=2023192 GN=queD PE=3 SV=1
MEEIELTKEFRFDAAHFLPNVPEGHKCRRMHGHSFRFKLHLKGKVDEKTGWLMDFAEVSKVVKPLLENYLDHYLLNEIEGLENPTSENISIWLWKRLKPGLPLLYKITLNETCTSACVYNGPSEK

SEQ ID NO: 21901 - protein, 134 aa, unidentified
  source 1..134: note = Leptospira neocaledonica
  REGION 1..134: note = tr|A0A2M9ZTY0|A0A2M9ZTY0_9LEPT 6-carboxy-5,6,7,8-tetrahydropterin synthase OS=Leptospira neocaledonica OX=2023192 GN=CH365_19045 PE=3 SV=1
MFFQETGKFYIRIEERFESSHYLYKYFPDGSDEPIHGHSFKVEVYLSGQKNIGEDGISFDFLTSKRRLKELVAELDHILINDHADFKKTNPTSENMARWFYYGLKDSVSAAKGKVDRIVIHEGPENLAYFEPIS

SEQ ID NO: 21902 - protein, 136 aa, Leptospira noguchii
  REGION 1..136: note = tr|M6VF50|M6VF50_9LEPT 6-carboxy-5,6,7,8-tetrahydropterin synthase OS=Leptospira noguchii OX=28182 GN=LEP1GSC172_2030 PE=3 SV=1
MFFEESGRFYIRIEERFESSHYLYKYFPDGSDEPIHGHSWKVELYLSGKKNIGDNGISFDFLTSKQKLKELVGKLDHILINDLEEFKKINPTSENIARWFYHYLKESVHTAGGRVDRIVIHEGPENLAYFEPTSLS

SEQ ID NO: 21903 - protein, 123 aa, Leptospira noguchii
  REGION 1..123: note = tr|T0FSJ1|T0FSJ1_9LEPT 6-carboxy-5,6,7,8-tetrahydropterin synthase OS=Leptospira noguchii serovar Panama str. CZ214 OX=1001595 GN=queD PE=3; SV = 1
MEEIELTKEFRFDAAHLLPNLPDGHKCKRLHGHSFRFKLHLKGKIDPKTGWLIDYAEVSKIVKPLIEDQLDHYYLNDVPGLENPTSENISIWLWNHFKPLLPLLYKITLNETCTSACIYKGPK

SEQ ID NO: 21904 - protein, 123 aa, unidentified
  source 1..123: note = Leptospira noumeaensis
  REGION 1..123: note = tr|A0A4R9I7D6|A0A4R9I7D6_9LEPT 6-carboxy-5,6,7,8-tetrahydropterin synthase OS=Leptospira noumeaensis OX=2484964 GN=queD PE=3 SV=1
MEELELSKTFGFEAAHFLPNVPEGHKCKRMHGHSFRFAVYLKGEIDPHTGWIMDFGELKSIVKPILDEHLDHYVLNDVPGLENPTSENIAVWLWNQLKPKLPLLDKITLYETCTSSCVYRGPK

SEQ ID NO: 21905 - protein, 132 aa, unidentified; identical to SEQ ID NO: 21837
  source 1..132: note = Leptospira noumeaensis
  REGION 1..132: note = tr|A0A4R9I951|A0A4R9I951_9LEPT 6-carboxytetrahydropterin synthase OS=Leptospira noumeaensis OX=2484964 GN=EHQ24_09505 PE=4 SV=1

SEQ ID NO: 21906 - protein, 133 aa, unidentified
  source 1..133: note = Leptospira ognonensis
  REGION 1..133: note = tr|A0A4R9JUI6|A0A4R9JUI6_9LEPT 6-carboxytetrahydropterin synthase OS=Leptospira ognonensis OX=2484945 GN=EHQ58_17745 PE=4 SV=1
MFQEESGNFYVRIEGRFESAHFLYDYFPDGSDEPIHGHSWKVEVFLTGERNIGPDGISYDFLTARTRLLELVHSIDHILINDHADFKGINPTSENVARWFYRGLKNEVTKTNGRIKRIVIHEGPENLAFFEPS

SEQ ID NO: 21907 - protein, 124 aa, unidentified
  source 1..124: note = Leptospira ognonensis
  REGION 1..124: note = tr|A0A4R9JWC9|A0A4R9JWC9_9LEPT 6-carboxy-5,6,7,8-tetrahydropterin synthase OS=Leptospira ognonensis OX=2484945 GN=queD PE=3 SV=1
MEEIELSKTFGFEAAHFLPNVPEGHKCKRMHGHSFRFAVYLKGQIDPHTGWLMDFSELKRIVKPILEEHLDHFVLNEVKGLENPTSENLAVWLWNQLKPKLPLLDKITLYETCTSSCVYRGPKT

SEQ ID NO: 21908 - protein, 124 aa, unidentified; identical to SEQ ID NO: 21832
  source 1..124: note = Leptospira perdikensis
  REGION 1..124: note = tr|A0A4R9JIC5|A0A4R9JIC5_9LEPT 6-carboxy-5,6,7,8-tetrahydropterin synthase OS=Leptospira perdikensis OX=2484948 GN=queD PE=3 SV=1

SEQ ID NO: 21909 - protein, 138 aa, unidentified
  source 1..138: note = Leptospira perdikensis
  REGION 1..138: note = tr|A0A4R9JG35|A0A4R9JG35_9LEPT 6-carboxytetrahydropterin synthase OS=Leptospira perdikensis OX=2484948 GN=EHQ49_11485 PE=4 SV=1
MFTQENGKFYVRIEGRFESAHFLYQYFADGSDEPIHGHSWKVEVFLEGNTNIRPDGISYDFLTARTKLMELVHSIDHLLINDHPDFKGINPTSENVARWFYSGLKADVKSSEGRIRRIVIHEGPENLAFFEPTNDSHS

SEQ ID NO: 21910 - protein, 127 aa, unidentified
  source 1..127: note = Leptospira perolatii
  REGION 1..127: note = tr|A0A2M9ZS58|A0A2M9ZS58_9LEPT 6-carboxy-5,6,7,8-tetrahydropterin synthase OS=Leptospira perolatii OX=2023191 GN=queD PE=3 SV=1
MEEIELTKEFRFDAAHFLPNVPEGHKCRRMHGHSFRFKLHLKGRLDPHTGWLMDFAEVSKYVKPLVEKYLDHYLLNDIEGLENPTSEQICIWLWNKLRPQLPLLYKITLHETCTSACIYSGPNLEPA

SEQ ID NO: 21911 - protein, 135 aa, unidentified
  source 1..135: note = Leptospira perolatii
  REGION 1..135: note = tr|A0A2M9ZJ45|A0A2M9ZJ45_9LEPT 6-carboxy-5,6,7,8-tetrahydropterin synthase OS=Leptospira perolatii OX=2023191 GN=CH373_16655 PE=3 SV=1
MFFQESGKFYIRIEDKFESSHYLYKYFPDGSDEPIHGHSFKIEVYLSGNKNIGEDGISFDFLTSKKRLKELVHELDHILINEHPDFKTINPTSENMARWFYHGLKHSVHSADGRVDRIVIYEGPENLAYYEPSEG

SEQ ID NO: 21912 - protein, 136 aa, unidentified
  source 1..136: note = Leptospira putramalaysiae
  REGION 1..136: note = tr|A0A4R9L5R6|A0A4R9L5R6_9LEPT 6-carboxy-5,6,7,8-tetrahydropterin synthase OS=Leptospira putramalaysiae OX=2484984 GN=EHO98_13755 PE=3 SV=1
MFFEETGRFYIRIEERFESSHYLYRYFPDGSDEPIHGHSWKVELFLSGKKNIGEDGISFDFLTSKQKLKELVAKLDHILINDLEEFKKINPTSENIARWFYHYLKESVHSAGGKVDRIVIHEGPENLAYFEPTSSS

SEQ ID NO: 21913 - protein, 126 aa, unidentified
  source 1..126: note = Leptospira putramalaysiae
  REGION 1..126: note = tr|A0A4V3JUP9|A0A4V3JUP9_9LEPT 6-carboxy-5,6,7,8-tetrahydropterin synthase OS=Leptospira putramalaysiae OX=2484984 GN=queD PE=3 SV=1
MEEIELTKEFRFDAAHLLPNVPDGHKCKRLHGHSFRFKLHLKGKIDPHTGWLIDYAEVSKIVKPLVENHLDHYYLNDVPGLENPTSENISIWLWNHLKPLLPLLYKITLNETCTSACIYEGPKNSH

SEQ ID NO: 21914 - protein, 134 aa, unidentified
  source 1..134: note = Leptospira ryugenii
  REGION 1..134: note = tr|A0A2P2E2G2|A0A2P2E2G2_9LEPT 6-pyruvoyl-tetrahydropterin synthase OS=Leptospira ryugenii OX=1917863 GN=LPTSP4_25650 PE=4 SV=1
MFLEESGNFYIRIEGRFESAHFLYDYFPDGSDEPIHGHSWKVEVFLTGDGSLRKDSISYDFLTAKTRLQELVHSIDHILINEHKDFQGVNPTSENVARWFYAGLKGEVIKTGGKILRIVIYEGPENLAFFEPRD

SEQ ID NO: 21915 - protein, 126 aa, unidentified
  source 1..126: note = Leptospira ryugenii
  REGION 1..126: note = tr|A0A2P2E2P2|A0A2P2E2P2_9LEPT 6-carboxy-5,6,7,8-tetrahydropterin synthase OS=Leptospira ryugenii OX=1917863 GN=ptpS PE=3 SV=1
MMEEIELEKTFGFEAAHYLPNVPEGHKCRRMHGHSFRFSVCLKGQIDSHTGWLMDFADLKSVVKPIIEKDLDHYVLNEVKGLENPTSEKLAVWLWNRLKPELPLLYKITVFETCTSSCVYYGPKQP

SEQ ID NO: 21916 - protein, 125 aa, unidentified; identical to SEQ ID NO: 21820
  source 1..125: note = Leptospira saintgironsiae
  REGION 1..125: note = tr|A0A2M9YGY8|A0A2M9YGY8_9LEPT 6-carboxy-5,6,7,8-tetrahydropterin synthase OS=Leptospira saintgironsiae OX=2023183 GN=queD PE=3 SV=1

SEQ ID NO: 21917 - protein, 136 aa, unidentified
  source 1..136: note = Leptospira saintgironsiae
  REGION 1..136: note = tr|A0A2M9Y827|A0A2M9Y827_9LEPT 6-carboxy-5,6,7,8-tetrahydropterin synthase OS=Leptospira saintgironsiae OX=2023183 GN=CH362_17510 PE=3 SV=1
MFFQETGKFYIRIEERFESSHYLYKYFPDGSDEPIHGHSFKVEVYLSGQKNIGEDGISFDFLTSKRKLKELVAELDHILINDHADFKKTNPTSENMARWFYYGLKDSVAEAKGKVDRIVIHEGPENLAYFEPFERP

SEQ ID NO: 21918 - protein, 136 aa, Leptospira santarosai
  REGION 1..136: note = tr|A0A0E2BVD9|A0A0E2BVD9_9LEPT 6-carboxy-5,6,7,8-tetrahydropterin synthase OS=Leptospira santarosai str. MOR084 OX=1049984 GN=LEP1GSC179_1096 PE=3; SV = 1
MFFEESGRFYIRIEERFESSHFLYKYFPDGSDEPIHGHSWKVELYLSGKKNIGEDGISFDFLTSKRKLKELVGKLDHILINELEEFKKINPTSENIARWFYHYLKESVHSAGGKVDKIVIHEGPENLAFFEPTSLS

SEQ ID NO: 21919 - protein, 136 aa, Leptospira santarosai; identical to SEQ ID NO: 21918
  REGION 1..136: note = tr|A0A1V2EIM2|A0A1V2EIM2_9LEPT 6-carboxy-5,6,7,8-tetrahydropterin synthase OS=Leptospira santarosai OX=28183 GN=BWD14_13050 PE=3 SV=1

SEQ ID NO: 21920 - protein, 126 aa, unidentified
  source 1..126: note = Leptospira sarikeiensis
  REGION 1..126: note = tr|A0A4R9K9D9|A0A4R9K9D9_9LEPT 6-carboxy-5,6,7,8-tetrahydropterin synthase OS=Leptospira sarikeiensis OX=2484943 GN=queD PE=3 SV=1
MEEIELTKEFRFDAAHFLPNVPEGHKCRRMHGHSFRFKLHLKGALDEKTGWLMDFAEVSKVVKPLLENYLDHYLLNEIEGLENPTSENISIWLWQKLKPGLPLLYKITLNETCTSACVYNGPSVKN

SEQ ID NO: 21921 - protein, 134 aa, unidentified
  source 1..134: note = Leptospira sarikeiensis
  REGION 1..134: note = tr|A0A4R9KFB3|A0A4R9KFB3_9LEPT 6-carboxy-5,6,7,8-tetrahydropterin synthase OS=Leptospira sarikeiensis OX=2484943 GN=EHQ64_01055 PE=3 SV=1
MFFQETGKFYIRIEERFESSHYLYKYFPDGSDEPIHGHSFKVEVYLSGQKNIGEDGISFDFLTSKKRLKELVHELDHILINDHADFKKINPTSENMARWFYYGLKDSVSAAKGKVDRIVIHEGPENLAYYEPFE

SEQ ID NO: 21922 - protein, 133 aa, unidentified; identical to SEQ ID NO: 21882
  source 1..133: note = Leptospira selangorensis
  REGION 1..133: note = tr|A0A4R9G278|A0A4R9G278_9LEPT 6-carboxy-5,6,7,8-tetrahydropterin synthase OS=Leptospira selangorensis OX=2484982 GN=EHO58_12400 PE=3 SV=1

SEQ ID NO: 21923 - protein, 125 aa, unidentified; identical to SEQ ID NO: 21842
  source 1..125: note = Leptospira selangorensis
  REGION 1..125: note = tr|A0A4R9GAN2|A0A4R9GAN2_9LEPT 6-carboxy-5,6,7,8-tetrahydropterin synthase OS=Leptospira selangorensis OX=2484982 GN=queD PE=3 SV=1

SEQ ID NO: 21924 - protein, 133 aa, unidentified
  source 1..133: note = Leptospira semungkisensis
  REGION 1..133: note = tr|A0A4R9FT74|A0A4R9FT74_9LEPT 6-carboxy-5,6,7,8-tetrahydropterin synthase OS=Leptospira semungkisensis OX=2484985 GN=EHO59_11115 PE=3 SV=1
MFFQETGKFYIRIEERFESAHYLYKYFPDGSDEPIHGHSFKVEVYLSGKDNIREDGISFDFLTSKLRLKELVSELDHILINDHPDFKTINPTSENMARWFYFGLKESVIAANGKVERIVVHEGPENLAYFEPT

SEQ ID NO: 21925 - protein, 123 aa, unidentified
  source 1..123: note = Leptospira semungkisensis
  REGION 1..123: note = tr|A0A4R9G6Z8|A0A4R9G6Z8_9LEPT 6-carboxy-5,6,7,8-tetrahydropterin synthase OS=Leptospira semungkisensis OX=2484985 GN=queD PE=3 SV=1
MEEIELTKEFRFDAAHFLPNVPEGHKCRRMHGHSFRFKLHLKGQVDQHTGWLMDFAEVSKVVKPLVENHLDHYLLNDVEGLENPTSENISIWLWKKLKPELPLLYKITLHETCTSASVYNGPA

SEQ ID NO: 21926 - protein, 136 aa, Leptospira sp.; identical to SEQ ID NO: 21918
  REGION 1..136: note = tr|M5UYK3|M5UYK3_9LEPT 6-carboxy-5,6,7,8-tetrahydropterin synthase OS=Leptospira sp. Fiocruz LV4135 OX=1193013 GN=LEP1GSC076_2030 PE=3 SV=1

SEQ ID NO: 21927 - protein, 134 aa, Leptospira sp.
  REGION 1..134: note = tr|A0A2M8HQB8|A0A2M8HQB8_9LEPT 6-carboxy-5,6,7,8-tetrahydropterin synthase OS=Leptospira sp. OX=178 GN=CK427_03945 PE=3 SV=1
MFLEEKGNFYIRIEGRFESSHYLYKYFADGSDEPHHGHSWKVEVYLSGKNGLREDGISYDFMDAKKKLRELVDTLEHTLINDLPDFKGVNPTSENIAKWFYHGLKEEVLNTGGIVKRIVIHEGPENLAYYEPLN

SEQ ID NO: 21928 - protein, 126 aa, unidentified
  source 1..126: note = Leptospira stimsonii
  REGION 1..126: note = tr|A0A396ZA13|A0A396ZA13_9LEPT 6-carboxy-5,6,7,8-tetrahydropterin synthase OS=Leptospira stimsonii OX=2202203 GN=queD PE=3 SV=1
MEEIELTKEFRFDAAHLLPNVPDGHKCKRLHGHSFRFKLHLKGKIDPHTGWLIDYAEVSKIVKPLIENHLDHYYLNDVPGLENPTSENISIWLWNHLKPLLPLLYKITLNETCTSACIYEGPKNSH

SEQ ID NO: 21929 - protein, 136 aa, unidentified
  source 1..136: note = Leptospira stimsonii
  REGION 1..136: note = tr|A0A396YTC6|A0A396YTC6_9LEPT 6-carboxy-5,6,7,8-tetrahydropterin synthase OS=Leptospira stimsonii OX=2202203 GN=DLM75_20170 PE=3 SV=1
MFFEETGRFYIRIEERFESSHYLYRYFPDGSDEPIHGHSWKVELFLSGKKNIGEDGISFDFLTSKQKLKELVAKLDHILINDLEEFKKINPTSENIARWFYHYLKESVHSAGGKVDRIVIHEGPENLAYFEPTSSP

SEQ ID NO: 21930 - protein, 123 aa, unidentified
  source 1..123: note = Leptospira terpstrae
  REGION 1..123: note = tr|N1W1Z0|N1W1Z0_9LEPT 6-carboxy-5,6,7,8-tetrahydropterin synthase OS=Leptospira terpstrae serovar Hualin str. LT 11-33 = ATCC 700639; OX = 1257025 GN=queD PE=3 SV=1
MEEIELSKTFGFEAAHFLPNVPDGHKCKRMHGHSFRFAVYLKGQIDPHTGWIMDFGELKSIVKPILDEHLDHFVLNDVPGLQNPTSENIAVWLWNQLKPKLPLLDKITLYETCTSSCVYRGPK

SEQ ID NO: 21931 - protein, 91 aa, unidentified
  source 1..91: note = Leptospira terpstrae
  REGION 1..91: note = tr|N1W3E6|N1W3E6_9LEPT 6-pyruvoyl tetrahydropterin synthase OS=Leptospira terpstrae serovar Hualin str. LT 11-33 = ATCC 700639 OX=1257025 GN=LEP1GSC203_3648 PE=4 SV= 1
MEGNTNLRPDGISYDFLTARTRLTELVHSIDHILINDHPDFKGINPTSENVARWFYFGLKADVKSSEGRIRRIVIHEGPENLAFFEPNLEP

SEQ ID NO: 21932 - protein, 126 aa, unidentified
  source 1..126: note = Leptospira tipperaryensis
  REGION 1..126: note = tr|A0A1D7V190|A0A1D7V190_9LEPT 6-carboxy-5,6,7,8-tetrahydropterin synthase OS=Leptospira tipperaryensis OX=2564040 GN=A0128_17990 PE=3 SV=1
MEEIELTKEFRFDAAHLLPNVPDGHKCKRLHGHSFRFKLHLKGRIDSHTGWLIDYAEVSKIVKPLIENHLDHYYLNDVPGLENPTSENISIWLWNHLKPLLPLLYKITLNETCTSACIYEGPKNSH

SEQ ID NO: 21933 - protein, 136 aa, unidentified
  source 1..136: note = Leptospira tipperaryensis
  REGION 1..136: note = tr|A0A1D7UYV6|A0A1D7UYV6_9LEPT 6-carboxy-5,6,7,8-tetrahydropterin synthase OS=Leptospira tipperaryensis OX=2564040 GN=A0128_13460 PE=3 SV=1
MFFEETGRFYIRIEERFESSHYLYRYFPDGSDEPIHGHSWKVELFLSGKKNIGEDGISFDFLTSKQKLKELVGKLDHILINDLEEFKKINPTSENIARWFYHYLKESVHSAGGQVDRIVIHEGPENLAYFEPTSSP

SEQ ID NO: 21934 - protein, 141 aa, unidentified
  source 1..141: note = Leptospira vanthielii
  REGION 1..141: note = tr|N1W594|N1W594_9LEPT 6-pyruvoyl tetrahydropterin synthase OS=Leptospira vanthielii serovar Holland str. Waz; Holland = ATCC 700522 OX=1218591 GN=LEP1GSC199_2918 PE= 4; SV = 1
MDYALFVNGMFTQENGKFYVRIEGRFESAHFLYQYFADGSDEPIHGHSWKVEVFLEGNTNIRPDGISYDFLTARTKLMELVHSIDHILINDHPDFKGINPTSENVARWFYFGLKEGVKSSEGRIRRIVIHEGPENLAFFEP

SEQ ID NO: 21935 - protein, 132 aa, unidentified
  source 1..132: note = Leptospira vanthielii
  REGION 1..132: note = tr|A0A4R9LEY3|A0A4R9LEY3_9LEPT 6-carboxytetrahydropterin synthase OS=Leptospira vanthielii OX=293085 GN=EHQ95_16175 PE=4 SV=1
MFTQENGKFYVRIEGRFESAHFLYQYFADGSDEPIHGHSWKVEVFLEGNTNIRPDGISYDFLTARTKLMELVHSIDHILINDHPDFKGINPTSENVARWFYFGLKEGVKSSEGRIRRIVIHEGPENLAFFEP

SEQ ID NO: 21936 - protein, 126 aa, Leptospira weilii
  REGION 1..126: note = tr|M3G6J0|M3G6J0_9LEPT 6-carboxy-5,6,7,8-tetrahydropterin synthase OS=Leptospira weilii serovar Topaz str. LT2116 OX=1088540 GN=queD PE=3; SV = 1
MEEIELTKEFHFDAAHLLPNVSDGHKCKRLHGHSFRFKLHLKGRIDSNTGWLIDYAEVSRIVKPLIEDHLDHYYLNEVPGLENPTSENIAIWLWNHLKPLLPLLYKITLNETCTSACIYEGPKGSA

SEQ ID NO: 21937 - protein, 136 aa, Leptospira weilii
  REGION 1..136: note = tr|M6M2Z3|M6M2Z3_9LEPT 6-carboxy-5,6,7,8-tetrahydropterin synthase OS=Leptospira weilii str. LNT 1234 OX=1088541 GN=LEP1GSC086_4109 PE=3; SV = 1
MFFEESGRFYIRIEERFESSHFLYKYFPDGSDEPIHGHSWKVELYLSGKKNIGEDGISFDFLTSKQKLKELVGKLDHILINELEEFKKINPTSENIARWFYHYLKESVHSAGGRVDKIVIHEGPENLAFFEPTSVP

SEQ ID NO: 21938 - protein, 141 aa, Leptospira wolbachii
  REGION 1..141: note = tr|R9A5B8|R9A5B8_9LEPT 6-pyruvoyl tetrahydropterin synthase OS=Leptospira wolbachii serovar Codice str. CDC; OX = 1218599 GN=LEP1GSC195_3672 PE=4 SV=1
MDYALFVNGMFTQENGKFYVRIEGRFESAHFLYQYFADGSDEPIHGHSWKVEVFLEGNTNIRPDGISYDFLTARTKLMELVHSIDHILINDHPDFKGINPTSENVARWFYFGLKEDVKSSEGRIRRIVIHEGPENLAFFEP

SEQ ID NO: 21939 - protein, 123 aa, Leptospira wolbachii
  REGION 1..123: note = tr|R9A5Z0|R9A5Z0_9LEPT 6-carboxy-5,6,7,8-tetrahydropterin synthase OS=Leptospira wolbachii serovar Codice str. CDC OX=1218599 GN=queD PE=3; SV = 1
MEEIELSKTFGFEAAHFLPNVPEGHKCRRMHGHSFRFSVTLKGQIDPHTGWLMDFGELKGLVKPILDAKLDHYVLNDVVGLENPTSENIAVWLWNQLKPKLPLLDKITIYETCTSSCVYRGPK

SEQ ID NO: 21940 - protein, 126 aa, Leptospira wolffii
  REGION 1..126: note = tr|S3UFT6|S3UFT6_9LEPT 6-carboxy-5,6,7,8-tetrahydropterin synthase OS=Leptospira wolffii serovar Khorat str. Khorat-H2 OX=1193069 GN=queD; PE = 3 SV=1
MEEIELTKEFRFDAAHYLPNLPEGHKCKRMHGHSFRFKVHLKGQIDPHTGWLMDFAEVSKVIKPLLENYLDHYLLNEIQGLENPTSENISIWLWQRIKPQLPLLYKITLNETCTSACVYEGPSKKV

SEQ ID NO: 21941 - protein, 134 aa, Leptospira wolffii
  REGION 1..134: note = tr|A0A2M9ZH77|A0A2M9ZH77_9LEPT 6-carboxy-5,6,7,8-tetrahydropterin synthase OS=Leptospira wolffii OX=409998 GN=CH371_07255 PE=3 SV=1
MFFQETGKFYIRIEERFESSHYLYKYFPDGSDEPIHGHSFKVEVYLSGRKNIGEDGISFDFLTSKKRLKELVGELDHILINDHADFKTTNPTSENMARWFYYGLKDSVSAADGKVDRIVIHEGPENLAYFEPNS

SEQ ID NO: 21942 - protein, 124 aa, unidentified; identical to SEQ ID NO: 21832
  source 1..124: note = Leptospira yanagawae
  REGION 1..124: note = tr|A0A5E8HGF8|A0A5E8HGF8_9LEPT 6-carboxy-5,6,7,8-tetrahydropterin synthase OS=Leptospira yanagawae serovar Saopaulo str. Sao Paulo = ATCC 700523; OX = 1249483 GN=queD P E=3 SV=1

SEQ ID NO: 21943 - protein, 124 aa, unidentified; identical to SEQ ID NO: 21832
  source 1..124: note = Leptospira yanagawae
  REGION 1..124: note = tr|A0A4R9J0A4|A0A4R9J0A4_9LEPT 6-carboxy-5,6,7,8-tetrahydropterin synthase OS=Leptospira yanagawae OX=293069 GN=queD PE=3 SV=1

SEQ ID NO: 21944 - protein, 126 aa, unidentified
  source 1..126: note = Leptospira yasudae
  REGION 1..126: note = tr|A0A418ABD0|A0A418ABD0_9LEPT 6-carboxy-5,6,7,8-tetrahydropterin synthase OS=Leptospira yasudae OX=2202201 GN=queD PE=3 SV=1
MEEIELTKEFRFDAAHLLPNVPDGHKCKRLHGHSFRFKLHLKGKIDSKTGWLIDYAEVSKIVKPLIENHLDHYYLNDVPGLENPTSENISIWLWNHLKPLLPLLYKITLNETCTSACIYEGPKGSA

SEQ ID NO: 21945 - protein, 136 aa, unidentified
  source 1..136: note = Leptospira yasudae
  REGION 1..136: note = tr|A0A418A889|A0A418A889_9LEPT 6-carboxy-5,6,7,8-tetrahydropterin synthase OS=Leptospira yasudae OX=2202201 GN=DLM77_12950 PE=3 SV=1
MFFEESGRFYIRIEERFESSHFLYRYFPDGSDEPIHGHSWKVELYLSGKKNIGEDGISFDFLTSKQKLKELVGKLDHILINDLEEFKTINPTSENIARWFYHYLKESVHSAGGKVDRIVIHEGPENLAYFEPTSFP

SEQ ID NO: 21946 - protein, 126 aa, unidentified
  source 1..126: note = Leptospiraceae bacterium
  REGION 1..126: note = tr|A0A357J1I5|A0A357J1I5_9LEPT 6-carboxy-5,6,7,8-tetrahydropterin synthase; OS = Leptospiraceae bacterium OX=2026757 GN=queD PE=3 SV=1
MSQEVEIVKKYRFEAAHFLPNVPEGHKCRRMHGHSFRFELVLRGPVDPNTGWLIDFGDISKIVKPLIDNHLDHYLLNDVEGLENPTSEQISIWLWNRIKPHLADLVEIVVHETCTARCIYRGPGGA

SEQ ID NO: 21947 - protein, 153 aa, unidentified
  source 1..153: note = Leptospiraceae bacterium
  REGION 1..153: note = tr|A0A357ISA6|A0A357ISA6_9LEPT 6-carboxytetrahydropterin synthase OS=Leptospiraceae bacterium OX=2026757 GN=DEA96_00250 PE=4 SV=1
MDQNAHPHLLKDLQGFSEKPGEFLIRIEGRFESSHYLYRYFPDGSDEPVHGHSWLVEVFLARADGGLGADGISYDFLSARLRLNELVDRMEHVTINNLPEFKGVNPTAENIGRWFYAGLKEVVEKEGACVREIRIHEGPSNYAVYRPFKEEAT

SEQ ID NO: 21948 - protein, 128 aa, Leptospirillum ferriphilum
  REGION 1..128: note = tr|J9Z7K2|J9Z7K2_LEPFM 6-carboxy-5,6,7,8-tetrahydropterin synthase; OS = Leptospirillum ferriphilum (strain ML-04) OX=1048260; GN = LFML04_0117 PE=3 SV=1
MFLISVTATFAASHILPGYPGLCSKLHGHNWTVEVSWSSRGLDPLGMALDFHEAEALLGPLIKELDHSHLNDHPFFRERLPTSEQVAFFLYTRLKEIMSSRTDSTVRLDQVAVTEMAPYKAIYRETSG

SEQ ID NO: 21949 - protein, 128 aa, Leptospirillum ferriphilum; identical to SEQ ID NO: 21948
  REGION 1..128: note = tr|A0A1V3SUK4|A0A1V3SUK4_9BACT 6-carboxy-5,6,7,8-tetrahydropterin synthase; OS = Leptospirillum ferriphilum OX=178606 GN=BOX24_07640; PE = 3 SV=1

SEQ ID NO: 21950 - protein, 128 aa, unidentified
  source 1..128: note = Leptospirillum ferrodiazotrophum
  REGION 1..128: note = tr|C6HXY4|C6HXY4_9BACT Uncharacterized protein; OS = Leptospirillum ferrodiazotrophum OX=412449; GN = UBAL3_93200098 PE=4 SV=1
MMGFSVSARRSFAASHIIVGYPGLCARLHGHNWTVEATFRTLELDALGMAFDFHEIERFLDPLVAELDHTHLNDHPFFSDRTTTAENIALYFYRGLVRNLSVSSHPGVSVARVSVCEMDGYVATYEEP

SEQ ID NO: 21951 - protein, 131 aa, Leptospirillum ferrooxidans
  REGION 1..131: note = tr|I0IKQ1|I0IKQ1_LEPFC Putative 6-pyruvoyl tetrahydrobiopterin synthase OS=Leptospirillum ferrooxidans (strain C2-3) OX=1162668 GN=LFE_0121 PE=4 SV=1
MFDITVTTQFSAAHQIPGYPGACARLHGHNWKIEVTIRALTLDHLGMALDYHQAEQMLFPIISELDHTNLNDHPFFSDRTTTSENVAFFIHSRMKQALGNDLQAKNRKLSLMAVTVYETDIYRTTYRETDG

SEQ ID NO: 21952 - protein, 128 aa, Leptospirillum sp.; identical to SEQ ID NO: 21948
  REGION 1..128: note = tr|A0A0K0WQB0|A0A0K0WQB0_9BACT 6-carboxy-5,6,7,8-tetrahydropterin synthase; OS = Leptospirillum sp. Group II 'CF-1' OX=1660083; GN = ABH19_00565 PE=3 SV=1

SEQ ID NO: 21953 - protein, 128 aa, Leptospirillum sp.
  REGION 1..128: note = tr|B6AMM9|B6AMM9_9BACT 6-carboxy-5,6,7,8-tetrahydropterin synthase; OS = Leptospirillum sp. Group II '5-way CG' OX=419541; GN = CGL2_11181002 PE=3 SV=1
MFLISVTATFAASHILPGYPGLCSKLHGHNWTVEVAWSSQGLDPLGMALDFHEAETLLGPLIKELDHSHLNDHPFFRERLPTSEQVAFFLYTRLKEIMSSRTDSTVRLDQVAVTEMAPYKAIYRETSG

SEQ ID NO: 21954 - protein, 125 aa, Leuconostoc citreum
  REGION 1..125: note = tr|A0A5A5TXC3|A0A5A5TXC3_LEUCI 6-pyruvoyltetrahydropterin synthase OS=Leuconostoc citreum; OX = 33964 GN=LCIT_06020 PE=4 SV=1
MSNKVLTYRLRTFINATHAVRWQGVQGVAHPHTWELILDIQPMTYPQPMKFEDIETVINDSIAVFSGKFLNTVAPFDDINPTLENFAEVLFDILTTALLKISCQLLDLSVGESPTRFINIALAQD

SEQ ID NO: 21955 - protein, 125 aa, Leuconostoc citreum
  REGION 1..125: note = tr|B1N004|B1N004_LEUCK 6-pyruvoyl-tetrahydropterin synthase OS=Leuconostoc citreum (strain KM20) OX=349519; GN = LCK_01281 PE=4 SV=1
MSNKVLTYRLRTFINATHAVRWQGVQGVAHPHTWELILDIQPMTYPQPMKFEDIETVINDSIAVFSGEFLNTVAPFDDINPTLENFAEVLFDILTTALLKISCQLLDLSVGESPTRFINIALAQD

SEQ ID NO: 21956 - protein, 120 aa, Leuconostoc fallax
  REGION 1..120: note = tr|A0A4R5N7W2|A0A4R5N7W2_9LACT Uncharacterized protein OS=Leuconostoc fallax OX=1251 GN=C5L23_000271 PE=4; SV = 1
MMKSRSYKFKTYLNASHAVQWDSGRGVVHPHTWEIICEVKEGDDLVKFEVVEAIIEQQLSAFSNQTLNDVAPFNEINPTLENFTDFVFDRLSQSLVDISCHLIRIEVSESPTRTCCISLE

SEQ ID NO: 21957 - protein, 127 aa, Leuconostoc lactis
  REGION 1..127: note = tr|A0A1B2A1T6|A0A1B2A1T6_LEULA 6-pyruvoyl tetrahydropterin synthase OS=Leuconostoc lactis OX=1246; GN = BCR17_06205 PE=4 SV=1
MRQKSYTYKLRTFINASHAVRWQGVLGAEHPHTWELILEIRPTAEQFSLKFEDIEAVIADSIAPFHGQLLNNVQPFDQIVPTLENFAEQLFDLLADALTEIACQLHDLSVGESPTRYYSVALRELND

SEQ ID NO: 21958 - protein, 125 aa, Leuconostoc lactis
  REGION 1..125: note = tr|A0A1B2A1U9|A0A1B2A1U9_LEULA 6-pyruvoyl tetrahydropterin synthase OS=Leuconostoc lactis OX=1246; GN = BCR17_06225 PE=4 SV=1
MGNKVFTYKLSTFINASHAVRWPDEMEAEHRHTWELILNIRPITAGKLLKIDDIEEVIEASLQTFSGRFLNDMSRFDNVNPTLENFTEILFDDLTQALSGISMQLVELSVGNSPTRFYHITLEDN

SEQ ID NO: 21959 - protein, 126 aa, Leuconostoc mesenteroides
  REGION 1..126: note = tr|A0A095CV71|A0A095CV71_LEUME 6-pyruvoyl tetrahydropterin synthase OS=Leuconostoc mesenteroides P45; OX = 1429888 GN=LH61_04190 PE=4 SV=1
MNLVGTYHLKYYIHASHAIRWENGEGEEHAHSWEIAVEFRSTNENMIVFDKIESSLDDLFKAYSGKFLNTVEPFTTIDPTLENITKFFFTLVEKQILPMHAQLNKIELGESPMRFYYVTRDDISGE

SEQ ID NO: 21960 - protein, 126 aa, Leuconostoc mesenteroides
  REGION 1..126: note = tr|A0A5B8TWP5|A0A5B8TWP5_LEUME 6-pyruvoyl tetrahydropterin synthase OS=Leuconostoc mesenteroides; OX = 1245 GN=FGL74_08790 PE=4 SV=1
MNLVGTYHLKYYIHATHAIRWENGEGEEHAHSWEIAVEFRSTNEDMIVFDKIEGSLDELFKTYSGKFLNKVEPFTTIDPTLENITKFFFTLVAKQISPMHAQLNKIEIGESPMRFYYVTRDDMSGE

SEQ ID NO: 21961 - protein, 126 aa, Leuconostoc pseudomesenteroides
  REGION 1..126: note = tr|A0A370AE82|A0A370AE82_LEUPS 6-pyruvoyl tetrahydropterin synthase OS=Leuconostoc pseudomesenteroides OX=33968 GN=DQM11_04270 PE=4 SV=1
MIKKNYQYKLRTFINASHAIRWADGQGTIHPHTWEVVLNIIPPVASTSEVVKFEDIELLVQNYLQKYAGQTLNDIAPFRTINPTLENFADVLFDELTAALDVIHFQLVQLDLGESAKRFYSISLAD

SEQ ID NO: 21962 - protein, 126 aa, Leuconostoc pseudomesenteroides
  REGION 1..126: note = tr|A0A5B8T3Q9|A0A5B8T3Q9_LEUPS 6-pyruvoyl tetrahydropterin synthase OS=Leuconostoc pseudomesenteroides OX=33968 GN=FGL85_08225 PE=4 SV=1
MIKKIYQYKLRTFINASHAIRWSDGQGAIHPHTWEVVLNIIPPAESTSEVVKFEDIELLVQNYLQKYSGQTLNEMAPFRKINPTLENFADVLFDELTAALNVIQFQLVQLDLGESAKRFYSISLAN

SEQ ID NO: 21963 - protein, 83 aa, Leuconostoc sp.
  REGION 1..83: note = tr|W1UVH8|W1UVH8_9LACT Uncharacterized protein (Fragment) OS=Leuconostoc sp. DORA_2 OX=1403934; GN = Q611_LSC00404G0002 PE=4 SV=1
MTYPQPMKFEDIETVINDSIAVFSGEFLNTVAPFDDINPTLENFAEVLFDILTTALLKISCQLLDLSVGESPTRFINIALAQD

SEQ ID NO: 21964 - protein, 126 aa, unidentified
  source 1..126: note = Leuconostoc suionicum
  REGION 1..126: note = tr|A0A2N9K8I0|A0A2N9K8I0_9LACT 6-pyruvoyl tetrahydropterin synthase OS=Leuconostoc suionicum; OX = 1511761 GN=LES9216_00762 PE=4 SV=1
MSLVGTYHLKYYIHASHAIRWENGEGEEHAHSWEIAVEFRSTNENMIVFDKIESSLDDLFKAYSGKFLNTVEPFTTIDPTLENITKFFFTLVEKQILPMHAQLNKIELGESPMRFYYVTRDDMSGE

SEQ ID NO: 21965 - protein, 118 aa, unidentified
  source 1..118: note = Leucothrix pacifica
  REGION 1..118: note = tr|A0A317C9T8|A0A317C9T8_9GAMM 6-carboxy-5,6,7,8-tetrahydropterin synthase OS=Leucothrix pacifica OX=1247513 GN=queD PE=3 SV=1
MFRISKEFQFSASHQLKQMPADHQCARLHGHNYIVVVELSSPTLDQYGFVRDYTELKPLKDYIDDTLDHRHLNDVLGDDCATAELLAKHLYDWCKAKWPETSGVKVSETPKTWAEYRP

SEQ ID NO: 21966 - protein, 118 aa, Leucothrix sp.
  REGION 1..118: note = tr|A0A317C9D2|A0A317C9D2_9GAMM 6-carboxy-5,6,7,8-tetrahydropterin synthase OS=Leucothrix sp. IMCC9719 OX=1481894 GN=queD PE=3 SV=1
MFRISKEFQFSASHQLKQMPDDHQCARLHGHNYVVVVELSSETLDQYGFVRDYSELKLLKTYIDDVLDHRHLNDVLGDDCATAELLAKHLFDWCKPHWPETTAVKVSETPKTWAEYRP

SEQ ID NO: 21967 - protein, 148 aa, Lewinella agarilytica
  REGION 1..148: note = tr|A0A1H9L014|A0A1H9L014_9BACT 6-pyruvoyltetrahydropterin/6-carboxytetrahydropterin synthase OS=Lewinella agarilytica OX=478744; GN = SAMN05444359_12263 PE=4 SV=1
MLNFAPMLYLTRRETFNAAHKLHNPDWSDEKNKATFGKCSNHNWHGHNYELFVTVVGEPDPVTGFVMDAKVLSTIVKKEIVDQVDHRNINLDVEWFSSDLQPTTENLARAFWNRIEALINERGAQLYCVKLKETENIFAEYFGPQGRK

SEQ ID NO: 21968 - protein, 142 aa, Lewinella marina
  REGION 1..142: note = tr|A0A2G0CFA3|A0A2G0CFA3_9BACT 6-carboxy-5,6,7,8-tetrahydropterin synthase OS=Lewinella marina OX=438751 GN=CGL56_09275 PE=3 SV=1
MHYLTRRETFNAAHKLAVEEWPDDRNKEVFGKCANRNWHGHNYDLRVTVCGEPDPITGFVMDAKVLSGIVKAEVVDQLDHSNLNLDIDWFKDGRQPTTENLTSEIWKHLEEKIAAAGSRLYRVRLYETENIYADYYGPAGRP

SEQ ID NO: 21969 - protein, 136 aa, Lewinella nigricans
  REGION 1..136: note = tr|A0A2D0N5Z1|A0A2D0N5Z1_9BACT 6-pyruvoyl tetrahydrobiopterin synthase OS=Lewinella nigricans DSM 23189 = NBRC 102662 OX=1122177 GN=CRP01_24610 PE=4 SV=1
MVYLTRRERFNAAHKLWVDQWSEEQNLATFGKCANKNWHGHNYWLYVTVKGRPDPVTGFIIDVKKLSRLIKESIVDKVDHCNLNMDVPFIPKGMQPTTENLVILFWQQLEPLLEECELHSIKLYETENIYAEYFGP

SEQ ID NO: 21970 - protein, 136 aa, Lewinella nigricans
  REGION 1..136: note = tr|A0A2D0N7C6|A0A2D0N7C6_9BACT 6-carboxy-5,6,7,8-tetrahydropterin synthase OS=Lewinella nigricans DSM 23189 = NBRC 102662 OX=1122177; GN = CRP01_24240 PE=3 SV=1
MRIAVFRKAHFNAAHRLYRPDWSDERNFEVFGVCSNNNYHGHNYELEVKVVGETDPETGYLIDLKVLKEIIFEEVEQRFDHKNLNLDTEEFRELNPTAENICYVIWQLLRKRLEDRLDLKVRLYETPRNYVEYPAD

SEQ ID NO: 21971 - protein, 142 aa, Lewinella sp.
  REGION 1..142: note = tr|A0A5C7FVP2|A0A5C7FVP2_9BACT 6-carboxytetrahydropterin synthase OS=Lewinella sp. SSH13; OX = 2602767 GN=FUA23_04555 PE=4 SV=1
MLYLTRRETFNAAHKLHIADWSDEQNRAVFGKCSNPNWHGHNYELFVTVAGNPDPNTGFVMDAKLLSTIMKEEIVDEVDHRNFNLDVEWVPKSIQPTTENLLILFWNRIEERVNAGGATLYSIKLRETENIYAEYFGPNGRK

SEQ ID NO: 21972 - protein, 141 aa, Lewinella sp.
  REGION 1..141: note = tr|A0A180EPQ6|A0A180EPQ6_9BACT 6-carboxy-5,6,7,8-tetrahydropterin synthase OS=Lewinella sp. 4G2 OX=1803372 GN=A3850_012380 PE=3 SV=1
MVYLTRRVTFNAAHKLHVEGWSEEKNRSIFGKCSNKNWHGHNYELFVTVKGQPDPLTGFVLDAKALRDLIKKEVTDDLDHSNLNLDVDWMPKDVQPTTENIAIRIFERIEAQVNELGAQLYSVRLHETENIYAEYFGPNGK

SEQ ID NO: 21973 - protein, 141 aa, unidentified
  source 1..141: note = Lewinella xylanilytica
  REGION 1..141: note = tr|A0A2S6I0D9|A0A2S6I0D9_9BACT 6-pyruvoyltetrahydropterin/6-carboxytetrahydropterin synthase OS=Lewinella xylanilytica OX=1514080; GN = CLV84_4088 PE=4 SV=1
MHYVTRRETFNAAHKLALPTWSDERNREVFGKCANANWHGHNYDLRVTVSGSPDPVTGFVMDAKVLSQIIKRTVVDVLDHSNLNLDVDWFRDRLPTTENLTTAIWERLVDEVSAAGSALYRVRLYETENIYADYYGPAGRP

SEQ ID NO: 21974 - protein, 136 aa, unidentified
  source 1..136: note = Lewinellaceae bacterium
  REGION 1..136: note = tr|A0A2C6CUA8|A0A2C6CUA8_9BACT 6-carboxy-5,6,7,8-tetrahydropterin synthase; OS = Lewinellaceae bacterium SD302 OX=2014804 GN=CEQ90_09675; PE = 3 SV=1
MVYLTRRMRFNAAHKLWVREWSEEQNLATFGKCANKNWHGHNYDLHVTVKGEPDPTTGFVMDAKKLRDIIQAEVIDDLDHSNLNLDVDWLPKDLQPTTENVVIHIWRRLADKVNDGKLHCVKLYETENIYAEYLGE

SEQ ID NO: 21975 - protein, 135 aa, unidentified
  source 1..135: note = Lewinellaceae bacterium
  REGION 1..135: note = tr|A0A2C6BB18|A0A2C6BB18_9BACT 6-carboxy-5,6,7,8-tetrahydropterin synthase; OS = Lewinellaceae bacterium SD302 OX=2014804 GN=CEQ90_02945; PE = 3 SV=1
MKIAAFRRAHFNAAHRLFRADWSDEKNREIFGPCSNPFYHGHNYEVEVKVVGEIDPETGFVIDLSLLKRYIKEEVEDYLDHKNLNEQIPEFKDLNPTAEHICILIWNRLKPRLDERYELTVRLWETERNYVEYPA

SEQ ID NO: 21976 - protein, 118 aa, unidentified
  source 1..118: note = Liberibacter asiaticus
  REGION 1..118: note = tr|C6XGK2|C6XGK2_LIBAP 6-carboxy-5,6,7,8-tetrahydropterin synthase; OS = Liberibacter asiaticus (strain psy62) OX=537021; GN = CLIBASIA_04670 PE=3 SV=1
MKITQAFTFEAAHRLPRVPKTHKCHRMHGHSYRVELVMEGDVDPKTGFVDDFFNIEQYFSPLLEKLDHHCLNEIEELENPTAENIAIWIWKRLSTSLSILSSVRVYETPMSWVEYQGF

SEQ ID NO: 21977 - protein, 118 aa, unidentified
  source 1..118: note = Liberibacter crescens
  REGION 1..118: note = tr|L0ET90|L0ET90_LIBCB 6-carboxy-5,6,7,8-tetrahydropterin synthase; OS = Liberibacter crescens (strain BT-1) OX=1215343; GN = B488_07620 PE=3 SV=1
MKITQAFTFEAAHHLSHLPKTHKCHRMHGHSYRVEITLQGNINPETGFVEDFFNIESSMSHVLALLDHQSLNDIDGLEKPSVENIALWIWNKINHTIPLLFSVRVYETSMSWAEYQGE

SEQ ID NO: 21978 - protein, 118 aa, unidentified; identical to SEQ ID NO: 18841
  source 1..118: note = Liberibacter solanacearum
  REGION 1..118: note = tr|E4UAY2|E4UAY2_LIBSC 6-carboxy-5,6,7,8-tetrahydropterin synthase; OS = Liberibacter solanacearum (strain CLso-ZC1) OX=658172; GN = CKC_03120 PE=3 SV=1

SEQ ID NO: 21979 - protein, 128 aa, unidentified
  source 1..128: note = Lihuaxuella thermophila
  REGION 1..128: note = tr|A0A1H8C195|A0A1H8C195_9BACL 6-carboxy-5,6,7,8-tetrahydropterin synthase OS=Lihuaxuella thermophila OX=1173111 GN=SAMN05444955_10321 PE=3 SV=1
MRGKYTLVKHFWLSCAHRVPGAGKCERIHGHNYKVTFCVEGYELDEQQMLIDFRQVKHAIEKKFDHHLLNDFPEFDPGRGGSAPTTEKVAEVFFSIIEELCLQKENRPTVKWVEVQETEEAYARYEKV

SEQ ID NO: 21980 - protein, 122 aa, unidentified
  source 1..122: note = Limimaricola cinnabarinus
  REGION 1..122: note = tr|A0A2G1MH90|A0A2G1MH90_9RHOB 6-carboxy-5,6,7,8-tetrahydropterin synthase; OS = Limimaricola cinnabarinus OX=1125964 GN=queD PE=3 SV=1
MYTITKEFHFSASHQLCGLPEDHPCARLHGHNYIAVVELQAEELDENGFVLDYKALKPLKTWIDDHLDHRHLNEVFGHDRVTSEVLAKEIYDWARARWAQVSAVRISETPKTWAEYRPRSAA

SEQ ID NO: 21981 - protein, 118 aa, unidentified
  source 1..118: note = Limimaricola cinnabarinus
  REGION 1..118: note = tr|U3AL09|U3AL09_9RHOB 6-carboxy-5,6,7,8-tetrahydropterin synthase; OS = Limimaricola cinnabarinus LL-001 OX=1337093; GN = MBELCI_1480 PE=3 SV=1
MYTITKEFHFSASHQLCGLPGDHPCARLHGHNYIAEVELRAETLDENGFVLDYRALDPLKRWIDDHLDHRHLNEVFGHDGVTSEVLARAIFDWARARWDQVSAVRISETPKTWAEYRP

SEQ ID NO: 21982 - protein, 123 aa, unidentified
  source 1..123: note = Limimaricola hongkongensis
  REGION 1..123: note = tr|A0A017HDN6|A0A017HDN6_9RHOB 6-carboxy-5,6,7,8-tetrahydropterin synthase; OS = Limimaricola hongkongensis DSM 17492 OX=1122180; GN = Lokhon_01271 PE=3 SV=1
MFTITKEFHFSASHQLCDLPEDHPCARLHGHNYIAEIELQAETLDENGFVLDYRALKPLKSWIDDHLDHRHLNEVFGHDHVTSEVLAKEIFDWARARWDQVSAVRISETPKTWAEYRPRRSAA

SEQ ID NO: 21983 - protein, 125 aa, unidentified
  source 1..125: note = Limimaricola soesokkakensis
  REGION 1..125: note = tr|A0A1X6YY80|A0A1X6YY80_9RHOB 6-carboxy-5,6,7,8-tetrahydropterin synthase; OS = Limimaricola soesokkakensis OX=1343159 GN=queD PE=3 SV=1
MYTITKEFHFSASHQLCGLPGDHPCARLHGHNYIAEVELQSEELDENGFVLDYRALDPLKRWIDDHLDHRHLNEVFGHDGVTSEVLAWAIYDWAAARWDQVSAVRVSETPKTWAEYRPQPGRRAA

SEQ ID NO: 21984 - protein, 136 aa, unidentified
  source 1..136: note = Limimonas halophila
  REGION 1..136: note = tr|A0A1G7P137|A0A1G7P137_9PROT 6-pyruvoyl-tetrahydropterin synthase OS=Limimonas halophila OX=1082479 GN=SAMN05216241_102367 PE=4 SV=1
MYAVTVRDRMMIAHSFQGEAFGPAQRLHGATYVVDVTLWRPDLNADGVAVDIAAAGELLSSVVGGLTFRNLDDEPAFAGRNTTTEVLAKAVFDRLAARIRDGALGGDGHALTALRVTLNESDIASASYEGPLTAGT

SEQ ID NO: 21985 - protein, 116 aa, Limnobacter sp.
  REGION 1..116: note = tr|A0A151QK51|A0A151QK51_9BURK 6-carboxy-5,6,7,8-tetrahydropterin synthase OS=Limnobacter sp. CACIAM 66H1 OX=1813033 GN=A0129_00870 PE=3 SV=1
MKVFKQFTFDVAHQLPDWPGLHGHSYTAEVWFEGPATDGYVVPESLLTQHVGAVHKRLDHSYLNELIELPTSENIARWIWDQLRPVGPLIKVKVFRGSIGFGVEFDLEDAKAEGRA

SEQ ID NO: 21986 - protein, 116 aa, Limnobacter sp.
  REGION 1..116: note = tr|A0A520TBW6|A0A520TBW6_9BURK 6-carboxy-5,6,7,8-tetrahydropterin synthase OS=Limnobacter sp. OX=2003368 GN=EVA59_09825 PE=3 SV=1
MKVFKQFTFDVAHQLPDWPGLHGHSYTAEVWFEGPAIDGYVVPESLLTQHVGAVHKRLDHSYLNELIELPTSENIARWIWDQLRPVGPLIKVKVFRGSIGFGVEFDLEDAKAEGRA

SEQ ID NO: 21987 - protein, 121 aa, unidentified
  source 1..121: note = Limnobaculum parvum
  REGION 1..121: note = tr|A0A2Y9U2M3|A0A2Y9U2M3_9ENTR 6-carboxy-5,6,7,8-tetrahydropterin synthase; OS = Limnobaculum parvum OX=2172103 GN=queD PE=3 SV=1
MMVTTLFKDFTFEAAHRLPNVPEGHKCARLHGHSFVVRIEVTGEVSPNTGWVMDFSEIKAAFKPILNRLDHYYLNDIPGLENPTSEVLAHWIWQQLKPGLPLLSGVRVKETCSAGCIYNGE

SEQ ID NO: 21988 - protein, 123 aa, Limnohabitans curvus
  REGION 1..123: note = tr|A0A315EP32|A0A315EP32_9BURK 6-carboxy-5,6,7,8-tetrahydropterin synthase; OS = Limnohabitans curvus OX=323423 GN=B9Z44_02210 PE=3 SV=1
MKYELSQRFYFEAAHTLRRKIDSEGSLRIHGHTYHAEVTIAGKPDPESGMMMDLAFLRQEVEKVREKLDHHFLDEVPGIGPATLENLCAFIYNDLKATLPNIHCIKIERPASGDTCCLLPNED

SEQ ID NO: 21989 - protein, 123 aa, Limnohabitans sp.
  REGION 1..123: note = tr|A0A2S7JJH0|A0A2S7JJH0_9BURK 6-carboxy-5,6,7,8-tetrahydropterin synthase; OS = Limnohabitans sp. TS-CS-82 OX=2094193 GN=C5F52_25055; PE = 3 SV=1
MTYELSQRFYFEAAHTLRRKIDAEGSLRIHGHTYHAEVTLAGKPDPESGMMMDLGFLRQEVDKVREKLDHHFLDEVAGLGPATLENLCAFIYNDLKATLPNIRRIKIERPASGDTCCLLPNED

SEQ ID NO: 21990 - protein, 123 aa, Limnohabitans sp.
  REGION 1..123: note = tr|A0A315C4P3|A0A315C4P3_9BURK 6-carboxy-5,6,7,8-tetrahydropterin synthase; OS = Limnohabitans sp. JirII-29 OX=1835756 GN=B9Z39_11510; PE = 3 SV=1
MTFELSQRFYFEAAHTLRRTIDAQGSLRIHGHTYHAEVTIAGTPDPATGMMMDLAYLRQEVEKVRTQLDHHFLDEVAGLGPATLENLCLFLHTQLKDALPNLARVVVERPASGDKCCLKVPQS

SEQ ID NO: 21991 - protein, 288 aa, unidentified
  source 1..288: note = Limnoraphis robusta
  REGION 1..288: note = tr|A0A0F5YI65|A0A0F5YI65_9CYAN 6-pyruvoyl tetrahydropterin synthase OS=Limnoraphis robusta CS-951; OX = 1637645 GN=WN50_08730 PE=4 SV=1
MECVITRREEFSASHRYWMSELSEAENFERFGPTARAPGHGHNYVLYISMVGQLDEYGMVLNLSDVKHVIKREVTSQLDFSLLNEVWPEFQHTLPTTEYLAQVIWQRLTPHLPLTNIQVFEHPKLWADYQGNSMEAYLTVSTHFSAAHRLAHPDLSFEENCQIYGKCARPNGHGHNYHLEVTVKGEIDPRTGMIVDLAALQQAIDDYVVEPFDHTFLNKDIAYFAKVVPTAENIAVYIRHLLQNPIRQLGTQLHKVKLIESPNNSCEVYCTETPADSTVTKTPVFATV

SEQ ID NO: 21992 - protein, 144 aa, unidentified
  source 1..144: note = Limnoraphis robusta
  REGION 1..144: note = tr|A0A0F5YE44|A0A0F5YE44_9CYAN 6-carboxy-5,6,7,8-tetrahydropterin synthase OS=Limnoraphis robusta CS-951 OX=1637645 GN=WN50_17215 PE=3 SV=1
MTSNTEKEEIKSNSESWIIGKEFKFEASHQLPNHDGKCARLHGHSWRGVIYVSGNKLIDAGAKQDMIMDYEDIKKYLKPLLDDYLDHYHLNETTGLANPTSEAIAKWIYEQLEDQIPGLVAVRIDETCTSQCVYSKEKSNFLLL

SEQ ID NO: 21993 - protein, 290 aa, unidentified; identical to SEQ ID NO: 17691
  source 1..290: note = Limnospira indica
  REGION 1..290: note = tr|H1WHD1|H1WHD1_9CYAN 6-pyruvoyl tetrahydrobiopterin synthase OS=Limnospira indica PCC 8005; OX = 376219 GN=ptpS PE=4 SV=1

SEQ ID NO: 21994 - protein, 130 aa, unidentified; identical to SEQ ID NO: 17690
  source 1..130: note = Limnospira indica
  REGION 1..130: note = tr|H1W622|H1W622_9CYAN 6-carboxy-5,6,7,8-tetrahydropterin synthase OS=Limnospira indica PCC 8005 OX=376219 GN=ygcM PE=3 SV=1

SEQ ID NO: 21995 - protein, 126 aa, unidentified
  source 1..126: note = Limnothrix rosea
  REGION 1..126: note = tr|A0A1Q4R7F4|A0A1Q4R7F4_9CYAN 6-carboxy-5,6,7,8-tetrahydropterin synthase OS=Limnothrix rosea IAM M-220 OX=454133 GN=NIES208_04760 PE=3 SV=1
MEQWQLYKEFRFEAAHRLPHHDGKCARLHGHSWVCRVYIRGDRLIESGAKQGMLMDFSDLKSSMKPLLEDYLDHYYLNETLEMESPTSEAIAKWIYEQLEAKKLMGLCAVEILETCTSGCIYSRPK

SEQ ID NO: 21996 - protein, 302 aa, unidentified
  source 1..302: note = Limnothrix sp.
  REGION 1..302: note = tr|A0A372DE81|A0A372DE81_9CYAN 6-pyruvoyl tetrahydropterin synthase OS=Limnothrix sp. CACIAM 69d; OX = 1890733 GN=BJG00_015850 PE=4 SV=1
MSDLCTISRRVQFSASYRYWLPELTEAENHRRFGIAARSPGSTFTLWVQVQGPIDPFGMVANLSTTVKRALQREVLEPLHGANLNQIWPEFANTLPTSEWLAQVLWQRLGQCWQRQGLQLRQVQLSPDPGLVVEYRGQAMEAHLTVHTHFSAAHRLALPTLTLAQNSEIYGKCSRPSGHGHNYQLWVTVCGQIDPRTGMVVELNRLHDLIEMQVVEPLDHTFLNQDIAYFQDIVPTAENIAVYIRDQLLEPVRELGVQLVKIRLDETENNSCEVYVETEAPWVDLPVTSAIDPGKPAGVGAN

SEQ ID NO: 21997 - protein, 302 aa, unidentified
  source 1..302: note = Limnothrix sp.
  REGION 1..302: note = tr|A0A1C0V3G2|A0A1C0V3G2_9CYAN 6-pyruvoyl tetrahydropterin synthase OS=Limnothrix sp. P13C2; OX = 1880902 GN=BCR12_06445 PE=4 SV=1
MSDLCTISRRVQFSASYRYWLPELTEAENHRRFGIAARSPGSTFTLWVQVQGPIDPFGMVANLSTTIKRALQREVLEPLHGANLNQVWPEFANTLPTSEWLAQVLWQRLGQCWQRQGLQLRQVQLSPDPGLVVEYRGQAMEAHLTVHTHFSAAHRLALPTLTLAQNSEIYGKCSRPSGHGHNYQLWVTVRGQIDPRTGMVVELNRLHDLIEMQVVEQLDHTFLNQDIAYFQDIVPTAENIAVYIRDQLLEPLRELGVQLVKIRLDETENNSCEVYVQTEALWVDRPVTSAIDQGKPAGVGAN

SEQ ID NO: 21998 - protein, 136 aa, Lishizhenia tianjinensis
  REGION 1..136: note = tr|A0A1I7BW02|A0A1I7BW02_9FLAO 6-carboxy-5,6,7,8-tetrahydropterin synthase OS=Lishizhenia tianjinensis OX=477690 GN=SAMN05216474_3130 PE=3 SV=1
MKLKICRRETFNAAHRLNNPNWDEQTNAEVFGKCNSPNYHGHNYVLETYVSGEPDPETGYLMDLKILKEIIKEEICERFDHRNLNLDTEEFKNLNPTAENIVMVCYRLLREKIDPKLGLYLRLYETQKNWVEYGEE

SEQ ID NO: 21999 - protein, 143 aa, Lishizhenia tianjinensis
  REGION 1..143: note = tr|A0A1I7BNS2|A0A1I7BNS2_9FLAO 6-carboxy-5,6,7,8-tetrahydropterin synthase OS=Lishizhenia tianjinensis OX=477690 GN=SAMN05216474_2946 PE=3 SV=1
MKTVYITRREHFNAAHKLWREEWSDEKNEAVFGKCSNKNWHGHNFVIYVTVKGKPNPDTGFVIDLKDLSKIVKEEVVEQLDHRNLNLDVPFMKGKLASTENLVIEIWEQIKDSIQRAGGELAKIKLVETENNFVEYFGGNEPF

SEQ ID NO: 22000 - protein, 142 aa, unidentified
  source 1..142: note = Listeria booriae
  REGION 1..142: note = tr|A0A099WEB9|A0A099WEB9_9LIST 6-carboxy-5,6,7,8-tetrahydropterin synthase OS=Listeria booriae OX=1552123 GN=EP57_05840 PE=3 SV=1
MMKIAKEFTFDMGHMLDGHDGKCHNLHGHTYTLQVEVAGALITTGSSAGMVLDYGDIKRIVKEHVTAKLDHAFAYFEENENECRVAKLLQEMERKTVALPCRSTAEGLAMVIYDWLAPYLPVSAIRLGETPTSFCEYTGELS

SEQ ID NO: 22001 - protein, 141 aa, unidentified
  source 1..141: note = Listeria cornellensis
  REGION 1..141: note = tr|W7BZB2|W7BZB2_9LIST 6-carboxy-5,6,7,8-tetrahydropterin synthase OS=Listeria cornellensis FSL F6-0969 OX=1265820 GN=PCORN_08822 PE=3; SV = 1
MRIAKEFTFDMAHMLDGHDGKCHNLHGHTYTLQVEVAGDLIANGPKAGMVLDYGDIKRIVKEHVTAKLDHAFAYFEGNENECRIAKLLQEMDRKTVALPCRTTAEGMAVVIHDWLAPYLSVCAIRLGETPTSFCEYRGELS

SEQ ID NO: 22002 - protein, 141 aa, unidentified
  source 1..141: note = Listeria grandensis
  REGION 1..141: note = tr|W7BCB8|W7BCB8_9LIST 6-carboxy-5,6,7,8-tetrahydropterin synthase OS=Listeria grandensis FSL F6-0971 OX=1265819 GN=PGRAN_14517 PE=3 SV=1
MRIAKEFTFDMAHMLDGHDGKCHNLHGHTYTLQVEVSGDLIATGSSAEMVLDYGDIKRIVKEHVTAKLDHAFAYFEENENECRIAKLLQEMDRKTVALPCRSTAEGIAMVIYDWLTPYLPVSAIRLGETPTSFCEYTGEPS

SEQ ID NO: 22003 - protein, 143 aa, Listeria rocourtiae
  REGION 1..143: note = tr|A0A4R6ZLG9|A0A4R6ZLG9_9LIST 6-carboxy-5,6,7,8-tetrahydropterin synthase OS=Listeria rocourtiae OX=647910 GN=DFP96_10536 PE=3 SV=1
MMKIAKEFTFDMAHMLDGHDGKCHNLHGHTYTLQVEVTGDLIATGSKAGMVLDYGDIKRVVKEHVTAKLDHAFAYFDGNENECRIAKLLEEMNRKTVALPCRTTAEGMAIVIYDWLTPYLPVSAIRLGETPTSFCEYVGDMHD

SEQ ID NO: 22004 - protein, 142 aa, Listeria sp.
  REGION 1..142: note = tr|A0A3N9UDH4|A0A3N9UDH4_9LIST 6-carboxy-5,6,7,8-tetrahydropterin synthase OS=Listeria sp. SHR_NRA_18 OX=2269046 GN=queD PE=3 SV=1
MMRIAKEFTFDMAHMLDGHDGKCHHLHGHTYTLQVEVAGDLIADGSKAGMVLDYGDIKRIVKEHVTAKLDHAFAYFEENENECRIAKLLQEMDRKTVAFPCRTTAEGMAMVIFDWLVPYLPVSAIRLGETPTSFCEYRGERA

SEQ ID NO: 22005 - protein, 142 aa, unidentified; identical to SEQ ID NO: 22004
  source 1..142: note = Listeriaceae bacterium
  REGION 1..142: note = tr|A0A099W908|A0A099W908_9LIST 6-carboxy-5,6,7,8-tetrahydropterin synthase; OS = Listeriaceae bacterium FSL A5-0209 OX=1497679; GN = EP56_11700 PE=3 SV=1

SEQ ID NO: 22006 - protein, 148 aa, unidentified
  source 1..148: note = Litoricolaceae bacterium
  REGION 1..148: note = tr|A0A520SJ21|A0A520SJ21_9GAMM 6-carboxytetrahydropterin synthase OS=Litoricolaceae bacterium OX=2510333 GN=EVA60_00690 PE=4 SV=1
MSVYQTIKTFDNFPCSHRQWRHSGHCKFIHGYSRSFKMTFGCKELTESGFGVDFGEFSEIKSWLSHWFDHTLLINEDDPERALFQELHEKQIVDLRVLPNVSMERTAEFVFHYVDGWIRQQTHDRSFLLEVECRENDKNAGVYRPATH

SEQ ID NO: 22007 - protein, 295 aa, unidentified
  source 1..295: note = Litorilituus sediminis
  REGION 1..295: note = tr|A0A4P6P0V2|A0A4P6P0V2_9GAMM Uncharacterized protein OS=Litorilituus sediminis OX=718192 GN=EMK97_02075; PE = 4 SV=1
MQLFVNDLTVIDFSYLCQQRGIVGESWIVDVLLDGSLNEMSMVLDFAVVKKQIKAIIDEAVDHKLLLPMQCEGLTLESSSHHEDHQTIDFLSDIASYHLQSPSCAFAQLECSAITIEDVTSHLTQIILAQLPENVQGLELTLRPEVIPSDYYHYTHGLKLHDGNCQRIAHGHRSKIKIFVDNKRNSELEKAWCLRWQDIYIASEADRVAQSDIQLSEKASGYLKPDHQFFAYQAPQGRFDIAVQKRVLDVVDCDSTVELLADFILRQILTAKPTLKGRLKVMAYEGVAKGAIVNG

SEQ ID NO: 22008 - protein, 295 aa, unidentified
  source 1..295: note = Litorilituus sp.
  REGION 1..295: note = tr|A0A502KRZ1|A0A502KRZ1_9GAMM Uncharacterized protein OS=Litorilituus sp. RZ04 OX=2491017 GN=EPA86_15295; PE = 4 SV=1
MQLFVDDLTVIDFSYLCPKRGIVGESWIVDVLLDGSLNEMSMVLDFAVVKKQIKAIIDEAVDHKLLLPILSKSVILKESSHQVNHQTIDFFSGVGSYHLQSPACAFASIESKSITIDAVTQHLTKVILEQLPENVEGLILTLRPEYIPGDYYHYTHGLKLHDGNCQRIAHGHRSKIQIFVDGEKDISLEHQWCQRWKDIYIASEADRISRKDIQLSNEIDEHLKPDHQFFAYRAPQGRFDIAVPTNILDVVDCDSTVELLADFIARQIVKAQPELSTRLKVIAYEGVAKGAIVNG

SEQ ID NO: 22009 - protein, 129 aa, Litorimonas taeanensis
  REGION 1..129: note = tr|A0A420WK19|A0A420WK19_9RHOB 6-carboxy-5,6,7,8-tetrahydropterin synthase OS=Litorimonas taeanensis OX=568099 GN=DES40_0558 PE=3 SV=1
MAAYLEIEKDFQFEAAHYFGHPDANDLFKHIHGHSFTGKVIVRGDAQSDKGWIRDLWKIETLVKEVVEPLDHSLLNNIEGLEQPALEQIAMWIFERLSLKLPGLICVEVGRPTCGERARYCVLPDSSVT

SEQ ID NO: 22010 - protein, 117 aa, Loktanella sp.
  REGION 1..117: note = tr|A0A1H9HDV2|A0A1H9HDV2_9RHOB 6-carboxy-5,6,7,8-tetrahydropterin synthase OS=Loktanella sp. DSM 29012 OX=1881056 GN=SAMN05428995_105274 PE=3 SV=1
MYRITKEFHFSASHKLSHLPADHQCARLHGHNYIVVVELAAPTLDSDGFVRDYGELKALKTYIDDTFDHRHLNDVLDVHSTGENMARHFYDWCRARWPETTAVKVSETPKTWAEYRP

SEQ ID NO: 22011 - protein, 117 aa, Loktanella sp.
  REGION 1..117: note = tr|A0A0F4RKF4|A0A0F4RKF4_9RHOB 6-carboxy-5,6,7,8-tetrahydropterin synthase OS=Loktanella sp. S4079 OX=579483 GN=TW80_04445 PE=3 SV=1
MFRISKEFHFSASHQLSHLPADHQCARLHGHNYIVVVELASPTLNSDGFVRDYHELKPLKTYIDDEFDHRHLNDVLDGPSTAENMAFHFYSWCKSRWPETSAVKVSETPKTWAEYRP

SEQ ID NO: 22012 - protein, 140 aa, Lonepinella koalarum
  REGION 1..140: note = tr|A0A4R1L0M3|A0A4R1L0M3_9PAST 6-carboxy-5,6,7,8-tetrahydropterin synthase OS=Lonepinella koalarum OX=53417 GN=queD PE=3 SV=1
MFKVSKEFSFDMAHILDGHDGKCQNLHGHTYKLQVEVSGDLVANGAKKGMVIDFTDVKTVVKKAILDPMDHAFIYDTNSPRECKIANLLNELDSKTFGIPMRTTAEQMARFIFNQLKNELPISAIRLWETPTSFCEYRES

SEQ ID NO: 22013 - protein, 164 aa, unidentified
  source 1..164: note = Longibacter salinarum
  REGION 1..164: note = tr|A0A2A8D0D6|A0A2A8D0D6_9BACT 6-carboxytetrahydropterin synthase QueD OS=Longibacter salinarum OX=1850348 GN=CRI94_04360 PE=4 SV=1
MKVSKRFRWEAAHRLPWHEGSCRFMHGHSYRMMVELEGEPTENTPGGSAMLIDFKHVKRIVKPLVDAMDHATIVNASDTELREAIEALESKVYVMPYDSTAENIARHVAESVRDDGASVLRTHGVHTIRVQVWETETCYAEVEREVPEGRSDPASAEEVLAAMR

SEQ ID NO: 22014 - protein, 141 aa, unidentified
  source 1..141: note = Longibacter salinarum
  REGION 1..141: note = tr|A0A2A8CTW9|A0A2A8CTW9_9BACT 6-carboxy-5,6,7,8-tetrahydropterin synthase OS=Longibacter salinarum OX=1850348 GN=CRI94_16605 PE=3 SV=1
MSTVYVTRKVHFNAAHRLHNPEKSDEWNRETFGPCNHPNWHGHNYVLKVTVAGEPDPDTGYVIDLSDLKSLLHEEVVDQVDHKNLNLDVDFLDGVIPSTENFAIAIWNQLEGKLPSGRLHCVRLYETERNYVEYYGDQEPR

SEQ ID NO: 22015 - protein, 132 aa, unidentified
  source 1..132: note = Longimonas halophila
  REGION 1..132: note = tr|A0A2H3P1T9|A0A2H3P1T9_9BACT 6-pyruvoyl tetrahydropterin synthase OS=Longimonas halophila; OX = 1469170 GN=CRI93_02070 PE=4 SV=1
MYTLTVKDDLIAQHYLTVPNCGPENEWHSHHFTVEVVLESNSLNKWGYVCDITDVKSALASLKDHVSDQTLNDLPAFKGLNPSVEHFARIAAEHIRGSLDKETRQRCHRMHVRIWEDDEAAAQYTTPLTDEV

SEQ ID NO: 22016 - protein, 164 aa, unidentified
  source 1..164: note = Longimonas halophila
  REGION 1..164: note = tr|A0A2H3NLE8|A0A2H3NLE8_9BACT 6-carboxytetrahydropterin synthase QueD OS=Longimonas halophila OX=1469170 GN=CRI93_07430 PE=4 SV=1
MTVAKRFRWEAAHRLADHPSLCRNLHGHSYTCWIELDGTPGPSEMLIDFQEVKRVVSPLIDAWDHCTYVNRDDTALREALATLGVKHYVLDGRSTTEALADYVARYLCTHGFAMLQDHGVTAVQVRVQETETCYAITRATVADYADTPAPDLEQALVETEAVAG

SEQ ID NO: 22017 - protein, 121 aa, unidentified
  source 1..121: note = Lonsdalea britannica
  REGION 1..121: note = tr|A0A1X3RM35|A0A1X3RM35_9GAMM 6-carboxy-5,6,7,8-tetrahydropterin synthase OS=Lonsdalea britannica OX=1082704 GN=AU510_16690 PE=3 SV=1
MPTMLFKDFQFEAAHRLPHVPDGHKCGRLHGHSFMVRLEITGEVDAYTGWVMDFAELKAISRPIWEQLDHHYLNEIPGLENPTSEILAQWIWQRLKPILPLLTAVRVKETCTAGCVYRGEE

SEQ ID NO: 22018 - protein, 122 aa, unidentified
  source 1..122: note = Lonsdalea iberica
  REGION 1..122: note = tr|A0A1X3S1E2|A0A1X3S1E2_9GAMM 6-carboxy-5,6,7,8-tetrahydropterin synthase OS=Lonsdalea iberica OX=1082703 GN=AU511_01945 PE=3 SV=1
MPTMLFKDFQFEAAHRLPHVPDGHKCGRLHGHSFMVRLEITGEVDAYTGWVMDFAELKAISRPIWEQLDHHYLNEIPGLENPTSEILAQWIWQRLKPILPLLTAVRVKETCTAGCVYRGEEK

SEQ ID NO: 22019 - protein, 121 aa, unidentified
  source 1..121: note = Lonsdalea populi
  REGION 1..121: note = tr|A0A3N0UQA9|A0A3N0UQA9_9GAMM 6-carboxy-5,6,7,8-tetrahydropterin synthase OS=Lonsdalea populi OX=1172565 GN=queD PE=3 SV=1
MPTMLFKDFQFEAAHRLPHVPDGHKCGRLHGHSFMVRLEITGEVDAYTGWVMDFAELKAISRPIWEQLDHHYLNEIPGLENPTSEILAQWIWQRLKPILPLLSAVRVKETCTAGCVYRGEE

SEQ ID NO: 22020 - protein, 122 aa, unidentified
  source 1..122: note = Lonsdalea quercina
  REGION 1..122: note = tr|A0A1H4AGZ5|A0A1H4AGZ5_9GAMM 6-carboxy-5,6,7,8-tetrahydropterin synthase OS=Lonsdalea quercina OX=71657 GN=SAMN02982996_01420 PE=3 SV=1
MPTMLFKDFQFEAAHRLPHVPDGHKCGRLHGHSFMVRLEITGEVDAYTGWVMDFAELKAISRPIWEQLDHHYLNEIPGLENPTSEILAQWIWQRLKPILPLLTAVRVKETCTAGCVYRGEDK

SEQ ID NO: 22021 - protein, 126 aa, unidentified
  source 1..126: note = Lucifera butyrica
  REGION 1..126: note = tr|A0A498RAB4|A0A498RAB4_9FIRM 6-carboxy-5,6,7,8-tetrahydropterin synthase OS=Lucifera butyrica OX=1351585 GN=LUCI_3180 PE=3 SV=1
MFELTITTDFEAAHRIPEYPGKCQRLHGHNWKVEVAVSGEGLDHLGMLVDFRVLKQEVAKVIATLDHYYLNELAAFQTICPTAENIACHIYKKLVKSASLPAAVTVSYVKVWESPYSAVSYREGGQ

SEQ ID NO: 22022 - protein, 120 aa, unidentified
  source 1..120: note = Lujinxingia litoralis
  REGION 1..120: note = tr|A0A328C400|A0A328C400_9DELT 6-carboxy-5,6,7,8-tetrahydropterin synthase OS=Lujinxingia litoralis OX=2211119 GN=queD PE=3 SV=1
MIVELVKEFRFESAHRLPNVPEGHKCRRLHGHSYRVTVTVRGEVDPEMGWLVDYGDIKDAVKPLIEQLDHYFLNEIEGLENPTSEVLAGWLWTRIKPVLPQLHALQIHETCESSCIYRGE

SEQ ID NO: 22023 - protein, 86 aa, unidentified
  source 1..86: note = Luminiphilus syltensis
  REGION 1..86: note = tr|B8KXT4|B8KXT4_9GAMM Queuosine biosynthesis protein QueD OS=Luminiphilus syltensis NOR5-1B OX=565045; GN = NOR51B_707 PE=4 SV=1
MTIDGEVDEHTGWLMDFAEIKAAVTPVIDRLDHYFLNEIPGLENPTSEVLAMWLWEEIAPRLEGLVQIEVKETCNAGCIYRGPGTS

SEQ ID NO: 22024 - protein, 171 aa, unidentified
  source 1..171: note = Luminiphilus syltensis
  REGION 1..171: note = tr|B8KQC4|B8KQC4_9GAMM 6-pyruvoyl tetrahydropterin synthase OS=Luminiphilus syltensis NOR5-1B OX=565045; GN = NOR51B_1509 PE=4 SV=1
MRLLFLAERAMTRTTTLYIDKEAHKFSAAHYTIFTATERERLHGHNYSVSVRLEALMGDNGFSADYNVYKRRIQALCDRLDEYMLLAANSPHQTLELGETEIKATHNGKTITFPADETIVLPIVNVTVEELAHYLLGELIATYDDPSLTGVELCVSTGPGQTGAAVWAPEP

SEQ ID NO: 22025 - protein, 136 aa, unidentified
  source 1..136: note = Lunatimonas lonarensis
  REGION 1..136: note = tr|R7ZLQ2|R7ZLQ2_9BACT 6-pyruvoyl tetrahydrobiopterin synthase OS=Lunatimonas lonarensis; OX = 1232681 GN=ADIS_4502 PE=4 SV=1
MKASVYRKEHFNAAHRLNNPNWPAEKNQEVFGKCNLPNYHGHNYDLIVQLYGPIDPDTGYVYDMKLLKDLIKAQVLDRFDHKNLNLDTDEFKHLNPTAENIAVVIWNILRQLIDTKFELTIRLYETERNFVEYKGY

SEQ ID NO: 22026 - protein, 111 aa, unidentified
  source 1..111: note = Lunatimonas lonarensis
  REGION 1..111: note = tr|R7ZYD2|R7ZYD2_9BACT 6-pyruvoyl tetrahydrobiopterin synthase OS=Lunatimonas lonarensis; OX = 1232681 GN=ADIS_0416 PE=4 SV=1
MFGPCANANWHGHNFELIVTVKGKPDPETGFVVDLKKLSTLIRQEIIAKVDHKNLNLDVPFMEGKMASCENLVIEFWKILEPKVAALVKEGGLYKLTLYETPRNFVEYFGE

SEQ ID NO: 22027 - protein, 117 aa, unidentified
  source 1..117: note = Luteibacter pinisoli
  REGION 1..117: note = tr|A0A4Y5Z827|A0A4Y5Z827_9GAMM 6-carboxy-5,6,7,8-tetrahydropterin synthase OS=Luteibacter pinisoli OX=2589080 GN=queD PE=3 SV=1
MRIFKTFNIEAAHRLPNVPEGHKCSRLHGHSFRVELHVEGPVDPVFGWVMDFGDLKARFLPLYDRLDHHYLNDIEGLENPTSESLARWIFEHLRPDVPLLCKVVVHETCTSGAEYTA

SEQ ID NO: 22028 - protein, 120 aa, Luteibacter rhizovicinus
  REGION 1..120: note = tr|A0A0G9HD77|A0A0G9HD77_9GAMM 6-carboxy-5,6,7,8-tetrahydropterin synthase OS=Luteibacter rhizovicinus DSM 16549 OX=1440763 GN=BJI69_05870 PE=3 SV=1
MRIFKTFHIEAAHRLPNVPEGHKCSRLHGHSFRVELHVEGPIDPVFGWVMDFGDLKARFQPLYDRLDHHYLNDIDGLDNPTSENLARWIFERLRVDVPGLARVVVHETCTSGAEFSADMV

SEQ ID NO: 22029 - protein, 126 aa, Luteibacter rhizovicinus
  REGION 1..126: note = tr|A0A4R3YUL3|A0A4R3YUL3_9GAMM 6-carboxy-5,6,7,8-tetrahydropterin synthase OS=Luteibacter rhizovicinus OX=242606 GN=EC912_102641 PE=3 SV=1
MFFRRPMRIFKIFHIEAAHRLPNVPEGHKCSRLHGHSFKVELHVEGEPDPHFGWVMDFADLKARFAPLYDRLDHHYLNDIEGLENPTSENLCRWIFERLRVDVPGLAKVVIHETCTSGAEFGVADV

SEQ ID NO: 22030 - protein, 118 aa, Luteibacter sp.
  REGION 1..118: note = tr|A0A1T5EQR9|A0A1T5EQR9_9GAMM 6-carboxy-5,6,7,8-tetrahydropterin synthase OS=Luteibacter sp. 22Crub2.1 OX=1283288 GN=SAMN05660880_02973 PE=3 SV=1
MRIYKTFNIEAAHRLPNVPEGHKCARLHGHSFRVELHVEGPVDPVFGWVMDFGDLKARFQPLYDRLDHNYLNDIEGLENPTSENLARWIFQRLRVDVPGLAKVVVNETCTSGAEYTGD

SEQ ID NO: 22031 - protein, 117 aa, Luteibacter sp.
  REGION 1..117: note = tr|A0A1I0QKT4|A0A1I0QKT4_9GAMM 6-carboxy-5,6,7,8-tetrahydropterin synthase OS=Luteibacter sp. 329MFSha OX=1798239 GN=SAMN04515660_3531 PE=3 SV=1
MRIFKTFNIEAAHRLPNVPEGHKCSRLHGHSFRVELHVEGPTDPVLGWVMDFGDLKARFQPLYDRLDHHYLNDIEGLENPTSENLARWIFDRLRPDVPGLAKVVVHETCTSGAEYAP

SEQ ID NO: 22032 - protein, 117 aa, Luteibacter yeojuensis
  REGION 1..117: note = tr|A0A561H5K0|A0A561H5K0_9GAMM 6-carboxy-5,6,7,8-tetrahydropterin synthase OS=Luteibacter yeojuensis OX=345309 GN=FHW30_105109 PE=3 SV=1
MRIFKTFNIEAAHRLPNVPEGHKCSRLHGHSFRVELHVEGPVDPVLGWVMDFGDLKARFKPLYERLDHHYLNDIEGLDNPTSESLARWIFERLRPDVPLLCKVVVHETCTSGAEYTA

SEQ ID NO: 22033 - protein, 117 aa, Luteibacter yeojuensis
  REGION 1..117: note = tr|A0A0F3KVQ5|A0A0F3KVQ5_9GAMM 6-carboxy-5,6,7,8-tetrahydropterin synthase OS=Luteibacter yeojuensis OX=345309 GN=VI08_08380 PE=3 SV=1
MRIFKTFNIEAAHRLPNVPEGHKCARLHGHSFHVELHVEGPIDPVFGWVMDFGDLKAAFKPLYERLDHNYLNDIAGLENPTSENLARWIFDHLRPDVPLLCKVVVHETCTSGAEYAP

SEQ ID NO: 22034 - protein, 140 aa, unidentified
  source 1..140: note = Luteibaculum oceani
  REGION 1..140: note = tr|A0A5C6V176|A0A5C6V176_9FLAO 6-carboxytetrahydropterin synthase OS=Luteibaculum oceani; OX = 1294296 GN=FRX97_08660 PE=4 SV=1
MALIYITRREHFNAAHKLWNDEWSKEKNHEIFGKCANENWHGHNYDLFVTVKGEPQEDTGYVCDLKALSDLIKEEITEKLDHKNINLDVPFMKGIMASTENLVIAMWKILEPKIKSSLKCDLHCIKLYETRNNFAEYYGE

SEQ ID NO: 22035 - protein, 120 aa, Luteimonas aestuarii
  REGION 1..120: note = tr|A0A4R5TS73|A0A4R5TS73_9GAMM 6-carboxy-5,6,7,8-tetrahydropterin synthase OS=Luteimonas aestuarii OX=453837 GN=queD PE=3 SV=1
MDIFKVFTLEAAHRLPNVPPGHKCARVHGHSFRVEIHVSGEPGTDTGWVMDFGDIKQAFLPLYEQLDHHYLNDVPGLDNPTSERLAIWIWDRLKPVLPGLSAVVVHETCTSGCRYTGPSP

SEQ ID NO: 22036 - protein, 117 aa, unidentified
  source 1..117: note = Luteimonas cucumeris
  REGION 1..117: note = tr|A0A562LEF4|A0A562LEF4_9GAMM 6-carboxy-5,6,7,8-tetrahydropterin synthase OS=Luteimonas cucumeris OX=985012 GN=IP90_00324 PE=3 SV=1
MDIFKVFTIEAAHRLPNVPEGHKCARLHGHSFRIEVHVSGEPGVHSGWVMDYADIKAAFKPLFDRLDHHYLNEIDGLENPTSERLAVWVWEQLKPALPQLSEVVVHETCTSGCRYRG

SEQ ID NO: 22037 - protein, 118 aa, Luteimonas marina
  REGION 1..118: note = tr|A0A5C5U0S4|A0A5C5U0S4_9GAMM 6-carboxy-5,6,7,8-tetrahydropterin synthase OS=Luteimonas marina OX=488485 GN=queD PE=3 SV=1
MDIFKSFTLEAAHRLPSVPPGHKCARLHGHSFGVELHVSGEPGADSGWVMDFADIKAAFRPLYEQLDHHYLNDVPGLENPTSERLAVWIWDRLKPTLPALSAVVVRETCTSGCRYAGE

SEQ ID NO: 22038 - protein, 118 aa, Luteimonas sp.
  REGION 1..118: note = tr|A0A0H1ATB6|A0A0H1ATB6_9GAMM 6-carboxy-5,6,7,8-tetrahydropterin synthase OS=Luteimonas sp. FCS-9 OX=1547516 GN=WQ56_02850 PE=3 SV=1
MDIFKVFSVEAAHRLPNVPPGHKCARLHGHSFQIEIHVSGEPGETSGWIMDFGDLKAAFAPLYAQLDHHYLNEIPGLENPTSERLAIWIWERLKPALPALSAVVIRETCTSGCRYTGP

SEQ ID NO: 22039 - protein, 118 aa, Luteimonas sp.
  REGION 1..118: note = tr|A0A290XC93|A0A290XC93_9GAMM 6-carboxy-5,6,7,8-tetrahydropterin synthase OS=Luteimonas sp. 100111 OX=2006110 GN=queD PE=3 SV=1
MDIFKVFTLEAAHRLPNVPPGHKCARLHGHSFQVEVHVSGEPGPETGWIMDFGDLKAAFRPLYDQLDHHYLNDIDGLENPTSERLAIWIWERLKPTLPALSAIVIRETCTSGCRYTGP

SEQ ID NO: 22040 - protein, 118 aa, unidentified
  source 1..118: note = Luteimonas terrae
  REGION 1..118: note = tr|A0A4R5U8Q8|A0A4R5U8Q8_9GAMM 6-carboxy-5,6,7,8-tetrahydropterin synthase OS=Luteimonas terrae OX=1530191 GN=queD PE=3 SV=1
MDIFKVFTLEAAHRLPNVPPGHKCARLHGHSFQVEVHVSGEPGPETGWIMDFGDLKAAFAPLYAQLDHHYLNDIPGLENPTSERLAIWIWERLKPALPQLSAIVIRETCTSGCRYTGP

SEQ ID NO: 22041 - protein, 145 aa, unidentified
  source 1..145: note = Luteitalea pratensis
  REGION 1..145: note = tr|A0A143PNQ5|A0A143PNQ5_9BACT Queuosine biosynthesis protein QueD OS=Luteitalea pratensis; OX = 1855912 GN=LuPra_02952 PE=4 SV=1
MEKIIVHSHFHTGHRQLGYPGKCKFVHGHTWRGTVTVSCEAFPRDHLDMALDFGDLKAVMRLLDHKMLVTEQDATFLDSDLFEPEGVVMLKGKGPSVENVALYIWDKVVDHIRDKFPGHGVAYTVEVLIQETENNIFVVEKIATI

SEQ ID NO: 22042 - protein, 136 aa, unidentified
  source 1..136: note = Lutibacter agarilyticus
  REGION 1..136: note = tr|A0A238XME0|A0A238XME0_9FLAO 6-carboxy-5,6,7,8-tetrahydropterin synthase OS=Lutibacter agarilyticus OX=1109740 GN=SAMN06265371_106112 PE=3 SV=1
MKVTVHRKAHFNAAHRLYNADWTDARNATVFGKCANPNYHGHNYDLIVAVKGEVHPETGFVMDMKVLKKLIEVEIEDQFDHKNLNEEVSEFKNLNPTAENIAVVIWNKLRPKIDSNLEISITLYETPRNYVTYSGE

SEQ ID NO: 22043 - protein, 137 aa, unidentified
  source 1..137: note = Lutibacter agarilyticus
  REGION 1..137: note = tr|A0A238YQI9|A0A238YQI9_9FLAO 6-pyruvoyltetrahydropterin/6-carboxytetrahydropterin synthase OS=Lutibacter agarilyticus OX=1109740; GN = SAMN06265371_11096 PE=4 SV=1
MNYKVAVTRREHFNSAHRLHNVNWSNEKNASVFGKCNNPNFHGHNYELEVKLIGTIDEDTGYVIDTKHLSDLIKINVLDKFDHKNLNLDVEEFKVLNPTTENIAMIIYMILRPLIEDKYELKIKLYETPRNFVEFPY

SEQ ID NO: 22044 - protein, 136 aa, unidentified
  source 1..136: note = Lutibacter flavus
  REGION 1..136: note = tr|A0A238VWI9|A0A238VWI9_9FLAO 6-carboxy-5,6,7,8-tetrahydropterin synthase OS=Lutibacter flavus OX=691689 GN=SAMN04488111_1080 PE=3 SV=1
MKVTVNRKAHFNAAHRLYNADWTDARNANVFGKCANPNYHGHNYELIVSVKGEIHPETGFVMDMKILKSLIETEIEDQFDHKNLNEEVPEFKTLNPTAENISVIIWNKLRSKIENNLELTITLYETPRNFVTYSGD

SEQ ID NO: 22045 - protein, 137 aa, unidentified
  source 1..137: note = Lutibacter flavus
  REGION 1..137: note = tr|A0A238VT12|A0A238VT12_9FLAO 6-pyruvoyltetrahydropterin/6-carboxytetrahydropterin synthase OS=Lutibacter flavus OX=691689; GN = SAMN04488111_1003 PE=4 SV=1
MNNKFAVTRKEHFNSAHRLHNALWSDEKNTAVFGKCNNPNYHGHNYELEVKVIGVVDKDTGYVIDTKQLSDLIKEHVLDKFDHKNLNLDVEDFKTLNPTTENIAMIVYMILRPLMEEKYELKIKLYETPRNFVEYPY

SEQ ID NO: 22046 - protein, 137 aa, Lutibacter maritimus
  REGION 1..137: note = tr|A0A1I6NQ02|A0A1I6NQ02_9FLAO 6-carboxy-5,6,7,8-tetrahydropterin synthase OS=Lutibacter maritimus OX=593133 GN=SAMN04488006_0347 PE=3 SV=1
MKVTVSRKAHFNAAHRLYNSDWTDARNATVFGKCANPNYHGHNYELIVSVKGEIHPETGFVMDMKILKYLIEKEVEEQFDHKNLNEEVAEFKTLNPTAENIVVVIWNKLRAEIDNKLELSITLYETPRNFVTYSGEV

SEQ ID NO: 22047 - protein, 150 aa, Lutibacter maritimus
  REGION 1..150: note = tr|A0A1I6PNZ5|A0A1I6PNZ5_9FLAO 6-pyruvoyltetrahydropterin/6-carboxytetrahydropterin synthase OS=Lutibacter maritimus OX=593133; GN = SAMN04488006_1232 PE=4 SV=1
MSKIRITKQFDFETGHALYGYDGKCKNVHGHSYKLSVTVIGKPIKDTSNVKLGMVIDFGDLKKIVASEIVDKFDHATVFNKNTPHIELAAELEKRGHSVILVDYQPTSEMMLIDFAQKIKSRLPENIELYSLKLRETGTSHAEWYASDQE

SEQ ID NO: 22048 - protein, 137 aa, unidentified
  source 1..137: note = Lutibacter oceani
  REGION 1..137: note = tr|A0A3D9RIU6|A0A3D9RIU6_9FLAO 6-carboxy-5,6,7,8-tetrahydropterin synthase OS=Lutibacter oceani OX=1853311 GN=BX611_2666 PE=3 SV=1
MKVTVNRKAHFNAAHRLYNADWTDARNAIVFGKCANPNYHGHNYELIVSVKGEIYPETGFVMDMKVLKQLIETEIEEQFDHKNLNEEVPEFEILNPTAENISVIIWNKLRSKIDANLELSITLYETPRNFVTYSGEQ

SEQ ID NO: 22049 - protein, 150 aa, unidentified
  source 1..150: note = Lutibacter oceani
  REGION 1..150: note = tr|A0A3D9RVQ8|A0A3D9RVQ8_9FLAO 6-pyruvoyltetrahydropterin/6-carboxytetrahydropterin synthase OS=Lutibacter oceani OX=1853311 GN=BX611_0840; PE = 4 SV=1
MSNIRITKQFDFETGHALYGYDGKCKNVHGHSYKLSVTVIGTPINDSSNVKYGMVIDFGDLKKIVLSEIVDKFDHATVFNKNTPHIELAAELEKRGHSVILVDYQPTSEMMLIDFAKKIKKRLPETIKLHSLKLQETGTSHAEWYESDNN

SEQ ID NO: 22050 - protein, 149 aa, unidentified
  source 1..149: note = Lutibacter oricola
  REGION 1..149: note = tr|A0A1H3A9I4|A0A1H3A9I4_9FLAO 6-pyruvoyltetrahydropterin/6-carboxytetrahydropterin synthase OS=Lutibacter oricola OX=762486; GN = SAMN05444411_10456 PE=4 SV=1
MFNFAFIKLNTIKLKVAITRKEHFNSAHRLHNPKWSNEKNKEIFGKCNNVNYHGHNYDLEVKVIGYVDEETGYVIDTKYLSEIIKSKVLEKFDHKNLNLDVEEFKFLNPTVENIAILVFRLLRPHIEKKYELKIKLYETPRNFVEYPYE

SEQ ID NO: 22051 - protein, 149 aa, unidentified
  source 1..149: note = Lutibacter oricola
  REGION 1..149: note = tr|A0A1H3D995|A0A1H3D995_9FLAO 6-carboxy-5,6,7,8-tetrahydropterin synthase OS=Lutibacter oricola OX=762486 GN=SAMN05444411_10787 PE=3 SV=1
MSNIRITKQFDFETGHALYGYDGKCKNVHGHSYKLSVTVIGVPISDTSNVKYGMVIDFGDLKKIVKSEIVDKFDHATVFNKNTPHIELAKELETRGHNVILVDYQPTSEMMLIDFAEKIKKHLPETIKLHSLKLQETGTSHAEWFASDN

SEQ ID NO: 22052 - protein, 136 aa, unidentified
  source 1..136: note = Lutibacter profundi
  REGION 1..136: note = tr|A0A0X8G5F2|A0A0X8G5F2_9FLAO 6-carboxy-5,6,7,8-tetrahydropterin synthase OS=Lutibacter profundi OX=1622118 GN=Lupro_03705 PE=3 SV=1
MKVTVNRKAHFNAAHRLYNADWSDARNATVFGKCANPNYHGHNYELIVSVKGEIHPDTGFVMDMKVLKNLIETEIEEKFDHKNLNEEVIEFKTLNPTAENIVVVIWNILRSKIAKELELSITLYETPRNFVTYCGA

SEQ ID NO: 22053 - protein, 150 aa, unidentified
  source 1..150: note = Lutibacter profundi
  REGION 1..150: note = tr|A0A0X8G783|A0A0X8G783_9FLAO 6-pyruvoyl tetrahydropterin synthase OS=Lutibacter profundi; OX = 1622118 GN=Lupro_08905 PE=4 SV=1
MSTIRITKKFHFETGHALYGYDGKCRNVHGHSYKLSVTVIGTPISNSTNVKYGMVIDFGDLKKIVASEIVDKFDHATVFNKNTPHIELANELEKRGHNIILVDYQPTSEMMLVDFAKKIKNRLPKTIKLHALKLQETGTSHAEWYAEDQY

SEQ ID NO: 22054 - protein, 149 aa, Lutibacter sp.
  REGION 1..149: note = tr|A0A559S2A2|A0A559S2A2_9FLAO 6-carboxy-5,6,7,8-tetrahydropterin synthase OS=Lutibacter sp. Hel_I_33_5 OX=1566289 GN=OD91_1765 PE=3 SV=1
MSTIRITKQFNFETGHALYGYDGKCKNVHGHSYKLSVTVSGQPITDNSNVKFGMVIDFSDLKKIVKEEIVDLFDHATVFNKNTPHVELAKELKDRGHHVILVDYQPTSEMMVIDFAKKIKKRLPENINLFSLKLQETDTSFAEWFASDQ

SEQ ID NO: 22055 - protein, 138 aa, Lutibacter sp.
  REGION 1..138: note = tr|A0A1D8P734|A0A1D8P734_9FLAO 6-pyruvoyl tetrahydrobiopterin synthase OS=Lutibacter sp. LPB0138; OX = 1850246 GN=LPB138_06695 PE=4 SV=1
MSNYKTAVIRREHFNAAHRLHNTFWSDKKNKEIFGKCNNPNFHGHNYELEVKVIGYTDPETGYVIDTKIVSDIIKKEVLEKFDHKNLNLDVEEFKSLNPTVENIAMVIFNIIRKELDEKFELKIKLYETQRNFVEYPY

SEQ ID NO: 22056 - protein, 288 aa, Lyngbya aestuarii
  REGION 1..288: note = tr|U7QIW1|U7QIW1_9CYAN Queuosine biosynthesis protein QueD OS=Lyngbya aestuarii BL J OX=1348334 GN=queD; PE = 4 SV=1
MECVITRRAEFSASHRYWLPELSETENFERFGPTARAPGHGHNYVLYISMVGQLDEYGMVLNLSDVKHVIKAEVTSQLDFSFLNDAWPEFQQTLPTTEYLAQVIWQRLAPHLPLTNIQVFEHPKLWADYQGNSMEAHLTVSTHFSAAHRLAHPDLSFEDNCEIYGKCARPNGHGHNYHLEVSVKGEIDPRTGMIVDLAALQQVIDDYVVEPFDHTFLNKDIAHFAKVVPTAENIAVYIRDLLQNPVQELGAKLHKVRLIESPNNSCEVYCTDTPADSTPTQTPVLATV

SEQ ID NO: 22057 - protein, 123 aa, Lyngbya confervoides
  REGION 1..123: note = tr|A0A0C1VH08|A0A0C1VH08_9CYAN 6-pyruvoyl tetrahydropterin synthase OS=Lyngbya confervoides BDU141951 OX=1574623 GN=QQ91_05835 PE=4 SV=1
MFSVTIRQHIMIAHSLPHPDFGPAQRLHGATYVTDVTFYSPQLTEMGIVIDIALAHDALRKALAPLDYQNLDELPQFKGKLTTTEFLAQYIHGQVKAAVAGQFDGRIKVVLGESHEAWAAYEA

SEQ ID NO: 22058 - protein, 288 aa, Lyngbya confervoides; identical to SEQ ID NO: 20989
  REGION 1..288: note = tr|A0A0C1YJX7|A0A0C1YJX7_9CYAN 6-pyruvoyl tetrahydropterin synthase OS=Lyngbya confervoides BDU141951 OX=1574623 GN=QQ91_32275 PE=4 SV=1

SEQ ID NO: 22059 - protein, 148 aa, Lyngbya sp.
  REGION 1..148: note = tr|A0YX06|A0YX06_LYNSP 6-carboxy-5,6,7,8-tetrahydropterin synthase OS=Lyngbya sp. (strain PCC 8106) OX=313612 GN=L8106_20268 PE=3 SV=1
MTSNQEEIPKIKRAESNSETWMIGKEFRFEASHQLPNHDGKCARLHGHSWRGVIYVSGNKLIDAGAKQGMIMDYEDIKKYLKPLLDDYLDHYHLNETTGLNNPTSEAIAKWIYEQLEDKIPGLVAVRIDETCTSQCVYSKGTSHVFLL

SEQ ID NO: 22060 - protein, 150 aa, Lyngbya sp.
  REGION 1..150: note = tr|A0YS60|A0YS60_LYNSP Uncharacterized protein; OS = Lyngbya sp. (strain PCC 8106) OX=313612 GN=L8106_20218; PE = 4 SV=1
MNSNEEKNKISQVRRDESNSESWTIGKEFRFEASHQLPNHDGKCARLHGHSWRCTIYVSGNRLIYSGAKQGMIMDYDDIKKYVKPIMDNYLDHYHLNDTTGLANPTSEAIAQWIYEKLETEIPGLIAVRVDETCTSQCVYSKGKGNVLIL

SEQ ID NO: 22061 - protein, 156 aa, Lysinibacillus boronitolerans
  REGION 1..156: note = tr|A0A0A3IP74|A0A0A3IP74_9BACI 6-pyruvoyl tetrahydrobiopterin synthase OS=Lysinibacillus boronitolerans JCM 21713 = 10a = NBRC 103108 OX=1294264; GN = CD31_12565 PE=4 S V=1
MSDFKIVERLQKMDVDIQRNQLKYHAKRVLISKEFTFDAAHHLHHYEGKCKNLHGHTYRVILGLSGYTDERGLIIDFGDIKEIWKRKIEIHLDHRYLNETLPPMNTTAENIVVWIYEKLTEALLDEGYNGARVEFIKLYETPTSYAEARREWMEVE

SEQ ID NO: 22062 - protein, 157 aa, unidentified
  source 1..157: note = Lysinibacillus chungkukjangi
  REGION 1..157: note = tr|A0A318TUX8|A0A318TUX8_9BACI 6-pyruvoyltetrahydropterin/6-carboxytetrahydropterin synthase OS=Lysinibacillus chungkukjangi OX=1202712; GN = BJ095_10710 PE=4 SV=1
MREFRIVDQLQKLDVDIKKNQLKYHSKRVLVSKEFTFDAAHHLHNYEGKCKNLHGHTYRAVLGISGYTDERGLVIDFGDIKEIWKQQIEIDLDHRYLNETLPLMNTTAENIVVWIYGKLAEALLNTQDYNGLRVEFVRLYETPTSYAEARREWMELE

SEQ ID NO: 22063 - protein, 157 aa, unidentified
  source 1..157: note = Lysinibacillus composti
  REGION 1..157: note = tr|A0A3N9UJF8|A0A3N9UJF8_9BACI 6-carboxytetrahydropterin synthase QueD OS=Lysinibacillus composti OX=720633 GN=queD PE=4 SV=1
MSEFRIVDRLQKIDVDIQQDQLKYHSKRVLVSKEFTFDAAHHLHNYEGKCKNLHGHTYRAVLGISGYTEERGLVIDFGDIKEIWKEKIEVYLDHRYLNETLPLMNTTAENIVVWIYEKLVDALREKQQYKGARVEFVRLYETPTSYAEVRREWMDVE

SEQ ID NO: 22064 - protein, 157 aa, Lysinibacillus fusiformis
  REGION 1..157: note = tr|A0A2I0UXB6|A0A2I0UXB6_9BACI 6-carboxytetrahydropterin synthase QueD OS=Lysinibacillus fusiformis OX=28031 GN=queD PE=4 SV=1
MSDFRIVERLQKIDVDIQRNQLNYHAKRVLVSKEFTFDAAHHLHHYEGKCKNLHGHTYRVVLGLSGYTDERGLMIDFGDIKKIWKRKIEIHLDHRYLNETLPPMNTTAENIVVWIYEKLAEALLDEPSYSGACVEFIRLYETPTSYAEARREWMEGE

SEQ ID NO: 22065 - protein, 156 aa, Lysinibacillus fusiformis
  REGION 1..156: note = tr|D7WZC9|D7WZC9_9BACI 6-pyruvoyl tetrahydrobiopterin synthase OS=Lysinibacillus fusiformis ZC1 OX=714961 GN=BFZC1_22709 PE=4 SV=1
MSDFKIVERLQRIDVDIQRNQLKYHAKRVLISKEFTFDAAHHLHHYEGKCKNLHGHTYRAILGLSGYTDERGLMIDFGDIKEIWKHKIEIHLDHRYLNETLPLMNTTAENIVVWIYEKLTEALLDEGYNGVRVEFIRLYETPTSYAEARREWMEVE

SEQ ID NO: 22066 - protein, 157 aa, unidentified
  source 1..157: note = Lysinibacillus halotolerans
  REGION 1..157: note = tr|A0A3M8H9H1|A0A3M8H9H1_9BACI 6-carboxytetrahydropterin synthase QueD OS=Lysinibacillus halotolerans OX=1368476 GN=queD PE=4 SV=1
MPNFRIVDKLQKMDEDIQRSQLKYHSKRVLVSKEFTFDAAHHLHNYEGKCKNLHGHTYRAVLGLSGFTDERGLMIDFGDIKDIWKQKIEIYLDHHYLNETLPPMNTTAENIVVWIYEKLKEALLDEQRYHGARVEFIRLYETPTSYAEARREWMEFE

SEQ ID NO: 22067 - protein, 274 aa, unidentified
  source 1..274: note = Lysinibacillus massiliensis
  REGION 1..274: note = tr|A0A0A3JTD4|A0A0A3JTD4_9BACI 6-pyruvoyl tetrahydropterin synthase OS=Lysinibacillus massiliensis 4400831 = CIP 108448 = CCUG 49529 OX=1211035 GN=CD30_12390; PE = 4 SV =1
MLYLSRRVDFSATHTYNIPSWSKELNRQVFGKCNNPNGHGHDYKLEVMVRGKLNMESGIVVNTTDIKHIVNTFLAEELDGKFLDREHPYFIRNLPTTENLVNYIWNSLKDKMEGCELYQLRLHENHYLHAERKINEMTYLTRQYHFSAAHRLHSIHLSDEENVKLFGKCNNPNGHGHNYYVDVQVKGEPSKETGMIINLADLDEIVEREIMDKFDHMNLNLDTEEFKELNPTSEVVAMVFYNLLKPHIPNLHKIGLWETEKNYFEYLGEDDYGI

SEQ ID NO: 22068 - protein, 157 aa, unidentified
  source 1..157: note = Lysinibacillus odysseyi
  REGION 1..157: note = tr|A0A0A3IL18|A0A0A3IL18_9BACI 6-pyruvoyl tetrahydrobiopterin synthase OS=Lysinibacillus odysseyi 34hs-1 = NBRC 100172 OX=1220589 GN=CD32_09595 PE=4 SV=1
MSNFRIVDKLQKIDEDIQRSQLNYHTKRVLVSKEFTFDAAHHLHNYEGKCKNLHGHTYRAVLGLSGYTDERGLMIDFGDIKEIWKEKIEIYLDHRYLNETLPPMNTTAENIVVWIYEKLQEALLEKHQNNGARVEFIRLYETPTSYAEARREWMEVE

SEQ ID NO: 22069 - protein, 142 aa, unidentified
  source 1..142: note = Lysinibacillus saudimassiliensis
  REGION 1..142: note = tr|A0A078M9X8|A0A078M9X8_9BACI 6-carboxy-5,6,7,8-tetrahydropterin synthase; OS = Lysinibacillus saudimassiliensis OX=1461583 GN=queD; PE = 3 SV=1
MIQQIYPTVAHPFRYELNKDMHFSAAHFIPAEAAGVCARMHGHTYFVNLTIAGDELDAIGFLIDFKALKDAVHGAFDHTVINDHPAFRTQNPTTEAVAAYIWQAIQALLDSKGNHARCLQVFVRETPTSYVCYRPKEEDFDA

SEQ ID NO: 22070 - protein, 162 aa, Lysinibacillus sp.
  REGION 1..162: note = tr|A0A544UPS7|A0A544UPS7_9BACI 6-carboxytetrahydropterin synthase QueD OS=Lysinibacillus sp. SDF0063 OX=2133753 GN=queD PE=4 SV=1
MSANFDFRIVDRMQALGTHIQKSQLRYHNKRVLVSKEFTFDAAHHLHAYEGKCKNLHGHTYTVVFGISGFPDEIGLVIDFGDIKQIWKEHIEIYLDHRYLNEMLPPMNTTAENMVVWIFEEMEKQLQSDAYRDRYDGARVEFVRLFETPTSYAEARREWMME

SEQ ID NO: 22071 - protein, 157 aa, Lysinibacillus sp.
  REGION 1..157: note = tr|A0A4R7U510|A0A4R7U510_9BACI 6-pyruvoyltetrahydropterin/6-carboxytetrahydropterin synthase OS=Lysinibacillus sp. YR326 OX=1855296; GN = A9A36_1129 PE=4 SV=1
MSDFKIVEKLQKIDEDIQRNQLNYHAKRVLVSKEFTFDAAHHLHDYEGKCKNLHGHTYRVVLALSGYTDERGLMIDFGDIKAIWKEKIEIHLDHRYLNETLPPMNTTAENIVVWIYEKLAAALLDVQRNNGARVEFIRLYETPTSYAEARREWMEVE

SEQ ID NO: 22072 - protein, 157 aa, Lysinibacillus sphaericus
  REGION 1..157: note = tr|R7ZDN3|R7ZDN3_LYSSH 6-pyruvoyl tetrahydrobiopterin synthase OS=Lysinibacillus sphaericus OT4b.31 OX=1285586 GN=H131_12573 PE=4 SV=1
MFHFKIVEKLQKIDEDIQRNQLNYHSKRVLVSKEFTFDAAHHLHDYDGKCKNLHGHTYRAVLGLSGFTDERGLMIDFGDIKEIWKQKIDIYLDHRYLNETLPPMNTTAENIVVWIYEKLAEALHDEQRYNGARVEFIRLYETPTSYAEARREWMEVE

SEQ ID NO: 22073 - protein, 145 aa, Lysinibacillus sphaericus
  REGION 1..145: note = tr|A0A1D8JFL8|A0A1D8JFL8_LYSSH 6-carboxy-5,6,7,8-tetrahydropterin synthase; OS = Lysinibacillus sphaericus OX=1421 GN=BI350_08115 PE=3; SV = 1
MMQQIYPVTPHAYAYEINKDFHFAAAHYVPSTDAGKCQHIHGHTYFANITIVGDMLDHSGFLVNFKTIKDLVHRRFDHRVLNKDAAFSDEDPSCFPTSEVIARTIYEIVQAHLDTLDNQPKCVQVFLRETPTSYCVYRPKEASAQ

SEQ ID NO: 22074 - protein, 274 aa, unidentified
  source 1..274: note = Lysinibacillus telephonicus
  REGION 1..274: note = tr|A0A3S0HHE1|A0A3S0HHE1_9BACI 6-pyruvoyl tetrahydropterin synthase OS=Lysinibacillus telephonicus; OX = 1714840 GN=EKG35_16710 PE=4 SV=1
MLYLSRKSEFSATHTYNNPRWNKEKNRKIFGKCNNPNGHGHDYKLEVMVRGTLNLSSGIVVNTADIKQIVNHFLAEELDGKFLDREHPFFIKNIPTTENIVNYIWESLKPQFKGCELYRLRLYENHYLSAERKIDSMTYLTRQYHFSAAHRLHSIYLSDEENKKLFGKCNNPNGHGHNYYVDIQVKGEPSKETGMIINLADLDEIVEREIIDRFDHMNLNLDTEEFKELNPTSEAVAMVIYKILKSHIPNLHKVGIWETDKNYFEYLGEGDYAI

SEQ ID NO: 22075 - protein, 157 aa, Lysinibacillus xylanilyticus
  REGION 1..157: note = tr|A0A2M9Q9K0|A0A2M9Q9K0_9BACI 6-carboxytetrahydropterin synthase QueD OS=Lysinibacillus xylanilyticus OX=582475 GN=queD PE=4 SV=1
MSDFRIVEKLQKIDEDIQRNQLNYHSKRVLVSKEFTFDAAHHLHNYEGKCKNLHGHTYRVVLALSGYTDERGLMIDFGDIKAIWKEKIEIHLDHRYLNETLPPMNTTAENIVVWIYEKLAAALLDEQRYNGARVEFIRLYETPTSYAEARREWMEVE

SEQ ID NO: 22076 - protein, 157 aa, Lysinibacillus xylanilyticus
  REGION 1..157: note = tr|A0A0K9FDI4|A0A0K9FDI4_9BACI 6-pyruvoyl tetrahydrobiopterin synthase OS=Lysinibacillus xylanilyticus OX=582475 GN=ACZ11_08655 PE=4 SV=1
MSDFRIVEKLQKIDEDIQRNQLNYHSKRVLVSKEFSFDAAHHLHDYEGKCKNLHGHTYRVVLALSGYTDERGLMIDFGDIKAIWKEKIEIHLDHRYLNETLPPMNTTAENIVVWIYEKLAAALLDEQRYNGARVELIRLYETPTSYAEARREWMEVE

SEQ ID NO: 22077 - protein, 117 aa, unidentified
  source 1..117: note = Lysobacter aestuarii
  REGION 1..117: note = tr|A0A508ADU5|A0A508ADU5_9GAMM 6-carboxy-5,6,7,8-tetrahydropterin synthase OS=Lysobacter aestuarii OX=1706195 GN=queD PE=3 SV=1
MDIFKAFTLEAAHRLPHVPEGHKCARLHGHSFRIELHVSGDIDPHAGWVMDFADLKQAFKPLYEQLDHHYLNDIEGLENPTSERLAVWIWERLKPALPLLSEVVVHETCTSGCRYRG

SEQ ID NO: 22078 - protein, 117 aa, Lysobacter antibioticus
  REGION 1..117: note = tr|A0A0S2FG02|A0A0S2FG02_9GAMM 6-carboxy-5,6,7,8-tetrahydropterin synthase OS=Lysobacter antibioticus OX=84531 GN=queD PE=3 SV=1
MNIFKVFTLEAAHRLPNVPEGHKCARLHGHSFRIEVHLTGELGEHTGWVMDYADVKKAFQPTYDRLDHHYLNDIPGLENPTSERLAVWIWDQLKPVLPLLSEIVVHETCTAGCRYRG

SEQ ID NO: 22079 - protein, 122 aa, unidentified
  source 1..122: note = Lysobacter arseniciresistens
  REGION 1..122: note = tr|A0A0A0F146|A0A0A0F146_9GAMM 6-carboxy-5,6,7,8-tetrahydropterin synthase OS=Lysobacter arseniciresistens ZS79 OX=913325 GN=N799_13345 PE=3 SV=1
MDIFKTFTLEAAHRLPNVPEGHKCARLHGHSFRVEIHLRGDIGADTGWVMDFADVKRAFQPLYDRLDHHYLNDIEGLENPTSERLAVWIWERLKPALPLLAEVVVHETCTSGCRYRGDQSQA

SEQ ID NO: 22080 - protein, 120 aa, Lysobacter capsici
  REGION 1..120: note = tr|A0A0S2FL00|A0A0S2FL00_9GAMM 6-carboxy-5,6,7,8-tetrahydropterin synthase OS=Lysobacter capsici OX=435897 GN=queD PE=3 SV=1
MTAVDIFKVFTLEAAHRLPNVPEGHKCARLHGHSFRIEVHLRGELGEHTGWVMDYADVKKAFQPIYDRLDHHYLNDIEGLENPTSERLAVWVWDQLKPVLPLLSEIVVHETCTAGCRYRG

SEQ ID NO: 22081 - protein, 120 aa, Lysobacter capsici; identical to SEQ ID NO: 22080
  REGION 1..120: note = tr|A0A120AGK2|A0A120AGK2_9GAMM 6-carboxy-5,6,7,8-tetrahydropterin synthase OS=Lysobacter capsici AZ78 OX=1444315 GN=AZ78_2250 PE=3 SV=1

SEQ ID NO: 22082 - protein, 117 aa, Lysobacter concretionis
  REGION 1..117: note = tr|A0A0A0ELL8|A0A0A0ELL8_9GAMM 6-carboxy-5,6,7,8-tetrahydropterin synthase OS=Lysobacter concretionis Ko07 = DSM 16239 OX=1122185 GN=N792_12465; PE = 3 SV=1
MNIFKIFTLEAAHRLPNVPPGHKCARLHGHSFRVEIHLEGEPGADTGWVVDFADIKAAFRPLYEQLDHNYLNDIEGLDNPTSERIAMWIWERLKPTLPLLSEVVVHETCTSGCRYRG

SEQ ID NO: 22083 - protein, 118 aa, Lysobacter daejeonensis
  REGION 1..118: note = tr|A0A0A0ERK8|A0A0A0ERK8_9GAMM 6-carboxy-5,6,7,8-tetrahydropterin synthase OS=Lysobacter daejeonensis GH1-9 OX=1385517 GN=N800_07310 PE=3 SV=1
MDIFKAFTLEAAHRLPNVPPGHKCARLHGHSFRVELHVSGDVGADTGWVMDFGDVKQAFQPLYDQLDHHYLNDIPGLENPTSERLAMWIWEKLKPALPLLSEVVVHETCTSGCRYRGP

SEQ ID NO: 22084 - protein, 117 aa, Lysobacter defluvii
  REGION 1..117: note = tr|A0A0A0M3Q9|A0A0A0M3Q9_9GAMM 6-carboxy-5,6,7,8-tetrahydropterin synthase OS=Lysobacter defluvii IMMIB APB-9 = DSM 18482 OX=1385515 GN=N791_08360; PE = 3 SV=1
MEIFKAFTLEAAHRLPNVPEGHKCARLHGHSFRVEIRVEGELQPGTEWVMDYADIKAAFEPLYRQLDHHYLNEIEGLENPTSERLAVWIWERLKPALPQLSEVVVHETCTSGCRYRG

SEQ ID NO: 22085 - protein, 118 aa, Lysobacter dokdonensis
  REGION 1..118: note = tr|A0A0A2WIY7|A0A0A2WIY7_9GAMM 6-carboxy-5,6,7,8-tetrahydropterin synthase OS=Lysobacter dokdonensis DS-58 OX=1300345 GN=LF41_1559 PE=3 SV=1
MDIFKSFTLEAAHRLPNVPPGHKCARLHGHSFRVEIHVSGEPGADTGWVMDFADIKSAFRPLYDQLDHHYLNDIDGLENPTSEVLAKWIWTRLKPALPQLSEIVVNETCTSGCRYRGN

SEQ ID NO: 22086 - protein, 121 aa, Lysobacter enzymogenes
  REGION 1..121: note = tr|A0A0S2DC28|A0A0S2DC28_LYSEN 6-carboxy-5,6,7,8-tetrahydropterin synthase OS=Lysobacter enzymogenes OX=69 GN=queD PE=3 SV=1
MPAIDIFKVFTLEAAHRLPNVPEGHKCARLHGHSFRVEVHLRGDIGEHSGWLMDYADVKKAFQPIHDRLDHHYLNDIEGLDNPTSERLAVWIWEQLKPALPLLSEIVVHETCTAGSRYRGE

SEQ ID NO: 22087 - protein, 121 aa, Lysobacter enzymogenes
  REGION 1..121: note = tr|A0A1J1EBS1|A0A1J1EBS1_LYSEN 6-carboxy-5,6,7,8-tetrahydropterin synthase OS=Lysobacter enzymogenes OX=69 GN=LEN_4226 PE=3 SV=1
MPAIDIFKVFTLEAAHRLPNVPEGHKCARLHGHSFRVEVHLRGDIGEHSGWLMDYADVKKAFQPIYDRLDHHYLNDIEGLDNPTSERLAVWIWEQLKPALPLLSEIVVHETCTAGSRYRGE

SEQ ID NO: 22088 - protein, 120 aa, Lysobacter gummosus
  REGION 1..120: note = tr|A0A0S2G1K1|A0A0S2G1K1_9GAMM 6-carboxy-5,6,7,8-tetrahydropterin synthase OS=Lysobacter gummosus OX=262324 GN=queD PE=3 SV=1
MTAIDIFKVFTLEAAHRLPNVPEGHKCARLHGHSFRIEVHLHGELGEHTGWVMDYADVKKAFQPIYDRLDHHYLNDIEGLENPTSERLAVWVWDQLKPVLPLLSEIVVHETCTAGCRYRG

SEQ ID NO: 22089 - protein, 121 aa, unidentified
  source 1..121: note = Lysobacter lycopersici
  REGION 1..121: note = tr|A0A516V5G9|A0A516V5G9_9GAMM 6-carboxy-5,6,7,8-tetrahydropterin synthase OS=Lysobacter lycopersici OX=1324796 GN=queD PE=3 SV=1
MDIFKVFTLEAAHRLPNVPPGHKCARLHGHSFRVEIHVRGEPGADSGWVMDFAELKAAFKPLYEQLDHHYLNEVPGLENPTSERLAAWIWEHLAPSLPLLAEVVVHETCTSGCRYRGPGAV

SEQ ID NO: 22090 - protein, 117 aa, unidentified
  source 1..117: note = Lysobacter maris
  REGION 1..117: note = tr|A0A2U9T7J7|A0A2U9T7J7_9GAMM 6-carboxy-5,6,7,8-tetrahydropterin synthase OS=Lysobacter maris OX=1605891 GN=queD PE=3 SV=1
MDIFKVFTIEAAHRLPNVPDGHKCARLHGHSFRIEIHLSGELDPRAGWVMDFADVKTAFKPLYERLDHHYLNDIEGLENPTSERLAVWIWERLKPELPLLSEVVVHETCTSGCRYRG

SEQ ID NO: 22091 - protein, 118 aa, unidentified
  source 1..118: note = Lysobacter pythonis
  REGION 1..118: note = tr|A0A3M2HSY6|A0A3M2HSY6_9GAMM 6-carboxy-5,6,7,8-tetrahydropterin synthase OS=Lysobacter pythonis OX=2483112 GN=queD PE=3 SV=1
MDIFKIFTLEAAHRLPNVPAGHKCARLHGHSFRVELHVSGPVDPQLGWVMDFADLKAAFKPLYEQLDHHYLNDVEGLENPTSERLAQWIWQRLKPEVPLLSAVVVHETCTAGSRYAGP

SEQ ID NO: 22092 - protein, 118 aa, Lysobacter ruishenii
  REGION 1..118: note = tr|A0A562LRX6|A0A562LRX6_9GAMM 6-carboxy-5,6,7,8-tetrahydropterin synthase OS=Lysobacter ruishenii OX=686800 GN=IP93_01876 PE=3 SV=1
MDIFKAFTLEAAHRLPNVPPGHKCARLHGHSFRVELHVSGEVGADTGWVMDFGDVKQAFQPLYDQLDHHYLNDIAGLENPTSERLAMWIWDQLKPSLPLLSEVVVHETCTSGCRYRGP

SEQ ID NO: 22093 - protein, 117 aa, unidentified
  source 1..117: note = Lysobacter silvestris
  REGION 1..117: note = tr|A0A2K1Q1Y0|A0A2K1Q1Y0_9GAMM 6-carboxy-5,6,7,8-tetrahydropterin synthase OS=Lysobacter silvestris OX=1645665 GN=Lysil_0665 PE=3 SV=1
MDIFKVFTLEAAHRLPNVPDGHKCARLHGHSFRIEIRVRGEPGADSGWVMDFADLKTAFQPLYDQLDHHYLNDIPGLDNPTSERLAIWIWDRLKPHLPLLAEIVVHETCTSGCRYAG

SEQ ID NO: 22094 - protein, 117 aa, Lysobacter soli
  REGION 1..117: note = tr|A0A3D8VEC2|A0A3D8VEC2_9GAMM 6-carboxy-5,6,7,8-tetrahydropterin synthase OS=Lysobacter soli OX=453783 GN=queD PE=3 SV=1
MKIFKAFTLEAAHRLPNVPEGHKCARLHGHSFRIEIHVEGDIDPHFGWVMDFADLKAAFKPIYDRLDHHYLNDIEGLENPTSEVLAKWIWDQLRPSLPLLSEVVVHETCTSGCHYKA

SEQ ID NO: 22095 - protein, 134 aa, Lysobacter sp.
  REGION 1..134: note = tr|A0A5C8KN23|A0A5C8KN23_9GAMM 6-carboxytetrahydropterin synthase OS=Lysobacter sp. Alg18-2.2 OX=2603204 GN=FU658_11355 PE=4 SV=1
MYSLSVREHIMIAHSFRGEVFGPARKLHGATYVVDVTFKRRTLDADGLVVDIGRAGELVRATLAPLNYTNLDEHPEFAGKNTTTEFMAHAIHGRIARAIAEGALGDSGRGIERLAVRLGESHLAWATFEDELAP

SEQ ID NO: 22096 - protein, 117 aa, Lysobacter sp.
  REGION 1..117: note = tr|A0A0D0R7I9|A0A0D0R7I9_9GAMM 6-carboxy-5,6,7,8-tetrahydropterin synthase OS=Lysobacter sp. A03 OX=1199154 GN=TI01_0839 PE=3 SV=1
MNIFKSFTLEAAHRLPNVPAGHKCARLHGHSFRIEIHVEGEPGEHTGWIMDFSDIKLAFQPLYDQLDHHYLNEVPGLENPTSERLALWIWERLKPTLPLLSEVVVHETCTSGCRYRG

SEQ ID NO: 22097 - protein, 128 aa, Lysobacter spongiicola
  REGION 1..128: note = tr|A0A1T4QN66|A0A1T4QN66_9GAMM 6-carboxy-5,6,7,8-tetrahydropterin synthase OS=Lysobacter spongiicola DSM 21749 OX=1122188 GN=SAMN02745674_01699; PE = 3 SV=1
MAGRPGDTMAAMDIFKIFTLEAAHRLPNVPEGHKCARVHGHSFRVELHLQGEVGADSGWVMDFGDIKAAFQPLYDQLDHHYLNDVPGLENPTSERIAIWIWDRLKPELPLLAEVVVHETCTSGCRYRG

SEQ ID NO: 22098 - protein, 121 aa, unidentified
  source 1..121: note = Lysobacter tolerans
  REGION 1..121: note = tr|A0A1N6Y5Y8|A0A1N6Y5Y8_9GAMM 6-carboxy-5,6,7,8-tetrahydropterin synthase OS=Lysobacter tolerans OX=1604334 GN=SAMN05421546_2388 PE=3 SV=1
MDIFKVFTLEAAHRLPNVPEGHKCARLHGHSFRVELHVSGPVNPQMGWVMDFADVKRAFQPLYDQLDHHYLNDIPGLENPTSERLAEWIWDQLKPDLPLLSAVVVHETCTSGCRYSGPAAA

SEQ ID NO: 22099 - protein, 137 aa, unidentified
  source 1..137: note = Macrococcus bohemicus
  REGION 1..137: note = tr|A0A328A518|A0A328A518_9STAP 6-carboxy-5,6,7,8-tetrahydropterin synthase OS=Macrococcus bohemicus OX=1903056 GN=queD PE=3 SV=1
MMQQIYPQVNHNYAFELNKDMNFSAAHYIPDERAGVCSRTHGHTYFVNVTIAGNQLDEMGFLVNFRDIKSIINDTFDHTLINDLPELKDKMPSTELVAKTIFDMIDNHLNTLPHAPKVLQVFLRETPTSYVVYRGLQ

SEQ ID NO: 22100 - protein, 137 aa, unidentified
  source 1..137: note = Macrococcus bohemicus
  REGION 1..137: note = tr|A0A4R5Y018|A0A4R5Y018_9STAP 6-carboxy-5,6,7,8-tetrahydropterin synthase OS=Macrococcus bohemicus OX=1903056 GN=queD PE=3 SV=1
MMQQIYPQVNHNYAFELNKDINFSAAHFIPDERAGVCSRTHGHTYFVNVTIAGNHLDEMGFLVNFRDIKSIINDTFDHTLINDLPELKDKMPSTELVAKTIFDMIDNHLKTLPHAPKVLQVFLRETPTSYVVYRGVR

SEQ ID NO: 22101 - protein, 137 aa, Macrococcus bovicus
  REGION 1..137: note = tr|A0A4R6C0N2|A0A4R6C0N2_9STAP 6-carboxy-5,6,7,8-tetrahydropterin synthase OS=Macrococcus bovicus OX=69968 GN=queD PE=3 SV=1
MIGQIYPQVTHSYRFELNKDMNFSSAHYIPDARAGACARIHGHTYFLNLTIAGNELDDLGFLVNFSELKKLIHARFDHQLLNELPEVEGLIPSTEKMAELIYTIVQAYLDGLDNQPICLQVFLRETPTSYVVYRGAL

SEQ ID NO: 22102 - protein, 142 aa, Macrococcus bovicus
  REGION 1..142: note = tr|A0A4R6BZX2|A0A4R6BZX2_9STAP 6-pyruvoyl tetrahydropterin synthase OS=Macrococcus bovicus OX=69968; GN = ERX55_06440 PE=4 SV=1
MHIFGDIQAPDVFKIYDASPVLKLKFSFHAHCRIYFSPDRYKDLENHLYVFYVTVSSPLNDMGMAVDFFHIEDIFTTHIKPFVDQQLLNQTLPSMNMTTENIAHWLYETFEEHLPANTTMETLELFETANHSVLLMQYNRPQ

SEQ ID NO: 22103 - protein, 137 aa, Macrococcus brunensis
  REGION 1..137: note = tr|A0A4R6BGJ9|A0A4R6BGJ9_9STAP 6-carboxy-5,6,7,8-tetrahydropterin synthase OS=Macrococcus brunensis OX=198483 GN=queD PE=3 SV=1
MIGQIYPQVPHSYRFELNKDMNFSSAHYIPDERAGACARVHGHTYFLCLTIAGNELDDLGFLVNFSELKKLIHGRFDHQLLNELPEVKGMIPSTEKMAELIYTLVQDYLDELDNGAKCLQVFLRETPTSYVVYRGDL

SEQ ID NO: 22104 - protein, 141 aa, Macrococcus brunensis
  REGION 1..141: note = tr|A0A4R6BF45|A0A4R6BF45_9STAP 6-pyruvoyl tetrahydropterin synthase OS=Macrococcus brunensis; OX = 198483 GN=ERX27_02845 PE=4 SV=1
MNLFNDIKVPASFKAFSGTPSLKLKFAFRAHCRIFFTPEKYKDLENHLYIFYVTVNSPVNDIGMGVDFFEVEHIFENHIKPLVDHQLLNQTLPAMNMTAENIGHWLYQTFEAHLPVNTTIEALELFETAEHSVILTQQNRH

SEQ ID NO: 22105 - protein, 144 aa, unidentified
  source 1..144: note = Macrococcus canis
  REGION 1..144: note = tr|A0A4P9CEU0|A0A4P9CEU0_9STAP Uncharacterized protein OS=Macrococcus canis OX=1855823 GN=EST43_02715; PE = 4 SV=1
MSLNHIQNKTSAYYRQAIDIEVDFQFKTSNRIFFPGNHYKDLVDHSYSFTLTVTSNVDEYGLGIDFFEIRRLYNEHIAPTVNAPIINEVLPHINTTVENLCYFLWQSFDKVLPETASIQSIVLSENDTHRAILKREYLNNGGLL

SEQ ID NO: 22106 - protein, 144 aa, unidentified
  source 1..144: note = Macrococcus canis
  REGION 1..144: note = tr|A0A1W7AAW4|A0A1W7AAW4_9STAP 6-pyruvoyl tetrahydropterin synthase OS=Macrococcus canis OX=1855823; GN = MCCS_05890 PE=4 SV=1
MSLDQIQNKTSAYYRQAIDIEVDFQFKTSNRIFFPGNHYKDLVDHSYSFTLTVTSNVDEYGLGIDFFEIRRLYNEHIAPTVNAPIINEVLPHINTTVENLCYFLWQSFDKVLPETVSIQSIVLSENDTHRAILKREYLNNGGLL

SEQ ID NO: 22107 - protein, 137 aa, Macrococcus carouselicus
  REGION 1..137: note = tr|A0A4R6BP60|A0A4R6BP60_9STAP 6-carboxy-5,6,7,8-tetrahydropterin synthase OS=Macrococcus carouselicus OX=69969 GN=ERX40_00280 PE=3 SV=1
MIGQIYPQVTHSYRFELNKDMNFSSAHYIPDARAGACARVHGHTYFLNLTIGGNELDELGFLINFSELKKLIHGRFDHQLLNELPELDGIIPSTEKMAELIHTIVQDHLDTLANQPKCLQVFLRETPTSYVIYRGEL

SEQ ID NO: 22108 - protein, 137 aa, Macrococcus caseolyticus
  REGION 1..137: note = tr|B9EAB0|B9EAB0_MACCJ 6-carboxy-5,6,7,8-tetrahydropterin synthase OS=Macrococcus caseolyticus (strain JCSC5402) OX=458233 GN=MCCL_0464 PE=3; SV = 1
MMQQLYPQVNHNYAFELNKDINFSAAHLIPNEKAGVCSRVHGHTYFVNVTIGGNELDEMGFLVNFRDIKSIINDTFDHRLMNDLEAFQNTPPSTENVAKLIFEKIEAHLDTLSHGPKVLQVYLRETPTSYVLYRGKR

SEQ ID NO: 22109 - protein, 137 aa, Macrococcus caseolyticus; identical to SEQ ID NO: 22108
  REGION 1..137: note = tr|A0A2N0VS98|A0A2N0VS98_9STAP 6-carboxy-5,6,7,8-tetrahydropterin synthase OS=Macrococcus caseolyticus OX=69966 GN=queD PE=3 SV=1

SEQ ID NO: 22110 - protein, 137 aa, unidentified
  source 1..137: note = Macrococcus epidermidis
  REGION 1..137: note = tr|A0A327ZVB0|A0A327ZVB0_9STAP 6-carboxy-5,6,7,8-tetrahydropterin synthase OS=Macrococcus epidermidis OX=1902580 GN=queD PE=3 SV=1
MMQQIYPQVNHNYAFELNKDMNFSAAHYIPDERAGVCSRTHGHTYFVNVTIACNHLDEMGFLVNFRDIKSIINDTFDHTLINDLPELKDKMPSTELVAKTIFDMIDNHLNTLPHAPKVLQVFLRETPTSYVIYRGVR

SEQ ID NO: 22111 - protein, 138 aa, unidentified
  source 1..138: note = Macrococcus epidermidis
  REGION 1..138: note = tr|A0A327ZUL7|A0A327ZUL7_9STAP 6-pyruvoyl tetrahydrobiopterin synthase OS=Macrococcus epidermidis; OX = 1902580 GN=BHU61_00665 PE=4 SV=1
MSLLEHIQQPQKTAYYEKDILLNLTFTFTTNNRIFFPNGKHKDLFNHNYKFDISIKSPVDTYGLAIDFYQIERDYNEKIAPLLNAPILNESLPEMNTTVENIAYFIWEQFEHLLDHVSSIQTLTLYETKNHSVTINKN

SEQ ID NO: 22112 - protein, 138 aa, unidentified
  source 1..138: note = Macrococcus goetzii
  REGION 1..138: note = tr|A0A4R6CFG2|A0A4R6CFG2_9STAP 6-pyruvoyl tetrahydrobiopterin synthase OS=Macrococcus goetzii; OX = 1891097 GN=ETI08_04785 PE=4 SV=1
MSLLEHIQQPKKTVYYEKDILLNLTFTFTTNNRIFFPNGKHKDLFNHNYKFDISIKSPVDTYGLAIDFYQIERDYNEKIAPLLNAPILNESLPEMNTTVENIAYFIWEQFEHLIDHASSIQTLTLYETKNHSVTINKN

SEQ ID NO: 22113 - protein, 137 aa, unidentified
  source 1..137: note = Macrococcus goetzii
  REGION 1..137: note = tr|A0A395G929|A0A395G929_9STAP 6-carboxy-5,6,7,8-tetrahydropterin synthase OS=Macrococcus goetzii OX=1891097 GN=queD PE=3 SV=1
MMQQIYPQVNHTYAFELNKDMNFSAAHYIPDERAGVCSRTHGHTYFVNVTIAGNHLDEMGFLVNFRDIKSIINDTFDHTLINDLPELKDKMPSTELVAKTIFDMIDNHLNTLPHAPKVLQVFLRETPTSYVIYRGVR

SEQ ID NO: 22114 - protein, 137 aa, Macrococcus hajekii
  REGION 1..137: note = tr|A0A4V3BDV8|A0A4V3BDV8_9STAP 6-carboxy-5,6,7,8-tetrahydropterin synthase OS=Macrococcus hajekii OX=198482 GN=ERX37_08445 PE=3 SV=1
MIPQLYPQVPHNYIFELNKDMNFSSAHYIPDERAGACARVHGHTYFLNLTIGGNELDELGFLINFSELKQLIHGRFDHQLLNELPELAGRIPSTEKMAELIHELVQSHLNTLPNQPQCLQVFLRETPTSYVVYRGAK

SEQ ID NO: 22115 - protein, 142 aa, Macrococcus hajekii
  REGION 1..142: note = tr|A0A4R6BJZ5|A0A4R6BJZ5_9STAP 6-pyruvoyl tetrahydrobiopterin synthase OS=Macrococcus hajekii; OX = 198482 GN=ERX37_06920 PE=4 SV=1
MTKFTDITAPQNFKIYDSCPLLKLKFEFNAHCRIFFTVDKYKDLSHHHYAFYLTVSSPINHMGLGVDFFEVEKIYTTYLAPKLNDQLLNHTLPEMNMTAENIAYWLWQQFEQYLPSDVDIETLELFEAPTHSVILNRQIMNE

SEQ ID NO: 22116 - protein, 138 aa, Macrococcus lamae
  REGION 1..138: note = tr|A0A4R6BV99|A0A4R6BV99_9STAP 6-carboxy-5,6,7,8-tetrahydropterin synthase OS=Macrococcus lamae OX=198484 GN=queD PE=3 SV=1
MIQQIYPQVAHNYRFELNKDMNFSSAHYIPHHDAGACSRIHGHTYFLNLTIGGNTLDEAGFLINFSTLKQLIHGRFDHQLLNELPELENIIPSTEKMAERIYELVQEHLNTLPNRPVCLQVFLRETPTSYVIYRGGSQ

SEQ ID NO: 22117 - protein, 142 aa, Macrococcus sp.
  REGION 1..142: note = tr|A0A4Q1B9Z9|A0A4Q1B9Z9_9STAP 6-pyruvoyl tetrahydrobiopterin synthase OS=Macrococcus sp. DPC7161; OX = 2507060 GN=ER639_06895 PE=4 SV=1
MLNHIQMTKPTNNNQQPVLLNLSFQFTTNNRIFFPNGKHKDLFNHAYHFTVSIQSPVDEYGLGIDFYKIEQNYHDDLAKKLNNPILNEMLPFNTTVENIASYIYQSFSRYLDKNASVHSVTLYETKSHSVTINEQNMYLFEL

SEQ ID NO: 22118 - protein, 123 aa, Macrococcus sp.
  REGION 1..123: note = tr|A0A4Q1AZ14|A0A4Q1AZ14_9STAP 6-carboxy-5,6,7,8-tetrahydropterin synthase OS=Macrococcus sp. DPC7161 OX=2507060 GN=ER639_06775 PE=3 SV=1
MKRCVYEIEKQFHFSSSHVLNGLPESHPCGRLHGHNYIAVFVLGADELNEVGFVVDYRELDSIKNYIDNELDHRHLNDVLPMQPTAENIAKYLFDKTKNELGIKEIVEVKISETPKTWASYRP

SEQ ID NO: 22119 - protein, 138 aa, unidentified
  source 1..138: note = Magnetococcales bacterium
  REGION 1..138: note = tr|A0A2E3C594|A0A2E3C594_9PROT 6-pyruvoyl tetrahydrobiopterin synthase OS=Magnetococcales bacterium; OX = 2026759 GN=CMF62_12810 PE=4 SV=1
MIEAIRYHDFCAGHRVAGHENKCAHLHGHNYRIYFHCTAEATDNLGRVIDFSVIKATLCNWLEDNWDHRFLVWEEDPLANDIAKLDDATVKLPFNPTAENMAQYLVETVAPQQLKGSGVTLHKCVVEETRKCSASYSK

SEQ ID NO: 22120 - protein, 142 aa, unidentified
  source 1..142: note = Magnetococcus marinus
  REGION 1..142: note = tr|A0L5B3|A0L5B3_MAGMM 6-carboxy-5,6,7,8-tetrahydropterin synthase; OS = Magnetococcus marinus (strain ATCC BAA-1437 / JCM 17883 / MC-1) OX=156889 GN=Mmc1_0635 PE=3 SV= 1
MKIARMFKFESAHRLPYHDGKCHRLHGHSYRLEMIFSGTVRQPDEKDPQSGFVADFGIVNDLVKEQLIDRYLDHRDLNASVPGIPYTSAEYLSAWIVGWCMRELEGHPQLGDLKIERVRVWETINAWAEADRQDAEGMNFHV

SEQ ID NO: 22121 - protein, 141 aa, unidentified
  source 1..141: note = Magnetococcus massalia
  REGION 1..141: note = tr|A0A1S7LMQ3|A0A1S7LMQ3_MAGMO 6-carboxy-5,6,7,8-tetrahydropterin synthase; OS = Magnetococcus massalia (strain MO-1) OX=451514; GN = MAGMO_2879 PE=3 SV=1
MKIARMFKFESAHQLPYHDGKCQRLHGHSYRLELVFTGTPRKPDASDPQSGFVADFGLIDELVKGELINPQLDHYHLNETIPELPYTSAEYLAAWIVGWCMKNMDGRAELGDCRIETARLWETVNAWAEADRNDAEQLGFA

SEQ ID NO: 22122 - protein, 145 aa, unidentified
  source 1..145: note = Magnetofaba australis
  REGION 1..145: note = tr|A0A1Y2K5D4|A0A1Y2K5D4_9PROT 6-carboxy-5,6,7,8-tetrahydropterin synthase OS=Magnetofaba australis IT-1 OX=1434232 GN=MAIT1_02450 PE=3 SV=1
MKITKQFRFEAAHRLPYHDGRCRREHGHSYLLELTFEGPVRAVDPNDPQSGFVVDFGRIKQIVQPELIDRYLDHHDLNQTVPEIPYTSAEHLAAWIVGWCMRHVDGQPGIGAARVHSARLWETISALAEADRNDAIALGYAPPTP

SEQ ID NO: 22123 - protein, 174 aa, unidentified
  source 1..174: note = Magnetospirillum caucaseum
  REGION 1..174: note = tr|M3AFQ0|M3AFQ0_9PROT 6-pyruvoyl-tetrahydropterin synthase OS=Magnetospirillum caucaseum OX=1244869; GN = H261_01911 PE=4 SV=1
MSTFRVRRRIEIDAGHRIMTHGSKCRNLHGHRYVIEVECEAAHLHPSGEQTDMVVDFGFLKHEMMRLIDAPCDHGFIAASADAELLALFAPQGAQDWTESILAEVRENGAALTTRTRMGTKLYVVPFQPTAECLAKHWFEVLKEPVRERSDSTARLVAVRVWETPNCMAEYAPG

SEQ ID NO: 22124 - protein, 176 aa, Magnetospirillum gryphiswaldense
  REGION 1..176: note = tr|V6F6Y1|V6F6Y1_MAGGM Putative 6-carboxy-5,6,7,8-tetrahydropterin synthase; OS = Magnetospirillum gryphiswaldense (strain DSM 6361 / JCM 21280 / NBRC 15271 / MSR-1) OX =431944 GN=MGMSRv2__3917; PE = 4 SV=1
MSAPYRISRRIEIDAGHRIMTHGSKCRHVHGHRYGIEAVCEAVDLHHDGEQTDMVLDFGFLKEEMLKAIDEPCDHGFIAALADVELLTMFAPTGNDTAEWLADLEAQVREKGEATTTRTQLMTKLTVVPFQPTAECLARHWFVKLAEPVKQRSGGAARLLLVRVFETPNCAAEYGE

SEQ ID NO: 22125 - protein, 176 aa, Magnetospirillum gryphiswaldense
  REGION 1..176: note = tr|A4TYV7|A4TYV7_9PROT Uncharacterized protein; OS = Magnetospirillum gryphiswaldense OX=55518 GN=MGR_3378; PE = 4 SV=1
MSAPYRISRRIDIDAGHRIMTHGSKCRHVHGHRYGIEAVCEAVDLHHDGEQTDMVLDFGFLKEEMLKAIDEPCDHGFIAALADVELLTMFTPLGGDTAEWLADLEAQVREKGEATTTRTRLLTKLTVVPFQPTAECLARHWFIKLAEPVKQRSGGAARLLLVRVFETPNCAAEYGE

SEQ ID NO: 22126 - protein, 176 aa, unidentified
  source 1..176: note = Magnetospirillum kuznetsovii
  REGION 1..176: note = tr|A0A364NXT7|A0A364NXT7_9PROT 6-carboxytetrahydropterin synthase OS=Magnetospirillum kuznetsovii OX=2053833 GN=CU669_12140 PE=4 SV=1
MPAFRVSRRIEIDAGHRIMTHGSKCRNLHGHRYVIEAECEARQLHADGEQTDMVVDFGFLKEEMMRLIDAPCDHGFIAASADDELLSLFAPQGRDADPWLAEIRGKVAASGAALTVETRMLTKLYVVPFQPTAECLAKHWYGLLAEPVKSRSDGCARLVSLRVWETPNCMAEYAPG

SEQ ID NO: 22127 - protein, 148 aa, unidentified
  source 1..148: note = Magnetospirillum magneticum
  REGION 1..148: note = tr|Q2W0Y7|Q2W0Y7_MAGSA Uncharacterized protein; OS = Magnetospirillum magneticum (strain AMB-1 / ATCC 700264) OX=342108 GN=amb3684 PE=4 SV=1
MVIDFGNVKAYMMDIFDSIFDHAFIVSAADAVMMEMFYPGEDPRAILALYQKSIAEQLEFYCSTADKKPIRLPRTCYSEQDPDGMKVVPVPYSPTAENLAAHMFELLGQPLKAHFEKTPIRLVNIRLFETPNGWVDHTADGFNPGIMG

SEQ ID NO: 22128 - protein, 174 aa, unidentified
  source 1..174: note = Magnetospirillum magneticum
  REGION 1..174: note = tr|Q2WAS3|Q2WAS3_MAGSA 6-pyruvoyl-tetrahydropterin synthase OS=Magnetospirillum magneticum (strain AMB-1 / ATCC 700264) OX=342108 GN=amb0248 PE=4 SV=1
MSTFRVRRRIEIDAGHRIMTHGSKCRNLHGHRYVVEVECEASRLHPSGEQTDMVVDFGFLKDEMMRLIDAPCDHGFIASAADGELLALFAPQGAAGWTESILAEVKAKGAALTTSTRMGTKLYVVPFQPTAECLAKHWFEVLVAPVRTRSDSTARLVAVRVWETPNCMAEYAPA

SEQ ID NO: 22129 - protein, 174 aa, Magnetospirillum magnetotacticum
  REGION 1..174: note = tr|A0A0C2UZ79|A0A0C2UZ79_MAGMG 6-carboxytetrahydropterin synthase Queuosine biosynthesis QueD PTPS-I OS=Magnetospirillum magnetotacticum MS-1; OX = 272627 GN=CCC_01172PE=4 SV=1
MSTFRVRRRIEIDAGHRIMTHGSKCRNLHGHRYVIEVECEASHLHPSGEQTDMVVDFGFLKDEMMRLIDAPCDHGFIASSADGELLALFAPQGAVGWAESILAEVKEKGAALTTSTRMGTKLYVVPFQPTAECLAKHWFEVLVAPVRKRSDATARLVAVRVWETPNCMAEYAPA

SEQ ID NO: 22130 - protein, 148 aa, unidentified
  source 1..148: note = Magnetospirillum marisnigri
  REGION 1..148: note = tr|A0A178MIU7|A0A178MIU7_9PROT Uncharacterized protein OS=Magnetospirillum marisnigri OX=1285242; GN = A6A04_04625 PE=4 SV=1
MVIDFGNVKAYMMDIFDAIFDHAFIVSVADAVMMEMFYPGEDPKAILDLYQESIAEQLDVYCSTADKKPIRLPRTCYSEQDPDGMKVVPVQYSPTAENLAAHMFEMLDQPLKAHFEKTPIRLVNIRLFETPNGWVDHTADGFNPGIMG

SEQ ID NO: 22131 - protein, 176 aa, unidentified
  source 1..176: note = Magnetospirillum marisnigri
  REGION 1..176: note = tr|A0A178MSE8|A0A178MSE8_9PROT 6-pyruvoyl tetrahydropterin synthase OS=Magnetospirillum marisnigri; OX = 1285242 GN=A6A04_01045 PE=4 SV=1
MSSFRVRRRIEIDAGHRIMTHGSKCRNLHGHRYVVEVECEARRLHADGEQTDMVVDFGFLKDEMMRLIDAPCDHGFIAAAADAELLGLFAPVGAQAESWVGGIRAQVAADGAALTTDTRMLTKLYVVPFQPTAECLAMHWYGLLEQPVAARSDGCARLVAVRVWETPNCMAEYAPG

SEQ ID NO: 22132 - protein, 176 aa, unidentified
  source 1..176: note = Magnetospirillum moscoviense
  REGION 1..176: note = tr|A0A178MR88|A0A178MR88_9PROT 6-pyruvoyl tetrahydropterin synthase OS=Magnetospirillum moscoviense; OX = 1437059 GN=A6A05_12375 PE=4 SV=1
MNAPYRITRRIEIDAGHRIMTHGSKCRHLHGHRYAIEAVCEAADLHHGGEQTDMVLDFGFLKDEMLTAIDGPCDHGFIAALADRELLTMFCPMGRDVDGWLAGLDAQVRAHGEATTTDTRLGTKLTVVPFQPTAECLARHWFTRLAEPVGRRSDGQARLVSVKVWETPNCTAEFSG

SEQ ID NO: 22133 - protein, 175 aa, Magnetospirillum sp.
  REGION 1..175: note = tr|A0A1W6CPA3|A0A1W6CPA3_9PROT 6-pyruvoyl tetrahydropterin synthase OS=Magnetospirillum sp. ME-1; OX = 1639348 GN=WV31_13830 PE=4 SV=1
MSTFRVRRRIEIDAGHRIMTHGSKCRNLHGHRYVVEVECEASHLHPSGEQTDMVVDFGFLKDEMMRLIDAPCDHGFIAASADAELLALFAPVGGGEAWVQVLRDTVAAQGAALTTDTRMGTKLYVVPFQPTAECLAKHWFEVLVAPVRKRSDATARLVAVRVWETPNCMAEYAPA

SEQ ID NO: 22134 - protein, 203 aa, Magnetospirillum sp.
  REGION 1..203: note = tr|A0A1M3LLF3|A0A1M3LLF3_9PROT 6-carboxytetrahydropterin synthase QueD; OS = Magnetospirillum sp. 64-120 OX=1895778 GN=BGO92_09735; PE = 4 SV=1
MIIRKLFRFENAHVVRNGSTRRCALSLHGHSYRVELLLTAARLDNAGMILDFGLLKGAIKELIDSWDHAACFWDRDDPEYIAFIKRHSERWVSMPVNPSAEQFSRVFFVLVDAVLAATEFGNGEQGVALDSAIVHETDTGYAQCWRADAVDPDMGGPIALNQIVFSERIREEWSDPHLWARVVDAHKRGTVLFRHTLPEQQVQ

SEQ ID NO: 22135 - protein, 117 aa, unidentified
  source 1..117: note = Magnetovibrio blakemorei
  REGION 1..117: note = tr|A0A1E5QC14|A0A1E5QC14_9PROT 6-carboxy-5,6,7,8-tetrahydropterin synthase; OS = Magnetovibrio blakemorei OX=28181 GN=BEN30_01830 PE=3; SV = 1
MDIYKIFTFEAAHDLPNVPEGHKCKRLHGHSFEVTLTVSGPVDEVTGWVVDFADIKAAFKPTLDRLDHYYLNDIKGLENPTSENIAKWIWAQVKPALPGLSKVAVKETCTAGCVYTG

SEQ ID NO: 22136 - protein, 118 aa, unidentified
  source 1..118: note = Magnetovibrio sp.
  REGION 1..118: note = tr|A0A2D8Z1B3|A0A2D8Z1B3_9PROT 6-carboxy-5,6,7,8-tetrahydropterin synthase; OS = Magnetovibrio sp. OX=2024836 GN=CMF64_14020 PE=3 SV=1
MTVYHGFSFESARRLPRLPDSHICSRLHGNTFLLRVAVTGPVRESEGWVIDFAEVAARVEPVLAEIDHHYLNEVPGLENPTTENIAVWLWDRIATHLQGLSEIEIRENATTGCVYRGA

SEQ ID NO: 22137 - protein, 131 aa, unidentified
  source 1..131: note = Magnetovibrio sp.
  REGION 1..131: note = tr|A0A2D7A9Y5|A0A2D7A9Y5_9PROT 6-carboxytetrahydropterin synthase QueD OS=Magnetovibrio sp. OX=2024836 GN=CMF65_08065 PE=4 SV=1
MSFEITQEFTFDCAHFLTGNGRRDEYSAVHGHSFVCAVTVSGLPVDHADWVVDFAEFKSVLIKIGQQLDHKILNDIPGLETPTMENICVWIASHVSEWLTVGIPADQLVKLISVKLMRKTIGQSCVYRLEK

SEQ ID NO: 22138 - protein, 129 aa, Malikia granosa
  REGION 1..129: note = tr|A0A2S9K284|A0A2S9K284_9BURK 6-carboxy-5,6,7,8-tetrahydropterin synthase OS=Malikia granosa OX=263067 GN=C6P64_13750 PE=3 SV=1
MSAAYIPRPARCELSQRFYFEAAHTLERSIDAEGSRRIHGHTYHAEVTLQGNPDPVSGMLVDLAYLRREIERLRDRLDHRFLDEVAGLGPATLENLCAFIRADLEPIFPQLCAVSVERQASGDRCTLSW

SEQ ID NO: 22139 - protein, 129 aa, Malikia spinosa
  REGION 1..129: note = tr|A0A2S9KCR0|A0A2S9KCR0_9BURK 6-carboxy-5,6,7,8-tetrahydropterin synthase OS=Malikia spinosa OX=86180 GN=C6P61_12740 PE=3 SV=1
MSAAYTPRPARCELSQRFYFEAAHTLERSIDAEGSRRIHGHTYHAEVTLLGNPDPASGMLVDLAYLRREVERLRDRLDHRFLDEVAGLGPATLENLCAFIRADLEPVFPQLCAVSVERQASGDRCRLSW

SEQ ID NO: 22140 - protein, 123 aa, Malonomonas rubra
  REGION 1..123: note = tr|A0A1M6K8R3|A0A1M6K8R3_MALRU 6-carboxy-5,6,7,8-tetrahydropterin synthase OS=Malonomonas rubra DSM 5091 OX=1122189 GN=SAMN02745165_02621 PE=3 SV=1
MYHLTIQTHFAAAHNLLNYDGDCENLHGHNWKVEVTVKTSTLDDAGLGIDFKILKKKTNKVMDFLDHKYLNDLEPFKGVSTSSERISKYVFDELVDDLQGSGVIVERVTVWESDNACASYTAD

SEQ ID NO: 22141 - protein, 117 aa, Mameliella alba
  REGION 1..117: note = tr|A0A0B3RZK1|A0A0B3RZK1_9RHOB 6-carboxy-5,6,7,8-tetrahydropterin synthase OS=Mameliella alba OX=561184 GN=queD PE=3 SV=1
MFRIRKEFHFSASHQLAHLPAGHQCARLHGHNYIVVVELAADALNADGFVRDYHDLKPLKVYIDDTFDHRHLNDVLDVPSTAENMAKHFFDWCKARWPEVSAVLVSETPKTWAEYRP

SEQ ID NO: 22142 - protein, 121 aa, unidentified
  source 1..121: note = Mangrovibacter phragmitis
  REGION 1..121: note = tr|A0A1B7KZ36|A0A1B7KZ36_9ENTR 6-carboxy-5,6,7,8-tetrahydropterin synthase; OS = Mangrovibacter phragmitis OX=1691903 GN=A9B99_16090; PE = 3 SV=1
MATSLFKDFTFEAAHRLPHVPEGHKCGRLHGHSFMVRLEVTGEVDPYTGWIIDFAELKAVFKPTWERLDHHYLNDIPGLENPTSEVLAKWIWDQLKPQLPLLSAVMVKETCTAGCVYRGEV

SEQ ID NO: 22143 - protein, 121 aa, Mangrovibacter plantisponsor
  REGION 1..121: note = tr|A0A317Q8G7|A0A317Q8G7_9ENTR 6-carboxy-5,6,7,8-tetrahydropterin synthase; OS = Mangrovibacter plantisponsor OX=451513 GN=DES37_101257; PE = 3 SV=1
MATSLFKDFTFEAAHRLPHVPEGHKCGRLHGHSFMVRLEVTGEVDPYTGWIIDFAELKAVFKPTWERLDHHYLNDIPGLENPTSEVLAKWVWDQLKPQLPLLSAVMVQETCTAGCVYRGEA

SEQ ID NO: 22144 - protein, 121 aa, Mangrovibacter sp.
  REGION 1..121: note = tr|A0A071M1L0|A0A071M1L0_9ENTR 6-carboxy-5,6,7,8-tetrahydropterin synthase; OS = Mangrovibacter sp. MFB070 OX=1224318 GN=DT73_00720 PE=3; SV = 1
MATSLFKDFTFEAAHRLPHVPEGHKCGRLHGHSFMVRLEVTGEVDPYTGWIIDFAELKAVFKPTWERLDHHYLNDIPGLENPTSEVLAKWVWDQLKPQLPLLSAVMVKETCTAGCVYRGEA

SEQ ID NO: 22145 - protein, 116 aa, unidentified
  source 1..116: note = Mangrovibacterium diazotrophicum
  REGION 1..116: note = tr|A0A419W466|A0A419W466_9BACT 6-carboxy-5,6,7,8-tetrahydropterin synthase; OS = Mangrovibacterium diazotrophicum OX=1261403; GN = BC643_0579 PE=3 SV=1
MIWTIKKTFEISASHQLDLPYESKCNNLHGHNWIVDIYVASRELENGMVVDFNYLKEEVFQKLDHKHLNDIIPVPTVENMAHWIANTIGTKEAGKRFWCTKVVIQESQGNVCELNC

SEQ ID NO: 22146 - protein, 116 aa, unidentified
  source 1..116: note = Mangrovibacterium marinum
  REGION 1..116: note = tr|A0A2T5BZW0|A0A2T5BZW0_9BACT 6-carboxy-5,6,7,8-tetrahydropterin synthase; OS = Mangrovibacterium marinum OX=1639118 GN=C8N47_11386; PE = 3 SV=1
MIWTVKKTFEISASHQLDLPYESKCNNLHGHNWIVDIYVASHELENGMVVDFNYLKETIFQQLDHKHLNDIIPVPTVENMALWIANTIGTKEAGKRFWCTKVVIQESQGNVCELNC

SEQ ID NO: 22147 - protein, 150 aa, unidentified
  source 1..150: note = Mangrovimonas sp.
  REGION 1..150: note = tr|A0A1V1ZJR1|A0A1V1ZJR1_9FLAO 6-carboxytetrahydropterin synthase QueD OS=Mangrovimonas sp. DI 80 OX=1779330 GN=BKM32_04990 PE=4 SV=1
MSNIRITKQFSFETGHALYGYDGKCKNVHGHSYKLSVTVIGQPISDTSNVKFGMVIDFGDLKKIVKEEIVDVFDHATVFNKNTPHIELAKELEDRGHNVLLVEYQPTSEMMVIDFAQKIKNRLPQNIQLHSLKLQETDSSYAEWFASDNN

SEQ ID NO: 22148 - protein, 149 aa, unidentified
  source 1..149: note = Mangrovimonas sp.
  REGION 1..149: note = tr|A0A3R9UWI0|A0A3R9UWI0_9FLAO 6-carboxy-5,6,7,8-tetrahydropterin synthase; OS = Mangrovimonas sp. HN-E26 OX=2494697 GN=EJA19_01625 PE=3; SV = 1
MSHIRITKLFSFETGHALYGYDGKCKNVHGHSYKLSVTVIGKPINDTSNVKYGMVIDFGDLKKIVKEDIVDVFDHATVFNKNTPHVELAKELQDRGHNVMLVDYQPTSEMMVIDFAKKIKKRLPDNIKLHALKLQETDTSYAEWYACDN

SEQ ID NO: 22149 - protein, 136 aa, unidentified
  source 1..136: note = Mangrovimonas yunxiaonensis
  REGION 1..136: note = tr|A0A084TNQ2|A0A084TNQ2_9FLAO 6-carboxy-5,6,7,8-tetrahydropterin synthase; OS = Mangrovimonas yunxiaonensis OX=1197477 GN=IA57_01505; PE = 3 SV=1
MKVTVSRKAHFNAAHRLFRKDWSHAKNEQVFGLCNNPNFHGHNYELIVSVTGEIDPETGYVIDMKVLKNVIKEEVEEAFDHKNLNVEVPEFKALNPTAENIAVVIYNKIKPRLNADLSLEITLFETPRNFVRFSGE

SEQ ID NO: 22150 - protein, 152 aa, unidentified
  source 1..152: note = Mangrovimonas yunxiaonensis
  REGION 1..152: note = tr|A0A084TKU2|A0A084TKU2_9FLAO 6-pyruvoyl tetrahydropterin synthase OS=Mangrovimonas yunxiaonensis; OX = 1197477 GN=IA57_05725 PE=4 SV=1
MSKIRITKQFSFETGHALYGYDGKCKNVHGHSYKLSVTVIGTPINNTDHVKYGMVIDFGDLKKIVKEEIVDVFDHATVFNKNTPHVELAKALKDRGHSVMLVDYQPTSEMMVIDFAEKITQRLPKHISLFALKLQETETSYAEWYASDNASL

SEQ ID NO: 22151 - protein, 140 aa, Mannheimia granulomatis
  REGION 1..140: note = tr|A0A011NEX7|A0A011NEX7_9PAST 6-carboxy-5,6,7,8-tetrahydropterin synthase OS=Mannheimia granulomatis OX=85402 GN=AK33_01475 PE=3 SV=1
MFKIAKEFSFDMAHMLDGHDGKCQNLHGHTYKLQVEVTGDLHQNGAKRGMVMDYSDLKTVVKTYILEPMDHAFIYDLNSERESQVAQLLVDLKSKVYGIPSRTTAEEMAKYMFEKLERVGLPVSLIRLWETPTSYCEYSK

SEQ ID NO: 22152 - protein, 140 aa, Mannheimia haemolytica
  REGION 1..140: note = tr|A0A248ZZA2|A0A248ZZA2_MANHA 6-carboxy-5,6,7,8-tetrahydropterin synthase OS=Mannheimia haemolytica OX=75985 GN=queD PE=3 SV=1
MFKIAKEFSFDMAHMLDGHDGKCQNLHGHTYKLQVEVAGELFQEGAKRGMVMDYSDLKAVVKQHILEPMDHAFIYDLQSERESQVAQLLIDLNSKVYGIPTRTTAEEMAKYMFEKLEKVGLPVSLIRLWETPTSYCEYSK

SEQ ID NO: 22153 - protein, 140 aa, Mannheimia sp.
  REGION 1..140: note = tr|W0Q6B3|W0Q6B3_9PAST 6-carboxy-5,6,7,8-tetrahydropterin synthase OS=Mannheimia sp. USDA-ARS-USMARC-1261 OX=1432056 GN=X781_5890 PE=3 SV=1
MFKIAKEFSFDMAHMLDGHDGKCQNLHGHTYKLQVEVAGELFQEGAKRGMVMDYSDLKAIVKTHILDPMDHAFIYDLHNERESQVAQLLIDLKSKVYGIPSRTTAEEMAKYMFEKLEKVGLTVSLIRLWETPTSYCEYSK

SEQ ID NO: 22154 - protein, 142 aa, unidentified
  source 1..142: note = Mannheimia succiniciproducens
  REGION 1..142: note = tr|Q65RE7|Q65RE7_MANSM 6-carboxy-5,6,7,8-tetrahydropterin synthase OS=Mannheimia succiniciproducens (strain MBEL55E) OX=221988 GN=MS1856; PE = 3 SV=1
MFKVSKEFSFDMAHILDGHDGKCQNLHGHTYKLQVEVMSAQLHQSGAKKGMVVDFSDLKTVVKKFILDPMDHAFIYDNTSERECKIARLLVELDSKTFGIPVRTTAEEMSRFIFNRLKHDAGLPVSAIRLWETPTSFCEYRE

SEQ ID NO: 22155 - protein, 140 aa, Mannheimia varigena
  REGION 1..140: note = tr|W0QE03|W0QE03_9PAST 6-carboxy-5,6,7,8-tetrahydropterin synthase OS=Mannheimia varigena USDA-ARS-USMARC-1296 OX=1433287 GN=X808_15680; PE = 3 SV=1
MFKIAKEFSFDMAHMLDGHDGKCQNLHGHTYKLQVEVTGDLYESGAKRGMVMDYSDLKAIVKCHILDPMDHAFIYDLHNERESQVAQLLIDLKSKVYGIPSRTTAEEMAKYMFEKLEKVGLPVSLIRLWETPTSYCEYSK

SEQ ID NO: 22156 - protein, 149 aa, Maribacter aquivivus
  REGION 1..149: note = tr|A0A1M6K2I4|A0A1M6K2I4_9FLAO 6-carboxy-5,6,7,8-tetrahydropterin synthase OS=Maribacter aquivivus OX=228958 GN=SAMN04488007_0635 PE=3 SV=1
MSNIRITKQFNFETGHALYGYDGKCRNVHGHSYKLSVTVIGRPITDTSHVKLGMVIDFGDLKKIVKEDIVDIFDHSTVFNKNTPHVELAKELTDRGHSVILADYQPTSENMVIDFAAKIKSRLPENISLFSLKLQETDTSFAEWYASDN

SEQ ID NO: 22157 - protein, 136 aa, Maribacter aquivivus
  REGION 1..136: note = tr|A0A1M6U5Q9|A0A1M6U5Q9_9FLAO 6-pyruvoyltetrahydropterin/6-carboxytetrahydropterin synthase OS=Maribacter aquivivus OX=228958; GN = SAMN04488007_3499 PE=4 SV=1
MNKLAIVRCEHFNAAHRLHNSNWSDEKNKEIFGKCNNPNFHGHNYELEVKVIGYCNKDTGYVIDTKILSDLIEEKILNRFDHKNLNLDTEEFKTLNPTVENIAIVIYDILKIEIESNLELKIKLYETPRNYVEYPY

SEQ ID NO: 22158 - protein, 135 aa, Maribacter arcticus
  REGION 1..135: note = tr|A0A1T5C9C1|A0A1T5C9C1_9FLAO 6-carboxy-5,6,7,8-tetrahydropterin synthase OS=Maribacter arcticus OX=561365 GN=SAMN05660866_02062 PE=3 SV=1
MKVKVSRKAHFNAAHRLYKKEWDDAKNTDIFGKCNNPNFHGHNYELIVSVTGEIDSETGFVMDMKELKDLIKQEIEDYLDHKNLNIEVEEFNNLNPTAENIAVIIWKRLRPHISSSNELEIVLFETPRNFVTFSG

SEQ ID NO: 22159 - protein, 149 aa, Maribacter arcticus
  REGION 1..149: note = tr|A0A1T5AFI9|A0A1T5AFI9_9FLAO 6-carboxy-5,6,7,8-tetrahydropterin synthase OS=Maribacter arcticus OX=561365 GN=SAMN05660866_00914 PE=3 SV=1
MGNIRITKQFNFETGHALYGYDGKCRNVHGHSYKLSVTVIGRPITDTSHVKLGMVIDFGDLKKIVKEDIVDKFDHATVFNKNTPHVELAKELTDRGHNVILADYQPTSENMVIDFAAKIKSRLPKNISLFSLKLQETDTSFAEWYASDN

SEQ ID NO: 22160 - protein, 149 aa, unidentified
  source 1..149: note = Maribacter caenipelagi
  REGION 1..149: note = tr|A0A4R7CX60|A0A4R7CX60_9FLAO 6-carboxy-5,6,7,8-tetrahydropterin synthase OS=Maribacter caenipelagi OX=1447781 GN=DFQ03_3320 PE=3 SV=1
MSNIRITKQFNFETGHALYGYDGKCRNVHGHSYKLSVTVIGKPITDTSHVKLGMVIDFGDLKKIVKEDIVDVFDHATVFNKNTPHVELAKELTDRGHNVILADYQPTSENMVIDFAAKIKSRLPENISLFSLKLQETDTSFAEWYASDN

SEQ ID NO: 22161 - protein, 135 aa, unidentified
  source 1..135: note = Maribacter caenipelagi
  REGION 1..135: note = tr|A0A4R7D0N4|A0A4R7D0N4_9FLAO 6-carboxy-5,6,7,8-tetrahydropterin synthase OS=Maribacter caenipelagi OX=1447781 GN=DFQ03_2586 PE=3 SV=1
MKVKVSRKAHFNAAHRLYRKDWDDSKNTEIFGKCNNPNFHGHNYELVVSVTGEIDAETGFVMDMKVLKDLIKVEIEDYLDHKNLNIEVAEFKTLNPTAENISVIIWQKLRPHIQKSHDLEVVLYETPRNFVTFSG

SEQ ID NO: 22162 - protein, 149 aa, unidentified
  source 1..149: note = Maribacter cobaltidurans
  REGION 1..149: note = tr|A0A223V535|A0A223V535_9FLAO 6-carboxy-5,6,7,8-tetrahydropterin synthase OS=Maribacter cobaltidurans OX=1178778 GN=CJ263_08860 PE=3 SV=1
MSNIRITKQFNFETGHALYGYDGKCRNVHGHSYKLSVTVIGKPITDTSHVKLGMVIDFGDLKKIVKEEIVDKFDHATVFNKNTPHVDLAKELTERGHNVILAEYQPTSENMVIDFAKKIKSRLPDNIALFSLKLQETDTSFAEWYASDN

SEQ ID NO: 22163 - protein, 135 aa, unidentified
  source 1..135: note = Maribacter cobaltidurans
  REGION 1..135: note = tr|A0A223V7Q7|A0A223V7Q7_9FLAO 6-carboxy-5,6,7,8-tetrahydropterin synthase OS=Maribacter cobaltidurans OX=1178778 GN=CJ263_14445 PE=3 SV=1
MKVKVSRKAHFNAAHRLYRPDWKDSKNSEVFGKCNNPNFHGHNYELVVSVTGEIDPETGFVMDMKVLKDLIKDKIEDVFDHKNLNIEVPEFQDLNPTAENIAVVIWNRLRPSIDKDKELEVVLYETPRNFVTYSG

SEQ ID NO: 22164 - protein, 149 aa, Maribacter dokdonensis
  REGION 1..149: note = tr|A0A1H4KNK7|A0A1H4KNK7_9FLAO 6-carboxy-5,6,7,8-tetrahydropterin synthase OS=Maribacter dokdonensis OX=320912 GN=SAMN05192540_1017 PE=3 SV=1
MSKIRITKQFNFETGHALYGYDGKCRNVHGHSYKLSVTVIGSPITDTNHVKLGMVIDFGDLKKIVKEDIVDIFDHATVFNKNTPHVELAKELTDRGHNVILADYQPTSENMVIDFAAKIKSRLPENISLFSLKLQETDTSFAEWYASDN

SEQ ID NO: 22165 - protein, 136 aa, Maribacter dokdonensis
  REGION 1..136: note = tr|A0A1H4J7K8|A0A1H4J7K8_9FLAO 6-carboxy-5,6,7,8-tetrahydropterin synthase OS=Maribacter dokdonensis OX=320912 GN=SAMN05192540_0170 PE=3 SV=1
MMKVKVSRKAHFNAAHRLYRKDWDDNKNTEIFGKCNNPNFHGHNYEMVVSVTGEIDPETGFVMDMKVLKDLIKVEIEDYLDHKNLNVEVQEFKSLNPTAENIAVVIWKRLRSHIQKSHELEVVLYETPRNYVTFSG

SEQ ID NO: 22166 - protein, 135 aa, unidentified
  source 1..135: note = Maribacter flavus
  REGION 1..135: note = tr|A0A5B2TPG0|A0A5B2TPG0_9FLAO 6-carboxy-5,6,7,8-tetrahydropterin synthase OS=Maribacter flavus OX=1658664 GN=F0361_10345 PE=3 SV=1
MKVKVSRKAHFNAAHRLYRPDWEDSKNWEVFGKCNNPSFHGHNYELIVSVTGEIDPETGFVMDMKELKDLIKEKIEDAFDHKNLNVEVPEFRELNPTAENIAVVIWNRLRPSIQDNKELEVVLYETPRNFVTYTG

SEQ ID NO: 22167 - protein, 149 aa, unidentified
  source 1..149: note = Maribacter flavus
  REGION 1..149: note = tr|A0A5B2TZZ7|A0A5B2TZZ7_9FLAO 6-carboxy-5,6,7,8-tetrahydropterin synthase OS=Maribacter flavus OX=1658664 GN=F0361_07270 PE=3 SV=1
MGTIRITKQFNFETGHALYGYDGKCRNVHGHSYKLSVTVIGKPITDTSHVKLGMVIDFGDLKKIVKEEIVDKFDHATVFNKNTPHVDLAKELTERGHNVILADYQPTSENMVIDFAKKIKARLPKNIELFSLKLQETETSFAEWYASDN

SEQ ID NO: 22168 - protein, 149 aa, Maribacter orientalis
  REGION 1..149: note = tr|A0A1H7LHJ3|A0A1H7LHJ3_9FLAO 6-carboxy-5,6,7,8-tetrahydropterin synthase OS=Maribacter orientalis OX=228957 GN=SAMN04488008_102568 PE=3 SV=1
MSNIRITKQFNFETGHALYGYDGKCRNVHGHSYKLSVTVIGKPITDTSHVKLGMVIDFGDLKKIVKEDIVDIFDHATVFNKNTPHVELAKELTDRGHNVILAAYQPTSENMVIDFAAKIKARLPKDISLFSLKLQETDSSFAEWYASDN

SEQ ID NO: 22169 - protein, 135 aa, Maribacter orientalis
  REGION 1..135: note = tr|A0A1H7V8J3|A0A1H7V8J3_9FLAO 6-carboxy-5,6,7,8-tetrahydropterin synthase OS=Maribacter orientalis OX=228957 GN=SAMN04488008_108137 PE=3 SV=1
MKVKVSRKAHFNAAHRLYRKEWDDAKNTEIFGKCNNPNFHGHNYELIVSVTGEIDSDTGFVMDMKVLKDLIKQEIEDYLDHKNLNIEVEEFKNLNPTAENIAVVIWRKLRPHISSSNDLEIVLYETPRNFVTFSG

SEQ ID NO: 22170 - protein, 149 aa, Maribacter polysiphoniae
  REGION 1..149: note = tr|A0A316E699|A0A316E699_9FLAO 6-carboxy-5,6,7,8-tetrahydropterin synthase OS=Maribacter polysiphoniae OX=429344 GN=LX92_00338 PE=3 SV=1
MSNIRITKQFTFESGHALYGYDGKCRNVHGHSYKLSVTVIGTPITDTSHVKLGMVIDFGDLKKIVKEEIVDPFDHATIFNKNTPHLELAKELMRRDHNVILADYQPTSENMVIDFAEKIKARLPESIKLHSLKLQETESSFAEWYASDN

SEQ ID NO: 22171 - protein, 136 aa, Maribacter polysiphoniae
  REGION 1..136: note = tr|A0A316E1P6|A0A316E1P6_9FLAO 6-carboxy-5,6,7,8-tetrahydropterin synthase OS=Maribacter polysiphoniae OX=429344 GN=LX92_01502 PE=3 SV=1
MKVKVSRKAHFNAAHRLYRPGWDDAKNSAVFGKCNNPNYHGHNYDLVVSVYGEIDKETGFVMDMKRLKALIKDKIEDVLDHKNLNVEVPEFKNLNPTAENIAVFIWNKLRPHIDASKELEVVLYETPRNFVTYSGE

SEQ ID NO: 22172 - protein, 135 aa, Maribacter sp.
  REGION 1..135: note = tr|A4AW96|A4AW96_MARSH 6-carboxy-5,6,7,8-tetrahydropterin synthase OS=Maribacter sp. (strain HTCC2170 / KCCM 42371) OX=313603; GN = FB2170_16111 PE=3 SV=1
MKVKVSRKAHFNAAHRLYRKDWDNSRNNEVFGICNNPNYHGHNYDLVVSVTGEIDKETGFVMDMKVLKTLIKEKIEDSLDHKNLNVEVPEFENLNPTAENIAVVIWNKLRPYIDDSKELEVVLYETPRNFVTFSG

SEQ ID NO: 22173 - protein, 149 aa, Maribacter sp.; identical to SEQ ID NO: 22164
  REGION 1..149: note = tr|A0A3C0G2H0|A0A3C0G2H0_9FLAO 6-carboxy-5,6,7,8-tetrahydropterin synthase OS=Maribacter sp. OX=1897614 GN=DCG42_04620 PE=3 SV=1

SEQ ID NO: 22174 - protein, 135 aa, unidentified
  source 1..135: note = Maribacter spongiicola
  REGION 1..135: note = tr|A0A4V3EPH2|A0A4V3EPH2_9FLAO 6-carboxy-5,6,7,8-tetrahydropterin synthase OS=Maribacter spongiicola OX=1206753 GN=CLV90_3740 PE=3 SV=1
MKVKVSRKAHFNAAHRLYRKDWDDSKNTEIFGKCNNPNFHGHNYELVVSVTGEIDPVTGFVMDMKVLKDLIKVEIEDYLDHKNLNIEVEEFKTLNPTAENISVIIWQKLRPHIQKSHDLEVVLYETPRNFVTFSG

SEQ ID NO: 22175 - protein, 136 aa, unidentified
  source 1..136: note = Maribacter spongiicola
  REGION 1..136: note = tr|A0A4R7K221|A0A4R7K221_9FLAO 6-pyruvoyltetrahydropterin/6-carboxytetrahydropterin synthase OS=Maribacter spongiicola OX=1206753; GN = CLV90_1989 PE=4 SV=1
MNKLAIVRCEHFNAAHRLHNANWSDEKNKEIFGKCNNPNFHGHNYELEVKVIGYCNADTGYVIDTKILSDLIEEKILKRFDHKNLNLDTEEFKTLNPTVENIAIVIYDILKIEIEPNLELKIKLYETPRNYVEYPY

SEQ ID NO: 22176 - protein, 135 aa, Maribacter stanieri
  REGION 1..135: note = tr|A0A1I6KGS2|A0A1I6KGS2_9FLAO 6-carboxy-5,6,7,8-tetrahydropterin synthase OS=Maribacter stanieri OX=440514 GN=SAMN04488010_3654 PE=3 SV=1
MKVKVSRKAHFNAAHRLYRKDWDDSKNTEIFGKCNNPNFHGHNYELIVSVTGEIDPETGFVMDMKVLKDLIKVEIEDYLDHKNLNIEVEEFKSLNPTAENIAVIIWKRLRQHITKSHDLEVVLYETPRNFVTFSG

SEQ ID NO: 22177 - protein, 149 aa, Maribacter stanieri
  REGION 1..149: note = tr|A0A1I6HQA3|A0A1I6HQA3_9FLAO 6-carboxy-5,6,7,8-tetrahydropterin synthase OS=Maribacter stanieri OX=440514 GN=SAMN04488010_0601 PE=3 SV=1
MSNIRITKQFNFETGHALYGYDGKCRNVHGHSYKLSVTVIGRPITDTSHVKLGMVIDFGDLKKIVKEDIVDIFDHATVFNKNTPHVELAKELTDRGHNVILADYQPTSENMVIDFAAKIQSRLPKNISLFSLKLQETDTSFAEWYASDN

SEQ ID NO: 22178 - protein, 135 aa, Maribacter ulvicola
  REGION 1..135: note = tr|A0A1N6XR20|A0A1N6XR20_9FLAO 6-carboxy-5,6,7,8-tetrahydropterin synthase OS=Maribacter ulvicola OX=228959 GN=SAMN05421797_105220 PE=3 SV=1
MKVKVSRKAHFNAAHRLYRKDWDETKNTEIFGKCNNPNFHGHNYELIVSVTGEIDVETGFVMDMKVLKHLIKVEIEDYLDHKNLNVEVEEFKKLNPTAENIAVIIWKKLRPHILESHNLEVILYETPRNFVTFSG

SEQ ID NO: 22179 - protein, 149 aa, Maribacter ulvicola
  REGION 1..149: note = tr|A0A1N6P766|A0A1N6P766_9FLAO 6-pyruvoyltetrahydropterin/6-carboxytetrahydropterin synthase OS=Maribacter ulvicola OX=228959; GN = SAMN05421797_101307 PE=4 SV=1
MGNIRITKQFNFETGHALYGYDGKCRNVHGHSYKLSVTVIGRPITDTNHVKLGMVIDFGDLKKIVKEDIVDVFDHATVFNKNTPHVELAKELIDRGHNVILADYQPTSENMVIDFAAKIKSRLPENISLFALKLQETDTSFAEWYASDN

SEQ ID NO: 22180 - protein, 135 aa, unidentified
  source 1..135: note = Maribacter vaceletii
  REGION 1..135: note = tr|A0A495DS69|A0A495DS69_9FLAO 6-carboxy-5,6,7,8-tetrahydropterin synthase OS=Maribacter vaceletii OX=1206816 GN=CLV91_3388 PE=3 SV=1
MKVKVSRKAHFNAAHRLYRKDWDNAKNAEVFGKCNNPNFHGHNYELVVSVYGEIDPETGFVMDMKVLKSLIKLHIEEALDHKNLNIEIPAFKEVNPTAENIAVFIWKTLRPFIDKDKDLEVVLYETPRNYVTFCG

SEQ ID NO: 22181 - protein, 149 aa, unidentified
  source 1..149: note = Maribacter vaceletii
  REGION 1..149: note = tr|A0A495EDB9|A0A495EDB9_9FLAO 6-carboxy-5,6,7,8-tetrahydropterin synthase OS=Maribacter vaceletii OX=1206816 GN=CLV91_0981 PE=3 SV=1
MSNIRITKQFNFETGHALFGYDGKCRNVHGHSYKLSVTVIGTPITDKSHVKLGMVIDFGDLKKIVKEEIVDQFDHATVFNKNTPHVELAKELTDRGHNVILADYQPTSENMVIDFSAKIKARLPKNIQLHSLKLQETDTSFAEWYASDN

SEQ ID NO: 22182 - protein, 131 aa, Maribius pelagius
  REGION 1..131: note = tr|A0A1H8DEN7|A0A1H8DEN7_9RHOB 6-pyruvoyl-tetrahydropterin synthase OS=Maribius pelagius; OX = 387096 GN=SAMN04488011_102310 PE=4 SV=1
MFAVEVRDHIMIGHSLPSPVFGPAQGMHGATFTVDAAFFTEDIDEHGLVVDIGLATEGLSKVLEPLRYQNLDEVPEFKGKFTTTEFLCRHIFDGMAEFVKQGHLKDGGRLRKLRILLHESHVARAWYEGEV

SEQ ID NO: 22183 - protein, 131 aa, Maribius salinus; identical to SEQ ID NO: 22182
  REGION 1..131: note = tr|A0A1M6LXH9|A0A1M6LXH9_9RHOB 6-pyruvoyl-tetrahydropterin synthase OS=Maribius salinus; OX = 313368 GN=SAMN04488012_11821 PE=4 SV=1

SEQ ID NO: 22184 - protein, 169 aa, Maricaulis maris
  REGION 1..169: note = tr|A0A495DM99|A0A495DM99_9RHOB 6-pyruvoyltetrahydropterin/6-carboxytetrahydropterin synthase OS=Maricaulis maris OX=74318 GN=C7435_0798 PE=4; SV = 1
MAHLSTKSYGNERGLSCCSRQWAADSHCALLHGYSFGFHFVFAAEQLDKRGWVLDFGRGGFGPIKDWLHEMFDHTLLVAEDDPERPVLEALGERGLARVRIVQGTSCERMAELAFHKASEIVRAATGGRCWVESVECSEHASNSAIYRSSAAMAQLAEAERLQAELSGD

SEQ ID NO: 22185 - protein, 185 aa, Maricaulis maris
  REGION 1..185: note = tr|Q0APJ6|Q0APJ6_MARMM Uncharacterized protein; OS = Maricaulis maris (strain MCS10) OX=394221; GN = Mmar10_1499 PE=4 SV=1
MSQAIGAHRLRNGSSGMAHLSTKSYGNERGLTCCSRQWAADSHCALLHGYSFGFNFVFAAEQLDKRGWVLDFGKGGFGPIKDWLHEMFDHTLLIAEDDPERPVLEALGERGLARVKVVPGTSCERMAEMAFHKASQVVKAATGGRCWVESVECSEHASNSAIYRSATAMTRLVDVERMQDALTQD

SEQ ID NO: 22186 - protein, 174 aa, Maricaulis salignorans
  REGION 1..174: note = tr|A0A1G9P864|A0A1G9P864_9RHOB 6-pyruvoyltetrahydropterin/6-carboxytetrahydropterin synthase OS=Maricaulis salignorans OX=144026; GN = SAMN04488568_103142 PE=4 SV=1
MAHLSTKTYGNDRGLSCCSRQWAADSDCHLLHGYSFGFHFVFAAEQLDARGWVLDFGRGGFGLIRNWLHEMFDHTLLVARDDPERPALEALGTSGIARVRVVEGTSCERMAELTFRRADAIVRDATQGRCWVESVECSEHGANSAIYRSQPAIERLAESDRLRRALESNSGDAD

SEQ ID NO: 22187 - protein, 145 aa, Maricaulis sp.
  REGION 1..145: note = tr|A0A2D8BSQ9|A0A2D8BSQ9_9RHOB 6-carboxy-5,6,7,8-tetrahydropterin synthase OS=Maricaulis sp. OX=1486257 GN=CMF74_06165 PE=4 SV=1
MPQITCTRLIAWDALHRIPGHEGICRAFHGHRYSAEITCAADALDTAGRVVDFSVIKTKVGGWIDTNWDHTAILMRGDPDPAVKAVCESNASYGRPVYLMDVPPTAENIAAEIFRIATGLLTEDGVTVQRVRVWETPNCHAEVTA

SEQ ID NO: 22188 - protein, 167 aa, Maricaulis sp.
  REGION 1..167: note = tr|A0A2D7Y5I2|A0A2D7Y5I2_9RHOB 6-pyruvoyl tetrahydrobiopterin synthase OS=Maricaulis sp. OX=1486257; GN = CMF75_08165 PE=4 SV=1
MAHLSTKSYGNERGLSCCSRQWAADSHCNLLHGYSFGFHFVFAAEQLDKRGWVLDFGKGGFGLIKAWLHEMFDHTLLVAENDPERPTLEALGARGLADVRIVPGTSCEHMAELAFHKAEEIVRQATKGRCWVESVECSEHGSNSAIYRSSAALARSAECDRLRAELD

SEQ ID NO: 22189 - protein, 365 aa, Marichromatium gracile
  REGION 1..365: note = tr|A0A4R4AGT6|A0A4R4AGT6_MARGR 6-pyruvoyltetrahydropterin/6-carboxytetrahydropterin synthase OS=Marichromatium gracile OX=1048 GN=EDC29_102372; PE = 4 SV=1
MTERLLHVAAAPFEAARHVSVLPAEHRCRALHGHSFLARVRTELAPGWAPFAGAETDALRERLAEAVAPLDYADLNTRLRVPTDENLARWVRDHLALDGVESVGIHSTRDQGVDLDADGHCHLWRRFRFESAHQLPNVPEGHQCGRMHGHGFEVILHADQTLAEDQDMGVDYDCIDALWAPLGATLDHACLNDIPGLENPTSEMLAAWIWARLKPEFAPLSWVSVYETATAGCQFDGSSYRIWKEQRFESALSLSAAPEGDARRRLHGHSYLLRLHLCAPLDRVMGWTVDYGDVKRLFKPVYARLDHHRLDTLPGIDQAAPGALARWIRAEVGDALPALDRIDLHQTPGCGAVLSWGPQGPALPV

SEQ ID NO: 22190 - protein, 164 aa, Marichromatium gracile
  REGION 1..164: note = tr|A0A4R4A9M5|A0A4R4A9M5_MARGR 6-pyruvoyltetrahydropterin/6-carboxytetrahydropterin synthase OS=Marichromatium gracile OX=1048 GN=EDC29_10688; PE = 4 SV=1
MAKHPLTRIEISKEYLNFSAGHFTIFSSVARENLHGHNFRVRCAVTAGIGADGMTFDYVVLKRVLRELCDALDERMLLPELSPYLRIERGEGMVFACFDRERIPFLERDVLLLPLRNVTIEELAELLLARLRDRPELIGADVRGIELGVSSGLGQWAYSTWESE

SEQ ID NO: 22191 - protein, 164 aa, Marichromatium purpuratum
  REGION 1..164: note = tr|W0E4A8|W0E4A8_MARPU 6-pyruvoyl tetrahydropterin synthase OS=Marichromatium purpuratum 984 OX=765910; GN = MARPU_11395 PE=4 SV=1
MAKHPLTRIEISKEYLNFSAGHFTIFSSVARENLHGHNFRVRCAVTAGIGADGMTFDYVVLKRVLRELCDALDERMLLPELSPYLRIERGDGMVFACFDRERIPFLERDVLLLPLRNVTIEELAELLLARLRDRPELIGADVRGIELGVSSGLGQWAYSTWESE

SEQ ID NO: 22192 - protein, 204 aa, Marichromatium purpuratum
  REGION 1..204: note = tr|W0E351|W0E351_MARPU 6-carboxy-5,6,7,8-tetrahydropterin synthase; OS = Marichromatium purpuratum 984 OX=765910 GN=MARPU_08795; PE = 4 SV=1
MLIRKLFKFENAHVVRGCSTRRCSHSIHGHSYKVELLLEAHAFDNGQMIYDFGLLKSHVRDLIDAFDHSIALWSGDDPEYLDAMRKHSERWVLIPVSPSAEQFSRLFFRLVDTALSLTDMANGETDVRLHSVIVHETETGYAQCFRADANNPRMGRIDLPAIEFAPAITEQWPDPDLFERIKRGERQVNPLSPCDQVSGPDERS

SEQ ID NO: 22193 - protein, 136 aa, unidentified
  source 1..136: note = Unknown
  REGION 1..136: note = tr|A0A1Q3GN82|A0A1Q3GN82_9BACT 6-pyruvoyl tetrahydrobiopterin synthase OS=marine bacterium AO1-C; OX = 1905359 GN=BKI52_31960 PE=4 SV=1
MKAKIARKEHFNAAYRLHNPEWSEAKNLEIFGPYNNPNYHGCNFDLEVQVIGEIDPTTGYVMRTEDLATLVKTYVLNKFDHKNLNLDLKEFERLNPTIENIAMVIWQILRERLDSKFDLKIRLYETERNFVEFPAA

SEQ ID NO: 22194 - protein, 158 aa, unidentified
  source 1..158: note = Unknown
  REGION 1..158: note = tr|A0A1Q3GMV5|A0A1Q3GMV5_9BACT 6-carboxytetrahydropterin synthase QueD OS=marine bacterium AO1-C OX=1905359 GN=BKI52_31140 PE=4 SV=1
MVYICRRETFNASHKLYNPNWSKEQNEAMFGVCANENWHGHNFELVVTVKGIPDLESGMVIDYKVLSKIIRKEIIEKVHYKNLNLDVDFLQNKMPSCEILIIEFWKKLAPAIRAVSPKSELHHLKLIETKNNFVEYMGEGLEHYQDLTLKNQAINDAV

SEQ ID NO: 22195 - protein, 118 aa, unidentified
  source 1..118: note = Unknown
  REGION 1..118: note = tr|B7RXW8|B7RXW8_9GAMM 6-carboxy-5,6,7,8-tetrahydropterin synthase OS=marine gamma proteobacterium HTCC2148 OX=247634 GN=queD PE=3 SV=1
MEIYKEFHFEAAHRLPNVPAGHKCARLHGHSFQVRLSVRGDALEPSGWVMDFGEIKSAFKPIYEQLDHYYLNDISGLENPTSENIARWIWQHLKPALPALSRVEIRETCTSGCIYEGD

SEQ ID NO: 22196 - protein, 118 aa, unidentified
  source 1..118: note = Unknown
  REGION 1..118: note = tr|A0YB41|A0YB41_9GAMM 6-carboxy-5,6,7,8-tetrahydropterin synthase OS=marine gamma proteobacterium HTCC2143 OX=247633 GN=GP2143_04955; PE = 3 SV=1
MEIYKEFTFEAAHLLPNVPDGHKCGRLHGHSFMARIYVSGDVDPRTGWIIDFSELKAHFAPIYQQLDHYYLNDIEGLENPTSENLARWIWNRLKADLPILSKVEIRETCTSGCIYQGD

SEQ ID NO: 22197 - protein, 274 aa, unidentified
  source 1..274: note = Mariniblastus fucicola
  REGION 1..274: note = tr|A0A5B9PFX9|A0A5B9PFX9_9PLAN 6-pyruvoyl tetrahydropterin synthase OS=Mariniblastus fucicola; OX = 980251 GN=MFFC18_40210 PE=4 SV=1
MVRLSREIRFALVSPEELDQQTSDRDQKNSWAAWPNTCRIAPQLRLRAVVEGEPDEMTGYLCNVKLIDEALRRFVNQQLIPSLADCLLSQLPNAESVLQQALQFLENQSLDGATLISVSLSLSPFLSFNIDSGAPDMIQLTHQFEFSAAHRLHCDSMSAEENVATFGKCNNPAGHGHNYVVEVSVSRDVSKSGGGPTVVGAVELAGIVNRNVIDVLDHKHLNEDIAYFSDVNPSVENISAAIFGWLKSDIESAGCQLAEVKVFETPKTWASFRG

SEQ ID NO: 22198 - protein, 165 aa, unidentified
  source 1..165: note = Mariniblastus fucicola
  REGION 1..165: note = tr|A0A5B9PDB2|A0A5B9PDB2_9PLAN 6-carboxy-5,6,7,8-tetrahydropterin synthase; OS = Mariniblastus fucicola OX=980251 GN=queD_1 PE=4 SV=1
MSITVMRQVRFCAGHRLLNHEGKCANLHGHNYIVEFHVTGNDVDELGRVVDFAVINKLFKGWIDENWDHGFILWDQDDNAINALEQVTPNRIYQLPYNPTAENMARYLMREIGPRLIETIKGYDLKLSKVVVWETEKSSATVTCDVSRESADARLQFTNATRSFN

SEQ ID NO: 22199 - protein, 124 aa, unidentified
  source 1..124: note = Marinicauda algicola
  REGION 1..124: note = tr|A0A4V6RF42|A0A4V6RF42_9RHOB 6-carboxy-5,6,7,8-tetrahydropterin synthase OS=Marinicauda algicola OX=2029849 GN=E5163_10930 PE=3 SV=1
MSKLSLEISKDFAFDAAHYFEHKEKDHPFSRLHGHSFQGTVTLAGTPAQDSGMVKDFWEIDAELKKITAQLDHRLLNEVEGLEHPSLEDIAMWVFEKLDPVLPGLVSVEIRRPSWGEKAVVKRG

SEQ ID NO: 22200 - protein, 124 aa, unidentified
  source 1..124: note = Marinicauda pacifica
  REGION 1..124: note = tr|A0A4V3RZE4|A0A4V3RZE4_9RHOB 6-carboxy-5,6,7,8-tetrahydropterin synthase OS=Marinicauda pacifica OX=1133559 GN=E5162_01380 PE=3 SV=1
MSNLRLEISKDFAFDAAHYFEHKEKDHPFSRLHGHSFQGTVTLSGSPAEDSGMVKDFWEIDSEIKALRDRLDHRLLNEVEGLEHPSLEAVALWVFERLDAVLPGLVSVEIRRPSCGEKAVIRRG

SEQ ID NO: 22201 - protein, 124 aa, unidentified
  source 1..124: note = Marinicauda sp.
  REGION 1..124: note = tr|A0A2U2BRP0|A0A2U2BRP0_9RHOB 6-carboxy-5,6,7,8-tetrahydropterin synthase OS=Marinicauda sp. WD6-1 OX=2135793 GN=DDZ18_10745 PE=3 SV=1
MSDLRLEISKDFAFDAAHYFQFKDGDHPFSRMHGHSFAGTVTLSGEPAAESGMVKDFWEIDAEIAKLRDQLDHRLLNEVEGLEHPSLEALARWVFERLDPVLPGLIAVEIRRPSCGEKAVVRRG

SEQ ID NO: 22202 - protein, 118 aa, unidentified
  source 1..118: note = Marinicaulis flavus
  REGION 1..118: note = tr|A0A2S7K9Y9|A0A2S7K9Y9_9PROT 6-carboxy-5,6,7,8-tetrahydropterin synthase; OS = Marinicaulis flavus OX=2058213 GN=queD PE=3 SV=1
MRIVKSMSFDAAHFLDHDPEARPYARLHGHSFKMEVVIDGEPQEETGWVVDFGDVAEALQDLHDALDHRLLNEVEGLERPTLENICQWAAKKLKARFPGLAEVRVSRPSNGETCIYTV

SEQ ID NO: 22203 - protein, 117 aa, Marinicella litoralis
  REGION 1..117: note = tr|A0A4R6XM97|A0A4R6XM97_9GAMM 6-carboxy-5,6,7,8-tetrahydropterin synthase OS=Marinicella litoralis OX=644220 GN=C8D91_2333 PE=3 SV=1
MDIYKEFYLESAHWLPHVPDGHKCGNLHGHSFKVILTVSGEPDSKMGWIVDFADIKSVFQPLYDQLDHACLNHIEGLDNPTSENLAIWIWQKLKPELNQLSQIEVCETCTSGCIYRG

SEQ ID NO: 22204 - protein, 149 aa, unidentified
  source 1..149: note = Marinifilaceae bacterium
  REGION 1..149: note = tr|A0A434AWW5|A0A434AWW5_9BACT 6-carboxy-5,6,7,8-tetrahydropterin synthase; OS = Marinifilaceae bacterium T3-2 S1-C OX=2487017; GN = DLK05_06735 PE=3 SV=1
MTKVRLTKEFHFEMAHALWNYDGLCKNIHGHSYILFVTVIGEPNKDIKNPKFGMVMDFGDLKRIVNQEIVDQLDHALVLSEATPNLERLNIPQMFERFFITPYQPTCENMIADFAERIISKLPNEVNLHSLKLHETATSFAEWYASDNL

SEQ ID NO: 22205 - protein, 149 aa, unidentified
  source 1..149: note = Marinifilum breve
  REGION 1..149: note = tr|A0A2V3ZVE5|A0A2V3ZVE5_9BACT 6-carboxy-5,6,7,8-tetrahydropterin synthase OS=Marinifilum breve OX=2184082 GN=DF185_18430 PE=3 SV=1
MAKIRLTKEFHFEMAHALWNYDGLCKNIHGHSYILFVTVIGEPITDKSNPKLGMVMDFGDLKGIVAEEIVDQLDHALVLSKDTPDIDQLNIPQMFDRFFVMDYQPTCENMIADFAERIKNRLPQGVELHSLKLHETATSFAEWYASDNE

SEQ ID NO: 22206 - protein, 149 aa, unidentified
  source 1..149: note = Marinifilum flexuosum
  REGION 1..149: note = tr|A0A419X5W6|A0A419X5W6_9BACT 6-carboxy-5,6,7,8-tetrahydropterin synthase OS=Marinifilum flexuosum OX=1117708 GN=BXY64_0101 PE=3 SV=1
MTKIRLTKEFRFEMAHALWNYDGLCKNIHGHSYILFVTVIGEPITDKTNPKLGMVMDFGELKGIVSEEVVDQLDHALVLSKDTPNIDQLNIPQMFDRFFVMDYQPTCENMIADFAERIKARLPKGVELHSLKLHETATSFAEWYASDNQ

SEQ ID NO: 22207 - protein, 128 aa, Marinifilum sp.
  REGION 1..128: note = tr|A0A4T2ADK0|A0A4T2ADK0_9BACT 6-carboxy-5,6,7,8-tetrahydropterin synthase OS=Marinifilum sp. JC120 OX=2302941 GN=queD PE=3 SV=1
MSKGKWKLKVKKDFSAAHQLRNYGGKCENMHGHNFGVEVEIEGDRLDPKVEILMDFKELKKELSELLDTLDHKHLNSTEYFEHRNPSSENIARYIYQEMKKRVESEHIKMVYASVSEKESSVASYSEE

SEQ ID NO: 22208 - protein, 136 aa, Mariniflexile fucanivorans
  REGION 1..136: note = tr|A0A4R1RE28|A0A4R1RE28_9FLAO 6-carboxy-5,6,7,8-tetrahydropterin synthase; OS = Mariniflexile fucanivorans OX=264023 GN=EV196_1085 PE=3; SV = 1
MKVKVSRKAHFNAAHRLYRKDWTHEKNDEIFGKCNNPNFHGHNYELIVSVTGEIDKETGYVIDMKVLKDIIKDEVEDAFDHKNLNLEVSEFKNLNPTAENIVVVIYNKIRPKLDSKLDLEITLFETPRNFVSYTGA

SEQ ID NO: 22209 - protein, 150 aa, Mariniflexile fucanivorans
  REGION 1..150: note = tr|A0A4R1RHT8|A0A4R1RHT8_9FLAO 6-pyruvoyltetrahydropterin/6-carboxytetrahydropterin synthase OS=Mariniflexile fucanivorans OX=264023; GN = EV196_105320 PE=4 SV=1
MSFIRITKQFSFETGHALYGYDGKCKNVHGHSYKLSVTVIGKPISDIKNVKYGMVIDFGDLKKIVKEDIVNVFDHATVFNKNTPHVELAKELENRGHNVLLVDYQPTSEMMVIDFAKKIKRRLPENIELHSLKLQETDSSFAEWYAYDNI

SEQ ID NO: 22210 - protein, 150 aa, Mariniflexile sp.
  REGION 1..150: note = tr|A0A385BNP5|A0A385BNP5_9FLAO 6-pyruvoyl tetrahydropterin synthase OS=Mariniflexile sp. TRM1-10; OX = 2027857 GN=CJ739_1634 PE=4 SV=1
MSFIRITKQFSFETGHALYGYDGKCKNVHGHSYKLSVTVIGKPISDTKNVKYGMVIDFGDLKKIVKEEIVNVFDHATVFNKNTPHVELAKELEDRGHNVLLVDYQPTSEMMVIDFAKKIKRRLPENIDLHSLKLQETDSSFAEWFAYDNI

SEQ ID NO: 22211 - protein, 136 aa, Mariniflexile sp.
  REGION 1..136: note = tr|A0A385BRL4|A0A385BRL4_9FLAO 6-carboxy-5,6,7,8-tetrahydropterin synthase; OS = Mariniflexile sp. TRM1-10 OX=2027857 GN=CJ739_2715 PE=3; SV = 1
MKVTVSRKAHFNAAHRLYRKDWTHEKNDEVFGKCNNPNFHGHNYELIVSVTGEIDKETGYVIDMKVLKDIIKDEVEDAFDHKNLNIEVPEFKDLNPTAENIAVVIYNKMKPKIDSKLSLEITLFETPRNFVTYSGT

SEQ ID NO: 22212 - protein, 149 aa, Marinilabilia salmonicolor
  REGION 1..149: note = tr|A0A2T0XSI1|A0A2T0XSI1_9BACT 6-pyruvoyltetrahydropterin/6-carboxytetrahydropterin synthase OS=Marinilabilia salmonicolor OX=989; GN = BY457_102308 PE=4 SV=1
MSKIRLTKEFRFEMAHALWNYDGLCKNIHGHSYIFQVTVIGEPEPDENSPKYGMVMDFGDLKKIVKEEVVDPMDHSIVISDRAPVEKLLQVPQMADRYHVVSYQPTCENLLVDYAQRIRARLPENVSLFSLKLHETANSFAEWFASDND

SEQ ID NO: 22213 - protein, 149 aa, Marinilabilia sp.
  REGION 1..149: note = tr|A0A2U2B9G7|A0A2U2B9G7_9BACT 6-carboxy-5,6,7,8-tetrahydropterin synthase; OS = Marinilabilia sp. WTE OX=2162893 GN=DDZ16_09770 PE=3; SV = 1
MAKIRLTKEFRFEMAHALWNYDGLCKNIHGHSYILQVTVIGEPCSDENNPKYGMVMDFGDLKKIVKEEVVEPMDHSIVVSEKADAEKLLGVPQMTERYHITPYQPTCENLLVDFSERISSKLPEGISLFSLKLHETGNSFAEWYASDNA

SEQ ID NO: 22214 - protein, 144 aa, unidentified
  source 1..144: note = Marinilabiliaceae bacterium
  REGION 1..144: note = tr|A0A4Q8RPV5|A0A4Q8RPV5_9BACT 6-carboxytetrahydropterin synthase OS=Marinilabiliaceae bacterium JC017 OX=2234116 GN=DMA11_17820 PE=4 SV=1
MTKEFRFEMAHALWNYDGLCKNIHGHSYILAVTIIGEPVADENNPKLGMVMDFGVLKKIVNEEIVGRLDHTLVVSSKAPAEQLKSIPQMVERYEIVDYQPTCENLLIDFASRLKNRLPEEVALHSLKLNETSNSYAQWYAADNK

SEQ ID NO: 22215 - protein, 149 aa, unidentified
  source 1..149: note = Marinilabiliaceae bacterium
  REGION 1..149: note = tr|A0A353TX49|A0A353TX49_9BACT 6-carboxy-5,6,7,8-tetrahydropterin synthase; OS = Marinilabiliaceae bacterium OX=2053574 GN=DDW62_02170; PE = 3 SV=1
MAKIRLTKEFRFESAHALYNYDGLCRNIHGHSYILQVTVIGEPETDINNPKLGMVMDFGELKDIVNREIVKDLDHAVVVSNKVSKDTLLQLGQMSERSFIMDYQPTCENMLIDFADRLQKVLPPKVKLHSLKLNETANSFAEWYAEDNI

SEQ ID NO: 22216 - protein, 148 aa, unidentified
  source 1..148: note = Marinilabiliales bacterium
  REGION 1..148: note = tr|A0A2N5YZH0|A0A2N5YZH0_9BACT 6-carboxy-5,6,7,8-tetrahydropterin synthase; OS = Marinilabiliales bacterium OX=2053303 GN=queD PE=3 SV=1
MSKIRVTKMFEFEMAHALHNYDGLCRNIHGHTYKLSVTVIGEPEPNPDSTKLGMVMDFGNLKRIVKQNIVDKFDHSVLLSHKEDTKYFEEENKLLKRIHIVNFQPTAENMVIHFADIIKPLLPENIKLHSIKLHETTNSFAEWYASDQ

SEQ ID NO: 22217 - protein, 137 aa, unidentified
  source 1..137: note = Marinilabiliales bacterium
  REGION 1..137: note = tr|A0A351HHE5|A0A351HHE5_9BACT 6-pyruvoyl tetrahydrobiopterin synthase OS=Marinilabiliales bacterium; OX = 2053303 GN=DCY97_03435 PE=4 SV=1
MVYLTRRERFNSAHRLFNPKLTDEENNELYGKCANPNWHGHNYDLFVTVKGEVDPETGVVINLKDLSQIIKTKVIDKLDHRNLNVEVDFLQNTIVSTENIIVAIWKELQVELDKTPARLSKIKLVETENNFAEYYGD

SEQ ID NO: 22218 - protein, 135 aa, unidentified
  source 1..135: note = Marinimicrobia bacterium
  REGION 1..135: note = tr|A0A101IAQ8|A0A101IAQ8_9BACT 6-carboxy-5,6,7,8-tetrahydropterin synthase; OS = Marinimicrobia bacterium 46_43 OX=1635280 GN=XE04_0820; PE = 3 SV=1
MTQLFEISKTFHFDMTHRLSFHQGKCRHLHGHTYTLEVYVRGVPDKHGFVMDFGDLKHIVKEEIVDILDHSVAIYEKDLLLVDALSGKFRSVMLPFETTAENLCAWIARRLQARNLDISKIILWETPTSKAVLTL

SEQ ID NO: 22219 - protein, 140 aa, unidentified
  source 1..140: note = Marinimicrobia bacterium
  REGION 1..140: note = tr|A0A117LL78|A0A117LL78_9BACT 6-pyruvoyl tetrahydrobiopterin synthase OS=Marinimicrobia bacterium 46_47 OX=1635279 GN=XD77_0644 PE=4 SV=1
MESSNPILEIYTRILFSAAHSYRDKHKSPEENRGKYGKYSRIHGHNYEVILGLRGPIDMKSGMMINFFEVEQILKEKIISILDISHLEEDIPWFREHLPTTENISLFVYHQLKRAFPPSVILVSVEVRETPDLGAKISNE

SEQ ID NO: 22220 - protein, 280 aa, Marinimicrobium koreense
  REGION 1..280: note = tr|A0A3N1NYW7|A0A3N1NYW7_9GAMM 6-pyruvoyl tetrahydropterin synthase-like protein OS=Marinimicrobium koreense OX=306545 GN=EDC38_0184 PE=4 SV=1
MLLFVDNLATVDFSFLDARRGLLGETWLADVQLEGALDEQGMVCDFSTVKKTLKAWLDNELDHRLLVPRHSHQLELEDEGDVLSLRWHFGDRSETIDLRCPKEAVALVDAEELTRESVAEWCIQRLNEEQLFPEGTRLHLSFSTEYIESVFYHYSHGLKKHDGNCQRIAHGHRSKIAIWADDIPSPALEGEWASRFRDIYLATREDLVAEEGDYFRFAYTAPQGDFEITLPQRCCYLMDTDTTVELIADHIAKTTKSEYPTSTIRVQAYEGMNKGAIAEA

SEQ ID NO: 22221 - protein, 280 aa, Marinimicrobium sp.
  REGION 1..280: note = tr|A0A2D8WNE8|A0A2D8WNE8_9GAMM Uncharacterized protein OS=Marinimicrobium sp. OX=2024837 GN=CMG77_12750; PE = 4 SV=1
  VARIANT 89: note = Xaa can be any naturally occurring amino acid
  VARIANT 206..207: note = Xaa can be any naturally occurring amino acid
MLLFVDNLATVDFSFLDARRGLLGETWLADVQLEGALDEQGMVCDFSTVKKTLKAWLDNELDHRLLVPRHSHQLELEDEGDVLSLRWHXGDRSETIDLRCPKEAVALVDAEELTRESVAEWCIQRLNEEQLFPEGTRLHLSFSTEYIESVFYHYSHGLKKHDGNCQRIAHGHRSKIAIWADDIPSPALEGEWASRFRDIYLATREXXVAEEGDYFRFAYTAPQGDFEITLPQRCCYLMDTDTTVELIADHIAKTTKSEYPTSTIRVQAYEGMNKGAIAEA

SEQ ID NO: 22222 - protein, 161 aa, unidentified
  source 1..161: note = Marininema halotolerans
  REGION 1..161: note = tr|A0A1I6R7M6|A0A1I6R7M6_9BACL 6-pyruvoyl tetrahydropterin synthase OS=Marininema halotolerans; OX = 1155944 GN=SAMN05444972_104228 PE=4 SV=1
MSNKRLKRNALQGRVIQKKETTFSELLVPFPMYSERVMPGSDQVIAYPLLEVNVALSKKNLSGIFVVDILLVTSLFNRSVGNQLNNKTIVKRGIDVPPTASKPILRVDFAPTIENLARYVYTKVRPAFARTLERRNIQLDYVTATTTIGKASFGRRRPSSS

SEQ ID NO: 22223 - protein, 158 aa, unidentified
  source 1..158: note = Marininema halotolerans
  REGION 1..158: note = tr|A0A1I6SMP6|A0A1I6SMP6_9BACL 6-pyruvoyltetrahydropterin/6-carboxytetrahydropterin synthase OS=Marininema halotolerans OX=1155944; GN = SAMN05444972_107202 PE=4 SV=1
MEFKIPDQVERLGVDIKPSELRYHRKRVAVTKSFTFDAAHHLHAYEGKCKNLHGHTYQLAVTISGLTDDVGIAVDFGDIKTMYQEEIDARLDHRYLNEVLPNMNTSAENMIVWIWEQFDARLEQDGLKKKGHRLEEIVLHETPTSWATLKREWMEEDE

SEQ ID NO: 22224 - protein, 158 aa, Marininema mesophilum
  REGION 1..158: note = tr|A0A1H3BAX2|A0A1H3BAX2_9BACL PreQ(0) biosynthesis protein QueD OS=Marininema mesophilum OX=1048340; GN = SAMN05444487_11626 PE=4 SV=1
MEFKIPDRVERLGVDIKQSELRYHRKRVAVTKSFTFDAAHHLHAYEGKCKNLHGHTYQLTVMMSGLTDEVGIAVDFGDIKQMFKEEIDARLDHRYLNEVLPNMNTSAENMIVWIWEQFDARLERDGLKARGHRLEEIVLHETPTSWATMKREWMEENE

SEQ ID NO: 22225 - protein, 150 aa, unidentified
  source 1..150: note = Mariniphaga anaerophila
  REGION 1..150: note = tr|A0A1M5CWH7|A0A1M5CWH7_9BACT 6-pyruvoyltetrahydropterin/6-carboxytetrahydropterin synthase OS=Mariniphaga anaerophila OX=1484053; GN = SAMN05444274_106296 PE=4 SV=1
MPKIRVTKRFHFEMAHALYQYDGVCRNIHGHSYKLEVTLKGEPLNRPGHPKDGMVMDFGELKNMVKENVVSRFDHVMMVNRLVPEEQVAMLKKISERIFVVDFQPTTENIATFIAEILKQQLPEEIELFSIRLYETATSFAEWFAADNAE

SEQ ID NO: 22226 - protein, 149 aa, unidentified
  source 1..149: note = Mariniphaga sediminis
  REGION 1..149: note = tr|A0A399D3U8|A0A399D3U8_9BACT 6-carboxy-5,6,7,8-tetrahydropterin synthase OS=Mariniphaga sediminis OX=1628158 GN=queD PE=3 SV=1
MPKIRVTKRFHFEMAHTLHGYDGLCRNIHGHSYNLEITLIGEPRNQPGHPKDGMVMDFSDLKHIVKSQIVSRFDHALMVNRLVSEEQIALLQKTSERVLIVDFQPTTENIAAYIADILQQHLPEEISLFSVRLFETVTSFAEWLAEDND
